United States Patent Application Publication US 2014/0057251 A1 - sequence listing, part 145

SEQ ID NO: 279299 - DNA, 936 bp, Cannabis indica
tgagtaatacgagttattaactgaaagctgacctgttacaactgaggggctggcatctgcatcagcctgagtgatggcgaacaccctagctggagtgggtatcgctggagctctcggtgcctctgatcggagctggggacaatccctcttgaagtgtccgggcatgccacagtgaaagcatccctgaccttagcactcacccggaggatgcctcttactaatgagacacttcgggtaggaataacgggtctcaacactaccctgacgaccgcctcgattctggcttccgcggaacctcttgttctgccccgagccaccggatgcagtggatgatttcctcctctggtccatggccgaaccactacctcccctgctgaaacctgatgcaggaggggtaggagccccgccacatactggagtcctagctgactccgacatacatccaactgcgccctcagctcgcactgccttctccaccatctcagcataggtggtcttgtcgtcggtagtaatcataaggtcatacttgatcttcacattaagtccatcaagatatttttctttcttactgaaatcggttggcataaatcccgaggccaacctcgccgaccgatcaactgcgtagtgtattccatcacactcataaaattaaatattttcgtaatcactgttagccactgctcggctttcacgacatctggacctcccagaaaaccggaggtacttgcttccggaacctttcatacaagggttccattcagtttgccgctaccactatctcggcctgagcagcaggggcgggtgccactggaacttctggcaccggcactgcaggagcaccctgctgcctgaatctctaaatctcattatcttgctcctctattctggcttgcatttcagcaacctaacttcccaattctgggcttcctgattgac

SEQ ID NO: 279300 - DNA, 516 bp, Cannabis indica
gatgactacgagggaaacctcgatgagtatgcctacgacgaaggtagttactcggaactggtgcttctcagacaaaaagctatcgatcacgaagccgagatcgaagctcagaaagcgcaaaaccagaaaatgcaagaagtgatgctggccatgcaaaaagccatggaggcagctggcattcacgtgcaccccaaggcaatgaccgctggacttggcaaggagccagcgacgtcttcgcctagttcccaacagcagaaatctagggagcctagccctataaggtaccctgctgaagggaaccaaacaaaaaaccctacctctaccccagggcgaaagaaaaaggcgcaggatccgcgaaaggtccgctcagatttccctaaagggaaaggtccgcagaggggcaagccccaaaaagggagctttggccctcaggatcgaggggaccgaaaaagcgtttccgtgcaccaagaacccgggggtagagggagaagaggacagaggtgtcctcccgttgat

SEQ ID NO: 279301 - DNA, 485 bp, Cannabis indica
acacctcttcactcactccttggatcttgaaagaatcactcacctccaagaatgaacggagatggaggtgaggatcttcagttggcatcccgctgaattgccccacggtttggagcatttgaaacatcactggcttgagctcaaactgcggtgcttgtatttcaggcctcacaatgcctggattgagctcattaaacatgggggctgcatactcccttatagcccttgctcgatcatctgccaatatgatgggattaacaatttgttgagcaaccccatcatcatcaaaattctcagccatgatgtctcggcccttagccttttgaacccttcttcttcttcggaatgtacgttcaatctcgggatcaataggagcaagttcaaagtcctcttgttggttcatacactatagatacctgagatttcaaagaaaaaccagcaagattaaaagcacaaaaattcttagaatgtcaattagttgataa

SEQ ID NO: 279302 - DNA, 486 bp, Cannabis indica
ttttaaaccttacttgatttctatttattgttatttgtagtatccgacatgacaatgaccaatcccatgttgtcactattgaatgataataagctgagtggttctaacttcccaaaatggaaagagaacattaacattgctctcataggtgaaagtgccctatttgtgttagctgaaccgtctcctgagcagccgggtgacaatgcaaccaaagctgtaaagcagaagtacaagcgttggcaaaatgtcaacaacaaagctcgatacttcatactttccagcatggtagacaccttgaaaacaaggtttgcaaacactgacacggctgcagaaataatgactgagttaactaatctattcggaatggcatcaacccaatctcgctttgaagcgacaaggaagtttatcaatgcacagatgagtcctcatcagaatgtgcgtgatcacctactccagatggcaagttatttccaagaagctcagaat

SEQ ID NO: 279303 - DNA, 316 bp, Cannabis indica
attattttaattattaaatatttggcatttatagggttgaaagtgcaaaaagtggtatttgtgaaaaataaataaatggttgagaaaaatggcaaaaatctaactagtgtagggcccacttcatggccggccactaggtcctattttcttttatcatttttttattctaaataaaccaaccctaaccataggtgaaattagtataaaaggaaagctatggtctcattatccaactaatgcttcaaaagctaaaacctagtttctttctctttctctttgtgtaacaccctaactagcataggcgtattacgtgatt

SEQ ID NO: 279304 - DNA, 565 bp, Cannabis indica
tttttttaaaacatcttacaatggaacagaaagaaagagaagtacttggtcgtttctttcacacgacaatggaacttgtcgttttcgcctgcacgacaaatcgttttaaaccaaacgatttgtcgttctgacttgaacaaaactaagttcaatcagagctaaccctagctcatttgcaccttcgaacattcgagagtttctcaaactctctctcttcctttcctttctctctggttctcaaaccctagaaccagagatctcactcgatcaacagatcgatcttacccagaatccatgctcaaacaatcaccataaacacacaaacacatagatcaacaaacacacacaatacagagagaaaagtaaagagagagaacacaaagtttatagaggttcgccctaaatcaggggtacatcctctttcgagctcgccttgaagacgtttctcaggatctgcactattttgagaagagtattacaaacaggtgagaaatccaagtcacaatctcgactggtatttctggttttcactgatctttcttttctgtatttttcttttggtttt

SEQ ID NO: 279305 - DNA, 604 bp, Cannabis indica
gggggttgtaaacactagagagaagcttaaattaaaacttgtattgtagctctataattgcttttagtgttaaactttctataactcatgttcgagtggaagtttcttgattgtttccttaagctaaatcatcttaactagttcatgttttcttaagctaaatgtaagatttgccaatgtaatgttttttcttaatacaaatttgtaaactaagtaagaataaaaatactaataagtgattattattaaaatttcaatttcaaaaaggcttgggctttaaaggcaaagcatgataaatttcttgcgcatggttgaataatgaatcatttcaatcaggattatttaactacgtactttatttttttacttttttatgttggggcagaatttttttcaaaaatactgtgtaaattttacactatgtattgtgttaaatttttactattgttttacggttgttttttagttgttccgttgttgtttttagttgttctattttgtgttccactgttgtcttataaaaaaaatagtatttttttaaaaaaataattcgtgtgacagtatttttgtaaaaattaacctaaattttaatatttttataagt

SEQ ID NO: 279306 - DNA, 805 bp, Cannabis indica
gctgaaggctccccctgcatatgtgctttattcccagatgtgtctgatgatgcgccaaacgaatcacgatgaaactcaggcagagagatgtcaggcagagaatccccaggaaaatggtgcaaaagagtggacttgatagagcaaaccatttgatacattgaggtgtgtctgagagaagccaaacttatctaacatagacttgacatatttagactgtgaaatgaatgtaccatgatctagttgtttgatttggagtcctagaaagaaagtaaggtcacctattaaactcatttcaaactcattagtcattaaagtgacaaatgtttggacttcagtatcacaagttgagccaaaaatgatatcatccacatatatttgggcaacaaagattcctttgtcaatatgtttaatgaatagagtgctatctgcagtacctcgagtgaagccatgagagatgagaaatgaagtgagtctatcataccacgcacgtggggcctgcttcagtccatataaggctttattgagcttgtacacatggtgtggatgatgtggatcttcaaacccctgtggttgtttgacatagacttcctcttgaattaccccattgagaaaggcactcttgacgtccatttgaaagagtttgatcttcaaaaaacatgcaatgataagaagtagccgaatggattctaatcgagccacgggtgcaaatgtttcatcaaagtcgatgccttcgacctgactatatccttgagccacaagtcgtgctttatttcgagtcactgtcccaaattcatcagacttgttt

SEQ ID NO: 279307 - DNA, 722 bp, Cannabis indica
aactcagcagaggcaaatttgcagcaacctgaaaacaacccggcaacaacttccaagcaacaactatctgcgcacataattggatcagttcaagatgatacattttttctaggaacagggaccgtgacatcataatcaaccatataacaaccagaaaacaacagagaaaaaactacagcagtagatgaatataaaaacaaccaaaaaacaactcaataacaatacaaaaacaacatcaacaaaaatacataaaagaaatacaaaaagaatgacaaaatacataaaaccgtcatgttaaacgagtaaaacattgacaaaaaaaaaacaaaatagttactgtaaaaacaaactcaataaaatgataaaaatcaaggtaataataccttggatttaactttaagcttttctcccccatcatgcacttcgttctcaaaatcagaatcggatataacctagaaaaagaaggggagaaaatttaaaacacaaaatgtaatacgaaaaaacacgacaactagaaaaaaactaaacaaaaactgaaaaacaacaaaactaaacttacatcttttgtagacttcgaaggttttgctctctttaccttatgagactcgaccttatctggaatgggtcttttcttagtaccagatggctctagaacatcacccattactttcttagcaatgcgcttcaaacccatcttaggatcaactttagatgaatttgta

SEQ ID NO: 279308 - DNA, 578 bp, Cannabis indica
aagagagaccccatcaacaatgtacgacgaggaagaagatgcattttaatctgatagctgataagggaatcaacagttgggtttctcaccaaaaacagcatttcccatgaacaattttctcaattcctttgagagaggtaggtactttacttactgggttggtttttattgttggctttcaagtatttgattatgacttacatagtttttttggagcaccacaaagattaaatcttgaaacatcatgttaatttcagagatatgtattctgatttagtaagtagtacatagaaatgctaattcttgtaaaacaattcagttagtaggaattgtttttgagttattgttatcagttcttggtgttgaatagattctgagatttcatagttagagatttttgctataggttgtgctcttctttgaatgaataaactgaacttttatcttcttcaagtttgaaatattgggtatccatcgacatcccagagcgtcaagtagattatataaagtgggctccatgtttgacattactcgctattttgctcttttgttggtaaagtatgattttgagataattg

SEQ ID NO: 279309 - DNA, 532 bp, Cannabis indica
actcttcaattggcagacgcattcactaaaccactgttttctccttccctcaattcccacatcagcaagatggttgtacatgacatatacagtccaccttgaaggggggggggggggagagggggagggggtaacaagaatctcattcactctgtatttcactctgtattagctttgtttagtttgttagttagtttaactgttatgtcaattaaaccgttcagtctattggttgttacaacatctttactttcctaagttagttagttcactaactaattgagtccaccgactctcctattgtatatatacctctgtacataccactctgcaattttaattccaatttatttttttcttttctgaattaaatgttccttttccttttcgcgttatattaaaaaaataattgatttaaaataactaatcttattgcagattgaattagattagaattaaacggagattaaatccaaaatactactttcaaatttaatagcgaatctgatgcactataactaacaaaaaaccg

SEQ ID NO: 279310 - DNA, 729 bp, Cannabis indica
acatatcttgggctaacaaaatcagcattgataaaatttatgagagcaaacctggacgtttttgcttggtcacatgaggatatggtcggaattgatccttctgtaatttcgcacgtcctaaatattgatcctaacttccgaccagttcaaaaaaagtgaaggctattggacaaagagcgagcattttccctaaaggaataagtagagaagctacgcaacaataatttcataattgaagctttctacccagcctgggttgcaaatctcgtactggtacccaagccgaacaagaaatggcgagtgtgtattgatttcacggaccagatcgggcgaaacatggaagtgtatgtggatgacatgcttgtcaaatctaggaaggctggggggcacatagatgacctggacaaatgcttcaaagtcctcaagaagtacaacatgaaactaaatcgcttaaagtgctcctttggagtcagctcgggaaagtttctgggctttattgtcaatgcccgaggaatcgaagccaatccatagaagatttaagccctcctggatatgaagtcgccaacaaaaaccaaagaagtgcaaagtttgactggtcggatcgccgcacttagcaaatttgtttcaaaatcaacagacaagtgtgttccattcttcaacatcctggggggaaataagcaattcgagtggacgaaggaatgtgaaaaagcttttcaagagctaaaaatg

SEQ ID NO: 279311 - DNA, 594 bp, Cannabis indica
gggaaacacccatctgaggcggcaaaaattgagaaaatgaaaggttcgaggaaccctgccaaaactgactagccggtttttgtggcactgcaaaccggctagccggtttgcaccaggtttcccaaaacctctcatttgttgctcaatcttccaccaattgccatgaaactttccagagcacctaataagggcatacacaacattttccaaccagtaattcacagaacaaaccatcaacactcaagttgccattaaagcccaaagctttgaactcaaagctcaaggttacacaaagctcaaccaaatcaacaatatcagttgctaggaacttaaattaactcaaataaattataaaattcgaaccctaatcatttcaaaacctaacagcactaaacctagaaatctcatattaaccatccatgaattcaagaaataaagagggataaaactagagctcaccttagcttcaaagaccccttgaattccttgctgcaaactcaaaaatcacagcccctttccccttgctcttgctgccttcgaagagagagagagagagagaagaaagagcttctctttcaagctttgctatttttt

SEQ ID NO: 279312 - DNA, 177 bp, Cannabis indica
tcagtacacagggtttaactgatatgacaatctacaacatagtttacttgcaccttggataagtgctatgttctttccagggcattggttaaagtaaagcttgggttggatgcatgaagtatgcatcgaaagggaccgatattgaactttgattcagatatattaaatttaccataa

SEQ ID NO: 279313 - DNA, 709 bp, Cannabis indica
aaaacaacaataagtttgccgggaaagttgccggtaccgaaaaagtcgctggaaaagtcaacggcaccgaaaaagttgccggaaaaatcacgtcccccggaaaagtcgtcggaaaagtcaacgtcgccgaaaaagtcaacgtcactggaaaagtcaccatagtaaatgtctcatatataactaaaaatataaccggttatatgaataaaaactaataactcaaaccggttataattgaaatataaccggttctgtaacataataaataaatataaataatataaaataactcaaaccagttataattaaaatagaaccggttttataacagtgttataatgaataaaaataaataatacgaaagaactcaaactagttataactaaaatagaaccggccggttatataacatattgaatacaaacaagtaacacgtaataactcaaaccgattacaattaaaaataaagaagaaatcagttcttaaaacactgaaatataaattaaagacaaaactagtttcacaataaaatacttcataacacataatacctcataaaactggttataatttctttttttttttaaaaaaaagtggggatcaaatgtctcggatataataaaaatagaaccggatttataacataatgaataaaaataaatagcacacaataactcaaaaatataaccggttttttttatattatatt

SEQ ID NO: 279314 - DNA, 588 bp, Cannabis indica
aaatcaaattttcaaaattcaaagcctactaatatctaaaactaattttaattaatttaaaaaaaattaataaaaattaattttattctgacaattagatttttaattgaaaattcagattctacacctaattctaaaaaaaattggcttttgtttcaatgaaaaacgatttttgaatcaaaagttatgaagaaaacaagtttggtgcacaagggtatgcattgcatacccctgcgcgcgcgaaatggcgcatctgaccgagcatcaaggctgcatgcagcctacttgaccgagggacatgggcgggacaggggaaagcttcggacacgcctgttgtcagaagcggttttgtcctagcgagcctcacttgtgcccatgcgcgcgcgtgtgtgcattcaaaacccgatattttcattcaaattcaaaaaatcataactaattcataaaaaatccaaattaggttttgtaaaagcctaaatttattaatttttcgtctactttccagtaaaaataattccagatcgaaataaaaaaatatttcagtaacatacattgcgatttctaaactatcatcacataagcacataa

SEQ ID NO: 279315 - DNA, 861 bp, Cannabis indica
ccctatcaataaaaagcatggaaataccccaaataacataaaatcgaggaaaactagggttcctgaaaattccccaaccggtagaccggttctgcaactggaattccggttctgggaattcctgaaccctcatctggaaatccggttgcacaaccggaattccggttcctcgcaggaacttttcaaaaattcacaattcaatcaaatccaacccaaatcacacaagaccttccagacctgttctaaacatcctatagaacaattctaaagcatcaaactcacccagatagcacagaaatgaaaatcaccatgtgagctccaagctttgagttcaaactcaaacttggctaaagctcacttacaagcctcaaaactagcttagaactacataaacaagcataaaaacactgcagaaaactaaccctaattcatgcaaacactacagccaccaaaacctcaattttcactttgaaaaccatagctttttaacaagaaaactaaccaacaaaagcaagaacaactagcatgcatttcaacctagctaaacatatttaattcaacattttagacatagaaacaacaacaacaactagcagcagcaacatcatcaaaatcatccatgcattactcatctttttcatcaaaatttcaagaaaacaaaggaagaaaaactagacaagaaatacctcttcaatgatcacactagacttgctgaaaattaccaaaatcacaagagaacatccactttcttgctgcctcaaatggccgaaaaagagagaggaaaagagagagttttccttttgaaaattttctattttttttttctaagttttgcaaaatgagagaaatgccacctaaccc

SEQ ID NO: 279316 - DNA, 508 bp, Cannabis indica
atatgaatttctaaaacaatgtaaataaacacataaaaggtatgagaaaccttatagtgggtgcagcagaattaaatgactccttccgctcagatctctaacccttgtatcctttctgtagcagagtatcaccaagatctgagcccgattctccttcttgttgattggattcttcacagtcttacatactatgattgaggaccaacttgatgtgtgtgggcacttactctatcactcaaggtatgaaaatatgaagagaagaagaagagaatgtggttcgaaattaatagaaaagaaggctcaggaaaatttgactgaaggtgaatttttcatcatcttttggtgtgagccatcactatctatttataggcaaccacctaggtttaggttaagatttattaggcattaaaataatgaagaaattaaatggaaaatcctatccctagtggccggccataggatgtttgggccccacttggaatttttccattttatcacaatctttcct

SEQ ID NO: 279317 - DNA, 384 bp, Cannabis indica
ggtttggttcaggtttgggttcggttcccgagtcctggtttgggttgggatccaggtccggctcccaattcgggtctaggtcttatttggagtttgggtcctggtccggttacggttctggatctaggtccaatttcagttatgattccaagtccaagtcctagttccagtccttgtcaacttccggtttgggttccaattttgggtcacagggtacgggttcgtgtccgcttttcagtttgggactgggttcaggttcgggtgtggattcgggtcctcatcaaggttcaggtccagggctgggtcccaaatcaagacaccgactatgggttttgtccaagccctgggtcgagatccgaatccaatcacgcgtcaaagtctggt

SEQ ID NO: 279318 - DNA, 642 bp, Cannabis indica
gacatacataatagtgttagatctcgaaagataaatattgtatatacaacatctagctgttcatcaattgatgacaccttagactagtatttttacgatatgaaacaagaagattatataaataagattactttggctttcgctaatcgaagtgtaaagcccgcttagttaatttggaaattagcagttaattatgattaattatgaaaattatttatagctatttaaataatttattatactgttatttatggaattcagaaatgcatggttatgttattcagtagttttcatattttgcatttccggtgcccggtattttggaactcggcgtttggctcagtagaaatcacaacttagtatgttagtagtttgggacggtttttagacattgggaatgtcgggaatggccgggaatttagaatttcccaaaaatacccctttagtatgatttatgtggttttatggtggaggggcaaaatggtctttttgccccattagtgttttgtcttttagtgacttattatttgaaaattaaatgtttattttaatgtttatttggctgaaatggatttatgttaggtgtcctttattcattttctcatttttacaacaaatttacacttagaaaaaaaaatagaa

SEQ ID NO: 279319 - DNA, 549 bp, Cannabis indica
gagaaatgcactcttgacgtccatttgaaagagtttgatcttcaaaaagcatgtaatgataagaagtagccgaatggattctaatcgagccacaggtgcaaatgtttcatcaaagtcgatgccttcgacctgactatatccttgagccacaagtcgtgctttatttcgagtcactgtcccaaattcatcagacttgtttttaaacaaccattttgtccctattacatttgcaccatctggtcgagagaccattatccatacacccagtctcttgaaatttcccatttcatccatgcaggcagccaaccagaactcatctaacaacgcatctcgaacacttttgggctcaatctgtgacagatagcaggcaaagactaacaaattctgcagtttacgtctagtgaccatggtatcattcggatttcctatgacagtggcctgaggatgagctttctcaacccaggatgggggtccggttttatgtactttgacttgttggggttctttggtcagggaaatatcaacttcatttcctcttcctggaccact

SEQ ID NO: 279320 - DNA, 660 bp, Cannabis indica
aaaagccggggacttctcagttaatgaagagggtattctactatacaaggcaagggtgtgtgtacctaagaaagcggagttgcaatcaaaaatcttacaagaggcgcacactacaccctattctttacacccaggatcaaccaaaatgtacaatgatctgaaaggtaggtattggtggccgggaatgaaaaatgatatagcagaatttgtagcaaaatgtcttacctgccagcaagttaaggccgaacaccagagacctgcagggctgttgcaatctcttgatattcctgagtggaaatgggaagatattgctatggattttgtgacagggttaccgaagaacagcaaacaacaggattccatctgggtgattatcgacagactcactaaatcagcacattttctgcctgtgcgcactaattacaatgcagagcaatatgctgaactgtatgtaaaagaaattgtaaggctacacggagtcccaaagaccattgtatctgatagaggttcagtttttacttctaagttttgggaaagtgtgcaaagtgctttgggcacaaaactgaagttgagtacagcattccatcctcaaactgatggacaatcggaacgaactattcaaatactagaagacatgctacgagcttgtgcgttggattt

SEQ ID NO: 279321 - DNA, 632 bp, Cannabis indica
taaaatgccaaataatcaatccaatttacatttcgggcccgaacccagttcggcccgaaattcccggttgtgactataccgcgctaacctgtcagaacacacctgaaaagacaacacaggcatactatataataatatagttctattaagcacgtaattaaattaatttcatcattttacccttctcgggtcataattaccaaaatgcccctggctcaccaacggggtctttaatatattaaaattcatataaaatcacatatattgaactatataataatataattcctcaattatacataattatctagttagggttttgctaatccatttcttaattccgggtattacaattaccccctccttatagaaatttcgtcccgaaatttacctgaacaactccggatatttctgctgcatatccgtctcgagttcccaggttgcctcttctactttactgttcctccacagtactttcaccagtgccactgtcttgcttctcaagactttttctcttctatcaagtatctgcactggttgttcctcgtatgacaagtccggctgaagttccaatgcttcataactcagaacatgggacgagtctgagacatatttccgaagcattgaaacat

SEQ ID NO: 279322 - DNA, 527 bp, Cannabis indica
gaaagaatatgcaacattacaaggataatgttgacaagaagaaggggaagaagattgctcaggaggcaaagtacactgttagtggctatgtacctgcctttcagtactgggcatacgaagcaattgagaagttggggaagaagtatgcccactgcaacgggaccaagttccccagaatgttgagctggaaaacaccggagggccagcggaaacaagatgtcaaggcaaccgacattgcactgttgttcaacagtcgggtatgtttctttactgttctgtatttttttttcctaaagagatatgtttgaatttattaaaaatcaacattcgcgacattgttctcgatatgttcgcgacattatgcgatgtcgcgaaagaacttcctgtcttggttgtcgcgacatatgtcgcgacatgttatcgacatgtcgcgacaatatgctgctttttgcgattatcataattttcgacttcttttcacagtttttaattattctgtgttttcttttttgtttcagttggtggtg

SEQ ID NO: 279323 - DNA, 622 bp, Cannabis indica
ccagctcgaaccaaaaccattacaaacctaaattgcatttccagaacagttcaatataccaagtacaacatatccaacacatcatttaatcacaattcaccatttaactcaaaattaccatctcacatgaaaatttgcactaaacatcactttcaataccaattcaattaaacagcccctaacttcactcaaatttcattcaaacaagttccatttcaaccctaagaacccaccttaccctcagtttataccccagctcagaattcattgaaactttcaccaaaacctaaactaaactcaagaaaacaaatcaagagaagtgtagaaagatcatacctccacttagctagcttctagggctaagattagctcaagaatggttgaaataagatgaatttcacttggttcccagctgcttctagggttcggcagaaggagaaaagaagagcttgatgttatgaaatggttttcttgccttggaaggaaacttccttaaataagggtttgtacttttattttttttttattttttttaataataggaagctaaaaagaaaagtcaaaagcaccctgaatttactaatctacccctcttccttaattttttttttaaaaaaaccct

SEQ ID NO: 279324 - DNA, 534 bp, Cannabis indica
atgttgatacggcttgcctcacaaaatagtttcggacaatgggaagcagcttgactgcgaagaattcaccgatttctgcaatcagcacagagtcgttaaaagcttctctgcagtggcaagaccacaaacaaacggacaagcagaagcggtcaacaaaatcctaaaggtcaccctaaagaaaaagttgctggcctgcaaaaacaattggcccgaagaattgccaagagtgttatgggcctaccgaacaaccccaagaaccacaaccggccactcgccattttcgatggcatatggttgtgaggcaatggttccggtggaaacattattcccatcccacaagagaacaacttatgatccaacaacgaacaaggctttattacaagaagcgttggatcagatggaggaactccgggatgagtctcaaatacgaatggtggcctatcaaaaaaaggtagactaagtactttaactctaaggttaaaagtagaaaattcactattggtgatatggtcttaagagagtcttcccagccac

SEQ ID NO: 279325 - DNA, 634 bp, Cannabis indica
gcaagtgttaccaccagtgcctgccagtgggggtaaccaggggtttatgatgccgcatagagattccgtgtttgagcggtttgtgaagctgcaacctcctacttttctgggaggtactgacataattaaagctgagcaatggatgagtacaatcacccgtatccttgataatatgggagtgacgggaacagagagagtgaattgtgcagctttcatgttacaagatcatgcccgcgtctggtgggatattgtgggacagactcgtgatgtcaatgtaatgacttgggatgagtttaagaatttgtttgaagaaaaattttataacatcgctgtgaggacttcacacatggaagactttgtgaaattaactcaggggaagatgtctgtggccgaatacactctagagtttgatcggctgtccaagtttgctggtgatctggtgcccacagatttcaccaggaaacagaaatatgtgagaggactgaatgccacaatcagtcgggacttgaagattaccactactcatgacactttgtacaagaaagtggtagagctagccttaattgctgaggaggctgagcatcaggtaataaaggagcagactgcaaaggatgttgtcacggcatcgaaccct

SEQ ID NO: 279326 - DNA, 448 bp, Cannabis indica
gccaaagaagaagaggacatgaaaaaggggagagcaagaagtatctccatggtgaccaatccaaacaattctcacaagagaaagttcactcccaacaactctagtgaccaaaggtctcataagaagagagccaccaatcctaagggaaatggacaagcaagctcttcttcaactggtcataagaatgagttcttcaaagggaagtgaaacttttgtcaatgcttcgggcataaaaaagctgattgccgaaagctcaaagctcacttagagaagaaaggtaattgtcttgtgatggtttgtttggaatccaatattattgatgtaccctcaaacacttggtggttagatactggtgctacaattcatgttacgaattctttgcaggcagtgacaagtcgaagaaggccgagtaggttggaggagtatgtatacatgggagacgatacta

SEQ ID NO: 279327 - DNA, 750 bp, Cannabis indica
tagtggacaacgccactactggctgtaattgtactttccaactagtacatttaccccctgttaagtaaaagtaggccgaagtagatcttctagtgtccctgtcccccgcataatctgtatctgtgaacccttcgatgttctgatgtgtttggtgaccctgataaaccaatcacaacttagatgtaccttttaagtatctcataagccatttcatggctttccaatgctcctttccaggactagacatgaacctgcttagcacactgattgcataagcaaggttaggtctagtactaaccatcaagtacattatggaccacactgcattagagtagggaacattagccatctcttcttgctctaacttggtcttagggcacatagatttagacataaggtattggttggtaatcggctgtgaaacagcctttgaatctttcatagaaaacttttctatgatcttgttgatatagtcttcctgatgtagcatgagtttccctttgcctctgtcccttagaatgttgatccccaaaatcttagtagccacacctatatccttcatttcaaattccgacttgagcaaatccttgaccttgttgacatttgacctctccttgctaattattagcatatcatccacataaagtagcaagtaaatgactttagcaatttccgaacctttaaagtacaaacagtggtcataatagcttatattgaacccctgtttggtcataaaagtatcaaactgtt

SEQ ID NO: 279328 - DNA, 725 bp, Cannabis indica
aagaaaagattagtaacaaataataatcaaatatttgtttatcatcaaaataagtgagtgattgacttttggtcaacattctccccctttttgatgatatcaaaatatttgattattttaaaggaaagaaaaagtaaatttaaacatgttgagtttagctcccccttaatatatgcatatattgatttataccgttttacctttgcatatttattgttaccttttcttaacttgacaaagctcccccttaatcatatactcaataaacttggtaatactttaaagcataatatgattaatgccaaaataatcaattccaatgtttctcccccttttgatttcatcaaaaagggtggcataggaagcaaggtcaagctaaatatatttctttcccttaatcatacaagatatgacttgtatcaatgaagcacaataggcaaagagaaatttcagaatggataaaaagatgaaagttcatataggcaaaacaagtttaaacattcaatctaccaaaaaaaatatgtcaaagaccttgaaagtaagagatactggtaaataatggcatagttatgatttcaaaaattttctcatacctcaagatgataaaacaaatgtgttcatgcacttaaatcaattagatgacaagattgagactttttggtaagtttttccaaaaatttaagcaaaaacaacatatgtacccaaaattagttttattgcatcct

SEQ ID NO: 279329 - DNA, 611 bp, Cannabis indica
cttcccgttttggttccaattttgggtcacagggtacgggttcaggtccacttttgggtttgggactgggttcaggtccgggtccttgtgagggttcgggtccaaggctgggtcccaaatccagacaccgactacgggttttgtccaagccatgggtcaagatccggatcccaatctcgggtcccagtgtggttccatttttggtgccaggtcacgagttgggtcctaggttcaagttcgggtctgggtcgggtactaggtcccggtcctagttctgtttcccaggtccctgtcctgattctgatccaggtcccggttattgtgtgggtttgtgtcccggtatatgttcgggtttaggtctctgtttgggttttgatttgggttcgggttttggtttaggtcctggtcctagtcctagttcggttctagttccatttacgattctgagttctagtatgggtttgagttcgggtcagagttcgagtccaagtctgagttagggttcagatccggatttcagtctaggtccagatcaggctccgggtgtgtgttcgcgtcctggctcttggtctaggttgggttcgagtcccaagttccaatcccgatctgag

SEQ ID NO: 279330 - DNA, 605 bp, Cannabis indica
ggaatctctgagaaagaacagaacatggatactagtgaagaaacataagggaaagagcattgtttcatgcaaatggcttttcaaacataaggaaggacttactgaggcagatcctaagaagtttaaggcaagactagtggctaaagggtttacacagaaagaggggattgattttaatgagatattctcacctgtggctaagtataaaactatcagaattatacttaccatagctactcaatttgacctagaagttgatcaaatggatgcaactactgcatttctacatggggaacttgaggaagagatctacatgcaacaacctaagggatatgaggaaaaaggcaaggaagacttggtttgcaaactgattaagtccctgtatggacttaaacagtcaccaaggcaatggaataaaaggtttgatgagttcataatcaagaagggattcactagaagctactatgatacctgtctatactacaaaggtactaaaattgatgaagtcatctacttacttctgtatgtaaatgacatgctcattgtgagcaaagaaaggaccaaaattgacctaatgaaggttggctaagggaagaatttgagat

SEQ ID NO: 279331 - DNA, 923 bp, Cannabis indica
tattttgaaaaatcatcaaaaaatatttttaataattttttaactacataattatcattaaaataataataattattaaaaggagtcaaaaaattaattaaaaatcatagaaaaatcagaaatttaattttaagcacgctggaaaaaaaaacgtcgaaaaacgacactccaggaggcctcacgcgcccccacgcgcctcctgcgcgagtgggcgttgcggctgggagtcatcttcaacctccagccggatctccaggcgggtcgcgcgacccggttcgtgcgcagtcgggtctggacgaattccggccaaaaaactcgacgaaaacactcgatttttgatgggtttgattcgggattggatttctattcaatctacactactaattttcgggtattaaaggctaaatatctagatctcatggcaaaaacaatccgaaaaattaagaacaaataacaatccgattttaccatgtgtgttatccaattcgaaaaattaaacgggtagaaacattgtaaattagttggtaatgagatttgcaccatcaatttcagtgtataaactatagaatcaaaaatcccaaattcaatttcataaagaaaaatacataaaccctaaaaatttaatcttaaaattctcctaatttactcaatgattttatgcaaataatatatcaaaagaaagagaatttaatgaggaataaaacccctaaacttttaagattgaaaaataaaaaatttaacataaaataataacaaaattaatatgtaattggaaaaaaaaaagtaacatatacatataattggttatataaattataggttctaaatcatatacaataggcaatctgattgtaacgccctgtccaacaggacgccacgtgtgtgcactctaattaaaataccaataattatataagatgtaa

SEQ ID NO: 279332 - DNA, 675 bp, Cannabis indica
aaataaatcatattaaaaccataaacaatgttaaacaatatccatctaaccctaattaaagtgtttagttactcatgttcaatgcagcacaaatacacatattaactgatagaaaagagatgaaaaatacagaagagaagaaaagaagaatgctgaaaaatcctgagcagtatgtcttcaatattgcagctgatctccctattctgtatctgaactctcactttttctctctgagattgcttgcttaaatccactctctactgctctttatataggtattcaggtccctcaaaaggtggaaaaccgcactgtttaaattcaattcggatttgaaatatctggaaaaatctcgcgccagcttttccagatatttctctctgttgacaaagaggcgggccgcggcatgctaagtccatgccgcggcccgtgtggcctttagtttgcttacgtggtcttcttccaagtaggcgggccgtggcatgctaataccatgccgcggcccgtgttgatctctgcacccaacttccacttgtttctatctttatccgaatttgattctgatattttccaccaggatattttcattcgatattttatcctttttcttctgatattttctaactcttcatctatttaaatctgcaaactaaagataaaagcgtaaaaatgctccaa

SEQ ID NO: 279333 - DNA, 460 bp, Cannabis indica
ttctgggtctgagaattttttctctctgggaaatttgagcaaagttggcaagaaatgggaagtaatcgaaatgaaggaaaggtggtggcttttatagacaaagctgcatgaggaacaggcaccatcacctaccaatcaaacggtgggggaaacgcacgatgcgaattctcgaagaccaacggaccagattgacttgtaattaaggcggtggaaacgtttgagtatccgtctgacaccattaatgcgccgtatcaatcaatgggcgtgaaacgaatcgacccctgcaaaaagtgaatcgctgcattaaaggccatcattaaatacaccctcacgcgctcaaagctcgtgccaggaaaccgaggagtcaaccggaagcacttgagcaagccttgttttatttttcaaataaacaaggcttggggggtaaatgttgcccctgattttgcccaatatacgtgga

SEQ ID NO: 279334 - DNA, 614 bp, Cannabis indica
tacgcgggggaggcatttccaaaattgctttgatctttgcagggtcgatttcaattcctcgatgtctgacgataaacccgaggaactttcccgatgttaccccaaatgcacattttaaaggattcatcttgagattgtgttgcctgagcctgtcaaagactcgttttaaatcatcaagatgatttgtcctttcttttgttttgaccactagatcgtcgacataacattcgacagtattgtgcatcatgtcttcaaaaattgtggtcattgctctttggtaggttgcccctgcattcttgaggccaaatggcataactgtataacaaaatatgccttttggtgtccgaaaagcagtgagctcttcgtcctcgtgtgccattttgatttggttgtacccagaaaatccatccatgaatgataaggcatcaaaaccagtggtagcgtctatcaataactcagtgatggggagtgggaattcatcttttgggcaagcccgattaagatctcgataatccacgcatatgcggagttgcccatttttcttcatcactatgacgatgtttgcaagccaagtaggatactgaacttcccgaataaaccggcagtctcttaac

SEQ ID NO: 279335 - DNA, 360 bp, Cannabis indica
aataagatataaaaataaaaaaaagagagataaaaagaagtgtttaaacaactggagtcccaggctcttggttcggttcttctaggccaactggagcaggaggatctgttgtttgaacaagagaagcatcagcagcctgaccggaggttgaagcagcttggccagacgttgaagcagccacctcgttcccaccataagccacttcggccgcgcagtactcaaggtacatgtccttagcgtcgcataagtagtcaaagttggcacggggattagccttccaaaaatcaaagaagagctcgagaccggctgtctccaaggcattgaccttctccttcaacctgtccacatcggccgaaagct

SEQ ID NO: 279336 - DNA, 623 bp, Cannabis indica
tcctggtttgcacaaaaggtaagcttattttcaattcttaattttttgtattaacttaaggagttcacaaacatattgagtgtagtaatttatttattacaatttttttttgtcaaattaggcagaagaattatatgataatcaagataatcgactttctgaagatctatattatctggctaaaggaccaaacaatattttcaatcgatttaaaagatatttaataaatggttttcggtttcatataaaaaaaatcgaagagaaattaaaaactcaaaatagtggagttattgtgactgccaagactcaaagtttttcaagtagtagggatccgaatcctatttttggagatgttacattttttgggatattaacagatattatcgaactagattattgttcagggaatcgtgttgtgttatttaagtgtgattggatttcgagtagtggtattaaaaaagagaaagattgcacaagagtcaaccttacaaaattgatgcgtgaagatgagccatttatactagcttctcaagcagaacaagtaatgtatgtggaagatctcaaacacgaaggatggcatgttgctttaaaaataaatcctagagattattataatatgagcg

SEQ ID NO: 279337 - DNA, 775 bp, Cannabis indica
aagtgaaatttatttaattgcattgcactttgtaaataatgaaagtaactagcttaatccagttataaaaatattagctgtagtattaatttattggtacgtgaaaacaacagaataaaattaaattaggaaaatttaaagctgctacaaaatgtttattatcaaagataaaagagaaacactccttaataaagtggaccttccacatatttttttctatttctttcaattatcttgaactaaaagaaaaagtaaatatatatgcttactgcgggtatactctaaattattcacaatgggagttgtagataagtacgtatttcctatttctaggattgatgttactcccacaaagaaacatagatatggtaataaaaaaaggaaaacgacgacgaagaagtttagcaggaattcaatgcaaaaaaaaaaaaaaagatttttaatgacaaaatcagacaatgaaaattcaaacaacccatgtggggatttttattagattttcataatacttctcaaaaattgaaattcttgaatctatctatataaccacaaaaaaaaatctcaagcggtgaaggagagaaactaataaatttctagacagtaagaacttttgtacgtacacaaacatagcattgaattgaattttcataatacaaaaaatgtaagtgtcgtgtttttgtgtggcaaattagatattactgttgtttggtaattctgaaactgcatttgcttttctaacatcttatctgtagttagttgcatctgtcttcactaa

SEQ ID NO: 279338 - DNA, 139 bp, Cannabis indica
tgggccgagaatcctcggagctggaggctgcaagcaaccattccgcgcgcgtgagggtgtgtcaccaccccaaatcgttttaagtccaaatttcttgcaagcaaataatttaccatggctctgaagccagttgttggaa

SEQ ID NO: 279339 - DNA, 1010 bp, Cannabis indica
cagaaagccttaacaacgtgactgaagaattccgggcatatccaataactactctagttgagttcataaggttcacactacaaaattggtttgctaaccgtctcgagaaggcaagtaagtgtgttacccctttggcaactcattttgaggaagatttgataaagcaacacgaggatggtagacgtagaagtgtcctacgtaacggtgcacaattgtttaatgttggaagaggtgctgacggttctgactttgaaaaaggcggagatgtgaacttagttgagagaacatgcacttgcggcatgttccaattgttgaaaattccttgtccccatgcatgtgccgcagcgcttactcagaatgtcagtgtctacgctctgtcatccccctattacacaaaggagacgtggaagaatacttacgatgcaacaattaatgttgtgggcgaggaggatgaatgggtgcttccagaacacatgcagaacatgagaatcggtgtaccagtggagaagaaacctgtaggtcgtccaagaaagagcaatgcaggaagactacggactaaccgatttccatcgaacggtcaaaaagtcaaggaaccacgcaaatgttcaaactgtggcgcattgggacacaacaaagctacttgcaaggccagggtttgagcatcattttcgtttttaaattgcatgcattattattattatggtttatgacatgttacttgtatttttttatgtatgactatgttttatcgacattttttcgacattattttctgtgtatgtggttgtttatctcactatctcagatttttgtatataattgtgtatttcacgacactttgcgatatgtagcgacattttcacgatatgtttggaaatttaatttattctggacaaagtcgtaaaattgcgactttccacgactacactagcgacatgtcgcgatataggaagaacttttattaattctggaaaaattaaaaaatcgcgactttccacgactacactagc

SEQ ID NO: 279340 - DNA, 948 bp, Cannabis indica
cgttttcctacataaaaaatctttagaagggcatgcttatttcaaatcgattttgattaatttatgtttaaccttactaatattcaccatgcatgcccttaatttctaaccttatgtttatttttattttttagggtaaataccattttggatcttgtgttttgcaaaaattatcaattggaccatctgttttgttaaatgacaaaatgaaccttgtattttctaaaatggtataaataggactctgaattgattttttgtcaaaataaaatttaattataatccaatctaaaagtgttatgacaaaattgtttatattttctggatctgttcgtattaagaattgttttcaagttgattatattaaaaaaaaaattattaaaaattaaattcaatgtcctatttttactattttagaacatgcaaggtccattttgtcatttaacaaaacacatggtccaattaataatttttgtaaaacacagagtccaaaatagtttttaccctattttttttaccatatatttatgttttaatgaaaagtaaaatgaaagagttggagtgatgatgtacttgcacgcacccaaagttaactctttacattaagtaacttacttcccaaaagcctgcaaccaaaaccaaccttcacttcccttttaaaaacataaatattattattattatttacattttaccaccaatttttttttttatgattaattgcaaatttaggtaaggatgacgtatgtgtttttaccaaatgtaagagcattgacattactttcattttagtcactaattatgtctagtatattgggaaatatcacttataagtacttaataattttttataccttacaaaaaaaaaaataattttaatagattaatttgtagtataaatatttaattttaactcttgattgtagataaatagttaagtttaatttt

SEQ ID NO: 279341 - DNA, 880 bp, Cannabis indica
  modified_base (756)..(756): a, c, t, g, unknown or other
ggcgagacctacagtcctgttgtgaaggcatcgactgtgagatcattcttaccatcgctgttgctaaaaactgggatattagacagcttgatgtgaataacgcatttcttaatggcgagttacagaagacatgtacatggaacaaccccaaggatttgttgatgcctctaaaccgaaccatgtatgcaagcttgttaagtctctttatgggctaaaacaagcaccgagggtgtggtatgataggttgaagagtactctcataaactggaagtttagaaactctagagccgattcttctctatttttctgcaaagttccaggtgtgattatcatggtgctaatttatgttgacgatattatagtgactgggaataatattgtcaaacttaatcaattcatcgacaaacttcatgctatgtttgccttgaaagatctaggagccttgcactacttccttagaatcgaagttcatagagatgaaacagatctctatcttaatcaaggaaagtacgtcaaggaactcctagccagaactgaaatgctgcacctaaagccgtgttcgactccaatgacagtaggcaaaccactgtcaaagtcagatggggagactcttcaaaatcctactgagtatagaagtctcattggtggtcttcaatatctcactcataccagacctgacctctcatttgcagtaaacaagttgagtcagtttctacagtactcctacttcctcgacattggtctgctgcaaaaagngttttaaggtatctcaaaggaccatgtaccacggtttgcacatcaaagtatctgacagacctgctaatacgggctactcagactgctgactgggcatgtgtcccgatgatcgagaagcgtagct

SEQ ID NO: 279342 - DNA, 889 bp, Cannabis indica
gtataatttttattctgcgattatggacaacaaccaaaaacaaacatgacagcaacgttaaaacaacataatttattttgaaattttaacacgcatttactgttctcgttatactacccagaaaattcaataaactgattttcatttgaaattttccaaaatactgaaaatacatgaacaaacacaagtatatgtgaagcaactaaataacaacaactcagtaagaaaataactaaatcaaacacactaaacaacattagatttgttttttttttatttaaaaagaaaaaatagattttttgggcaagtaagcattgaaggagatctctccttaatagttgatcttttctcttcggcttttatggagatctctcattgttggtagctcttacgatggctgaatattaaagcaaaacttctcaccaacattcatggagactgaaaaaagtttctcgtcagcgttcatggtgatcggcaaagcttctacatagctggtggtggttttgatttaagatctaagattgtttggagaagcttcaccgattatggaggagctgacctattttgtggaggagaagaaattattttgggaaggtttgtagataccgtattttttaaaagggaaagtttttgttttctaattttgttatttttctaaatagcaataaaaaaagtaaattttagacctaataacgttataattgaaaaaaatctcttaatttttttaaattaaacatataattaagtataagtgcacttctccatagtatttatatatttgaccaaatgaaaaaggaataattacataaggcactatttttttgtaaaatatttacatttttacgttcaaaaaatgtatttttacatttttacggttttccaaaaaata

SEQ ID NO: 279343 - DNA, 671 bp, Cannabis indica
cattcggatttgtggggtcctgagaaaccttaacttttggtggtagtgcctatttcttgtctattgttgatgattattctaagaaagtttgggtttatctgttaacgcataaaaatgaggcttttcaaaaatttgtacattggaaattacttgttgaaaacctaattaaccagaaattgaaaaccctaaggacagacaatggcctagaattttgtaatgatgagtttataggttactgtcaagacaatggaatccaaaggcataggacagtgaggaaaactccttagcaaaacggtgttgctgaaaggatgaatagaaccatattgaacaaagcaaggtgcatgcttttcaatgccgggctcgcaaatggattttggggagaagcagttgtcactgctacatacctaatcaatagaagtccctctagtgcaattgaaggtaaaactcctgaagaaaggtggactggtaaaccacctgacttgtctaatttgaaagtttttggatgtgcagcttatgcacatcaaagtgtaggcaagtcagagccaagggctctaaaatgtgtgtttctgggttacccctgttgggttttatgccctaaataaaactcatttcaatataatcagatttacttattaatataggtcagaaataacatttaatgttgcatggtt

SEQ ID NO: 279344 - DNA, 672 bp, Cannabis indica
tggacagagtaaggtctgttcggcatagtttgtcaattatatatatagtatccttaccctaataacttggttgatcaatacattatgagataggtatggttgacttattgttaaaagtcaacggaaagtaaatagttgggttacgataacccatggtagggttgaagttattttaaaggggttattagtgcgttttttaaatacatatatggtatagtcttaagtaaataatcagtataggaatgtatgtttaagagatttggaagttttagaggtacaattaagaagttaagatatgttttggcgaactaaaaagaagtgcaagatacatggcataaatatggctggaataatcaatggtatgataagtatgaagttatgtgatacctcatatagttagtattatagaagaagtgatcattgaacaaaactataaatttatcaagattacagatttgaccactatcgtaaagtatcacaaaagtagacaaaagttattgtgtaaaactagctaatctcataattaagtcgacttgattgacagagtattggaggaccaggaactagaggagagattagcatataagatacaatgaagtggtaaaagaatcaagagactacaaataggaattaaagtctatgctatccaggaaataaagacaagtgcaacga

SEQ ID NO: 279345 - DNA, 526 bp, Cannabis indica
aacatgaaccaaatgacacattagataagtgatgaaaatacttctgtctctttattaatattcaaatgatagagattacattgaaatagagttttatttagggcataaagcccaacattagaaacttattttttcaattattattgtcaccaaatagaattaggaatttaattgtttggtaatttactacaacccttttcggattgacctcactcttgtgagtttattacttatgaacgatacgtatacttgtatattggatttttcacagcactggggtcatagcaggcaaggaggaggcctcctcactaggggtcatgtgagcaaggtagagaggtgttgggttttgtgccctaaataaacccattacaatctgattagttatcaatttaagagatttgaagtgatttatgttaacatgtatttttcatgcttatggtttaatatatatatttaatatatgcacaaaatcagttaagtccataacatatatttattcacaattacagtattgtcaacacagtgg

SEQ ID NO: 279346 - DNA, 606 bp, Cannabis indica
gtctaccgaagcttgctaagacatgtacaatcttcatcagagaaagctcggttcacggttcagtaagctcgtaattgtttagtattttaaatgattattaaagcatgttaggaagcatattagattacacttattcatgttaagtgtgttgcctttaagtccataagagcggtattaagcttatgatcgttgtctaacctgccaggcttatgggttcgcaggctaagtcctataaaatggacgcctagtgaaatacaagaagtcagggtaacatggttgagaacagaggcgatcagggaaatcaaattccccagattccccgtggtcacggccgtggccgtggcagagcttagggtggtcgtcctgtaaatccaccacaagctcctccggattgggagtagaggtttgcagaaatgcaagatcgaatccgctagcaggatgaagaaattcagaggttgaggcagcaaggtcctcctgccgtgcctcctcagcaagttgctgttggaaatattttaccaagatctagatttactaccatgtatgtttcacaaacatccttatatgaattctaaaacaatgagatgaacacatataaagtttaggaaa

SEQ ID NO: 279347 - DNA, 647 bp, Cannabis indica
tctaattagtagcttttcttgctgagtcattgtgactcacgggtgcttcgtggtgcaggtaaggaagttggaagctgtgttcagccatgagtcagaggtctcctagcaatgtacatatcagccgtggggtcttggcttttgggaagcaggatcgaaattcctttctatgtttggaaatgtaatttattgtaaaagaatatttttattttataaacaaaggatccctatattacgacagtatttaaaatgaaagtctttattttgtattatatcaagatttaaaaaaaaaaacacacagacacacacgtggcgtctctgagagtcagggcgttacaacatggtatcagagcgaccaagttttaaagatcctgaagactggttttatatgtacattggctgtgaagactcgttcgactcatggtttagtaagtgttaattattagttgattagtgaattatatgctgattatttgaattgtctgcttatttgaaatgtgtaagtcgttagagaagcatgataagttttaatataaagttgctgagtatatttatgcatgtgcgataatgcttattagcattagttttagttagaaatattctaactatgagcaaggaatggtcgcgagtgtattaggaggtgtacttga

SEQ ID NO: 279348 - DNA, 697 bp, Cannabis indica
aggtcaaacaattctaaaaatagtacaaatattcaagaaaaatgttagtaacaagccaataaaaactatacagaattaccttgaataaatctagaattgtgagtgtgtgcaccaaaccctaaccttcttaccgcaaaccataacacataaatacttttgaaaaatataccaagtgaagtctcaacttcattagcctcacaagtccttgaaaatatttaaatatggctaaggtattcactcatagagttggaaatttgaaagtgagcactcaaaatggatagatcaatttatgacaaacatttgaataaacattgaaacgaagataggttataaattatttggacaaccaccataaagagtaccacaaaccaacttttcaggacttttaaacgaaaatagacaatcttttacatttattctaagagccaaaacaaatgaaaaatgaaatactacaaatttttttttttgttttttttttaaactaagaggcaacatattggatataatgatggaaatgtcctttttttttactaagagaaaccatataataatggaaatgttgctcttgtatccgtttttttttattttttttctaactaagaaaatatttacaaaaggtctccctaactaagatttgtctataaaaattatacctcaaagtcaacatccaatcaaaccctagtaccatgtccaaaat

SEQ ID NO: 279349 - DNA, 516 bp, Cannabis indica
tattatggagctggaattgaagcagttggattgtgagctttaataggaaaaggaggctattcaacaaccagcacccccggctgccccaatgcaaactcattatccccaaggccatgtacctatcagcaccgccaccacaagccccaacatcttatgctcctcctgcaagccctcctccttccgcacctgcacctgtctcacctgcccctgcacagtctagcaagtcatctcacccgccagtaaaatgccccatggccggtaccttttaccggtctcccgcacctggggagccaccatttgttaaggtaattaatgtcttagtttatcaatcggctttttctgttattattttttcccaggcatgttatactaaaatatatgcaaatctatattgtttcttcaggtaggagataaagtacagaaaggtcaagtcatttgcatcattgaagccatgaagctgatgaatgaaatagaggtatcccctatgttcttaattagtcatatctaataaatagt

SEQ ID NO: 279350 - DNA, 598 bp, Cannabis indica
aaaaattttagaattgggggttagttgtaaaaacctccctactttagggggttttaccgcaaataaccctattaaaaatatgttttattatcttttttttttaattttatttttgaaattaacgtatacaatgttggggagtctttatttgttacattaattaacaaacaatgagattataatgcctttcaaaaaaaaaaaaaatagattctagcgtaataacaagaaagaaaaaagaataaaaaagctaaaaaaatgaattatgtaatcaatcacattctgcatatataatactaacaatatttattttgctaattaaaaagtaattgaatggatgataaaagcaatccattatatatggagagactcttatttaaaaaaaaaaaaaaaagacaatcataatcggcatcatatatcgagaatactaaccttcgatgttctttttatatgaaatatattgaatagattataatgagaatagaaaaattaaagaatactaaccttcaattgttttgacaaagcaataattctattttttctttcttcaataaaaaaggctgctatgatttttttaggctgaagactattaggttttcat

SEQ ID NO: 279351 - DNA, 571 bp, Cannabis indica
actcgtctctgaataagttggtgggcggagtcttgaaagagcttaccaaggttagtcttttcttttcgacacttcccttttatcttttcatacttagctccatatggtgtacttttttcctttatcaggccggtttaaagttggcttacacctactcccgggctaaatctgctacttccaagagtgcggctctattcgacaccttgagggcggaggcggacttggccaagaaggaagctgaagaggctagggcggagactgcagctgttcgtcatgagttaattgaggccaacaagaagctgtttgccgctgagaagaaaatcaccgtgctgacaaaagacctcgaggctgctgattgctttgagaaaccatcgagaccttgtctactgaagttgatcgtctttaggatgagaggagttctctgcggcaggtccttcttcggatgaaggaagataaggacgctcaggcggctgaggcggaccgcttgaaggagaaggtcaatgctttggagactgtcaagctcgagctcttctttgatttttggaaggctaatccccaggccaacttcgac

SEQ ID NO: 279352 - DNA, 631 bp, Cannabis indica
tccatgtactgggtatattggggagcatacccccttttctgtcgcttatcctccgttcgggtgctgcccttggaggaccttttactccttgagccctgggaaggaccggctaaacttgcagtcggagcagagtgtgagggggcttgtccaattatccctgaggtatttccaaaatgggaagatgcgggggctaaggtctggccttggctatgtccgggagtagcagaaaactgtatgccgctcatcggtggagctgctgctggcatagtgcctgagagctgggctccgggcacatatcctgctatcccggtgggatagtatcctccataggccactatttgggcctcttccaggttgatgtatttctggactctcttctggaagtcttgaaggctggaagctccttcttgctgtaactcgttccagaatggagtccctgtacggatacctgcttggagaagagcaagctgttgtccgtcatctactttcttggttttagaggcttcttcccggaacctctttatgaaattcttcagtgtctccgtaggcagctgcttgatgttagtcaaagcgctgacctccaggttgacttttcttgcggcgacaaactgtctccggaagttggtttgta

SEQ ID NO: 279353 - DNA, 591 bp, Cannabis indica
tttgcttattcctcgaccgaacccggtgttgacagtgtcagcttcagcaatcaccaactcaaactcgaatgagcataccaaaaagtttgtgattgaatgcatgaaagacattcttcatttgtcatcttctcctttgaccacatcagacatttcaaaacatcgtgctgacgtgagtatgcaactcgacgtgttgagtaccctttgcgggcattataaatgtggtttagcagaggttgcatggttcactgactctgtcaatgatttgctcaaggcccaagaaaagtctctcgcttctgctaaagttgttgagaatgcccttagtcttgatgaatctcttatcatggatcttcttcgtcgtgataaggataatttggcagctatagatcatttgtccatatctgtcactaacaagacaaaggattttgaagattttaaagcaaaggaagcagagattattgcagcggaactagccatacaacaacgacgagccgatttcgaagccgataaagcatcgtttgaggtagacctttctagtctcaaagattccttgaaggagcaacaacatctcgctgaggagataagtcggtcaaa

SEQ ID NO: 279354 - DNA, 693 bp, Cannabis indica
catactagctacttgcccgggaccctttctgctaagggcatcgaccactacattggccttcccagggtgataaaggatctcacaatcataatcctttaccaactccaaccaacgcctttgtctcatattcaagtctttctgagtaaagaaatatttgagacttttatggtcggtataaattttgcacctttccccataaagataatgccgccaaatcttcaaagcgaatactactgcggccaattctaggtcatgagtcgggtattgctgctcataatctttttaaacggaaggcataagtgataacctgtctggatgcatcacaataaaccacgaacttttctttgtcagaaggcaaagctagtactggagctgtaatcaacctctgtttcagctcctgaaaactagcctcacatttgtctgaccatacaaaacgctgattcgttttggtgagctcgattaagggtgttgaaattatagagaacccttctacaaaccgacaataataaccgactaaacctaagaagcttctgacttctgtcactgttttcggtcttggcccatccctgacggattctatctttcctggatccaccttaatcccatccttgctaacaatatgccctagaaagagcacctgagataaccagaattcccatttcttgaatttggcataaagcttatgttctcgaa

SEQ ID NO: 279355 - DNA, 586 bp, Cannabis indica
agtttcggtctgaggctaggtctttgttcggttgtcggtcttggtccaggtcttggtcacggccctagtcttgttctaggatcctggttcggcgattcttatttagcatctaattttgggtctcaggtgtaggcttgggttcgggtttggttcttcgtctgggttttggtcctagtcttagtcgtagatctagatcactgtcacgggtcttggtcttgttctggttcaggtcccaagtcccatttttgagtttgggtttgggatcgagactagggtgcggttttaggtcccgaccttggttttgtgtcccaagtctggttccatgttttggtctttgttcaggttcaggatcaggtacaaagtccaggtttgggttcggatccgggtccagctcccattttgggtctaggtcttatttggagtccgggtccttgtccggttacgattctggatctatgtcaaatttcaattatgattccaagaccaaatcctagtaccagtcccggtcaacttcccgttttggttccaattttgggtcacagggtacgagttcaggtccacttttgggtttgggactgggttcagg

SEQ ID NO: 279356 - DNA, 662 bp, Cannabis indica
gattgcgttcggttgttgcatggttgggcaatggttgcgcgatagttgcccaggaagcatggatcatgggttgaaggtgtgtgtaagtggtatttgtgtaattttttttaattggtctgtatatttgtttatttggccaggtgaaaatatttttgtaatattattatttttttggttaaaactgaaaaaaaaaactcatatatatatatattctatataaagtgtagctatgtaacagaattggtttaacgatgtttttacgttaactttaatagaatatcctattagttaacagaatattctttattaattttataatattattatatatatttaaaaataaaattatatacatattttatataaagaaatttaaatttaaatttaaaatacttaaaatgttgaagtgtaataatgaaaaatccttatttttaatcatatttttaaatttattggtttaatttggaattaaaataaaaaaaaattatataaatatttctataagaaatttaaattaaaatattataactatttttcactttattattatttattttatatttgaaattaaaatagttgtactaaggaattgattgctttccattttagttatggtaaaccgattcacacaccataattttcgtaaagtttagaaataaaaa

SEQ ID NO: 279357 - DNA, 756 bp, Cannabis indica
attcacatatgtctgtatagcacagacctgatcattatttcatcatgcccatttatgtctacgtggcgtagacctatgtgttgcgctcacacatctaattaaatctacgtgacgtagacccacgtgttactctcacacgtctaaatacattaaggccttagaagcggttcatctcggttatgagtaccgagtccaacctgattatgccttgagcacataatccttaaatctcatttcaattaacatggcatggcatttatacacatatatcactagggtaataaccctaggctattagaccgttcctattagggtaataaccctaatcccggttacttaacattcatgcatatcattctcaacataagcgccactgcgcatactctacgtgctaatcactgtcttacctgttgtcccgcaatagtagagattccaaatccccgggtgctcctgaccaggtgccggtaatcctagtcacacacaatccgggattttcacaaatagggttaacccctgatttcacattcataaaataaattcatggcatttcaaatacagataatcacatagagctcgaaaagagctttccaacggtataaagaacgtcccaaacggagtcccgagtcaaaagttatggccaaaacaaatttcagcatttcccgatgaactccaaccggatccgtgtctggcagagacacgaattctcaatcttaaccccaaaactcactcaaatcatccaaacacttccaaactttc

SEQ ID NO: 279358 - DNA, 700 bp, Cannabis indica
gtattccgaggtattgagatagtacttaaaattttaaatttatatatgatagtgtatattgtaatagttattatagaaatattaaaaaattttaaaaaattatattagacttaaggtaaataaattagggttgaaaagatctcttcacacgtgtgtgaaataaaagacactattttacaaatttatttaaattttattttagtatggtaaattattaataaaaataaaaattaaatttaaaataattataatatacatgattatataaatttaaaattataactattgaaaactcaataagtgtgccgatattttttttttggtaaatactattttagaccttatattttacaacaattataaattggattatttatttttttaaatgataatccagacactctattttttaaaatagtacaaaataaatcatgggcttaattatatctaggtactatgattagatagaatacaatttttgtatgtgtccgaccatgttaaaaattactttaaagttagttatactaaaaaaattgacgaaaattaaatttagggtctattttatattatttttaaaatacaggatttaaattatcatttaacaaaacaaatgatataatcaataacttttgtaaaatatgggatctaaaataatatttaagaataattacataaggtactattttattaaaaaaaatta

SEQ ID NO: 279359 - DNA, 520 bp, Cannabis indica
gcaaagaaaagaggattttcctcttgaatttcaagctctccttagcaagattaagttgttggtatgttttctacatctttcttttatgttttcttgaatttttgaagagaaatggtaggttgcatgcttagttttaagttgttcttgctgctggattcttgatgttatttctgaagttaaagcatggtaaattgaggttaatttagctactagtaatgcatgattaatgatatggtttaaagttatgaattttctatgcaaaattggtggctgtagttgttgcatgagtttaagtttgttttctgcagtgtttttatgcatgattatgtagttctaatctaggtttgatgcttgttatgttgtttagtcaagttttgagtttagaactcaatctttgacctttaatggtgaaatgagtttctgtgtgtgaagctcggttttgttgctttagaaatgttctaggggatatatagaacaggtctggaaggttttgtgtgatttggatttgatttggttgagt

SEQ ID NO: 279360 - DNA, 583 bp, Cannabis indica
tgaagctagtcaatacaagaaaaaaagtctttactttttagattagtttctttgtggtcaacttgatgtaatccacaaagcaattataaaacagagtacagaaatatagttatacactctgagtgactaaatagtaattataaaatttaccaaatatttcatagattgtaatacactcttagtaacatgcccattttattagcttatcataatacgttttgaaaaaaagttataattttgtgttaacgaaagggttttttgttgtagtgtattttattgaattaattaggttaagttgaaatagaataattttattgtattaattaggttaattaaattgttcttttgttgttttgttagaagtttcgaaatggatagagattggatgagtgcgaataggttgaggaatacatatgcatttaataatcctgcttcggtatcaactgaagctggtaaactcaaacaacgttcaaagaatctatgtcagcgaatgatgggtatgcaacctgaacaatggttgatatgtccgtggaattcagagtaagtatgtttttatattaataaatgtaacaaactaatggat

SEQ ID NO: 279361 - DNA, 747 bp, Cannabis indica
agagggcgtaagtcacacaaagacatcgatagagacgcggagttgtggaataaaggcatcaaggaagccagcagggctgagaagaccgagcgcaagcattgagatggcgctagagtttgtgtggaggccagagggccgtgccagtgagacttagtagtcatgttggcctgcgaaggtcgagaagggtgctacagtttgcatgaaggccagagggctgcgtcattggaacttagtacaccgtgggagccagaagggcgtgatgcaagtgtgaatcagttggatggttgagtgggaagttagtgcatgcatgtggaaatcgacaggggtgctaatgagatagttgactcgagagtcacatcctgcgggatgcacttttagatgacatggtgtgcatgaagagttggggcagtcaggcatttgcgtgtgggcatgttgtcgaggacgccaacagatgaagtgggggagagaccttcacggttcactcaacaagactagttattcattacaagcatcgagatgagtatcatggagattgattgttgttcaggatgtaaagtcaagaagactcaggacacaggcagagccagttatctagggtgaaagtccgcaggactcaggtactaagataacaccatggcaatgttggccgaaggcaaaagtcagcaggactagggtactaaggcaacaatgaaatgtcgaggggcgaagagtcagaatgatcgaggcattagttcaacatcttcatca

SEQ ID NO: 279362 - DNA, 594 bp, Cannabis indica
cagccgctcacacatttgttgttgtaaggcctcatgcttggacagccgctcttccactggatctcttgaagtggaagctgtggcagtggatggagtggggcgtcttggggcacgatcaggcccgaaaccaattaccccctttcgtggaactggatcttcatcattcaacattggtacattggcacatctgcacatttcagtaatgaggcacgggaaaaacaatttcccttttactcggtgtgcacagtcaaaaatctccttcgctatcaccttgccaatattaatctttttgcctttcacgatgcaatagagcatccacatccgttcccgactcacggtggagtcatgtgacgtaggcagcaaagtagtttgcacgaaattataaagacacttgatatcatgcttcagatccgtccgtttaaaacggaatacaccacgcccatcgatttcccacactgcctctggagtggccaattcaggcacaatttgtgcatcagctcatcagtgagcttaccgacatctttggagaactcacacgtcacatttttaagcaagtagtaatggttgatgtctttgtcagaaaatttcacttta

SEQ ID NO: 279363 - DNA, 514 bp, Cannabis indica
tttgtaaaataaggcaaaatatcggggcgttacagttggtatcagagccgatcgtccgttagcccgaaggatactcacggtatacatacagaagactgaaaaagatccctctcactattatgtaagtgttagttttaattttcttggtattgccattaatagtcttatatgtgatacatataattagagcctcatcttaggtggtgcttagagacatcaatagtaccatctatctcttatgattgattacactttttaggaagaatatgaataggttttatttttctttattgtcttgaattgaaactaggaaggacagtgttcctttcttgaaaatttagaataaattatattaggaattcataagactttgtttgataaatagaatattactagttaagcttgacaacattaagtttagatatattcatggaatcttctctccctataattgaactcttttgtttctattaaattaacctttcttgtaagagctcacacatgaaactagaag

SEQ ID NO: 279364 - DNA, 429 bp, Cannabis indica
tttgcttgcaagaaattttggactttaaaacatttgtttgtgttttggatggtttcatgttgtgttgagtgttatttgatgattgattgatgtttgtgaattttcgtgaaaaataattgaaattttgtttctggaattatttttattggataggattcaaaaaaaattaggggtgatgaactcacatacgcgcgcggacgagggtgacaccctcagacagcacgcgttcagacacggctcgaccgagctgattgtctgaacccacccaatccgcgcgcccgcagaaatcatgcaaaccctcccctgcgccgaggtttctcggcactgcaactcttagagtgcgcgcggacagtatgctgacagctcgctaattttttcgtttttcttcgattttttcatgctatttcgtggatttaacttccgattttt

SEQ ID NO: 279365 - DNA, 788 bp, Cannabis indica
actatacttgatatggatatcaagacaatagattgattgaaatgcacttctagttttatgttagtgcaagtgggagtttgttgggattttatgccctaaataaaacccatttcaatataatcttatttgttatcaatagaagattagaagtcatttaagttaacatgttattttcatgattatggtttaatatacaatttctgataaatccagaacatattgttattcacaattatagtgatgtcatcacaatggaaggtaattgtgattatatttcaaagcttaagtctcatgatttatcagtgcactgatttacatcgacgtgataatcaataataaagttcacttacaccttggataagtgttatgtccttttcaagatattggtaaagtatgctagtatcagatgtatggagtatacattgaattggaccgatattgaacttggtaaatatatcataaacttactgttacatctttctaagtcaatataacttagttgatcttagatcaaaagatcttaatcttgagatggttaggtttgatcttaactatgttatttgtgttctttgagtttttcgttaaagctgactaattggatcagcccaatacttacatcttaggaacatggtagtacaattgagtgggagtgctaatcatagatacagaatctataacttctatcttgacatagaagtaaaatgatgatttccttcgagcttggcttaatagagataatagaagagctctatttcagtatatatagtttaccgaaatatcatttatag

SEQ ID NO: 279366 - DNA, 413 bp, Cannabis indica
agttgatccctgagttgtagggattgagctgatgactcatgatgcgtcaagctgaattcgctaaatgttgatcgccctacacaacttgttgaatatttcattctggatgtgccagcgaggcatcctgctcgacttatcgttctgagccgatgctccaagtggagtccacgtgtcaccattcttgtgatgccatgtcagagtgccaaatttgggataacatttgccccccaagtctgtacgggacctctgaggttgcgtgtagacttatttcgagctggctctacctttggatggggacacgtgtcgagcatgaccgttcgagactcgatgtgaagctaactgggcgtcccttcagtttccggctaattaatgctctgaaaattatattttgaaaatctgaatttctctctcca

SEQ ID NO: 279367 - DNA, 663 bp, Cannabis indica
acattttgttcaatgtattaagggggttgaaacaaggtttaaccgtcttgatcgtaatgaagatgaggttgtcccacgaaagctttctgtgtttcaatctcaatgtcgacccattacaaaaggcaatctccgaccacttgatcgcgcatctcgtgaacaagtagagtggtatacattcaacaattcacctgaaattcaagcttacttagagtaagtttttttctttattaatttttttttcaccttaaatttcaatcaatcaattcaaatctattttattttacagtgaacacttggaagtgatccgacaaaattacctgaatggagatcataatgttccacacaaaaaacattttcgtctgtggtttcacaagaaggtgaatatatatgtgtagtaaacgtttattatcttaagtggtgtttgccatttctaatgaggtacttatttttatagatatatgacttgcagaagtctggatcattagagaatggcaaagagttactagctttagcatccgggtctgatcacttaggtacttacaatgaaggttgtattgtgaatggagttcgatttatggctaccaaacgagatgagaagaggagcacacaaaatagtggagtgtttgtggcaggaacagaaggttttaattattacggcacact

SEQ ID NO: 279368 - DNA, 525 bp, Cannabis indica
ggttcctttgtatacaggtacccttttgcctataaatactcactcgtactggcacataactcattttatcacccttcgttgttaatgaaactccagagcgaaaagagagagttttctggcttcaaagttgctgaagtgcctacaaacgattgctggtttgcttgaactcagacattcgaatctttgaagaaagttctgattccctttatgcttttctttgcatgtttacgctttgaatgtaactatgctgtagaaagaatgcttaggaaaccctagggttagaaacttctgcaactcttcttttccatgtcttcatgtgggctttcagccgtagagcttttgaaccgcattgtgtctgtcttccatcttgcttattctaagctttatgaactttttttcccaactcaagaaactttctaacttcttgagttttgacttttctttaaacatagtcgttctttaatctgttgagtactcctggtcggctatattttgctttgtttttcgtttgatactccgtccaac

SEQ ID NO: 279369 - DNA, 596 bp, Cannabis indica
tcaaaatgtaaatgggcgaaggaaggcgatgcaaattcaagattcttccacaatttgttgaatgcaaggaaatctaggaacacaatctccagaattgaaagagaagatggatcatttattgaggagaaggaagaaatagtcaaggagataatttcttttttctcaagtttgtatacttctgaaagaaaagtgggtaatagcattgaaggaatagactggcacgcaataccagatgactctgctaggcacttagagagaccgtttgttgagagtgaaatcagagaggcagttttcagttgtgaaggcagtaaagccccgggcccggatggattcagtttggttttgtttcagactcaatgggaggtaatcaaagaagatttgatgaaagtggttaagtcgtttgaaagagatggcagtattcagggaagcatcaacgaaactttcatttgtctaattcctaagaagctgggcagttgcagggttagagattacagaccaatcagtctgataacaagtgtttacaagattattgccaagatgctctctattcgactcaggggtgtgttgggggagactatccttgaaactcagtcggc

SEQ ID NO: 279370 - DNA, 596 bp, Cannabis indica
agttgtaaagctaagctacattagtggagaggattgcactaattcaacttatggaagcaaacctttaaacttgaggatcaaaggtggttgttatagaaattcaagttgttggtgggaagtatttgcacacttatttgatcgaattactcttgataagttttaaggacataaatagcatgcaaaattctgttgaaacacacaagttcgaggcatattcactactaccaattacatttccatttcatctaattctgagagcaaatttcgtccctagaccaagtgtgaaagagcaagattttctctactgcaagcgtgttagtgtcgctgtcattttctgttcttattgtttagttctttgtgtttttcattactcgaggacgagcaatactctaagtttggggtgtgataactctatgttatagagttaatttttatgcttttaaactaaagtattgtgaggagagtagtgaaaatgtgtttattttgcttaattttaattagttttagtgttattttctatttagtaatctaacctttaagttttgtaaatattgatattgttgggtgtgtttttccaattaactgtgcttattttg

SEQ ID NO: 279371 - DNA, 657 bp, Cannabis indica
tgatccacgtggtccaaaaagaactatttgcaatgaaacaagaagcatgtagaaaagatgttgaacgtgcatttggagtattgcaatctagatttgcaattattgctggaccggcacgtctttggaataaaacggttttacatgatataatgacttcatgtattattatgcataatatgataatagaagatgaacgtgatctaaatgcaccaattgaagagcgtgtcgaagtgccaagtccagaagttgagatggtagaagatgataatgctcggtttcaagaatttcttgccagacatagaaaaattaaagataaagatgctcacattgagcttcgaaatgcattaatcgaacacttgtgggacgaatatggtaactcacaaaattaatataatttaattaattttaagtgtgtgtttcaagtttaatttaatttaatgtaatttttttgtcatgaatgtaatgtttgttctctagtaatgtaatatttatgttattgcaatatgatattttaatttatcgaatttcgccgattttacagtattattgtctttaatcacattagtaagtttatttaaattattaattaaatataacaattgtggtaattttgttaattaatatgatattattttttaatttattaaaaaattaata

SEQ ID NO: 279372 - DNA, 511 bp, Cannabis indica
cgcaagtatacgcaatcgtaacaagtaataaagtgataaatcgagtatcgtctccacagggattgaaaattagaaattaatttataaaactaattactcacaaattggttcaaacaaaaataaaataaattgttgagaatatgtaaaaattaataaacgcaaactatgaagaaaacaagctagaattattaaattggcctaaaaatgcaaagttgatataatggtgctaatgagtattgttgtaaattgataatgtcaactagaaatttaaaatgtcataatcctttttccaaagtatttatggtttgattctctaattaattaacatattcctatgcccaattaattttaagaataccaatttaagtacaattccttcaagtcatacaaggtaaataacatattcctatgctatttacaaatcacacttttccaaagtgatattcatgcatcattcaagcaattccactaaccctattttttccaaaatcaagattagctactacttact

SEQ ID NO: 279373 - DNA, 678 bp, Cannabis indica
ttgaagggtagaacggtaaatttgttccctttcgatgtagatcatctatagagaatctttgacaatttggattagaacgatggataattcatagcgtatctatatcttggtacatatagagtgttctatataattaagagtgcaattccgaatctatagtggcataaggatgaattaaaaagttaaagaatttacttggatggtaaattctaattctacttattggaagattgattatataggtccatggtccccacactagttgagataatactgcttgcagactcagttaattagttttaactaatcaattataattctaaaattagactatgtcttatttatgaattttcactgtgtaagggcttaattgtgaagaaaagaagttttggggtttatttgttatttaagagactctgtatggtctaattaatgaataaaacaaatgctaatttttatttgataatttattataattattaaataaatagttttgacatttatagaattaaaattaaaaaatatgacattattgaaagaaagataattggttgaaataaagtgacaaaattataactagtgaggctcattaagtggccgaccactagagtgtatttttgccgattattttattcttttttaatccatataattaaatcataaaccctagttgaaata

SEQ ID NO: 279374 - DNA, 607 bp, Cannabis indica
ctttctttctttttcagatttttttctttctcaaatattttcatcactttgttcttcttcatcttttttcttagaccaccatcacatccatccaactaccaaatcggggtctgctaaaatttaaagataaaacctaaataaaaaaaaaattacaacaatcattaacttaaatttcagccataaacttaaatttatcaaacccatttttcaaccataaacagacttttaacagaaaataatattaaaaaaaaaaacttctcatattgagaaccagccaatccattttctaaagtttagacatgcatctgtgtgtagatctgaagctactacattcgtcgaaaaccattgagaaccaatcacaggagcctcacaattctctcagcgctcatctagttgtcctctcagccacactcgagacgcaaaccggtgcttcctgcaagaaaaacacaaagccaacaaagaaaaggagtagaagaagaagaagaagagattgtgttagaacctacccacacactaggcaccatgttgatgttgtttcaccattggagccgagatgaagatattttgaaggagcacaacccatatcccaccgacatcatcccaaatc

SEQ ID NO: 279375 - DNA, 396 bp, Cannabis indica
tgattgagataccacttgatgtgtgtgggcactcactctaacactcaaggttttgaaaattgaagaagaaaagagggagagagaggttcgactataggcaataggataggaggctcaatttttgtaaaggcaaaatttttgattttcaatctcttattaagtgtgagccatcactatctatttataggtaaccactaggtttaggttaggaattacttggcattaaaataatgaaaataatattggaaaaaacctcacaagtggccagccatagagttaatgggccccacttggtattttacaattttggcaaatttcatttttattttctcaaaaacgccaattttccaattctaaccatttaattgccaaaactgattatttaataactaaaat

SEQ ID NO: 279376 - DNA, 612 bp, Cannabis indica
atctcaaggacgagattgaaaacctaatccggttgggccacctctatgagtggatcaaaaataggttgcctcaccttaatccgggccaggcgactgtgggtgtgcctcagggaacaccggggagtacagcaggagcgttagctccaactgctcccgcgggcgacgcccagcacatccccggtctgccgcccagacctaacgggagggtagccatgatctccggaggtccccatatcggaggaactactcgcaaggagctcaaacgatacgcaggggccgtgaaacacaatgaggtttgggaggttactcaactcccagctcaaaggccccggctgatggaccaacccatcacgttcacggaagaagacgccaagacagtgcgcttccctcatcatgacccattggtcatagagacccccatcgcaaataaagtggtggccagagtcttaattgacaatggaagttccgtgaacctactcttcaaggaggccttcaccgcaataggcttgacggaccgagacctctcgcccagtgggtcccaactcacagggtttaatgggacgacacttatcccaatgggaaaagtaaggctcccagtcaccttgtgcccgg

SEQ ID NO: 279377 - DNA, 528 bp, Cannabis indica
gagccctaaaatcaataactttggctcttgataccaattgttaaaataacgattactcataatcattaaagccaagatctagtatttatttagagcatcaaatacaataaaacacatacctcccataccatccatgtgagccattatccttcattgtcttccatgagaatcaccaccaatccttgagcaaaaactagagagagcacttgtggagctaaccccttttgcctttaccatacaaactctaattacctcttaccacacataacacatatatatatatacacatgttattacccttataaccctaaggggttattaactaatagggcttttgaggtcttttatggtatactataatttaatgggccaactatagtattaagggtgctctcatgtgcctctaacatataattaagttgctaaccatcccattatggttatgagtaacattaggcacataattaatgattgtgtattatggaattaaacctataattgtattagtccattataataattctaaca

SEQ ID NO: 279378 - DNA, 588 bp, Cannabis indica
tttccaataggtccaacgattcattcatcagctggtgattactgacttggttgtatgtcgctcgtcggtgggagggtgggtctagctcgaccggtatcatcgcatcatacccataagcaagggcaaagggggtatcaccagtagctgttctttccgtcatcctatataaccacaaaactttgggtaattgctctggccagcttcctttcgcctcttcgagtcttttcttcaaggtgttttttaaggtcttattcaccgcctctacctgcccgtttgactgggggtgcgagaccgccgagaagctctttactatgccatgcttaatgcagaaatttgtgaacaggacactgtcaaattgggtaccattgtcagataccaatttatggggtaatccaaacctacatataatgttcttgaccacaaagtcaagcaccttcttggatgttatagttgctagtggttcggcttctgtccactttgtgaaataatcgactgctactaccgcatattgcactcctcctttgcccttaggcaactgaccgatcaagtctataccccaaatagcgaagggccatggactctgcattt

SEQ ID NO: 279379 - DNA, 600 bp, Cannabis indica
atgagtctgggagccatctgaaaaaacaaaaaacaaatcaatataactgccaaaaaaataaaaaatggtcgacataacatcgacatcatgtcgatattcagtcgacattatcaaacagttagtaaacaaataatttggtcgacaaactgtcgatatactgtcgacatgttgtcgacattatcacaaaagcagtaacaaaataactttgtcgacagcatatcgacaaactgtcgacatcctgtcgacatacaaagaaaactggactatatttgcagtaaacaaaaatcgtcgacataaggtcgacatcatgtcgacatgcgatcgacattatcaaacagacatcaactacataaaaatgtcgataacctgtcgacatgaagtcgacataacaattcaatcaactggtcgacaagatatcgacatactgtcgatatgctatcgacattatagacctgcacttttattccaaaaaaggtcgacatcctatcgatacaccaacgacatcctatcgatatacactaacaacacagacaattctaatggtcaaacaactttcaatcttggtcgacattatatcgataacctatcgatatgtcatcg

SEQ ID NO: 279380 - DNA, 561 bp, Cannabis indica
tacccattaggagtgcacccatatatatattagattggataattattctcctctattagattgggtgcactcttaatgggtattacccataaatggataaaattagaaaattttgagtttaatattgatatttaaatttgtttagtaatcattcatgggtaatacccattaagaagtgttccatatatataaatatatattaagtgatttatgaagagaaaacctaaggttttgtgactaaggcaccaaaaaaaaagaaaagaattatatcctaagctagccactatttttatcatctctcgctttctctttgaatatctagctttcatcaaagacaaaaggtggagtcattatttccactatgtatttgtaagtaaactaaatccacattttggttttacggaatctttaactatgtatatatgtattatgctttctattatatgtttatatatattgtattaggaatcatgcaaatagattataatagccactagtataaaaggagatattattgacaaccaaaccaatacctctttccaccaaaaaaaaaaagaaacc

SEQ ID NO: 279381 - DNA, 597 bp, Cannabis indica
aaatagcgaaaataaagataaattttcaagaagagttgcgattttttatcttttgtttaaaagatgagttatctttatccgagatatttcctaatactattataaatagaatcctaattctaagaggatttatctatccactataaatagaatcctaattctaataggattcaactaactttcccattactataaataagacctcttagactacaaatggaggggaatccaaaaactaaaattaaatattatgatttttattaatgtctagttctgagtagttttcttttagttaagggttatttcaaaacccgaaacatgaattcttaatttcattattgaatgttaatttttagtttccattatatcaaattgcttctattcttctatgttcaatgttatgattattgttttaatcttgtttagacggccgctaaattaggttttactttaatctaccgtcatcttaggattactattcacctaatagtctaggattctaagtgtttgtgacaaattacaatttgtgatgaagaatagaacctaggttaaatgaattatatgcttcattgatttgttgcctagattagtctatct

SEQ ID NO: 279382 - DNA, 477 bp, Cannabis indica
ttagactatgtctagtttattaattttcactaagcaagggcaaaattgtgaagaagagagattctagttttatttattaattaagagactttattagtctaattaataaatatattaaatgacaatattatttaataattaagttttagttattaaataattggaattggcatttaagtggttaaattggaaaattagtgtttttgagaaaataagatgagaaaatgacaaaatggcaaaattgcaaagtgggacccaatccaatacatggccggccacttattgtggattttaccatttaattttctattattttaattctaattaaatctaacctaaacctaggtggtaacctataaataaatagtgatggctcccacttaagattgatgaaatttcacattcagaaaactttcctgagctttctttctattaggccgaaaccaccacctctccttttcttcttcaaattttcat

SEQ ID NO: 279383 - DNA, 605 bp, Cannabis indica
aaatccggaaaaaatccaagccctcctggatatgagctcgccaacaaaaaccaaagaggtacaaagcctaactggtcgaatcgccgcactcagcagattcgagttaaaatcaacggataaatgtgtcccattcttcaacatcctgcgtggaaacaaaaagtttgagtggacagaagaatgtgaaagagcttttcaagatctaaaggcacagctcgcaaaacctctcgtcctctctaaacctctggacggtgaggaactggggatatacctggcagtaacggagcatgccataagcgccgtactaatcagagaagaagatggcgtgcagcatccagtctattacatcagtaaaagactcattgaggccgaaggccgatatccgttgatagaaaagctcgcctactgcctcatcttagcaacaagaaagctaaggccttattttcaagctcatcctgttcgggtgtacaccgaccaaccactacggcaaatactgcaaaagccagatgcctctgggcgattactcaagtgggcggtggaattagggcagtacgaaatcaatttccaacccgaacagctatcaaaggccaagccttggccgactttgt

SEQ ID NO: 279384 - DNA, 589 bp, Cannabis indica
ctgtaggaaataatggcagcaattccgagatgcctaaactacccctacaccaacaccccaacgttcataaaagcaagggcaatttcgtctttttctctttgtgcggatccaaaaagaatattctctcttgttatccgaatatgcctcctcttttcaaggtcagatttaattcaaaacctattgcatttattttcatataaatgctatcttttctttttcctagaaaaccctagcacacatttttctctcttcaatcaagtgcagccgcccaacacactcctcttctctccttcttctcttttctttgaacagcaagcaaaaccctagcaagcttcttcttctcttgctgcaaaacgcagcagctcatcaatggcagtaaacactgctgcgttttctttcttcttcctctttttccttgctgcagcaaccctagccgaacctctttctttgctacaacaaaaaacccagccgaaacccttgttgttcttttcctcctactctcttcaaaaacctgcagaaaagaagaacaacacaaccagaaaaataccaactaaaacccgaaaaacagcaacgaaaacaagagtaaaaa

SEQ ID NO: 279385 - DNA, 596 bp, Cannabis indica
tgagatctgcagtgattcacagccagtggtaaatcatgaggcgaatacgaggctcggggagaaaaaatgatagcatatctgagcaaaataaatgatctgctcgcacaattctaaagctacagcctcagacaaattccaagagaagaaaatacaacggcagatgcgttagcccgattggcgagcagcaatataagtgacaaggcaaacctggtcccgatccagttccttgaagagcctagcatcactagcatggaagaaatcgaaatgatcgacacatctccaaactggatgacgccaatagcagcctatctcaactctggggaactcctaaataaccgaaatgaagctcggaaaatgagaagaaaggcaacacggtacatcatagtagaagggatcatgtacagaagaggattctcgatgccattactcagatgtgtcacaccaaatgaagccgcatagcttctatatgaagttcacgacagattctgtggaaatcatgcagtcggacagagcttatcaaagaaaattctaatgcaaggtgttacgaattttatgtttactacgcaagtatacgcaatcaagtagtatctcacgca

SEQ ID NO: 279386 - DNA, 505 bp, Cannabis indica
cagctcgtcgatgcaacagccgggcaacgaaatattaagcttcatggatgcttattcgggctacaatcaaatcaagatgcatccgccagaccaagaacatacaagtttctggacagatatgggtctctactgcaacaaagttatgccattcggtcttaaaaatgctggagctacataccaaagactggtcaacaaaatgtttaaagatcagatcggcagaaatatggaagtgtatgtggatgatatgctcgtcaaatccagaaagggggggggggtgtaaagaccgcctatgaataatactttgtattattaaatgtttaaggtttatgtattaataattatggaacgcatattttagaaatatatttcatatatcatataagttttttatgctattttatatttaattacctaatttccgtgttgtgttcggaagctgtggaaagcggcgttgggcctttagagagtcatatcttatattttgatgtatgtatttttttttttt

SEQ ID NO: 279387 - DNA, 502 bp, Cannabis indica
cttaaactagcataatataacctctgaaaacaaataaaaacattaacaacaacacagcaacagattcacaacatcttcttcaaaaatcacatttttgagctagaaaatccaaacttgaaacaaggtagtttacatgcatttctaacagcttaattaccctcaaattgacatgcttacatcacagaaatcaacaacaaaatcacagcagcaacaatattacaaattcatgcatgcatcaccattttcatcatttttttcaacaaattaaagaaggaataacaagagctaacctagcttgaaatggaccttaaaaggagatgaaatcacaagcaaaacttcaagggagaagaccaactccttgctgctccaaggtggccgaaagtgagaggaaagaaagagagagtttgttttgaaagcttttctctaatttttctctaagtgtaggaaatgaggtttgaagagtaaaatgaagtaaaagaattcttttcagccaaataataaa

SEQ ID NO: 279388 - DNA, 514 bp, Cannabis indica
aattggaagaacaattttatactcaaaataaagtgaatcaatgtggattcaaaaattatgaaataattttgaatcttaaataatcaaagtggtgaacaaaattgatgagaattttgttaactttagtgtaatatttgggttaatctcattgagaagataacttcaaaataatgggtaaaaataatcacattattttgtgagtagtaatgtgagtttggtattttagttttgctgtgaaaactaaaaataacaaatagtattttctaagtgaccttaaaaagtcatttcaagaggaaaatacaaaaaggtgatatttaatatacattttatggtagaaatgtgggggtgaactacaaatttaatcaaaatgtgatgagacattgttgatatttttgattttgaattcaaattctaaatcaaatttggctatgtgcatatgtaaaattttgacatattttgatgtcaaattttgggaaaataatttcaagaaagaaatcaaatttaagagaaatta

SEQ ID NO: 279389 - DNA, 656 bp, Cannabis indica
tacaaatgcttccaaaaaggttaaagatccgatcttcttggaaagatttaaagatctaatgtacaactactacgaggaggaggattttgaagcaagatggttagacgtcgtcaaaacccaacagctaacagataatgaatggtgccaaacaacattcgacataagaaaacagtgggcagaaacttatttaaggggttcattcgttgcaggaatgagaaccacacaacgttgcgaatcgatcaactcagccctaaaaaaatttttagagaagaattattgcttgcgtgaatgacttcaaaagcaaatgcactcgacctcacccacctaatcctacatgcttgaccacgtactacaaccaatgtgctgaattctacacaagaactatgtaccacaaggttgctgagcagctttatttagagaataattattttgtcataagttaggagcaagaaggagagtggcagatatacaccattggaaagtttcagcatccggaagtccaataccgagttcattactgtgaaggccaacgagcactacactgtagctgcatgctatatgaaagtcaggggtacccttgtagacatttatgggctacaatgaaaagattaaacatgagaagaatacctaatactcttctcatgaagcgatggagc

SEQ ID NO: 279390 - DNA, 612 bp, Cannabis indica
gaaaataacactaaaacataaaaaaaaaagagttcaactaaatcaataagaatacttgggttgcctcccaattagcgctaactttatcgtcgcatagctagacgttgatcgagttcttcatagtggcgccagaatcatggcggacttggcttgatcaaattgacctcccaagtagagctttaaccgctgcccattcactttgaaagtattagggccttcaccttttagttccaccgctccataaggaaacaccttgatcactgtaaatggccccgaccaccttgacttcaatttaccaggaaacaactttagtcttgagttgaaaagcagttgttgttgcccaggttgaaactcctttcggactaagtttcggtcataccactttttagttctttccttgtaaattttggcgttctcataagcttcgttccgaaattcctccaactcatcaagctgtagtaatcttttctgtccagcagcctttaaatccatgttcagagttttcattgcccaataagctttgtgttctaactccaccggtagatgacaagcctttccaaacaccaaccgatatggtgacatcccaattggcattttgaacgctgttctata

SEQ ID NO: 279391 - DNA, 541 bp, Cannabis indica
tatttagttaaatcatattcaaagagtatttgtagcataaatacttgatgtttttaattttatacacttatataccacattttttattctaacagattaaataccaaaaattacatttatattactttaatcgttattggtccattaaatcctattaaaaataaattatgttgaaatgtgttgatatattagtggtttatttttattttcaataaaattaattattaataattctaaaattaaaaagtaactaaataataataaaattagaaaatagcaatcacattctaagagaagaagaataagaaacacggacagagatatacttgtaaatagtattttttttattattttattaattaaataaatattatatagttattttttaaattttaaaattatttaataaggctttttattgaaaaatacttaacaaaaatatatagtttttattatgttttatgtacaattttaaaaattttaaaattatttaataaattttcatattgaaaatatgaatggacaactaatatattgacac

SEQ ID NO: 279392 - DNA, 571 bp, Cannabis indica
tctcttactgcttctggacctaatagtgtctttctccaacttcatcccaatgaagtggtgatctacatttttcgtccatataacatctcatatggcgccattttgattgtggcttgatagctattattgtaggagaactccattaggggtaaatacttgctccacgagccagtgtaatctagtgcacacgctcgaagcatatcctcgagtatttggatggtgcgttcagattatccatctgtttggggatgaaatgatgtacttaatttcaatcgcgtccccattgccttatgtagactctcccagaacttggaggtgaatactgaacctctatcagagactatcgtctttggaactccatgcagcctcaatatctcttgcacgtacaggtcagcatattgctctgcgttgtaagtagactttactgggacaaagtgtgttgacttggtgagtcttgctataattacccaaattgagtcgtgttgcttggttgttcggggtagtcctatcacaaaatccatggctatatcttcccacttccatcttgggatttccaagggttgcaacatcc

SEQ ID NO: 279393 - DNA, 267 bp, Cannabis indica
ttgagtgggagcgctaatcatagatatggaatctatagcttctatttggacatagaagtgaaacgatgatctccttcgagcttggctgaatagagataaatgattgatgcctcatttcagtaattatattagtttactgaagtatcatttataggtagctaagtgttttaaggataaaatacattgaagggtaaaacggtaaatttgtccctattcagtgtagatcatctatagaggatccttgactattaggattgtaacaatgga

SEQ ID NO: 279394 - DNA, 606 bp, Cannabis indica
tcatcatttttctttaaaaactatagttttgagctaaaaacttccaagcttgaatcaaagcaaataacatgcatcaaactagctctaatctactcaaaataacaagattaaacctctgaaaacaacatcaaaacacagcaggaactacacaaccaaatcaagcatgcaaacatcatttttcttcccaaaattccaagaaacaaagaaaagaagctagaacaaggtttacctctactagaattactttgaacttgctgaaaatcacatgaataaagcaaagaaacgcagccctagcagctcccaagcttggccgaaagaaagagagagaaagagctttgaattttctaatttttttttttctaagttttcaattttggataaaatgaggataaaatgcttactttagttctttacttcagccaaaagaaaagccacatagtcacatattcaaatcccactaagtccacaaaaggacaaaataacaatggggaaaaatgaccattttgcccctccacactaaaataacatacaagggtactaagggtatttttgggaaattctaaattcccgaccactcccgacattcccaatgtctaataaaccgtc

SEQ ID NO: 279395 - DNA, 640 bp, Cannabis indica
agcgaatggtcttcaaaaaaagctagccttcctccaggatggagtggctagttgttcctcttggaaaaggcaatttcggatagccgactctagcagactctatcctatccagaaacttcttcaacgagtgtctttggtccgtgatctcaaaagctcatatacgttctcgaatgtactaagacttaagttgacgtggagatctcgctcaaaggagagttggttaagttagttgctcactaaataatttaacaacttcgactcttgcagccactgactttaggattttgatcctacctaagtctataaatatcatcttgacttgtcgtttttcagaatatggttcggattgagattgagatcgagagagagaaaagattaagaggtagagagagaggtacagagaaaagagagagattgagtttagattttcgtaagaagaatcttctgttgatgaagaagattcttgggttaaagcatggacggagcaaacatgaaaagttagggggcccaaactatattgtaaatttaagtataaaaaattttaatatttttattaaattcataattaaaattaaactacagaacgtcttttttgcatatcatgaaaatcatcgataagtgaatctatactaattttttt

SEQ ID NO: 279396 - DNA, 454 bp, Cannabis indica
tccttgatattgtgaaattcctctctatatgtctactcctctagggatactggattctttactttttggcaactacttctgcgttaatcaggaagtaacactagtagttaataaatgttggaataatgccaaaaatgtatagaactctccttagactgaataagtatctatcctgcaactttaacattctgtaaagaccgcatatgattaatactttgaattattaaataattagggtttatgtatgagattttattattattgataataatacaattatgtgaatttatttgagttcgtatatatttattatgctatttatgtaaatttctcaatttctgtgattgtgttcggaagctgtggaaagcggcgttggggctttagagagtcatattgtatattttaacctatgttatttgctcggggttttgtgttaagtattgaattgtcgggt

SEQ ID NO: 279397 - DNA, 729 bp, Cannabis indica
ctatgtggcatagacctacgtgttgctctcacacgtctatatatgtctatatggcatagacctacgtgttacgctcacacgtctatttacaataaggccttagtaaggtttatctcggttataattaccgagtctaacctggttatgccttgctcgcataaccctattcatatatatttacgtaatccatacattacgttctttcagtggtttatcctagtaatatactaggtctaaccaagttatgtcttatgcacttaactcttggcatatatgtatgcattcaatagatatcaaagcatatagaatcttagggtaataaccctaacttgcatactaaatactcattcctacaacatattacggtatgcccgaaataacatttattgagggtaataaccctaacttatgccttcatttaattaacaacataaccatacattattgcttccttacttttataatattctagggtaataatcctagaccacattaaaattaactcaaggtactagtttaccgagtctagcttaatcatgccttagacgcataattctttattccaacatatttatcatggtataacattcaacatcttttaactactagggtaataaccctagaccaaacaaccgctcattttagggtaataaccctaatcccggttcttaattgatcacaatcacaatattcaatatgagcgccactgcgcttaactctacgtgcata

SEQ ID NO: 279398 - DNA, 1115 bp, Cannabis indica
taatgagttcataaccaggtggagaaacctcaatctccaatgtccagaaaggatatcggaacaagcggcggtttcaatgtgcgccaaaaacctcaaccctgaggtggcaacttttgtgggcacagcagaacccaaaacttttaatgagctcgtctcgaaggcctgcaacgttgagatacaaatttctcggcaaaggggtggcaaaccctcaccgagattcgaaaataaaaagccattcaagaagggagaatcaatggcaacttttgtcaataccggcaacaaagataaagggaaggcacgggagccgcaaaagaaattaactctcaaagaaaggaaagaagttaagtattcattcgacgatgatgatgtcgaccaaattttcgatgagttgttaaaagctaaggcaatacgactccccgagccgaaacgacccaacgaggttggtatgacaaatgatccaaattattgtcggtaccaccaaattgtgagtcacccattgtcggattgctacatcctcaaaaacattatcgaaggcatgatcaagagaaaagagattgagattgactcttctctcgggaaagcgacaacaaatacaacttccttaaccgagaatgaccaaataccaaatgatcccacacaaagggacataatttctgtggcatttgaagtcgacaaggaagttacaatagtccaagcccactcagacatgccaaggccaggaaacccaaatattcctacattatatgagctcatgacagagcctaatctagaaatttgggaggactggtatgatagtgaagaggatttagaaagtacatggcaaacatgtactcggaaaaaaccggcaaaaattccatctcggaagccatctggaaactccggagtcaaatttcggagtagaccagatataaaggatcaaaagagtaagaaaaggatcggcaagcaaaaggccgtttccaaaagaaacgaactcgaacaaccaaaacgaaatctagtaactctggaggagtttttaccaaaagagttacgggacaaggcagctagttgtaatgacagtgtgtcggattgctgcatgactttaacaaaagaagatcctgaatctacctcacctgaaa

SEQ ID NO: 279399 - DNA, 774 bp, Cannabis indica
cctcgcgagccctcgtgagcccaaccttagaagtcctcactgccgcactctaggatgatgaaaatgagatgtatttttcccctacccttttgttattcaagttgatagggatgcgatcgagatcgtaggttcgcggagagacaatgagaagcacgattcgttggaggttggcaaatggtggtgagcttcgtctgcgatgttcatagagatccgacaatagagtttgggcagtattcgttgggttttcaggtttggtgaagatggagctgttatttttgttttaataaaaaagttttaatgaatttcactacattagtttaatgatttttatattttaactattatatttctttaaaaaaaaatatttaatttttttatttagttttctttaatttttatatagttaaatggcttttcaatatttttttaaaatatttaaataattttttttattaaaaaattaaaattaaatgatttagaccaatgagaagatgacaagtgggtacgttacctgtcacttaacggctaggtacctacggaagttccagaactctaatagaaggtatttttaccgccaaaaatacgacttaagtatttatctgctactcggagtaaaacttaggtattttggccgcaaactctaatttttattttaatatttaattgaaaaatagataacatatagctacttattatgagataacgtacgcttatcttaaaactgaccaatcactaattagattcatcaaggtactatatatatataagaaacct

SEQ ID NO: 279400 - DNA, 586 bp, Cannabis indica
aagaaagaaatggaaatagcttttgaattcattatagtttctagaagcttttgatagaaactcacaaaaaaaaaattgtgtcttcacaagtgaaccaaagacctctatttatagtgtttaagaacacacactttgaaattcaaactcataaccctcatggatgatatgtaactcatgcacacaccataactcccatagcattaagaatttcaaattaaaatgtgtaacaccttttacacacttaatattggtgataattgtggaggttacaaaatgtaagtaactccacctcttatgttacaatttatgtgaatattagatgtgatgcatttaactctcaatcacattatatacattaatctcatatcaatatataatatgtcacattttaatattttaatctatcttatattataacaatataatataacattcccccactagattaaaacttgtaacacgccattgtaacactatttaatcaatcaaatattatatatcccccactttgattgaataaatcaaacacttttatagagatcttgcttagatgcataaagtaaaatgtctttcgacttgaatttta

SEQ ID NO: 279401 - DNA, 947 bp, Cannabis indica
gcattacaagaaactaaaagagcacatggctaagccaccaatcctatcaaaacccgttctcggagagacttgttcctatacttggccgtctccgagaatgcggtcagcgcaaccttagttcgggaagaagagaaaactcagcatcccgtgtactatgtcagcaagcgcatgataggagcagagacgcgatacccagtgattgaaaaactagttttttgcctcctgatggcctcgagaaagttgagaccctacttccaagctcacccaatcaaggtattgaccaaccatccgctccggcaagtcctacaaaagccagaagcgtccggaagactcctcaaatgggcaatggagttaagccaatttgacctgcactacattccacgcatttccataaagggacaggcgttagcagacttcatcacggagtgcaatgaagccgaagctaccgcaaacatacccacaccatcagtcccagcgtggaaagtatttgtagacggagcctccaacgagaatggatccggagcgggggtcgcaatgatatctccaagcggacttcgactccaagcagccctacggtttgacttctcagcttctaacaatgaagccgaatacgaagccttgatagcagggctgagattagcaaaaactgtgggggctaaaagagtagaagtctacagcgattcccaactggtagtaaaccaggtgtcgggagaatatcagacacgcggagaaagaatggccgcatatgtggcgatagtccgggaactgctccacgagttcgcggactataaagtggaaagaatccctagagaaaagaatgcccacgcggactgtctggctaagttagcttcagacagcaaaatcgagaaactgggggtggtacctgtggaacgcttggcagagccaagcatcaaaataaaagaagccataacaacggttgggcaaga

SEQ ID NO: 279402 - DNA, 577 bp, Cannabis indica
gaaccaatggaggacgtcgaggagatatcagtgtgcgacctcgactccaccaaagtactccggctaggaaagagcctacacccggaggaaaaagaaaaaataataaagacactgaagggtgccattgacgttttcgcgtggtgccaggaggacatgactggcataagtccccacgtcatcacccatgtcctcaatgtcaacccggacatgccaccggtccagcagaacgatgtcccctcgactcagtgaaggccgaagccttagagaaagaggtggacaagctattaacaagcggcatgatctacaatgtttactgcccggaatggctagccaatccggtcctggtgccgaagcctaacgggacctggcgagtttgcatagacttcactgatctaaacaaagcttgcccaaaagattgtttccctctgcccaggatcgaccagattgtagacgccacctccggattcaagctactgtccttcatggacgcgtacgccggttataaccaaataaagatgcacacagcagatcaagagtgcactagcttcaggaccgataagggggtatactgctacct

SEQ ID NO: 279403 - DNA, 130 bp, Cannabis indica
caaagaaaaagatgatgcaaacactttccttgagtcaaaatttgaaccatcttctctataccaatttcaaatcctcctctctctctttctctcttcaattcgtaccctatagtgattagagtaagtgccc

SEQ ID NO: 279404 - DNA, 681 bp, Cannabis indica
tgttcagctttcacttgttgacaagttaaacatcttgcaacatattaattagcaatatcattcttcatgcttggccaccagaacatggtcttgaggtcttggtacatcttcgttgttcccgggtgaactgagtaaggagtcgtataagactcgtttaagatttttcttttaatattatcatccataggcacacaaacacgattcataaatcatagcattcccgtgtcatccactgtaaagttactagtctttctagtcgaaaccctatctcaggatttcactaactctggatcttaaaattgtgcttctttgatacgatccaaaagagtagattgtagggtaatattagccaatttccctacaacgaactcaattttagctcaggtcatttcatctggtagttgctgggagatctgcttcactatatttatttgactctggccttttctacttagggcatcagccacaacattggccttcccaggatgataaagaatctcacagtcataatcctttaccaattcaagccaatgcctttgtctcgtgttcaagtctttctgggtgaaaaagtaattcagactcttatggtcagtgtaaatctcacatttctcgccatataagtaatgccgccaaatatttagtgcaaatactactactgggagtaccattgtgctcgcttgc

SEQ ID NO: 279405 - DNA, 632 bp, Cannabis indica
ggtagtttagtcatttaccactcccgaaaaatcccatatatctccaatgcctaataatagtaccccgctattgacattctaaatcatacaaaacgtgactctttaatggcccacgtcgctttccaccgttaccgaacacaagcacagaaaacgcgaaaactcacatatatagcataattaatacattttcaatttaaataaatctccataaacatgtaaatcataattaataactcaatattgcaattaaccctaatcatttaataatccaaaatattaatcttaagcggtcattacagttatcatatactatctaatttgaatgaaatcaacggtaatcgagatcatttagattttttttagtgcaaaactttttatctatttattatgcataattttctttgacaaagagccataacttttcatttgaatattatttaataatgtcatgtattattttattgttcactattacaatttacaaccttaaaattttatagtgtattccatacattattgtttaaaacaaaattttaaaattattaatttaatttaaaatttaaattaataataaataataaaaaaatcaatgtctttacaagggtagcaaattcgatcgtttatagtaacgt

SEQ ID NO: 279406 - DNA, 524 bp, Cannabis indica
cattaccttatcctcttttgataattcggaatattagtcattctcttattttaggagcattttatggtatcattgctatttttctatggcatggccctaatctttttatagttcccgttgtgatatttgtggtttcggttgcactagatacttttaaatttgtcaaggactttaactctagtcattagctagtaataattgtgtcctatataggtatatatttatggccggccagagggtggggcagccggggcctaggccccaggccctacaattttagaggccccaaaaaattaaaattaatattatatatataaaaataaaaatataatatatgtgtatatataaattttggttttataattttcgtaaaagggctgccagcacaattggttagcgagggattatatgttggttggtggttgatgggttcgatttttgacttcctcaattcatagaaattttttttttttaaaaaaaaaatagtacattatttaaaaaagaataaatattatttataaata

SEQ ID NO: 279407 - DNA, 505 bp, Cannabis indica
aaataagttaaggctcaactttgggtatactatggtaaaatttctaggtaggcttgaaaggctcaatcggtccaaagaaaacttgcctaaatcactttccaaacaaaaattatcaaggatttcgcttcaagaaagtatgtcaaacaaattctatttcatgtacagtcaatcattccacaaaccaaatagaacagaagtgatatgcgtcaagaacaaatgttttatatctacatgaacaacctcctaacacacatccaccttaattcaaacagttgcaaatcaagcacacagttatgttttaatccattgcacaagtgaataacagtggttcaatcaatctttcaatttagctatcaacacatgacttaaaaaaaaactaaaaaaaaactaattaacgaaaacaaataaactgaaaaaaaatttaagtctctccccccaaactaaagatgcacattgtccccaatgtgtgaaaataaaccaggatgagagaaacttacctgagccc

SEQ ID NO: 279408 - DNA, 1268 bp, Cannabis indica
catgcccttttgaagcatgggtactattggccgcagatgcgggaagatgtggtggactacacaaggacctgtctcgtctgccaacaagacaaagtggagaggcataagacgccagggttgttagaacctctgtcggtcccaagcaggccatgggagagtgtctcgcttgatttcatctcaggtttgccgaagactggggacttgaatgcaatcttggtgattgtggatagattttctaagtatgcaaccttcatcccggtgtcgaagcagtgtccggcagaagagacagctcaacttttcttcaagcatatagtaaagtactggggagtaccccagaatatagtaagtgaccgagatcgaagattcacagggaccttctggtccgaattatttaagcttcttgggtcacagatgaacatctcctcgagctaccatccacagacagatgggcagacagaaagattcaatgggatgttggaggagtatttgcggcactttgtcaatgccaaccagaagaattggccgcaactactagacgtagctcaattttgtttcaactctcagaagagttcttcatcaaacaagagcccttttgaagttgtgaacggacagcaaccactgttaccccacacagtggatgaataccacggacggaatccgcgggcctttaattttacaaaagactggaagaagaacacagagattgcccaagcatatttagagaaagcttcacgaagaatgaagaagtgggcagatcagaaacgccgaccgctggagttcaagacaggtgacttagtgttgatcaaactgcggccagaacaattgagattccgaggggacaaggacatcagactcgtacgcaaatacgagggccctgttccagtcatctccaaaattggcctagcatcctacaaagtcgaactaccttcatggatgaagatacacccggtcctgcacgtcagcaacctcaagccgtatcatgaagatccagaagatccagcgcgcaaccagtctaccagggacgacatcagcattcaacgacgcagcagcagagaaccagaagaaatccttgccgaaagaactgttcgtgtgaagaaaaagaagagaaaagagtacctggtcaaatggaagggccttgctgatgacgagatcagctgggaaaaggcggaggacttgcagcagtttatacagaagattgaagatcatgcagcaggttcgtcgaggacgccgaacaattaagtggggagaatgtggcgtgctgccccatg

SEQ ID NO: 279409 - DNA, 557 bp, Cannabis indica
tctcctcggtcacttggggggcacctatacctgtacaaagtatttggtaaacataaaacaatcacaattgcacgacaattataaacagagaatgaaattcattaaggatgaccaaagcatatagtacctggattaaaagctgcgtggtcagcccgttgtccaaaaaatgaaaagtaattccaagtttaaagacctcttggtcggtcatgatgtcttaaaggccttgaggccacatataatatatatatatatatataaacaggagataaaaagagaagtgtttaaacagctggagtcccaggctcttggtttggttcttctaagccaactggagcaggaggatctgttgttcgagcaggagaaccatcaacagcctggtcagaaacttggccagaagttgatgcagccacctctttcccaccatagccaacttgggtcgcgcagtactcaaggtacatgtccttagcatcgcccaagtagtcaaaattagcctggggattagccttccaaaaatcaaagaagagctcgaggccggcagtctccaaagcattgacctt

SEQ ID NO: 279410 - DNA, 819 bp, Cannabis indica
ccctatctaggtccaagtcttttattaggatcgtgtccctgttttaggtccaggtccaggtctcaattctagtctgggtacacgaccgtgtccagactcgagttccattctcagtttgggtctgaggctaggtatgtgttcggttctacgtcaacgtccgggtcctggtcacgatcctagtcatgttctagggtcctggttcggcgattcttgttcaggttctaattttgggtcccaagtctaggtctcggttcaggtttggttcttcgattgggttctggtcctagtctgagtcccagatcgagacaccgactactggtctgttccaggccctgttacccgaatcccgagtcaagatctggatcactgtcacgggtctcggtgtggttttggttcaggtcccaggtcccatttctgagtttgagtttgggatcgagactgggctgcggttctagctcccgaccctggttctgtgacgctagtcttgttccatgtttgggtctgacttcaggtttggaacctgagtccaggttttggttgggatctaggtctgcctcccaattcgggtctaggtctaatttagagtccgggtcctggtccggttacggttctggatctaggtcaaattttagttatgagtccaagtccaagtcctaattccagtcccggtcaacttccggtttcggttccaattttgggtcagagggtacgggttcgggtccacttttgggttttggactgggttcaggtccggttgtgggttcgggtctatctcagggttcggctccagagctgggtcccaaatccagacaccgacta

SEQ ID NO: 279411 - DNA, 578 bp, Cannabis indica
attaaataaaactaacactacgtggcttggcacgtaacaatcacctagtatatatatatatatattgaacaataagagttatatagttatttaaataatgaattgtgatgaatgaaagatactaatttagtattaaatggtcatgtatttttttctaaattgtaaatattaattaatgttctcatttaaatattaaaaattcaggtttgaaggaagaggagaagttgataaatttaggatcaaggaatttcttcttgtgctcaaaggcaaagcgagtaatgtcttcgataaaatcttcttcttgttctgaggaagcaacctcattattaccattaacaaggttgatggatttgttattgtaaatatatttttataaaattatgtagggtacttatagcatctttaataaaatactaaaatagttgtatggtgctatattttaacacatttaaaaataagttctctaataatgtaataaaacttatattaaatttgacacgtgtgaaaattaaatttaacaatattaaaagttatatcaaatttgtatcttttcctcaaaaaaaaaaaaaatatcaaat

SEQ ID NO: 279412 - DNA, 484 bp, Cannabis indica
gttctggaaattcccccaacaggcagaccggttcccaaccggcaatccggttctgggtcaccaaccggtcgaccggttggtactggtctcccagaaccggaattccggttctgctgctgggaacccaaaaatcatcccccttaattcaattcaatcccaaaccttaccaaactctccagtatacctatacaatgcataaacatccattttcaaccaataaatcacagaagaaaccaacaaatcaaattatgccattaaagttcaaagcttgagtttcaaaactcaagcttgcttagaatcattatcaagcatcaaactagagagcaactaaggttaccttggttaaatcctccttgattccttgctaaatcccaatgaaaagagaagaaaattctggtttggtccttggtttgtcccagccgaaagcaagagagagagagttcaagagataattcaatttttccaatttttcttctttatctct

SEQ ID NO: 279413 - DNA, 520 bp, Cannabis indica
cttcccaaacttcattgtgttttacggcccccgcgtaccgcttaagttctttgcgggtggttcctccgatatggggtcctccagagatcatggccattctcccattgggcctgggcggcagaccggggatgtgttggccatctccggcgggagcaactggagccaatactcctgctgcaccccctggtgttccctgcggtacaacccctgtcgcctgacccgggttgaggtgaggcagccgattcttgatccactcatagaggtggcccaataggataaggttttcaatctcatccttgagatttttgcattcattggtgctgtgcccaatgtcgttgtggtactcgcatcttttgtttgggtccctccgtgagctatccttgtacaagggaggtggtctccggtagtgcgtattttgcctactagcaaagtacacacgctcttgggagtccgtcagctctgtgtactgggtgtaccatggagtgtactgttgcgatattttgcacacgcaagtgtacgt

SEQ ID NO: 279414 - DNA, 461 bp, Cannabis indica
agaaaatagtttttttttttttttactaattgcattccatataagaatagatagaaattattaatctcttatacctaccctattttttatatatatatttttcagatcattccataacgtttttttctctcatctctaaaagttgagagtaaaagggaacaaagtcctatagtgtagtgattattattatttaaaattagctctttgtgaaaaaactaatgagtttttcatcatattttttttaatttgtttattttccatgaccatttcatttcttgtcaaatgtagatgtgagtccaccaccataataataatgcttttatacctttttatgctttgttatataaataaatttaaattatctactgcccaaggtcacaccagcattatatatctaaaactttataatatctaaaatctaataatatatagtgctccgattatcataataattgtgggta

SEQ ID NO: 279415 - DNA, 619 bp, Cannabis indica
tccgccaatgacagcttcagcaccggaggccctagcagatccatctaccccactaccaactgcatcacccccactaccagctgcatcacccccactacaagaggaggaggtctttcctgacgggtatgatccttatgagggagctccagctactcccatcggtgcaggtgttatccatgtacatgacagcgagtcccagggtgaaattttggcgatagaggcacaacctgcaggggttaagagtcggaagaggaagagaaatccccctgtatggttccgtgactacacggagatgaagaagaaacagaggccttcttcgacgtttgatcccctggcgccaccggatgagtaattgttggatactttccgaaagtggtgttgtggactcattccgaaccaccgacttcgggatttgaaaagtggtgattacggtccatcattcttttggaagctgctgacactacaggaatggcttacagatgacgtaagtaaagtattttataattttactttactttacaactaatgtgcaattaatatattttgttgtctaactgatttctctaacctttatatgcaacatatagatgcagcaatgcatatgctgaggaggcgacgc

SEQ ID NO: 279416 - DNA, 674 bp, Cannabis indica
atttgggtgaactctgaaacaattctggtgttttctctcccttgtttttcatttttctctcatctaatctaagctatggttgtgtgtgggtgtgaatctgggtttcagatctagattcgagcaagttctcaaagagaacttgctctgctagggtttcgagtttgtgagtgtgtgtgtgaattgtgtctgagtgctttgggattctagactcttctattgagtctttgaatcaaaggtttcatacgacatcaagattggtgtcatggggttaatacggggtcgtattggtctaagttttacttagacaaggaaaggtcaattctgaccttaagactgatattattacctttgttggtgtagggttaaaacagtaaattcctacagtcgtatgagagcctggtttggctaagggagatcaacaaagattcaagaaaatatcaggaaggaattgtcaagaaaatcttgaaagaaagattgacaaaagaacaacactcaaacagcaagaagatcaagattcaaattcaaattccagaaacacaaactgagaaattctaaaactcttatctgtttcttttcaattttattaaaatgagtaacataaaagttgacattgataaatttgatggtacaggggattacagaatttggagaaggaaaattaggtctctactagc

SEQ ID NO: 279417 - DNA, 534 bp, Cannabis indica
ttacaaagtattttatttttttttttatttatttgaatataaattaacattttgatattatattttataaaggaatgcaatgatattttatttaaattctcaggtaccaagttactttagaaagcaggataaaagacaaaaagacaaaaacaaaaaaacatgttacttttgcattaaaaccagtcaaaatataacacactaaacctaatttaatatttaaggttccaggttactttagcaaacatcaggttacttttgatttgtcaataggttacatgtgtaagaaatataacacatcaaccaaatttaatatttcaggtatcgaattattttaaaaaatattgggttactttttgatgttgcgaataggttacatatgtgtaaaaaatgtagcacatcaacaaaatttcatattttaggtaccaaattactctagaaagcaaaataaaagacaaaagatggaaaattatgttactaacaaaattcaatattccaggtaccaagttactttagaaaatatcaggttactttttg

SEQ ID NO: 279418 - DNA, 728 bp, Cannabis indica
gccttggccactgcaaggttgtaacattcccgagcagactgctagtttcctcttagacaccctaccccattttttgttggaaacttcaggcacgagtgaaatatcgatgtgacaacttttaagtcatacaaagccagtcgacctagcattacgttaaaatttgaaggaacatctagtatcaggaactgtgccatgacagtcatgctcgtcggagcttgtccaacagtgaggggtagacgaatttgtcctagaggtgtcactccttgatcggagaaaccatagacaggctggaggcatggggttagatccttgagttggagtcccatcttttcataagcagttttgaataagatattggaagaggctccattatcgatcatagttctggcgaccattttattagctatctggacttccaggaccagcgggtcgttgtgtggaaatattttgacaacgtcttcatcgttgaaggttatggtcggctctcctgctcgtggaactttgggcttcctttctttcacggccaggataacttcttcttgctcgtgctgcgctgttcgggcatacctctcccaagatttgcccgaatctccagcaatgtgcgggcctccaacaatgacttgcagatgtccatctaccggtggaggtagcaaatcttggtttttgtcgttcctctgaccttgatcggtcttaacatatttttgaaggtgtggattgtttttccttat

SEQ ID NO: 279419 - DNA, 772 bp, Cannabis indica
ccttcgttttgttcggcttttgctcaccttctgctcgctgaatggcttcttcgagcttgatgaaaccttcggcccggtcgaggaaatcactcattgagtcgaccggtccgtttttccttatgtccttccatagttcgccaaggacttcaatgcccccagtatcgcggataactttccatcctcggttacccgtgacaccttggtcgcttccgtcatgaatctgctgatgtatgcccggagtggctcgcctggtcgctgttttacttcgaccaaatctcccagatgcaatgggagttggcgtgaggaagagaattgtgcatggaattccgaagagaaggttttccatgaactaaactttcctggagccaacttgaaataccattgctgtgcggcctctgacagagttgcggggaagattctgcaacatacgtctcctcgcaccccttgtaaatccatttgcatctcgaaatacttgagatgagagagaggatcttctctcccagtgtacatcttccacgttggcatcttgaactggtgaggtagtggcaggaggttgatttctggcgagaagggagttccgcatgcacggtctaactcaagatcattgttacgctgcccggccatgccatgaaacatattcttcagtttgtcaagctgggcctgtacggctgggctgacttcattggcattctggtcgggttgggctacgtcagcgtctttctgagcggggattttgagtagtgggctccggactgcacattcgttgtagtat

SEQ ID NO: 279420 - DNA, 854 bp, Cannabis indica
attagtttcacttttaccgtaaggacatttcttatttttgagatatggagaaattttaaaccatattttgttatatgatgtgtatattataattatactaagcatttagtttttggaaaaatctaaataatttaaaagtatcgaaaataaaattcaaacatttagttgtacaagtgtcttttttattttactggcatggaacgaattattttgaactttatttttaataccgtaaagtatttagaatttctcaaaagagatgtactgatatacccttatctattctagtatccgaaataattttttagtcaaattttttttaatgttcatgtaagttatagttatttaagatatcatgaaaaattttaaggaattcaagaaaatttaacacgccaaatcagtggcggacctagaatttaattggagggtagacgcaaatttttttcatatataaaaatattccaaaaaaataagtaaatataaagaaaaacacaattcaatatttcaattcccaactaaaaagatattaaatatcaagcactaaaaatacttctataaaaaaaaaaaaaaaaaaacaatttaaaacgatgttcaaaatatataacatactgaatatcctaaaacatcaaatatattaatttttgagttcatatctttagagttgtcctcgaagagttttcatgttttgaaaacgatgaatgataagctcgttgtcaatagcattgaatacatcattttcgagatatactgtcaaactatcattcaactattgatctcccattttgttgcgcatttgttgcgggcaattaaaataattaaaagattttttttttagttaagaagtaaaagaaata

SEQ ID NO: 279421 - DNA, 763 bp, Cannabis indica
cttcttcacaaacagaaccggagcaccccaaggtgagtagctcggtctgatgaatcccagattcagtaactcttgcaattgtatcttcaattccttcaactcagctggagccattcggtacggtgctttagacactggatccactcccggagccaattcaataacaaattcaatttcccggacaggtggcaatcccggcaaatcttctggaaagacatcaagaaactcgcataccaatctcgtattttcaggccctgatgtcacaggttggctagtgtccactgcagtaactatgaaccctagacaacctctacccatcaggtctttagctttcaacaatgatattctcggtatgcgtgccccctgaactttacccacgaacaccgctgggttagcactatcgggctcaaacaccaccatcttccgtttacagtcaatcatcgctccatacttagacagaaaatccattcccaggattatgtcaaaatcagataattgcaactcaattagattggcggtcaactcacaaccgtcaatccaaaaagacaaggaccgaatccaccttggataagatataataaacttaccgtaatatctatctaattcactatcacctagttgatcttagatcaaatgatgtcaatcctgagatggttaggttctagtttagttgtattatttatgttcttcaatctgttcgttaaagtcgaccaatggattttctcgtgacatatagattaaggacatgatagttcaattgagt

SEQ ID NO: 279422 - DNA, 720 bp, Cannabis indica
aaagtttggggaggattggggttgaattggttgagatatggaatttttagtgtttcctgcactgaaccgaaatttcggttcagagagccctgtaggaaccggaattccggttggcttccaggatttcctcccagaaccggaattccagttgaggaaccggtctaccggttgggggcaaatttgggaaccctagtttttcccatttttgtgttatttagggtattgccatgtggtttatcgatagggaaacttctagtttcaagtttaagtccccgggaagtgatttagcgtgtcacttatcagtgttgtgattattatgatttaggagcctgtaattcaccgagcagattgttccactcaggttgaccggcacacctgaattcggaatcgaggtaagattagtataatcttatgcatatgcttatacatgtttagcatacatgtcagttgtcatcagattaacatattagatatatgttaggcaaattttatatagccgtcagattagcatatcagggcaacaatgaggtgtacatagagttgcaccgagatgccaacagatatatgctaggctatcagttagtatggattaactgctaccacgtcgatacgactagagtatcgagtataggctggattcgcgattaatcatacgttttcatggacgtccttgattcagttacggttatggtcaagtgtatggtgttgggttttatgccc

SEQ ID NO: 279423 - DNA, 1011 bp, Cannabis indica
cggcattacctttatggcgagaaatgtgagatatacactgatcacaagagtctgaaatacttctttacccagaaagacttgaatatgagacaaagacgttggctagaattggtgaaggattatgattgtgagatcctttatcatcctggtaaggccaatgtggttgctgacgctttgagtagaaaaggtcagagtcagttgaattctatgaagcaaatctcccgacagttagcaaatgaaatgactcgtgctcaaattgagttggtcgtagggcaattagctaatattaccctgcaatccattcttctagagagaattaaagaagcacaaaagcaagattcggaattgataaaaacccgagctagggtttcggctgggaaggctagtgatttctcagtggatgaaacgggaatgttgagatttggaagtcgagtttgtgtgcctatggatgagaacatcaagaaagagatcatggatgagtctcacatgactccttattcggttcatccagggtcaacgaagatgtaccaagacctgaaagccatgttctggtggccaggcatgaagaatgacatcgctgaatatgttgcaaagtgccttacgtgtcaacaagtgaaagctgaacatcagaggcctgcagggttgctgcagccattgaatataccagagtggaaatgggaagatattgctatggacttcgtggtaggtttgcctagaaccacgggacagtttgactctgtgtgggtcatagtggacaggtttacaaagtcagcgcacttcctacctgttcggacgaatttctccattgaccagtatgctgagttatatgtcagagaaattgttcgtcttcatggtgtcccaaagtccattgtttcggatagagatccgaagtttacatcaaaattctgggagagtctgcatcgagctatgggtactcagttaaagttcagcacagcttttcatcctcagacggatgggcaatccgagaggccattcagattttagaagaca

SEQ ID NO: 279424 - DNA, 543 bp, Cannabis indica
ccaggcgaaataccaggagctaggaaaattcggttggatcaagtggtggtcagggagctcagattctcctaaatattcgcggccttggtagaggtcctagaggcagggcacgtggtcggggtgatgctaacccgccacaggctgcccaagctacccaagttgcccaagagtgggaaaacaggtttgcagaaatgcaagctaggattaatgaacaagatgataagattcgatgcctccattaactactcatgttctatattccacaagggaatatcaacaatttaactcatattatctttctaatctgtctatcttgttaaataggttaccactaaataacatacatgcacaatccattcagatttcttgatgtctctaactaaatgtacaatgtttaatatcaataaaaattataatattgcccataaattctaacttgagtcggccgaaggaccgatattcgggtccccttgaatcataactggcacttaggcaggatccgtacacttttcttctttaacatcaatctttcttaattgtggg

SEQ ID NO: 279425 - DNA, 624 bp, Cannabis indica
taaggccttagaagtggttcatctcggttatgtgtaccgagtccaacctgattatgccttgagcgcataatccataaatttcatttcaattaacatggcatggcatttatacacatatttcactagggtaataaccctaggctaacaaaccgttcctattagggtaataaccctaatcccggttaccataactcacatatatcatattcaacataagcgccactgcgcatactctacgtgcaaactactgtcttacctgttgtccagctatagaaggagattccgaatccccgggtgctcctgatcaggtgccggtaatcctagtcacacaaatccgggataattcatacttagggttaacccctgacttttaactcaataaaattcaagcatggcatttacaattcagataatcacatagagctcggaacgagctttccaacgatataaagaactcccaaatcagagttcggaatcaaaagttacgaactatcaaaaattactcaaaactgcccaaaaacacgagggcgagccgcagcatgccccagaccatgccgcggcacctgggacaaattcccaggtccatacaaaggggcgggctgcggcatctgggtgcagaaccca

SEQ ID NO: 279426 - DNA, 891 bp, Cannabis indica
tcttgaactatacatggtgaaaaattcacattataggtcattatgcaaatttttggtgaactttggacatacctttgaactagtgaatatgtgaatttttacatatttggctagtatatgtgtttatatgtttgaacatgtccaaatgagtgtatttagcacgcctaaaggttttcttgattgaaatatactttaaacaaaattttggtatgtcatttgcttattttcaactttttaaggccataatgggtgaaattagccaaaatttcatattgttgagaaaattgttgttttgaaagcttgtacatctctaaatactcatatataaactgtctcaaaaagaatttttcaaaaataatgctcaaatcttgattttggtactatcttgcataattttgactttttaagacctaaaagagtgtttttctccaaacgtgctcaattttcattatttttcaattccgtaagtttgtacacctcacatttgatatttttgacctactggaaaaagaatttttcaatttggttgcatagaactcatttttggtagatttctagtttttaagcaaatcgaaaagcttaccgaaaagttaggatttttgacttttttctgattttcttgtttgagcatgtttgttttatcatatatcagctgtcaaaaaagattttgcatgaaaattttgcataaaatcaatttttagtaagtaagttgcttaaaatgaccttatatgaccaaaacgagtaaaacttgccaaaatctctcatttttgaagctttttctatttttccagcttgtacacttcatattaatcatgtttaagctgatacaaaaagaatttttcaaaaaggatgcataaaactaatttttggtacatatgttgtttttgctta

SEQ ID NO: 279427 - DNA, 515 bp, Cannabis indica
ctcaattgtactaccgtgttccacaaatgtatgtatcaccctaactaaaaggtaggcttaactaacaaatcaaagaacacaaataatactcttgagatcgaacctaaccatctcaagattgagatcatttgatctaggatcaactagatgatattgaattgaatagatattacggtaaaattatcatatctagttcaagttcaatatcggtcccttcctatgcatactccaaacatccaacccaaacttactttaaccaatgtcctggaaaggacatagcacttatccaaggtgtaagtaaactacattgtagattatcatatcagttaaaccctgtgtactgataaatctaacaatatatttaatcacacaatcttgtttactttccactgtgttgacaacacaataaacaagaatatcagtgtgataaggatctggatgaatttattaatcaaataagtaaatagatgatcacatgaaccaaataacacattaaacaagcaatgaaattaaat

SEQ ID NO: 279428 - DNA, 596 bp, Cannabis indica
taatgtatttcgtttttctttttatcttttttacatatggttatttttttttcttaatatctaattttttctccatctttaaagtttgagataaataatcggtggggaggagatttctgagtaaaacgccgggatcggtcggtggtctaaatatttggaggttagttcttacaatatttgtgtatatatctcataaaaatatttttttttctgtaaaaaatatgatatatgtatgtgttatatttgaaaaatttatatatatactcttatatattatatattcatagagatttaggatttatagtttagtgtaattttaattgttgttttgtgtatactgtatattgtatattatatattttgtatatatactgtgtattgtatattgtatagtgtatatattgtcagtttatacactgtgtatacagtatatacagtgtatataatgtgtatacagtatatacagtacagtatatacactgtatatactgtatatataaatatacacagtatatatactatatatacacagtatatactgtatatttaatataatgttatatattatgtaataataaatgtaatttatagagttt

SEQ ID NO: 279429 - DNA, 619 bp, Cannabis indica
attcttagataataatatagtcttagcttagctgcatatcgactttcaatctttgggtccccttgcccagtgaacattcctcactatatatagggctgggttacttgaggaggaagagtttctctctcgttacaatgcgcagaaacagagagatcgtgtgatcaatgctgaatgcaaggatcgtgggattgaggctgtgtccactaatagtgggatcgtgtgtatgccacatccacgtaagttgaaacctgagttatagagattgagctgatgactcatgatgcaaatgctgaattcgctaagtgttgagtgctctgcacagctcgctgaatatctcattctgaatgtgccagcgaggcatgctgcccagtctatcctccaagcagatgctccaagtagactccacgtgtcaccattctcgtgatgccacgtcagagtgtaaaattagggataacatttgcccctaagtctgtacgggacctctgaggttgcgtgtagacttcttctgagctggctctgcctttggatggggacacgtgttgagtatgaccgttcgagacccgatgtgaagctgacagagcgtcccttcggttttcggctaattaatgctttgacaatt

SEQ ID NO: 279430 - DNA, 523 bp, Cannabis indica
cttagcatgttagtattaggggacggttatttagacattgggaatgtcgagagtgttcgggaatttagaatttcccaaaataccctttagtgccctttatgttattttagtgtggaggggcaaattggtcattttgccccaatgatattttgtcctttagtggactttgtaattggaaattatgtgattatgtggcatttgtttggctgaaataaagattcatttatgcatttactttcattttattcaaaagcttgaaagttgagaaaaaccaaagttaaaagaaaaatctttttctctcaaattctctctctattttcggcccctttgagcagctgggatttgctccttcttccttgagatttcaagtgttgttgtgttcaatccaagctaggttagctcattctcttcctctctttaaaattcttgaaaatattgaaaagatgattgttgcatgtatgtttttggtgttgttgctgctgttaattgatgttgttgtttttgtgattaaaatgctgaatta

SEQ ID NO: 279431 - DNA, 578 bp, Cannabis indica
catgtgggtcgagatcctccatagccagattttctgtggcgtcgcctaagagatacgttgcagagatcacctccaacggagaagaagacgatgggccaaagaagaaaacgccgctgaagacatcgccggagaagaaggaagacccgctgttagtgctagcctcggagaaggctcgggttaaggtgtattttctgggttgagaaaaggctcggctggggtaaattttctgggctgagagtattaatttgtgggttggttttttttgtttgcgtctttgctatgttcttcagagaagaacaaaggtctcacggtaagataattgaaaaaaattgataaaatataatataataccaagttttaacgttttgtggggttctaatatcaaagagtcaaaagtttctttgactgggtaaaggtctgattttaccattgttttctttgactggtttatctcttgctgtggtgtaggcattaattcctacgttatagtttgtatacagttgtttagtagttttattatagttttgctacttgcatatgttatttcattctaaaattaatatgcaactatgtgcaca

SEQ ID NO: 279432 - DNA, 497 bp, Cannabis indica
tgattatattgaaatgagttctatttagggcacaaaacccaacacttttctccccaagcctcatattctcctgatacgtgatttaccaccagctgtgaatcactgcatatttcgatatgttcggcgttcatctcccgggctagctttagaccagcgatcaaagcttcatatttggcctcattgttggatgctttaaatctaaacttgactgcagcgtgcaggtgttgcaccctaggtgtgacaagggagattcctacgccagatagttgatctgtagccgacccgtccacatgtagtttcaaagtcagcttgtcttcactgttacttggctgaggtatttgtactggatcggggttgccttctgatatgctttcttccttcctgtgcattctactacaaaagtctgctaaaggcctggccttttagtttgctgttcagggtttggaaagtaattctatactgacccaatctactgtccacttgagtaatcgtcacga

SEQ ID NO: 279433 - DNA, 556 bp, Cannabis indica
ttccggacgcttcaggtttttggaggacttgccggagcgggtggttggttagtatcttgatcggatgtgcttggaagtatggcctcaatttcctcgaggccatcaggaggcaaaagaccaacttttcaatgatggggtacctcgtttcggctcctatcatgcgcttactgacatagtacacgggatgctgagttttctcttcttcccggactagggcagcgctgaccgcgtgttcggagacagccaaatatagaaacaggtcttctccgagaacgggttttgacaggatgggaggcttggccatgtgctcttttagctttttgaatgcctcctcgcattcgtctgaccattcgaacttctggcatttcttcaatatgttgaagaaggggatgcacttgtctgtagaccgtgagatgaagcggcttagggcagccacctttccggtcaggctctgcacatctttgtgctttttgggggatggcatgctcaggagagcctggattttttccgggtttgcctcaatccccctctggctgacgatgaagcctaggaattt

SEQ ID NO: 279434 - DNA, 533 bp, Cannabis indica
gtcccgagtgcgggtcctagtttcggtctctgggcgtagggttctcggtcttgatctaggtccagcattttgatcccagtctgggtcttggttaagcttccaggtcccatttcagagtttgggttcgggatcgagactgaggagtggttctaggtcctgaccctggttctttgtccctagcatggttccatgtttgggtctgagttcaggttcgggttcgggtcccgagtccaggtttgggttgggatccgggtccggctcccaattccgttctaggtctgattttgagtttgggtcctggtccagttacggttctggatcaaggtccaatttcaattatgattccaagtccaagtcctagtatcagtcccggtcaacttccgcttttggttccaattttgggtcacagggtacgggttcgggtccacttttgggtttgggactgggttcatgttcgggtgtgggttcaggtccttgtcagggttcgggtccaaggctggatcataaatccagacaccgactacgggttttgt

SEQ ID NO: 279435 - DNA, 655 bp, Cannabis indica
agtttaattaagagattaattagagaacatgtggtttagaacctaaaagatctgaaacgagttaggttaattttataatctgtcattcacatcaagaacatgatagcaattaggcattaacaattgggtaaacaaacaacaggattctcctccctatcttctcatcttgattaatattcacttgtttctttaagtttcttgaattacttttattttgtttaaatcttgaaaattatcgatttaccgaatagaatcataagtataatttagtggtaattaatccaattgcctgtggttcgacctcacatgggtgagtccactacttgattacgtgcacttgcgtattgttttataattgtcgtaacaagtttttggcgtcgttgccagggaattgtataaagattaatattacataaaattatactaagtttttggcgtcgttgccggggaattgtataaagattaatattacataaaattatacaaacttctactttggtctatttctcttgctaatttctaatatatttcttgcaatattgtctctatctatttcagggattttaagtgtatgcgccgtcaaggacaaggagtcatattgcccgttgatcttgaaattgatgttgggttttgtgccctaaataaaacccattac

SEQ ID NO: 279436 - DNA, 290 bp, Cannabis indica
acttatatagagcattctatatattccacgatatagatatgctatctaatttaaccattgttataatcttaatgtgatcaaagatcctctatatagatgatttacatcgagatgggataaatttaccgttttcacccctcaatgtatttggccccttaaaacacttagctacctgtaaatgatgttttagtgatctaagaaatagtcactgaaacaagagctcatccatttacttctatttagctaagctcaaagggaatcatcacttgacttctatacaccagtagaag

SEQ ID NO: 279437 - DNA, 600 bp, Cannabis indica
attatatatgacaatgaccgataaaaaagttgtctttatcaaacttactatttaccataaatacctaattcatatcataaagataatcaataatagattgacctaaattttgagtaatcatgaactcatgttcatgttataagtttctttgattcactcgttaaagtttctcagagaagatgattcttacaacttctattttaggaatataataatgtggatggttgggaacacgatctacaattaaggaatcctaacattcctaacggatcgaatattgatttctattatgtattaattttggaactggaaagttacatgcaaatttagatgggatctaaattatacttctacaagtgaattaatggtactaaaagataaagtagtaattagaaaggtaaaatagtattttgaccaaaactaattacgaaccaacacaaggagggcaaatcactagaattaattatatcaatagacactgcagtaaaactcaataaatataattatataattactaagagttcatttccatatttataatggagtaatcatggaattaataaaacaggattatttagttaatgagactcaataaataat

SEQ ID NO: 279438 - DNA, 1027 bp, Cannabis indica
gagaaggagaaggcggcaagaaaatccaaatgcctccgaacagacaacggtggcgaatatacctcagatgaattttctgagtatcttcgagaatgccgcatacgccatcaattcacatgtgcaaatacgccacaacagaatggagtagccgagaggaagaatcgccatcttgcagaaacatgtcgaagcatgctacatgcaaagaatgttccagggagattttgggctgaaggtatgaagacagccgctcatgtaatcaataggcttccccaggctaagttagggttcgtttcaccctttgaaaaactgtggggttgtaaacctgcagtaagtcactttcgagtatttggttgtgtgtgctacgtattcgtgccaagccacctacgtagcaaatttgacaagaaggcgatacgatgtatctttgtgggatacgacagccaacggaaagggtggagatgttgcgaccctacaactggaaagtgttatacatcaaggaatgtggtctttgatgagacatcatcatggtggtcatcgcaaaaggaagcattaccagattctaaagaaatggaagatgaattgcagaagaaaatgggggagcaaattgttgagttacctacaacacaagatacagatgaagaagaaaacagcgaggatgaggcacctcagaatccatggcaaacaggggtgcatcaaagagaaggagatgatgatagtcaaccagaacttcggagatcaacaagagcgcgaaagccaaatccaaaatatgctaatgctgctgtagctgaagaagaaaagttcaaagaaccagagtcatatgaagaggcataccaaaactccaagtggctaggagctatgaaagaagaaatacgtgcgctagcaaagaatcagacttgggagttggtaccaaagccgaaggaagtgaaacccatttcgtgcaaatgggtctacaaggtaaaaactcgtcctgatggttcaattgagagatacaaggctcggttagttgctcgaggattctctcaacaatatg

SEQ ID NO: 279439 - DNA, 611 bp, Cannabis indica
gccacagatcagaaaagaaaggcatctacaacaaccagtggctcgggtaagaacaacaggttctaggggaaccaggataaaagcaatcgtcagagtggcaccgaaacccgatacacttacccggagtgccccagttgtaaaaagcaccatctgggggagtgtaaagggcatgggtgctttcagtgtggtatgcaagggcattacaagagggattgtccccagctcaggactgaaacaccaaagactgcagcaaaacccactccagctagggtgttcacgataactcaggctgatgtagaagctgttggaaattattttaccaggatcttagatctactcacaagtatgttgattaacaccctaaatatgaacttctaaaatgataatgaaataaacacatataaagtattagaaatcttacatttggtgcagcggaataatatgactccttccgttcagatctctaacccttgtatcctttctgtcgcagagtattataaagatctaaacctggatctctttctctccttcttcagtgttgaaactccttcttgttgaaagtctttcttcacaatcttcctcaaaatgattgacgtatcacttgctgtgtg

SEQ ID NO: 279440 - DNA, 497 bp, Cannabis indica
agctcctccctctactaccataaataatcccaaccagcattgattgaaaactatccagagaagtaatgggcatatagctaaactaacgaaaacgtaaaactgaaaactcaagaaaatatatgagtgcactgcagtgcagcttttccaagtaaggaaatccaaaagtgtgcatcgtaaatgggaaaaagaaagaaagggcaaaagcaaaagagtaccgttgaagagaagccgaggacggaattgaatgaaacggccatagtttttgaggtggacgttgggtcctaacggccaaccatgaaaggagaaggaagaatttggtttgctttgggttggcgataaggtgaaggtgggactgagtgagagcctctacctctatctcagcgcgtgtaaaccacctggtttttaataattcttatttgtttcaaaatgggtcctttcgagacatcccataaatatagatcacttaatttatttacaaaataccttcactttttttt

SEQ ID NO: 279441 - DNA, 527 bp, Cannabis indica
gtggagggaaccttcctgaagaggtcgagggtgcggatgctgaggaagctgagaacgaagtcatcagcaaagtcgcggatgagactgctcctattgttccagatgtttgattttcctccatgttaaaactgttaagctttttaactttactttttatgcggtacaggggtactcgcgctttgtacttagacaaatttgctttttattttggacaaatttatatcctcgcggggataattatcctttaatattttcgcagtacacgggtactagcgttttcaatatatatatctgcgactttaattacagcttggtgtaataagtagaaatatttacaagtttgataaaattttgaaaatttaacaatcatgaatcaattttctttatataatcaatagtacattctggcatatatatccccctatacttaggattttttttttttttgtatgaaaaatatataagtataagtacaagagtgaacatagttgaataatgcgagtactattgataatataattttaaac

SEQ ID NO: 279442 - DNA, 606 bp, Cannabis indica
cctcaacctcatgacataccggacaaatggggctaataaccacatgacgcttgagaagttgcaaacaagttgggaggatacccgaaggtgctctccatataaagttactaacttttgggggaatctttaattttcacatttttctctaaaaactagtgttgtcatcgtccaaccaatcatatttgagattttccaagaaacgatacgcactttttacggtaaataggccattatattctaaaaaaaacaatacttatgctctcaactaagtttttgttttataaatatatataaggttttattaccttatttattatgttcctagttctctattaataatgttcttcattttcatgatatttctattttatagatgtgctcaattatacaagttaaaagtaatataaaaaaatttctgtatagtataacctaaaataataataacctaaaataataatatatgagagaaacattattttttttttaaaatctacagtttcggttgtttcggtagttactgtggtagtttctatatatatatatatctattttatataaaatgtggctatataacagaattcttgatttatgagaaattattgggtg

SEQ ID NO: 279443 - DNA, 626 bp, Cannabis indica
caaaagctcatgccttttaaccttagtcacaaacagtggcagcaagttctccacactcatttttgccttcattcttaagaacaatcttacttgactatctttcactaaaacttctggcggtatcatattgcctttcatgtacatataacacacctctattttcagttcatacacaatagggtctatatccaactcttcatacaaaatatcattcatcttttctaaagtagtgtcaacctcaaacattaacatcttactttttggattattgaatatccagttgaaaccttcaactgcccaagccccatcatatagtacaactacaaacacatttgaatctgcaaaccaaaatgaccacaaattataacaaaccaatatgttgcaagatatcgcgaacctatcgctacttatcgcgaaataattacaaaaaacagtaagtcgacaaacgtcgctaacatgtcgagaaaaataaaattatccacaatttaacacaataattctatgtgtcgcgacttgtgtcgcgacatgtcgatacatgtcgctaaatgtcatccctaacctcttgtcagctcgtaatcgctaaatgtcgctaaccatgtcaaaaaatatcgctaaaattgcaaaaa

SEQ ID NO: 279444 - DNA, 685 bp, Cannabis indica
ataccatctattagagatgataaggaaaatactaaaggagatactacacatcataaatagtggcagaccgttattgatgcattttaataatgagtttcacccattttaagttagtgaataatatgaaaaacaactaactaattattaagtgtcatatttgtatagtattgaatatattaaggtgccaataaataataataatattttattaataataataaaaaataattcaccatacaaaattgtacaaaaaaattatacatagaaaaaattattcataagaataaagaaaattacgatcattgaaaacaaaaccataggaggtgttgtaaaaaaaattgtcattcataaaactattaagagaggtgttaaacaccataaatagtggcataccattattaccttattggtcccaagcactacaaattagcaaaaaaatcacacgaagtattgtaaaaaaaaaattgtaaaataaataattattaaaaaaaattaataataaaaaaatgtaaaaaaaaattaataataaaaaaatgtaaaaaaaatcaacaaaatgaaaacaaaaattgaaaaacataatattagaaaaaatgtaaaataaaataattataaaaaattataataaaaaaattagtataaaaatcacaaaatagataaaacaaaaaaaaaaataacattataaaaa

SEQ ID NO: 279445 - DNA, 578 bp, Cannabis indica
gatcaaattaggattataactgtaagtgtcatgtctttgagtggcaaattatgtaaatactcttgtttagtatttctgcatcagtattgtccttctaacatcttttctgtggttagttgtcatctgatttcgctaaatcttttttagtgccatgttagctttctggtgtttgttagattgtgccagttgtacttagctggttggttagttagtcaatttttattatcttcaggatatatattctgttgtgtcggttagaatcatcttcttgattcttgctctgctagggcacaatatatctttgtttttgttttgttgtttgcagagagagattccaaagttcttcctgaggttgaagatggagttcgaatctgcttgatctgaagggagttcagattactatgctgaaggtggttcagttgtgtgtatgctaagtgttcttgtgtacagagatctaaatgagtttaaatctcaaagcttgaggttgttcaagtgttaggtaactttgtataaaattcaatttagattacattatttgatttgaagaatcagaactagaatttgtaattgaattgatt

SEQ ID NO: 279446 - DNA, 253 bp, Cannabis indica
caaattcatccaaacccttatcacattgatattcttgtttattgtgccgttcgcacagtggaaagtaatcaagtagaagtgaaatgatgatttccttcgagctttgctaaatagagataaatggttgactactcatttcagtgattatgttagttcactgaaatatcatttataggtggctatgtgttttaaggtaaaatacattgaagggtgtaacggtaaattaatccctatacaatgtaaatcatctata

SEQ ID NO: 279447 - DNA, 689 bp, Cannabis indica
acatgattttcttcaaataattaagaagtcaccttttaaccaaaaaaacaaaaaaaaaattaagaagtcacctttgtcgtgatttgtaatggtatagtacaaatcataaagttttggggttaaataatttcagtgaagtacaatcaagtacaaacttatatcattacggtaacttaaaattgctttgcatcaaattagaatcgatggataaaagaaatgggaaatgatgtgttttaaacagtaatgacaaatatttctcaagtatgggtacattgtcaaagttaatatggtgtgagtacaaagatttgctaagtatggtgcaatctcaaagttaatatattctcaaaactaaaataaacacaagtctgtcaacataataaccagttccaaacgtgaactaataaaaacagatgtctaaatccaaatgttcccaaatccaaactaaacaacacactaataacacaacctaataataacacaagtgttttttacagactattcaccatatgaaatcttagccttgctagaccgaatcctaggggaggctcttgaggggggaaacatgtttgcgtggcgagacttcgccgtactgaaccgaggatcgcgtggagactttgacggactacgcaaaggggccgaggatgatgcaaatgagctgccttgtgcagccctacgatcttcaaccactt

SEQ ID NO: 279448 - DNA, 577 bp, Cannabis indica
taatttctaaattaaactaagcggtctttacactgaagctgtataaaaattcaagcttggacttctcttgaaaagatcaaagggtgaaagagtcgttgggagtaaagcagacttcaagcagtccttccagtccgagaaggagggttaaagacgtacgacacacccaacgatatttcacagatggacatgcagtgtgcatgcatcccccgagtttcggaaggctctaggaggtgcatgtttataccccaggatctcatgggcactctgtctccgctggttaagcgcgaggcatttgagggtctctagagcaagaacccggtctcttaacaagataagcatgtcacaaggactccctaacttatttttaatggcccaagttgctcccttctgatgtaaccccggggttgcagctacactaggcaacaagaacgacattaagtgaactttgcccaaagttgtcagcctctaccaacagtaccataatcaagcctcaccgataacccagcaaacgctgacatgtactaaattgtgccccctgaacttttttggccataaaaaattccccccaaactattga

SEQ ID NO: 279449 - DNA, 550 bp, Cannabis indica
atggtcccagtggaaacattattcccatcccacaggagaacaacttacgatccaacaacaaacaaggctttattacaagaagagttggatcagattgacgaattccgggatgagtctcaaatacgaatggtggcttatcaaaagaaattgaccgagtacttcaactccaaggttaaaggtagaaaagtcttcccagccactcaagaacctcaagaagagtcttcccagccactcaagaacccggagtgggggtacttgggccaaattaggaaggaccatatgaaatcgaggatgagatcggctccgagacctacaagctaaagagaatggacagaaacatggtgcctagagcctggaacgctgatcacctccgaaagtattaccaatagtcagaaaatgtaaacttaggctttgttaagaaaaaatttgtaccaaaagagtacatgcaacctccaaatttatgcataaagctgactgccttaaaaacaattttttcatgccactcaggggggtagtaaggcataccacatggacaaatgtaaaacatgcc

SEQ ID NO: 279450 - DNA, 339 bp, Cannabis indica
tgtgggcactcactctatcactgaaggtataaaaatttgaagaagaaaggagagggtgtaggttcggctataggtaggaggctcaattttctgaagacaagaaattttatcaatctttaagtgtgagccatcactatctatttataggcaaccactaggatttaggttagatttatttggcattaaaatattagaaaaataaatggtaaaatctacactaagtggccagccatgggtattggattgggacccaatttgtaattttgccattttgtcatttttccatctcattttctgaaaaacgccaattttccaatttaaccacttaaatgccaattc

SEQ ID NO: 279451 - DNA, 707 bp, Cannabis indica
gcagattcatgacggaagcgaccaaggtgtcgcgggtaaccgaggatgtaaatttatctgcgatactggggggcattgaagtccttggtgaactgtggaaggatataaggaaaaacggaccggtcgactcaatgagtgatttccttgaccggaacgaaggtttcatcaagctcgaggaagccattcagcgagcagaaggtgagcaaaagccaagcaaaacaaaggttccttctactggaacatccgccccacttccccattattccaacagttcaagtggcaagcgttcaggcaacaaccacaagcaaggaaacgggaagaagggaaagttcaccaaaaagtccggacagactccccgtgatcacgccaaacacactacattcactatcctaactgaagatatagagagtgtgtacatagcaactcagtcgttaattacgtacaagaagcctgggcccatgaagaaagatgccagcaaaagggacatgacgaaattttttcggttccatagagactacgaccacgacaccaacgaatgctacaacttgaagcgggaaatagaacttctgatcaagaaaaacaacccgcacttacagaagtatgtcaaggccaaccaaggtcagaacagccaggatctgttgcctccaccaatagatggacactttcaagtcattattggaggcccgcactgttggaaattattttac

SEQ ID NO: 279452 - DNA, 608 bp, Cannabis indica
ttaattcctccttgcaccactatagaatttggaattgcactctcaattatatagaacgctctatatgttccacgataaagatacgctataatattattcatttgttattatcccaataatcaatggtcctctataaatgatttacattgaatagggattaatttaccgttactaccttcaatgtattttatccttaaaaaacttagctacctataaataatatttcaatgaattaatataatcactgaaatgagtactcaaccatttatctctgttaagccaagctcgaaggaaatcatcatttgacttctgttaacgcagatttttgttagctaaatttgagcctcacggtaatgatttcacatagaaaaagtaaaagctatagaaaataatatatgaacatagggtttttttaagtggttttgcagttaaaattttgcatagtctacgagtcaatcttattcaaatttctgatttttttagggcctctcttgtatgagattttttggtccccctttttttttgagtcttgtctggcactatatataattacatagtgggcagtaaattacaaaagttgattacaatcgttacaacaattattctct

SEQ ID NO: 279453 - DNA, 693 bp, Cannabis indica
aaatgaagattgaaatccaccaatgactatcaatgaagattgaactgatatttagcatatttcaactctatatataatcacaactataactctagaaattaaaaatatatatataaaataaattgaaccttaaaccgcatatacaattagtttgttgagagagatcaggaaaagaacgaattatatatggaattttttttaccaaatcgtttaggtttcctctagctatttatcttcatttatatattttttttcaatcgcagtccactcccactattcaatgaacagagcaagcaaattcttattgccgtctagatggatgagtgaatctgcgaaaaatggaggatctgacgcaaattcgctgtgagaaattcaaaaaaatcgtcccccaatttcaggttctgatccaattgggtcttctttttattcgtaaatcatcccccaatttttaagattaatttttcattttctaacattttgggatttttgtctccttattgaatcttttcaaatctgcattgtttctatcaaaattaatgagctcacatcgttgttgtgttatacggagactaaactatgccatttgtatattcatatacagtcctttttcttttctatcttcgaaaggatagttaataaatataatatatagctttttttttttttagaaataatatatagcttttttttcac

SEQ ID NO: 279454 - DNA, 712 bp, Cannabis indica
acaatcacaacctatccagatagtctttaaacacctgattcatcaaatccatgaatgtcgcaggggcattagtgagtctaaaagacatcacaagaaattcatagtgtccataccgagtacggaacgcaattttcgggatatcttcctctcgaatcctcagctgatgatagcctgagcgaagatcgatcttaaaaaagactgtcttccccttcagttgatcaaacagatcatcaattcgaggcaaagggtacttgttcttggtagtaagcttattcaactcccgataatcaatacacattcgcagggttccgtccttcttcttcacaaacaaaaccggagcaccctaaggtgagtagctcggtctgataaatcccaaattcaataactcttgtagttgtatcttcaattccttcaactcagctggagccattcggtacggtgccttaaatacaggatccactcccggaaccaattcaataacaaattcaatttcccgaacaggtggcaatcccggcaaatcttctggaaagacatcaaggaactcgcataccaatctcatattttcaggccttgatgtcacaggttggctggtgtccactgcagtgactatgaaccccagacaacctctacccatcaggtctttagctttcaacagtgatattctcggtatgcgtgccccctgaactttacccacgaacaccgctgggttagc

SEQ ID NO: 279455 - DNA, 633 bp, Cannabis indica
gctgcggtagtgtttgctttgaagacgttggcggcattatctctacagagagaaatgcgagatttataccgaccataagagcctcaaatacttctttacccagaaagatttgaatatgagatagagtcgttcattggggtcggttaaggattatgactgtgaaatcctttaccatcccgtgaaggccaatgtggtggctgatgccctgagcaggaaggctcctgggcaggtgactaatatggttaagatttcacctcagttagcagatgatatggtcagatcaggcattgagtttgttgtaggcaaacttcataatttgacattgcaatctgatttgttggaacaaattaaagttgctcaattaattgatccagaattagtgaagatccgagagaggttttagctagtcaagctaaagattttacgatgtcagataatagaatgatgttgtataagactagggtttgtgttccaagtagtgcagaacttagaagtgagattctcaaggaagctcataccactccatattcactgcatcttggcactaccaagatgtattaagatcttaaaccctactattagttgtgcaagatgaagaaagatgtggtgaaatttgtatcccggtgcttaact

SEQ ID NO: 279456 - DNA, 498 bp, Cannabis indica
aggccaaccaaggtctgaataacaaggatctgatgcctccgccaatagatggacacttgcaactcatcattggaggcccgcacatcggtggaaacacgggcaaaacttgagaacaatatgcccacagagctcaatatgagcaagaagaagtcatcctagctgtggaagagaggaagcccaaagttccacgcgcaggagagccaaccataacattcaacgacgaagatgctgtccagataagattttcgcacaacgacccgctagtcgtggaagtccagatagcaaacaaaatggtgttcagaaccatgatcgataatggggcttcttcaaacattttatttaagactgcttacgagaagatggggctccagctcaaggacttaactccatgccttcagcccatctatggtttctccagccaaggagttacgcctctaggacaaatccagctacccctctacagttggacaagctccaacaagcataactatcatggca

SEQ ID NO: 279457 - DNA, 309 bp, Cannabis indica
aaaaacatttacaaaatgttattaaaagtccttttcttcagccggcctaagcggcaaaacagagtctcaaaaacacaacactggtagaccccaacccgcttggtctgatatggcccggacatgtacattcttcgtccagctcccgcactcatggctgatcaacatcagtcttaccctttcctacacagtagagcacccgtaagccaagcccagcaagacagtataaaacataaaaataatatgctaatcatataatataaacagtaatgccaatcaaaatatgtctatgtgacacagacctgcatgttg

SEQ ID NO: 279458 - DNA, 474 bp, Cannabis indica
tccaatgtgtaagtatacctatcactgattatcatgcgagtctaaatccagtgaactgacaaataagggaattaaactttttgaacatataatcatgattatattccactgtgctgacaatactataatcatgaacaaatacatatgttctcgaccaaatagaatttgtaaacatgaaataaatcatgtgtaacatgatacataaaatgatttctgatctttattaattatttaatctaattatattgaaatgggttttatttaggacagaaaacccaacaaactcccacttgcactaatataaaacgaaaagtgcatttcaaataatcacaacaccttgatatccaaatcaagtgtagtatgtagtattgtctccgtaataggatctgacaggttgtattcaatacaacctttcatccaccattatatttccttaatcacaaaatctttgatattgtgaaattcctctctata

SEQ ID NO: 279459 - DNA, 622 bp, Cannabis indica
aaaacaataaacaaaataaacgtttataatatgattaatgttacccttatgttaagacctaataaattcatttatatgtacatatagctaaatttaaaattgaagtttaatttcataaatagtattgaacattataattaccgcctcatgcgttgagatgtcttagacaatatttgagaattaacaatcacacacatatattatcctttggaagtggcgtgtgtaaagggttattttactcatattatattagagcatccataatagttatattgtaggaattattaaatagaaaatacaaattgacactttatttataaaaatacttttataagatgtagataatatttataccttttgtgattttaattaccaaaatacctcttacactatcacttacacaatcaaacgatagttgcagggtggttgcataagacgatggttttaatcagacgatggttgcagagtggttggccaaaggttgcatcagacgaaattttttgggtggttgctgggtggttggtcgaaggttgcatcagacgaatgtttcaatcaaacgaaataagtgttagcaaaatgtttatgcaactgtaatacaattgttatgaaacattaaaaatca

SEQ ID NO: 279460 - DNA, 497 bp, Cannabis indica
tatacattgtgggattttgcattggagttcctgtttaagattacatctttattgtggaacacatgggagttggctggggctcggagtcactgagttgagttttctgtaataagtctcaaatgtacttcttttgattgagataaatgttttggccatccctggtgactttaaagcctaggaagtacttgacagttcctagaactttgagtgcaaactggttatgtagagcagagattatgtgttgaacttgggatggttcttctcctacgatgagaatatcatcaacttatatgaaaagaatgagaagcttttttagtgaagaacatgtttgtatcagacttactgttgtgaaaactgttgggttttatgccctaaataaaactccatttcaatgtaatccatattattcaatatcaataaagaaacagaagtatttttcattcatttctatgttttggttcaccttatcaattatttgtctatttgatttataaatt

SEQ ID NO: 279461 - DNA, 589 bp, Cannabis indica
aattcgataatctcaataattcaagtggaattttaaacggtaaaaaaaattcaaggagcatgatttggtacatatcaaaatttaaaaagtaaaaatcttaattagactaaattaaaatataaaaaattcgatattaatttatttaattagcaatatggtaactcttagataccattgtccactttagtattaatcaaaataaaaacaatgattctaatataactatattttttggttttggtgttattatattttttcagttttgctacctctgacgacaactattatattgggaaggtattttttaatgtgacggggagttgtttgaagacgttataacttatttgtctaaattttcgaggccagttttgtcccatgttgctcgcaatatgtattctgcagctcatggtttgacagaatatgtcattcggttagacgataagctatcctagttcgaggagattctatcgccgattgtggtttgctgcattattaatcatgtgtgactctgttcaccgcgtcaaaaaaaaaaataaataaataaaaacaatgattcatattagataatagatattaatagtgcccacta

SEQ ID NO: 279462 - DNA, 743 bp, Cannabis indica
ccctccgcctggcctcttcctcactggccttggcaagggcctcccggggcttagcatcctcctggtacgtccacctttcagcagtcaaatcctgaaggatcttcatgacttcgtccatgcccccaaagtcggacaggacgaagccataattaataaggttcttggaaaggcggccgacctcggcaacgagctagaaaaggatacaagtatgagtaaaagtccttaagagaaaataatgaggagaaaagtaaactacgaaatacttaccacagtcagggagtgactgagatcctggacctgaaagatggagttcaaggatgcacaagcagcgaaccgcttgggtgcacaccgggtaagctgagacgcaaactcaccggtcatctccgcggcaaagggagctagagtgggcccgaggaaacgaccgaaccaatccgatagggggtccaagattagatcccatggattctggaagttcggatcgttaagggtattttgcatttcaactcgcaaaaccctcctcaaagcctccacgtcagcatgcccccgggagtactcgtccatggcgtagttgtgtttagctatccagagttcctgtctcgcctcatctccaggaaccggagtcagcactatgttcggaggcgcagtgtgttcctccacctcgggagagatcccggaatcaagtgcgggggctcgagtatcagctctccgctgccgtttgggcacctcctcggcaaccatcttgc

SEQ ID NO: 279463 - DNA, 655 bp, Cannabis indica
atggaaccagactagggacacgaaaccacggtcaggacctagaaccgcacccaagtcttgatcctgacccctaactcacaaaatgggacctgggacatgaactagaacagaaccgagacccgtgacagtgatccccatcttgactcaggattcggataacggggactggaacagaccagtagtcggtgtctagatatgggactcagactaggaccagaacctagacgaagaaccaaacccgaacccagacttagacatgggacccaaaataagaacctggacaagaatcgccgaactaggaacctagaacaagactaggaccgtgaccaggacccagacccaaacctataaccgaacacagacctagcctcagacccaaactgagacaggaactcgtgcatggacacggtcgtgtcccagaccggaactgagattcggacctggacctaaatgtgggacccgatcccaaacacaaacttggacctagatagtgatcaaaatacgaacctggactcggagtaagatacagactgggatggaaattttggacatagatctggagcgagagcctgaccaagacccaaacttggacccgaacatggacctggactccaacctagaccgagatcggatttagacctcgacacaaacccgg

SEQ ID NO: 279464 - DNA, 571 bp, Cannabis indica
tttttttcatttttaaccaaaaaagtaataatattacaaaaatacttctagctcgccaaataaacaaatgtacaacccaaataaaaaaaattacacaaatatcacttacacacaccttcaacccaggatccttgcttcctgggcaactatcgcgcaactacgcagcaacccaacacaactgaaaagaaaattcaaccagaaagagaaccaccattaattatgacgacttcatctgagaagacgacgagaatcaatcaaaacaagggttgtttcaaattcataaaaaaagtgtagaaaaactactacgaaactaaaattcaaccgaaaatccagtttaatttgcataaaaactaataatttttagatcaatgaaaggtagatcttaaaaagttgaaatggagttcccaaacaatccaactcaagtataatccaaaaaaattacatcaatactatagtaaaatatttatcgtggtgtatttttgttgttttctaaatttctaatagtgaatttgttcatattaaatcataaagagactgttagcccaagatatgtttccaagagggggggtga

SEQ ID NO: 279465 - DNA, 589 bp, Cannabis indica
tttcgtcctgcaagacccaacactctaaagtggtatgaccaatatctttatggtacttacagaactttttggggtctcttctatcgcggtttcccctaatggggggcggcttcttgaagactccattcctgtcttcaatcgcataaatgtggtctcgggacaccgcgagttcggtataattaacaaaacacggtccacccttcctctttggagaggactccttcttgggaggagatttggccatctttggacttcgttgtctctgtgggctgtgtcttctcgggcttcggcctctggaattcttccctcagggattgcgtgatcttgatcgcggtattggtgatttacgtttatccttgcccttctccaactctgccagagaattctcaatccttttatgaggttcggccatagcgaagaattcgactagtgattctggccttcgggcttgtaactccttccagaaatcagttctcggcaaaatacctgttatcaacatgcaaacaagcaaagactcgggagccttctcaacttttgttacttccacattaaaccgtttaaaatagtcttgtaaagactcaccgggttc

SEQ ID NO: 279466 - DNA, 970 bp, Cannabis indica
taacgaggccgagtatgaggccttattggctgggctgaggtcagcaaaagagcttggtgcgaaagcaattcagtgttttagcgactcccagctagtagtcaatcaagtattgggtgagtatcaggcaagaggattaaaaatggcggcttacctttcgcaagtacaaaaacaactccaacaatttgagtattactctatagaacaagtacctcgtgacaaaactcgaatgctgatgccttagcaaggttggccaccactaaggaagctgatacactcaacgtcgtcccagtagagttcctccctaaaccgagtatcaatgtggaggagaacgaagaggctaacatggagctggtcgatactcaaataacgtggatgactccactcattgattacttaactactgggagtctcccttctgataagagtgaggcaaggaagttactgtataaggtaccaaggttcactctgttggatggaaaattgtacagaaggggatactccatgccattattgaggtgtgtgacagttgaagaagcacaaggcatattgaaggaggtccatgaaggattttgtggggaccatgccggaggggatagcttagctaaaaagataataaggcaaggatactactggcctactattagtcaagactctctccagtatgtaaaaaggtgcgacaagtgccaacgcttctcaacaataccacgagccccttcagtggaactcacttctatgacctccccgtggccctttgctgtgtgggggatagatttgattggatctctaccacaaggaaagggtggagttaaatatgcagtagtcgcagtagactacttcacaaaatgggctgaggcagaacctttggccaccataacttcaaaaaaggtgctcgacttcgtcgtgaaaaacattctatgtcgctatggagttccacaaaaaatagtatcagataatggaaaacaattcgata

SEQ ID NO: 279467 - DNA, 635 bp, Cannabis indica
aaacgtttccaccgcctttatggcagctcgatctggtccgttgatctttgggtattcgaatcgtgcatctcccccaccgtacgattggtaggtggtgacgcctgttcctcatgcacttttgcctataaaagccaccatctttccttcattttggttactttccattccttgccatttttgctcgaatttcccagagagaaaattcttcaaaacagcacgaaccgtcttaacacttcgccatttcttccagtttttccgtgtttgttatcatcagttcttctcaactctactcggccacatttaggacccccagttcaacaatttactgtaagtttcttgcatcctttaataatgacgtgcttttacttgctttgtttgttttcctgggttcgtactttgagatttctggacatgcgagtgtttaggttcttcaggtgttctgttttgtgtttactgctttagttgtaggaccgccattatcatgcctctgttataatcgtgtatttttgttgaagagagccatatgttcttcgttcaatagttgcttagggcatagaatggggtcttttcccttctgtttcttttactctgtaaaaccactttctgcgattttactgcacccgacacttgttcag

SEQ ID NO: 279468 - DNA, 567 bp, Cannabis indica
acaacctttcctccaccgttacacaattcccccaggcatccgcgcgtgtatcaccttgtccgaaggactggtatgcgtgtgattgagacatgtgcaccaattttaaaactcacataactttttcaatttttatcagaatcgagttccgtaaaaactaaagttgtacttaattgttcacaaggaaaccaaataaaatatttttagattgaaaataaaattattttatggaaaaatttcgtaattcatatacattcatcaaataatcacataaaccatcatgaacaaatccaaatcaacacaaaaacaatacattcatcgtttaaatccatattacatgaaagtaaatcattaccatggcttcgagcccagttgttgggaatatttactaggatcaataaacacataagaatttaagaaaaccttacattgattacagtagaatataatgactcctttcgttcaagatctctagcccttaattcctttctgtagcagagcattatcatgatctaaacttggatctctttctctcctttggatttggttgcgaccgtcttactcactatg

SEQ ID NO: 279469 - DNA, 712 bp, Cannabis indica
tagtattttagtttagcggggcagttaatttagacattgggaatgtcagaattagtcgggaatttagaatttcccaaaatacccttagtatcctttaaattagttttgggtgggcaaggtcattttggtctttttgcccttttagtgttttgtctttatgtggatcaattaaatgaattattattgattttgattaattagttttggctgaaataagtaaataaaattatttttatctttcagttttacaaaattggaaaaaataagaaaagaaacaaaatctaaatttttctctcaagccctctctctctttcggcctctctttgagcagcaaagaattggtattttccttggtaatttaagctggttttaaccaagatttagtgatctcaagctgttggtaagattcttgtagcttcctctttgttttcttgagttttaagaaaaagatgatagttgcatgcttggtaaattatgatgttgttgctgctgtgtttatgtgatgttttctgcagcttaaatatgtttaattaagtggattggaataggttttgattcatgctagttgattttgttcaagtttggaattttgaactcaaaacttaggattttttatggtgaaatgataaatcagttgatgtgcttgttgtagttgattgctgttgttttcagaggcttaatatgcttgattgagtagattaaaacaggtttt

SEQ ID NO: 279470 - DNA, 842 bp, Cannabis indica
cgacccagatcactcctaagggcattaagtatttatccgccctcttcgtcctctacgcttcccaaggatggggtgctccttctccccacgaggttgcctggttctttgatctgaatctacccccaaacaaggcaggtcggggtacttctatttctctcagcaggcttcaagtggttgaccggcacggatgccaaggccatcagcaaaatagggcgttttgctgatgagtacttcatggtgaaggatccgagcattacccggactcggtttcagcagattctgacatatcaccgtcctccccttactcttgctcttagggatagagctcagaaacttgcccggttgccgggggaagacaggaatattatccagttgacctccgatgataatctggtgaagtacgggctctatcccgaggacttttctcctaagtccgtggcggggaagaagaggaagtctgatgctggccggcctgaacgaactcatccggagaatgagctaattcaactgaagcgcgaagctaagttgaaaggaggtgctagggccaagcagtatgctcaggagcctttgaatcctgaagatgaggccgaggacgagcaggtgaccccactgaagaggaagaagaaactcccggccacgcccaggcctgttgaacatgcaattcgcataagggagcccatttcacctgttcggccatctcccccctttgccggaaaagggaaagctgtcatggctgagataagatcaatgtcaggtgatgatggacttctgagtctttgtgcgggcggtcaccttgcattttacttactttgtcttgagcttcttgattttcatgccttgtg

SEQ ID NO: 279471 - DNA, 596 bp, Cannabis indica
agaagagtaattaatgggcctccgaatgtcaaacttgagatatcgtccatttattattcaattccactatatcagactttattttcgatatcatattcgagaatcggatattctgaataaggaaataaggtaattgtcaatcaagcatttatatgtctttattatctatgaagacagaacacgttttgacaactattaacaatatgtgacatccacgttagcagaagatcaatgcctcatgagtcgggctccaccaaacggaactacaaaatcaatatgtaacttgtatttatctaattagtgggctaaggtttacaaaataaaaaccctaagagcactcacgttagatgatgtataagtttgttttttttttaaaaaaaaaaaattaaagagtagagaaaaataaaaaatagacaaaaaaatgtgctacatcaattgctatattataaagaactaaataaaaatgtaatagtgcttctctgcaagtagaaaaacactatttattatatacatattttaatattatatatattattttattcttttaaaaattcaataacaatatataaataatattttatttatattttaataat

SEQ ID NO: 279472 - DNA, 729 bp, Cannabis indica
tagatttttgcgttctcataggcttcatttcgaaactcctctagttcattcaattgtagcagccttttctctcctgcagcttttaattccatgttaagagtcttcatggcccaaaaagctttatgctctaactccaccggcagatgacaagcctttccaaacaccaaccgatatggagacatgccaatcggtgttttgaaagcagttctgtatgcccacaatgcatcatctaattttcttgaccaatctttccttgatctttgcactgttttctctagaatcatcttgatctcccgattagaaatttcagcttggccattactttggggatgatatggtaaagcagttcgatgtcggacaccatatcttgaaaggagtgcttcaaactgtttattgcaaaagtgactcccttcatcgcttacgattgctcgaggagtaccaaaccgagtaaagatgttcttttgtaggaagcggagaactgtcttaccatcattctgtggtgtagctgcagcttcaacccatttagacacatagtcgacagccaataggatgtattgattgctaaaagatgacggaaaaggacccatgaagtctatcccccacacatcaaacaattccacttctaggattcctgtccgttgacaacgatcacatgccttcacaaaggtagtagcatccttgaaaagagttggccaaaagaactccactctgcaacaccttagcagcagt

SEQ ID NO: 279473 - DNA, 667 bp, Cannabis indica
tggacctagatagggatccagatacgaacttggactcggaccaatacccagactgggatccaaatgctggacctagatctggaccgagatcatgacccagacccaaacttgaacccacactcgggacccaaacttggcttggactcgaacctagacccagatcgaggtccagacctggacacaaacccggacacatactcgaacccaaactcaaacacccacacctagaatcagacccaaaaatagaccaggacccggatccaaactcgaatccagacaaggatcagaacaaaggactcgaacgcgaacctagaccgggacccaaacccacataataaccgcgacctggacccaaaatcagaactaggaccgggacctagtacccgacccagacctgaacttgaacataggacccaactcgtgacccggcaccagaaatggaaccagactacggacccgaaagtgggatccggatccggacccagttcttcgtctgtgctctagtcctagtcttagtcctagatctagacaccgactacttgtctattccaggccccgttacccgaatcttgagtcaagatctggatcactgtcacgggtctcggtttggttctagttcaggtcccaggtcccatttctaagtttgggttcgggatcgagactgggg

SEQ ID NO: 279474 - DNA, 547 bp, Cannabis indica
aaaaaaaaaaaattaaaaatggcatactagtctctacggtcgaggaatatatatattattggttttcaatgtagtgttgacaattaagcaaaacacattataaatgctataattaacatggaagagaaaaaaaatccaactaattacattgcctaaaaagaattgagaaagaaaccaaatgagagagagattgtaggattagcaatcaggttttagaccaagctgtttcctagttttgctgacaaacaagtcttcagacttaatcttgccaggaatgcatccactaatagtcacaaatggaaattgagctacaccttcttttctcccaagtgaaacaagtgtggcttctaaaaagtttttgtattttgccatcttgctctctttccctcccactaacaacaccttcaagttcttcactgccacttgtgcatgtttttgtgctatatacctatgcttcctctcctacacacaacacattatatatatagtaaaaacaataatatataataacccccaaaaaaaagaaagaaagtaaagttaattatat

SEQ ID NO: 279475 - DNA, 610 bp, Cannabis indica
ttcaagcgatgacacatgacttgcggagatatcccgaccatatctgagtgtttccaagcaaaaacatcaagattttgctttaaaaaggtcgttaattgttctcgcagctgaaaatttaatttagaaccaattttcaaaactttattattatctacaggatctataggtacctcaatagtgtcttccgcggcttgggctgcggcggtgtgatcgaggattcttggatccaagtctggttcatctatgtgcggcacctcctcgattctgaggatctcctggcgaggaggtggtgcctccaacaggtagataacatttaccgtctttttctctgcgagtttaactgctgtgttgtagcattcccgcgaatctgcttggactccccgcacagaacctactccagcgggagtagggaacttcattgtcagatgatagatcgaggttatgatcttcatctccttcaggatcggtcgaccaatcacggcgttatatgcagagtactggtcgattactgcgaagtcagccattgacttggctgtcaccggggcggttcccaaagtgattgggagtttgatcattccttttattgttatgacgtcgcctgtaaaaccgt

SEQ ID NO: 279476 - DNA, 1009 bp, Cannabis indica
tttgagcttggcttaatagaggtaaatgggaagagctcttttgatcagtgattatatttttagttcactgaaacatcatttagtaggaagctaagtagtttttaaaaaataaaaatacattgatgggtagaaaacggtaaattttatcccctaactcaatataaatcgtctaatagaggatctttgattattgaaattagaacgatggttaaatgttgatagcgtatctatatcatggaacatatatgagtggatgcaacaagaaattaataagttaggaaatttacttggtaaattctaggtctacttattggaagcccggttgaataggcccatggtccccatactagttgagaccatactgcttgtaagactcaaataattgattttgattaatcaattataattctaaaaatagactatctagtttatgaattttcactaagcaatggcataattgtgaagaaaagagattctaggtcttatttattaattaagagacattattatgtctaattaataaatatattaaatggcaattttatttgatgattaattttaattattaaataattagttttgacatttaaatggttagaattggaagaatggcttttttgagaaaataaggaaagattgttgtaaaatggcaaaaattctaaagtgggggcccatatccatggccgaccacttgttaggtattttccatttaatttcttcattattttaatgcctaataaatcctaacctaaacctaggtggttgccgataaatagatagtgatggctcacacttaaagatgatgaaaattcaccttcagtaaaattatcctgagccttctattctattgaattcggaccaacccctctcttcttctcttcataattttataccttgagtgatagagtgagtgcccacacacatcaagtggtatctcaatcatagtgtgtaaggctatgaagaatccagaatcaaaagaaggagaatcaaactcagatcttggtgatac

SEQ ID NO: 279477 - DNA, 699 bp, Cannabis indica
caaaattggcagagttagaatcactaacaacatcaacatcagtctcatcttcgttgtcattaatgtcccaaatttgtcgatggctaatatcttcaacaaccttccaatcgcgacctctgagtggatcttcaagatagaaaacttgcttcgcctggttagcaaggatgtacggttcatcttgataccaatatccacgagtatttatactggttatattattttcagtgattgtcttctttcttaatggattagtgttataccatttacattcaaacaatgtcactgtatatgcaccagtataagatatagtgattacatcttcaagtgtgccgtagtaattaaacccttcagttccagcaacagtaacaccactattttgtgtcttccgcttttggtctcgctttgatgcaataaaccgaacaccattcactacacaaccttcgtaaaatgttgctaagtaatcggacccggaagcgagagcgagtaactcatcaccattttgtaaagttccaagcttgtgcaactcatatatctaaatacataaaatgtattaatatgagaggaatataaatggttgaattaaaactttacaattttgtcattataccttcttatgaaaccacggacggaaagtttgcctatgcaagacatcgtgattaccattaggatattcatgcctgatcttgtccaaatgttcac

SEQ ID NO: 279478 - DNA, 555 bp, Cannabis indica
cggcgcactaacttggagcacgagttgaaatgttggtatacattcgtgcaaactgccctctgccccacctcacatgattcgaccgtcagcagagaccgcgcctggatgctctattgccttagaatgggttgggatgttgacgtaggggctgtccttgcccaagagattgctgattgtgcacacagggggaaggggaagttattcctccctgctactatcactgctctttgccgcgaggcaggtgtacccatatggaaggaagaaggcgccctgaatcctcgggggcctatcaattttggtccacctcgagctccaaaaacaacgcctaccccagcgacgtccccagccacggagcctcccgtagatcgctttgctcgctttgagcaagtgcaacaacaaatgtgtggccgattgcacgcgatgtgggattatgagcagaagcgcgacgccgtcatggagcgtgcattcaagaggactacgccccgttttgatcccaagttcccggacttccctcagcacgttctagacccgtggggagggccatcagcttcgaac

SEQ ID NO: 279479 - DNA, 631 bp, Cannabis indica
atttcatatggtccttcccaatttggcccaagtacccccactccgggttcttgagtggctgggaagactcttcttaagaccatatcaccaatagtgaattttctacttttaaccttagagttaaagtacttagtcaccttcttttgataagccgccattcgtatttgagactcatcccggagttcctcaatttgatccaacgcttcttgtaataaagccttgtttgttgttggatcgtaagttgttctcctgtgggatgggaataacgtttctaccgggaccattgcttcacaaccgtacgccattgaaaatggcgagtggccggtcgtggttcttggggttgtccggtaggcccataacactcttggcaattcttcgggccaattgtttttgcaggccagcagctttttctttagggtgacctttaggattttgttgaccgcttctgcttgtccgtttgtttgtggccttgccactgcggagaagcttttaacgactctgtgttggttgcagaagtcagtgaattcttcgcagtcaaactgctttccattatctgagactattttgtgaggtaagccatatcgacacactatgttttgataacaaagtctagtgcttttttagcagttat

SEQ ID NO: 279480 - DNA, 526 bp, Cannabis indica
caattttggtatcagagccgctaggtttgtctaccgaagctcgccaagacatgtacaatcatcatcagagaaagctcggctcacggttcagtaagcatgtacttgtttagtgttatatgtgattattaaagcatgttaggaagcatattagtttatagttttttatttaaatgtgttgccttaaaatccctaagagcagtattaagtctgtttaatcgctgtctgacctacctggcttatgggttcgcaggctaagcctattaaatggatgcccatcgaaatacaaggagtgagggtaatagggtcgagactggaggcggtcagggaaatcaatttccccagaatccctgtggtcgcggcagaggccgtggcaggtttctgggtggtcaacatatgaacccatctcaagctcctctaaattgggggtagcgatttacggaaatgcaagatcgtattcgccagcaagataaagaaattttgagattaaggcagcagggtcctcgtgcagtgcctccaccgcaagctc

SEQ ID NO: 279481 - DNA, 516 bp, Cannabis indica
tagcctatagatttaaagcaccagccttgtagactaacacataatgcgtagtacttttcaaatatttcagaatatgtttaactgcagtccaatgttcctctcttgggtttgtctgatacctgctcacaattcctagtgcgtagcatatgtcaggtctagtgcatattattgcatacatcagactcccaactggtgaagcataaggaacccttctcatgtcctctatctcttgaggatcagtgggacaccattccttagatagacggataccaaatctataaggcatctgtgcccctttggcattgctcattgagaatctctccaaaaccttatcaatgtaggttgtatgagagagagcaagggatctgttcttccggtttctaatgatctgaataccaagaacataagcagcttcacccaaatatttcatttcgaattgagtgtcaagctattccttgatgtcagtcattttcttgatattgttgccaataatcaaaatgtcatcaacataaagga

SEQ ID NO: 279482 - DNA, 531 bp, Cannabis indica
agctcagggtggtcgccctgtaaatccaccacaagctcctctagattgggagcaaagatttgcgaaaatgcaagatcggatccgccaacaagatgaagagattcatagattgaggcagcagggtcctcccatcgtgcctcgtcaagttggtcaggccgttgcagttccggcggtgccagcagaacaacctgttgttggcaaccgtatggagccgtcgtatgaaagattccggaagcaggcacctccagtgtttctgggaggtcctgatgtaatgaaggcgaagcagtggctcacagtgattgagcgtatcctcaactttatgggagtggttggtaatgatcgggtgacatgcgccactttccagtttcaggaggacgctctcgtgtggtgggagttgataaccctcactcgggacgtcatagtgatgacttggtgaataattcaatgagttgtttaactccaaatattacaatgaagctgtccgcagtgaaaagcggaaagagttcactgaactggttcaaactgagggaa

SEQ ID NO: 279483 - DNA, 600 bp, Cannabis indica
aaactagggtttctgaaaattccccaaccggtagaccggttgcccaaccggaattccggttctgggaattactggacacccatccggaattccggttgcacaaccggaattccggttcctcgcaggaatttttcaaaaattcctaacttgatcaaatcaaacccaaatgattccaaaccttccagacctgctctaaataccccatagaacaaatccaaggcaacaaactaacccagaattcacagatacacaaaacaccattaaagaccaagctttgagttccaaaactcaacttggttaaaatccactaatcatgcaataaaacctggttaattctacttaactaagcatgaataagctctgaaaacacacaagaacatccagcaacttcacagaacaaaatgaaccatttcattcaaaaattcataactttttcacataaacatttaaccaactagaacaagaattcaagcatgcaattccatcacattaaacctactgaattcaacactttaatcacagaaacaacaacaataataaccagcagcaacaacaccaaaacaccatgcatgcatcaccattttcatcatttttttccaa

SEQ ID NO: 279484 - DNA, 532 bp, Cannabis indica
agcaacaagaaagttaaggccggcctttttttcaagctcatcctgttcaggtgtacactgaccaatcattacgccaaatattgcaaaattcagatgcctatggacagctactcaagtgagcggtggagttgggccaatacgaaattactttccaaccctgaacaacaatcaaaggtcaagccttagcagaatttgtggtagaatgcacaggcaaggaaggaagcgtaccaaaaagcaaccctgagccagtacaaacacctcaaccaagtaatagtgaagataagccgacccggaaactacatgtagaggggtcagctacagatcagctatctggtccaggaattgcccttgtcatgcctcgggggcaacacctacacgttgcaatcaagtttgggttcaaagcatctaataaggaagccgagtatgaagctctaattgctggcctaaaactagcccgggagatgaaagccgaacacattaaaatctacagtgattcacagctggtggtaaatcatgtatccggagaatacga

SEQ ID NO: 279485 - DNA, 508 bp, Cannabis indica
tcctttctgtcgtagagtatcaccaagatctgagcctgaatgtccttctcttgaatctagattcttcacaatcttccacactgtgattgaggtaccacttgatgtgtgtgggcactcactcactcactatgggcttcggttttcagaagtgaagaagagggggagaaggtggcggctaggtttaggaagaaggctttgagatttctatgaaggaatgagatgcatcatctttttcctaaagccataactacttatttatagtcaaccacctagggttaggttagatttatttggcattgaaataatgaaaaataaatgataaataccctacataagtggccggccatggttaaggataatgggtcccacttttgcaattttgctgttttatcatttctacatctcattttctcaaaaacgtcaattgtctaatttgaccaattaaatgtcaattctaattatttaatagctaaaaattaattattaaataatattttcatgtaatata

SEQ ID NO: 279486 - DNA, 475 bp, Cannabis indica
gggctgaattatatggattaaaaaataataaaatattgggcaaaaattcacatcatggccgaacagtatagtggaccaatttctagttagatttttgccactttatttcaacacttattcttcttttcaataatatcatattttccaattcaatcctataaatgccaaaattatttatttaataattacaattaattactaaataaaagtgtcatttatgtaatttattaattagaccatacaaagtctcttaattaacaaattgaccccaaaaactattttcttcacaataaagcccttgcttagtgaaaattcttaaataagacattgtctaattttagaattataattgtttaattaaaatcaattaactgagtctggaagcagtattgtctcaactagtgaggggtccatgggcctatataaccgagctttcaataagatatagaattcaccaagtaaatttcctaactta

SEQ ID NO: 279487 - DNA, 500 bp, Cannabis indica
cttattctacactcaattatataactcgttgtttaataaacaacctactttgtgatccaacatccaccaatcactcaattacgtgtctattaaattgcatctcaattcataagcttttttcccattcagggtgagaatacctttccataattgcataataaagtaatcttttcccaaaatgtcaatggtctccttatataccatattgactatccagtcaattataaagtactctccatcattaccgtataaccttaagtaatttaggtaatcttctttacttcagtgataccactactcttcctgacgttcttttatacgttacctcggtaacatctacacttcatgcctctattgggcccttacgcccacagaatgatgactcttatacatgactgcatcactctagctgtttcctggactgacaactggtcccacgaaccaatctaagtgtttctaacgtgctttgctctgactcgcacgcttcatggggaaatttc

SEQ ID NO: 279488 - DNA, 559 bp, Cannabis indica
ggttttgatctgggttcgggtttggttttaggtcctggtcttggtcctagtcctagttcggttgagttccatttgcgattctgagttcgagtttgggtttgagttcaggtcgtagttcgagtcctggtctgagttttggtttgggtccaaatttcagtctaggtctagatcaagctccaggtgtgggttcgcgtccttggtactgatcctggtctggtttcgagttttagtccgagtttgagtctagctttgggtctgactctaggtgtgggtttgagttcgggtccgagtctgtgtctaggtttgtgtccaagtttggaccacgatctgggtctaggtttgggtccaggtcaaagttagggtcccgagtgcgggtcaaagtttgggtttgggtcaggatctcggtccagatctaggtccaacatttcgatccatgtttgggtcttggttcgagtccatgttcgtatccggatccctatctaggtccaagtgtgtgtttgggatcatctcccagatttaggtccaggtctgggtctcagttccggtctgggtacacgac

SEQ ID NO: 279489 - DNA, 767 bp, Cannabis indica
acttttcctaggacgaagatgataacgccccggctctttttccatcagaaaatagaagtggatgacgtcggacacttcccactgaacgcccgcctaataacctaatacaatcagacccaaaagaatagcccacacattagggagtaactgggcaggagcaagcgaataatgtataagaaattccttaataagtctaggaatgggcaacctcagcctaatcttcgactcaaaccagtatgagtgtaggcatacccactcattttgagaggaatccgccctctcatgctgtttaggaagcctaacttcgacccccgacggaaaaccacacgacaaaactaaggaatcgagttcacgttgggtgaggaccgacggacaactcgacctaacatccagataagaactacccagagcatgttttttctttttggccttcttcaacgggggaattgctagagtaaccccttcagacggggctgcctggccactaacgcccgcctcgcctccagaacgagaacggggaataacggagacgctgcctaaacactcgacttctgggtcgtcggggacttcaacgttttcagtctccataggaggagtatcagaaactaacaatgattcgacgaatccaggagcaatactcgaggaaagagaatcggaaaccgaaggagagacacctggacaatccgtattcgacattacaccacagctaaaatgacaatcgggatccaaagcctacccaaaaaaaaagaggaagagagaaaggctaa

SEQ ID NO: 279490 - DNA, 525 bp, Cannabis indica
gccatgatcttcggaggaccccatattggaggaaccacccgcagagaactaaagcagtacgcggggggccgtaaagcacaatgaggtttgggaggttgctcaactcctagctcaaaggccccggctgatggatcagcccatcacgttcacgaaagatgacgccaagacggtgcgcttccctcatcatgatccgttggtcattgagacacccatcgccaataaagtggtggccagagtcttgattgacaatggaagttccgtgaacttacttttcaagaaggccttcattgtaataggcctgatggaccaagacctctcacccaacggttcccaactcacagggtttaacggaacaacgcttatcccaatgggaaaagtgaggcttccagtcactttgtgcccggacacccccccaaagcacgttcacccacgtcctcaacgtcaacccggacatgccaccagtccagcaaaagcgacgccccctcgactcggtaaaggccgaggccctagagaaagaggtggaca

SEQ ID NO: 279491 - DNA, 531 bp, Cannabis indica
tgtgtttgtttcttggattaaaatgctgaactaaatgtgattagataagttgaaatgcatgatagttatccttactctagtttgtcaatttttagttcaaaagctatggtttttcaaatgaatttgtgagttttgttgctgtgtttattgaggacgatttcctgtgttttcagaggttttaatatgcatgtttaagtaagtttgaactgatttggatgcatgttagttagatttaaccaagtttgagttttgaactcaaatcatggagctttaattgcttttttgatatctgtgtgttctggactgtgtagatgctttagaaatgttctttggggtatttagaacaggtctggaaggtttggggtgaattggatttgatttgatgaagttatgaatttttgagttttgtctgcgaggaaccagaattctggttgtgcatccggaattccagatggggttctgaaaattcgcagaaccggaattccggttgggcaaccggactaccggttgggtgattttcagaaaccctag

SEQ ID NO: 279492 - DNA, 439 bp, Cannabis indica
actgatatgataatctacaacgtagtttacttgcaccttggataagtgttatgtcctttctagggcattagttaaagtaagctagggttggatgtatggagtatgcatcagaatggaccgatattgaacttgaactagatatgataaacttaccgtaatatgtattcaattcaatgtcacctagttgatcctagatcaaatgatctcaatcctaagatggttaggttctagttcagttgcattatttgtgttctttaacctattagttaaagtcgaccaaatggctcttcccatgacctatatgttaagaacattgtatttcaattgagtgggagcgctaatcatatatatggaatctataacttctattcaaacatagaagtgaaaagatgatttccttcgagcttggctaaatagagataaatgatagagcactcat

SEQ ID NO: 279493 - DNA, 549 bp, Cannabis indica
tttcaagaaagtgggttagatcagtgttaattagaattgaagatagagaattcagcgctgatcttgtggagttaccattagccgagttcgatattatacttggcatggactttttgtccaagtactctgctagtattgattgtaaacggaaaatggtaacttttgaactggagaatgaggaaccatttgtctttgtgggttcggttcaaggttctcgtgttccaagaatctcagcattgaaagctagggatttgttatgcagtggatgtgtaggatacctagcagttgtagtggattccagtaaacctgtgttacttggacccgaagaggttaaagtggttaaggaattcctggatgtatttccagaggaattacctgggttaccacctcagcgggagatagattttatcattgatttaactcctggagcagaacctgtttcaaaagcaccttatcgaatggcacctgccgaattaaaagaactgaagatgcaactccaagggatgttggatctagggttcacacggcctagtgtgtcaccttggggag

SEQ ID NO: 279494 - DNA, 623 bp, Cannabis indica
tcctcaaaatctaacctgaatagctctggatgttgagtcctcatgtcggactttaattcccaggtggcttcctccaccttgctgtttctccagagcactttgaccaaggcaatggtcttgttccgaagaactttctcttttctatcaaggatctgaacaggctgctcttcataggataagtctaactgtagtttaagggcttcataactcaagatatgagtcgggtctaaaacatatttcctcaacattgaaatatggaatacattatgaacagccgacaatgatggtggtaaggctagccgatacgctacctgcccgaccttcttaagtatctgaaatggcccaatgaacttagggcttaacttacccctcttcccgaagcgtctaatacctttcacaagtgaaaaccacaggaaaacatgtttctctgcttgaaatgtgacgtctctgcgcttcggatcaacataacttttctgcttactttgagaagcaagcatccgagccttgatcttgtctatagcttcattagtcctctgaattaactctggaccttaagtatttcctttctccagttttgtcccaatgaataggggagcgacatttcctaccatataacatctcat

SEQ ID NO: 279495 - DNA, 430 bp, Cannabis indica
tgtactctctattattatatcactttctataacttacactattatataatctctattattactatattataattggtatgtaagtgacttttgattgtattttcttaaatgcaaaatgtcataagttttgaccatttagtttacaaataatattatgatctctatataaatacatatttatctcaagtttctcctaattactatcaccacagaatactaatcctcctaaattactaaataacaaattatgagtaccaatagctattcttaagatatatttatacatatacaatcatgcctatatatatgataagaggatgctctgaagtggagagtcaagaaaaatcaacgaggttcttaaactctctttcaagtcaaatacaaatattggtagctttgaatttgattcgttttctctaatataaaattt

SEQ ID NO: 279496 - DNA, 474 bp, Cannabis indica
gatctggtctttaaattttttttaccaatctttggtatgttgctccagcattttttagaccgaacaacattactttgtaataatatagacctaaatctgttcggcaacttgtatgttcttggtctggtggatgtattttgatctgattgtaccctaaataagcatccatgaagtttaatatttcatgccctgctgttgcgtccacgagctgatcgattcttggaagtggaaaacagtctttggggcatgctttgttgaggtatgtgaaatcaatacacactcgccatttcttgttccgcttgggcactagtacgggatttgcaacccaagctaggtagaaagcttcaattatgaaatttttgttgcgtagcttttctacttcttcttttagggctagtgctcgctctttctccatagcttcgcttttgttgactggccgaaagttgggattaatattcaggacgtgcaaaatga

SEQ ID NO: 279497 - DNA, 500 bp, Cannabis indica
tgttgacttcgtcattagccaacgacaatgagttttttgataagcgataaacgatatgtcgtaatgagaatatatataagaaagtaataataagacacaatatagccttagcttaactgtgtatcggctcataatttctcggtccttttcctagtgaacattcctcactatttatagggatgggaaacttgaggaggaagagtttcctctctcgttacaatgtgcataaacagaaagatcatgtgatcaatgctgaatgcaaggatctgtatgccacatccacgtaagttgatccctgagttgtagggattgagctgatgactcatgatgcgaaagctgaattcgctaagtgttgatcgccctgcacgactcgttgaatatttcattctggatgtgccaccgaggcatcctgctcggcctatcgttccgagcagatgctccaagtggagtccacgtgtcaccattctcgtgatgccacgtcagagtgccaaatttaggat

SEQ ID NO: 279498 - DNA, 506 bp, Cannabis indica
actataaacaacaattaaacacagcaacaacatactcaaataatcatgcattttactcaactttttcatcaaaatctcaagaaattaaagaaggaagaaggtgagctaacctagcttgcaaaggaccttaagagaagatgaattaacaagccaaaatcaaaggagaaaacccactccttgctgctcaatgcttggccgaaaatggaagggaaagaaagagagagtttctttgaaaattctatttttcctttacttagtaatttttgtaaaattttgagaataaaacaaagccatttatctcatttacttcagccaaataacaattaaaataaacatttaattttcaaataaaaagtcactaaaagacaaaaagtcattggggcaaaaagaccattttgcccctccacactaaaatcacataaatcatactaaaggggtatttttgggaaattctaaattcccggccattcccgacattcccaatgtctaaaacccgtccccaaact

SEQ ID NO: 279499 - DNA, 636 bp, Cannabis indica
caacgaaccgatgatagtagccagccaaacccaagaaacttctaacttctgtcactgttttcggtcttggccaatccctgatggtttctatctttcccggatccactttgatcccatctttactaacaatgtgtccaagaaaagacacctgagacaaccaaaattcgcacttcttgaatttggcatacaacttatgttctcgaagtcgctgcagaaccatccggagatgttgctcatgctcctcttctgactgagagtacacaaggatgtcatcgataaatacaataacacaaatatcgaggaaatccttgaataccatattcatcaaatccataaaagctacaggagcattggtcagtccaaaagacataaccagaaattcataatgtccatacctagtgcggaaagctgtctttgggatatcctcctctcggattctcaactaatgatagcccgatcggagatcaatctttgaaaagcgatcttcccctgaagttgtactaaaaaaatcgtcgatcctaggtaaaggatatttattcttgactgttagcttattcaattcccggtaatcaatgcacatccgcaaagatcaatccttctttcttaacaaacaattactggagctccctagggtga

SEQ ID NO: 279500 - DNA, 1229 bp, Cannabis indica
gtattgtattatattcaattgtattttatgtaaaactatatgtagtattaatttttatggatacctaaatatataatattttagtataaattaaagtttaacatattattatataaaaatatgatatataatccaattcaatataatacaatacaatacaatctaatacgacattctaaacgagccctatatatttttctccaattaaaacaaattgcattatattattattctagtaaataattgatttgtttaatgaaaaaaaaaacatggaagaggcaaaatgtgggtttgaaatgtgaggtgagtccacttgtttggtttgttatgcatggaatttgttgtgcccttttctacactttagctctggagtttggttgtcttctcatcccacttttcatgcccttgtccttctctgtctctctctcctcttctttctctctctagcccacttgtattatgttaatgccaatcatgtatcactattattggcaacttactccaaattttgtccactttgcttctaaattacagctctccttttcaatttttaatcactttcaattcaaatataataataaataataattgataaaaccctcctatcaaataccagaaacaatcttttcaagccaaaaataaaaacaaaagacttatcttttttattggaagagtcttcatgtagtcaccaccgtttatgaatctcaaattaaatattagattcattcccaaacaaaagtagattaatatgattaataaaaattgtttttaattttgtaaatttactgaattgctttaaaatgagaatagggtcaattttaattaatgtgaaatttgtaatattttacataatattaaatcttaggaatcatgggaagaagaaaaatactatttgtaaaattaattctaatttattttagaaaatatcttcagaaatgtaacatcatttcataagtctaattattacttaccccaatttttattggtttggtagctggaataaaacaaaatattctttatagaaaaggtaaaaatgaaaaataaaaggtaaagaaagggcttgaataatatttggtagatagtttggggtgaaaatatgaattatacaaaactttaaaacacacaaacaaaaattggtttatacttttttagttacattccaacccaggcctcaatgaggaagagagagagagaggtgggttcggccaaagatagggagagagaaggct

SEQ ID NO: 279501 - DNA, 443 bp, Cannabis indica
aacctcccatcctttctaaacctctggacggtgaagaacaagggatatacctagcagaaacggagcatgccgtgagtgccgtactgatcagagaagaagacagcgtgcagcatccagtctattacatcagtaaaagactcgtcgaggccgaaggccgatatccattgatagaaaagctcgcctactgcctcattctagcaacaagaaagctgaggccttactttcaagctcatcctgttcgggtgtataccgaccaaccactacgacaaatactgcaaaagccagatgcctctggacagttactcaagtgggcggtagaattgggtcagtacgaaatcaacttccaaccccgaacagctatcaaaggccaagcattggccgaatttgtggtggaatgcacaggcaaaaaagaaagcataccagcaagcgatctcgagccaata

SEQ ID NO: 279502 - DNA, 603 bp, Cannabis indica
aaacggaaaacaccattaaagctcaaacttaagctttaaaaagttccaaactcgatttctaactcaaaatcacctcaaattcaacaaataaacatcaaaactagtcctacatctacccaagaacaattctatgaaatcagaatctctataactagtctaaatcacaaagtcactatataaaactaatcgttttcaacttaaaacgaaaccaatccttaccttaattttttcctttatgatttactatcgcgctactaccagagtttgaaatactaggtttcaagttgaaaatcaaagaaagtacattaaaggaggagagtgtcgcaaaaaggagaaaagagaatttcatttctttcgttcttcagtttataaacttaatatatatatatatattacttaactgatacatttttaaaacataatatataatatagaataatgataatattattaacaaaaaattttaattttcatagttttcttattattttttaacctactgaaaaatactctaaatttttggaaatttggtcaactccgaataccataatatttctaaaatacgacttaatctcaatgatcccatcaatattactaactaaa

SEQ ID NO: 279503 - DNA, 507 bp, Cannabis indica
atatccactgaaagtataatcatctcattcggagatggatgtacattcaggggtggatatgattttttcgttatattcttaaaacgatcactctagatattaccttatgcacaagaaatttgaaatgtttgaaaaatttcatgaatttctaccattaaggtaggtggttaaagatcttgcgaactgataggggtggagaaatatttggttcatatgcagttcaaagatcattaaattgattttttgaattatatccaaacttacctccccagaaattcgatttgcatattgatgattagttactagttgttgcctaagtctttctagggatataccatagtgataggaaaaaaattcagcatgattaaatggttgggtacttagtgtaaaccattactagattcatggatgacctaattgaaatcttaagaaaagctagaactgttaaccatggtttgcatgtttgttagttattctaagtgattaggggtggaccatcccatagtc

SEQ ID NO: 279504 - DNA, 837 bp, Cannabis indica
gttttacttcgaccaaatctcccagatgcaatgggagttggcatgaggaagagaattgtgcatggaattccgaagagaaggttttccatgaactaaactttcctggagccaatttgaaataccattgctgtgcagcctctgatagagttgcggggaagattctgcaacatacgtctcctcgcaccccttgtaaatccatttgcatctcgaaatacttgagatgagagagaggatcttctctcccagtgtacatcttccacgttggcatcttgaacttgtgaggtagtggcaggaggttgatttctggcgagaagggagttccgcgtgcacggtctaactcaagatcattgttacgctgcccggccatgccatgaaacatattcttcagttcgtcaagctgggcctgtacggctgggctgacttcattggcattctggtcgggttgggctacgtcagcgtctttctgagcggggatttgagtatgggctccggactgcacattcgttgtagtattctgctcgtctgttccccttcttctgtttaggtcgtcccttaggtcacggggtgttcccaacctttcgaacacagaagaacctggctgccttagcgattggttcgcttggttggcaggtggaatggctccattattttgcgtggatccatcgagcatgactcctcctgatgaattcccggacaaggtctgtccgcctcctcttggcccacgagtggaactcgtgccggggattggacgctgaccgttgtttgtctgggaagcattcaccgttgggtcatcctcggttttccaaggggaatgacgctcggcgcctgctggcctac

SEQ ID NO: 279505 - DNA, 314 bp, Cannabis indica
actccaaatcaaacctagacccgaattgggagtcggacccggatcccaacccaaacctggactcgggacccgaactcaaacctgaactcagacccaaacatggaaccagactagggacacagaacacgggtctgaaccagaacaagaccgagacccgtgacagtgatctagatcttgactcgggattcgggtaacggggcttggaacagaccagtagtcggtgtctagatctgggactcagactaggaccaaaacccagacgaagaaccaaacccgaacccaaacctagacttgggcccaaaattagaacctga

SEQ ID NO: 279506 - DNA, 515 bp, Cannabis indica
aacaaaattttactttaattttttaactaaaaaaaataattattacatagaaaatatgaattgacactttatttatatatttataaaaataactccataaggcgtggacaacatttataccttttatgtgattttaattactaaaatacaacttacactatcacttacacaatcagacgatggttgcagggtggttgctgcgtggttgcgcagtggttgcatcagacgaaagtttcaatcaaacgatagttgtagggtggttgctggatggttgcgcaatggttgcatcagacgaagatttcaatcagacaaaaatttctgggtggttattgggtagttggccgaaggttgcatcagacgaaggtttcaatcagatgaaataattgttagcaaaatatttatgcaactgtaatgcaactgttgtgaaacattaaaaatcataacattgtttccacgtacgtaactctatctacatgtctctttatgatttaatatgaacaaattcaccattaaaa

SEQ ID NO: 279507 - DNA, 845 bp, Cannabis indica
gtttaagaagcttgagctataagaagaaaaataaacaaggttagtagtccagaattaataatccaaatggataataattcactaaaacacatcagtttatagaaagaaataccttgtttctttgcaagaagcttaggacattggggtttccaatggcctttctcattgcagtagaaacattttccttttggtgtatcaccagaagctgcagcctttttgttcttagctgctttcacagcttgagctcgcttcttggcatttttccacttcttcttattcttggatttggaagtagaggcaacgtgtgcctcaggattactcgtcctattaccatttccagaattctgaggtttactccctctcttcttgggtcctccaatcaaattttcatatgtctgaaggtcattgactaacgtatgaaagtcttgttccttcttattcatgacataatttgatgtatagggcagaaaatctggagtcagactattcaagatgagactcacttgagtagtctgatccatttcagcaccatgattctgggcttcctggaaataacttgccatctggagaaggtgatcacgcacattctgatggggttccatccgtgcgttgatgaatttcttagtcgcgtcaaagcgagactggatagatgccataccgaatagctcagttaactgcgtcatgatttctgcagccgtgacagtgttagcaaaccttgttttcaaggtgtcaaccatgctggaaagcatgaagtatcgagctttgtgttagcattctgccaacgctcgaacttctctttaacagcttggttgcattgtcacctggctgctcaggagacggctcag

SEQ ID NO: 279508 - DNA, 693 bp, Cannabis indica
ggcataaaacccaacaaaaacacttagctccgtataaatgatatttcagctaagttaaatgagtactcaaccatttatctctgtttagccaagctcagaggaatcatcatttcactttctatttgccagatagaagctatagattccatctttatgttttgcgctcccactcaattgcactgccatgttcccaaaatgtacgtatattgaattgaatagatattacggtaagtttaatatatctgaatcaaagttcaatatcggtcccttccgatgcatactccatgcatccaacccaagctttactttgaccaatgctctggaaagaacatagcatttatccaagatgcaagtaaactatgttgtagattgtcatatcagttaaaccctgtgttctgataaatctaggaatatatctttaatcacataatcttgattactttccactgtgctgacgacacaataaacaagaatataaatgtgaaaagggtttggatgaatttataaatcaaatagacaagtaattgataacatgaaccaaataacacacaaatgaatgaaaaatacttctgtttctttattgatatttaataatagagattacattgaaatagagttttatttagggcataaaacccaacacattcgatctccattgttggttctacatagttcttgttttagtgagtaatc

SEQ ID NO: 279509 - DNA, 970 bp, Cannabis indica
ttggacttatgccttcgagaagaaaaatctgctgatcttatactaatatcagaattgttgcccaaaaattcttcatgcacaatggaaaaattcaaatcatcttagtctcattgctatgaaagttcaattccataacattcatttaatgctttgccaaacacctcaaatgcaaaagagtttttcaatgctgtagaaaaactatatgacactggtgaaaacgctgaagctggacatcttatggatgaaatgacaaccattaagtatgatgaattaaaaggagtgcgagattttattctgaaatttttaatgttcagtccaagttgaaagatcataatattcctcttcctgacttttacaccattcttcaagttcttcatgaacttcctacttcttttagctttaccaagacaacctaaacacttatagtaaaatatggagtgttagtaaccttatttctcagtatatagctgaaacaagcaagctaacaaaatgagaagaatgagtcttctcactttgtttctcaactcaagcccaacaaaggataaagaaaatatgaaaagaagcaaccacaaccaggggctaagggatctcaagaagataagtgagagggagtcaaagcttaaagtggcacttatgttggagttgatgttatctatgttggcacacttattcttgaattacagtttagtgttcagattgttttgaacagtactttcttgattcctacttttaaagtaattcagtttcgcttccgcttttagttaaacaatgattttcttttcgttttgccaattatagtgttgacattatgtttgactccgaataattggaaactgttttactctgatattcttttcaaattatcattgacttccttagcttcctttttcaatgttgtgaatattgtgggtaagaaatcttatattaagataacatccttattattatggcacgatatatcgggtcatat

SEQ ID NO: 279510 - DNA, 630 bp, Cannabis indica
gggtttgggactgggttaaggtcttgctgtgggttcgggtcgttgtaagggttcgggtcctgggctgggtcccaaatccagacaccgactacgggtcttgtccaagccctggctctagatccagatccaaatctcatgtcccaatctggttcaatttcttgtcccgggtcacgagctgggtcctaggttcaacttcgggtctgggtcgagtactaggtcccggtcctagttctgtttcccaagtccctatcctgatctgggtcgaggtccaaattattgtgtgggtttgggtcccggtctacgttcgggtttgagtcctagtctcggtttgggtttaggtctgtgtctggtatttgatctaggttcgggtttgggttaagatcctagtccttgtcctagtcctagttcagttctagttccatttacgattcttagttcgagtttgggtttgagtacgggtcagagttcgagtcttggtctgagttagggtttgggtggggattttagtctaggtccagatcagggtctgggtgtgggttcacattcgtcttctaggtccaggtcgggtccgggtcttggtttgggtctgattctaggtgtggatgtttgagttcaggttcgagtctgtgt

SEQ ID NO: 279511 - DNA, 648 bp, Cannabis indica
tattattatttaaaattaatcaagtaatttaaagaataataaatacgaagatattgtaataaaaggaggtatcttgtcaaatgcgaatttattgtgttcagatatatttgggaagtcaaattttatggaatttggtttgtaatctatgtggtataggaatgtatcattataaatgtttttatggtaacttaaaaggatacaatttttggaagttttacaacttgtcttttggaaattaaaataggaataattatgtcataataactaaattggattattttaagtaatttcaattcaatatagattgatttgattataataaagttttaccataaataaatatgtataaaaattgcttttttgggataagtacaataaaggaatttgtaatattttagaaatggggacattaataatgaattaatatggttgattttgtctattttgggaaggattatggaattaatgggtcattaatgcttaataatcaaggttattttgtttcattgtattgaattacactaatcattgataatcaaggttattgaagtacattattcgttgcttactttattattgcgataattttcaaagtaaacttttgatatcctatggattggagcattgcaggatttttgttattactag

SEQ ID NO: 279512 - DNA, 746 bp, Cannabis indica
agcaatcataagcgatgaagggagtcacttctgcaacaaacagtttgaagcactcctttcaagatatggtgtccgacatcgaactgctttaccataccatccctagagtaatggtcaagctgaaatttctaatcgggagataaagacgattctagagaaaacagtgcagagatcaaggaaagactggtcaagaaagttagatgacgcattgtgggcgtatagaacagcttttaaaacaccgattggcatgtcaccatatcggttggtgtttggaaaggcttgtcatctgccggtggcgttagaacataaagctttttgggccatgaagactctcaacatggaattgaaagctgcaggagagaaaagactactgcaattgaatgaactagaggagtttcgtaatgaggcctatgagaatgcaaagatctacaaggagagaaccaagaagtggcatgaccaaagcttagttaggaaagagtttcaacctgggcagcaagtgttactattcaattcaaggtttaagttgtttcctggtaagctgaagtcaaggtggtcaggaccatttaacgtggtcaaggtgtttccctatggagttttggagttaaaaggtgaaggtccagcaacctgcaaagttaatggacagcgtttgaagctctacttgggaggtcaatttgaccaagccaagtccgacattatctggcgcctctctaaacacaactcagcgtccggctatatgacgataaagc

SEQ ID NO: 279513 - DNA, 702 bp, Cannabis indica
ctcaacccaaagaaatgcacctttagtgtcaaatcaggaaaatcttgggcttcatcgtcagccaaagggggattgaggcaaacccagaaaaaattcaagctctcccgagcatgccatcccccaagaagcataaagacgtgctgagccgaaccggaaaggttgccgccctgagccgttttctctcccggtcaacagacaagtgcattcccttcttcaacatattgaaaaagtgccaaaagtttgaatggtctgacgagtgcgaggaggcattcaaaaagttgaaagaacacatggcgaagcctccaatcctgtcgaaacccgttcttggagagaacctgttcctatatttggccgtctctgagcacgcagtcagcgctgccttagtctgggaagaagagaaaactcaacatcccgtgtactacgtcagcaagcgcatgataggggcggagacacggtaccccatcatcaaaaaattagttttctgccacctaatggcctcaagaaaattaaggtcgtacttccaagcgcacccaatcaaggtgttgaccaatcacccactccggcaagtcctgcaaaagccagaggcgtccagaaggctcctcaaatgggcaatggagttaagtcaattcgacttacactacataccccgcatctccataaagggacaagcattggcggacttcatcaccaaatgtaatgaag

SEQ ID NO: 279514 - DNA, 237 bp, Cannabis indica
gttcggtaatagcctaatccttaacaaggaagaagattccttttcttatagctcctacaacagtatctctgaatatataattcttagataataatatagtcttagcttagctgcgtatcaactttcaatctctcggtccccttgcccaatgaatgtaattcactatttatagggctgggaaaattgaggaggaagagtttcctctctcattacaatgcgcataaacagaaagatcgt

SEQ ID NO: 279515 - DNA, 916 bp, Cannabis indica
gggtactttatgaagtacctaaattatgtggttataaagttgtggaacgatcaagcgtgttattatgtgatgagttgtaattgaatacatttttgttaaggtatgattgaataaatgttatatagcttatgaaattggtcattttcttatagtctcagtggcttagggatgtaagaaaacaggtttgtaatgatgtatgattggagtgctttatgaagcactgaaattgtgtggatatgctaatgtgtgaactagggtgctttatgaagcattgaaaatgaatgtttatgataatgcatgattaaggtgttttatgaaatactgagattgttgattatgtatagctgtaaatactcttaattttgtaatgagtttgctcgtatagacgttgaattgtaaatgtacgttgaaagagtgtaatctactggtatgaataatctgttgaaatgaaatctactatcactttccataatattcttttgtttaatagcttttcttgctgagtcactatgactcacgggtgcttcatggtgcaggtaaggatcagcggttctgtttggccacgagtcagaggtctcccagcaatgtacatatcaaccgtgttgtcttggtttccaggaagcaggatcacttttttttttatgattggatgtataacctactcttgtataacggttttaaaattggttgtaaaagaatttttaccaacaggggatccccatattacgacagtattttgaattaagttaaagtttctattttaaatttaattaaactacacttttcctaaactaatagattaatggcaataagattataaaagcacacacacacgtggcgttcctgaggttcagggcgttacagaaatactttcagatataactccttccaatgttccgtcctcttccactcaaga

SEQ ID NO: 279516 - DNA, 609 bp, Cannabis indica
ggtgatgaagtctgccaaggcttgtcctttttatggagatgtggggtatgtagtgtaagtcaaattgagttaactccattgcccatttgaggagccttccagacgcctctggcttttgcaggacttgccggagcggatgattggtcagtaccttgattgggtgtgcttggaagtacgaccttaattttcttgaggccattaggaggcagaaaaccaattttttgatgatggggtacctcacctccgcccctatcatgcccttgctgacgtagtacacgggatgttgagttttctcttcttcccgaactagggcagcgctgtccgcgtactcggagacggccagatataggaacaggtcctctccaagaacgggttttgacaggattggaggcttggccaagtgttctttcaactttttgaatgcatcctcgcactcgtccgaccattcaaacttttggcacttcttcaatatgttgaagaagggaatgcacttgtctgtagatcgggagataaaacggctcagggcagcagtctttccggttaagctctgcacgtctttatgcttcttgggggatggcatgctcaggagagcttgaattttttctgggt

SEQ ID NO: 279517 - DNA, 860 bp, Cannabis indica
aaaaatgaacttatccacttgtaccaacacatcttcaattttcccttccggatgagccatggaacgatccgctaattgcaaagtgacggtggtcggccttgcttctccaattcccaacttcctaaaaatagacataggcatgagattaatactagctcccaagtcacaaagagctcttccaacatctcgaccccctatagaaattggaattgtaaagctgcccggatctttcaatttgggtggaattttacttttcaacatagcactacatccctccgtcaaagcgaccgtttcaaactcgccaagcctccttttctttgtcaaaatatccttcaaaaacttcacataagttggcatttgctccaaagcttccactaaaggtatattgatgtggagctgctttagaacatcaagaaatctccggaattgaccatcgtcttgttgcttcttgaaccgttgaggaaatggtggcggtggcttttgcaaagacttttctgcagtagaatgctgactggatgctgtaactactgggggaatttcagcagctgaagttgctggttttttcttcatttccccctctttttggattgaagagggctctttactgcctgctgcagccacatttgactcaattatttttccacttctcaaggttaccgctttgcaatgttctttgcaatctcttcttgggttttcggtgtcactaggcaaagtgccttgtggtctattcttcaaatcattggccaattgccccaattgaacttcaagattccgaagagatgctgcttggctttgaattacagcgtcattcttggccatataatctctcattaagctctccaaagaactagtttgagagc

SEQ ID NO: 279518 - DNA, 531 bp, Cannabis indica
ctgatgaatgatgtgctatacgagtttttggatagattcgttgtagtatatcttgatgatattgtgatctatagcaattcgttagaggaacacttgcagcatctacggaaggtgttgacaaggctgagaaatgaaaagttgtacattaagaaggagaaatgcgagttttgtcggaaggaggtgaaattccttggtcactgggttggtcaagggaaattgagaatggatgagggaaaagtcaaggcgatcagggattggcctatccccactaaagtagcagagttgcgatcatttttggggctggctaattactatcggaaattcattaaagggtactcaaagagggtgagcgctcttactgatcttcttaaaaaggatcagaagtggtgttggtctgaggaatgcaatgaggcatttgagaaactgaaggtggcagtgtcttcggaaccaatactaaagttgcctgattttgatttaccattcgaagtccaaactgatgcatcggatcgtgccttgggtggagtactggtg

SEQ ID NO: 279519 - DNA, 594 bp, Cannabis indica
tcagagaaatcaatacaagttttccaagttctgttgggcttcgggacgagaacaggattggctattcacgagggataaaacacctcgcgtataaaatcgttgactaacaacttgtcaacttcttattttagtgccccttgcctctcggaatccaagggtctccatttctgtcgcttcgctgggtaacttggatcgacatttaaatgatggcagataatattagggtcgatccctatcatatctccatggctccaggcaaattgatcctggttcgccttcaaaaagcttattagttgctatttgagctgctggtccaggttcttcccaatgtatacacattttgtgggatttcctaggtcgagaataacctcttccaattcctcaattggttttaataggtttttcccgtgttgaactcgagggtcaagatcctcatcttttttctcaatttcttctgccaagatcgtcatcaactgatgatcgacttttctatgctgcaactctatgtgatagcaatcgcgagccaacttttggtcgccacacaccactcccacgccatcttgtttttagaatttcaaggataagtgcttgatc

SEQ ID NO: 279520 - DNA, 646 bp, Cannabis indica
ttttatcgaggaggctgttgggtcatcgagaccagctcgcatcatagagagtcgatctctatgctttcacaggaggatcgagaggatactcgcacatatcctggtacatgcgagttaagtccgttccttggtcctacataatgcgggacatacgaatgcgactagacttggtcatattcacatcatctcgctatgtctagctcaggcgaggtttaaactcgaggagtctctcattcacatctcagcttttcttgggaaaattgagtacacgtgtcctccacacatgtgtctggtctcgagtttctaggtgagagaaatctcactataacataagtcaatatcactggttgatcttagataaaaagatctcaattctgacatagttaggttcaatttcaagagtgttatttgtgttctttgatttgttagttaaacctaccttttggtccgggtaaaatgtacattttgggaacatgatagtacaattgagtgggagcgctaaacatatatatggaatctatagcttttatctggacatagaagtgaaatgatgatttccttcgagcttggcttgatagagttaaatggaagagctcttatttcagtgattatattagtttactgaaatatcatttataggaagcta

SEQ ID NO: 279521 - DNA, 521 bp, Cannabis indica
tactacatactaaaaaaattaagtgaaaatacattttatttggcctccttatttcgtcatctggttccgccactgctcccaagcatccatgcatcgaggctctttagccaagatactcgcactgtccataggttctcactatgttaagacaaatcccaacatcgacgctcacctagtcactcgtgaccaaggtagcatgtgtggcaagatgccaacactaagttgacgtgccaacgcttctatcatgccccattcgatactgtccgaacagtctccctcgtcacccaaggactcccatacgtccatggaccatcctcaaggcaccatgcctccatgcatgttggcaggccctcgagacaagccaccaaactagtttcatacattagacctttgtctctttccagcatggtgcatatgtcccatgcgcgtatgcaaactagtccacgaatgactacccgtgtcatctcgtgttgagactcgtggccaaggcgcgccacaacgtctcatggaggtttaggcca

SEQ ID NO: 279522 - DNA, 805 bp, Cannabis indica
ccttgatcgcagttctcggtttatacttgatgtcgaactgactcaactccatcgcccattttaacaatctccccgatgcttctggtttcgctagaacttgtcttaaggggaagttcgtcaaaacttcaatgctgtgagcctggaagtagggtcgcaattttcttgaggatattatcaaggcgaaagccaatttctccatttggggataacgtgtctcggcatccagtaatcgcttactgacgtaatacactgggtattggcgaccttggtcctcgcgtattagcaccgaactaatcgcatattctgagacggccaaatagatggacaagacttctccggacaatggctttgacaagatcggaggctgccccaagtgcgtttttaaatcttgaaaggcctgctcgcatttttcattccaatggaacctgttgttgcctttcaaaatctgaaaaaactccttgcatttatcagaagatctggatataaagcggtttaaggctgcgactttacctgtgaggctctgaacctcctttggcttggtgggtgatggcatttctaccaatgccctgatcttcgcaggattggcttctattcctcgctgattaaccatgaaaccaaggaatttcccagagccaaccccaaagacgcatttcagtggatttagacgcatcttgtatcgtcgcagtatatcgaacatggcctgtaagtggacaatatgatccttcgcatgttgtgattttacgagcatatcgtcaacatatacctccatggtctttccaatgagatctgcgaacatcatattcac

SEQ ID NO: 279523 - DNA, 683 bp, Cannabis indica
tgcctgatgacttgtccaatgtttatgttgtaccccttcataatggcgtacacatatttcaagcgatccatttggacatcggagaagtgcttatttggcaccaaccgagcacttacaaagtacaaccatgttttcgccaccgggtttaattcacaccagtataggatgtttggcgacccctctgtgccatcgttgtcgtggaacctcaacccaggaaatcccaccgtctcagccacatccaccatatcaaactgctcttcctcctcaataattcggaggcgttgctcttccctagagtaatcttggacagagaacatcacattaaaagcatcagcagtagcgggaaccttctttccacgcacctttacttccccattccggcggtcgggccaatttgcaagaaattcacaggccatagtcacattagcccgaccccgagcatccacaaagctcccccactttatcctctcaatttgggctcgaattgtctcaaaccgtggttgtcgtctcaaaggattttcagggaattcaatacctcggtcttcaatataagccctatttttcagcgtcataaaacgattctaggcctccacattcccaaaccgagttctatcaaaacccgtaattggtgggtttgatgacgaaccctcctccacatgcctagttcttttaggtgccatttt

SEQ ID NO: 279524 - DNA, 480 bp, Cannabis indica
agttgtcagaaaagaagtagtcaaatggttggatgctggagtggcctatcccatctcagatagtaagtgggttagtccgatgcaagtagttccaaagaaaggtgggatgaccgtaatcaagaatgaaaagaatgagttgattcccacaagaacagtcactggttggaggatctgtatcgattatggaaaactcaacaaagaaacccaaacagatgactttcccttgcccttcattgatcaaatgctagacagattggcggggcaagaatattattgctttcttactggctactctggataccaccaaatagccatagcacctgaagatcaagaaaatactactttcacatgtccctacggtacctttgcttttagaagaatgtcattcggattgtgcaacgcccctgctacttttcaaaggtgtatgatggctatcttttcggacttaattgaatcctgtattgagatctttatggatga

SEQ ID NO: 279525 - DNA, 529 bp, Cannabis indica
ttttggaaaagtgttgtcaaggctaattctatcttgaaaaaaggggcttgtaagttgattgctaacggagaatcaacgaaaatctggtcggacccatggattcctcactctaaaggcttttgcccgaagcgtaggaggggtgcccctaccatctttaatcgtgtaggggagttaatctgtaacgatggacattgggacctacaaaaactgaaccttctatttgagaaggacactgttgcggccattttgaaagggggtcacccctctggtgttggtcaagatagatgggtttggacgctggaaagtaacgggcagttctcgtgtaagtctgcttatctatcccaagccctggaaagagctcctcactgtgatgtcgcgccaaagctttggaataaactgtggaatagcaaaatcttggagcgacacaaagtcatgtggtggagcatcttatccaatgctcttccggtaagagatgttataggaaaacgtttccatatagaggactcgagctgccccctttgtggcgtgg

SEQ ID NO: 279526 - DNA, 851 bp, Cannabis indica
gcaatgactgctggacttggcaaggagccagaggagtcctcgcctagtacccaatagcaaaagtctagggaacctagccccataaggtatcccgctgaagggaaccaaaagaaaaatcctacctctacccctgggagaaagaaaaaggcgcaggatccgcgaaagatccgtagaggggcaaactccaaaaagggagtcttggccctcaggatcgagaggaccgaaaaagcattttcgtgcaccaagagcccggaggtagaggaagaagaggacagagatgtcctcccgttgatttgagaaatcaaatcaatgggaatcaaggtgacctccgggatcaccttgaccaaaagaaatacgggcccgcggtctccacgggaacgttaaatgaaggaatcatggcggaactcgccatactccgaaaagatatcgcccgagtctcccggagacaaaaaggggacgactccgactcagactgtgaggaccgggagccatgtgctaagcacatcctggaagcagagctccccaagaactttaagatgcccgaaatggcagcttataccgggaactccgatccaagcgaccacttgtcgcggtttaaccgtgtcatgacggtcatgagagtcagcaatgacgcaaaatgtctgtgcttcccgcttactctaagcgggtccgcggaggaatggttcaagaagctggaaccaggatccgtgggctgttggaaaagttacagaccaacttccggagcagttcgccgcaagaaaggtcaacctggaggtcagtgccttgacaacatcaagcaactgcccacagagaccttgaaaaaaaactatataaaagaggttccgagagga

SEQ ID NO: 279527 - DNA, 798 bp, Cannabis indica
acccatgagtcacaatgactcagcaagaaaagctactatataaaatcatagaaagtgccagcaaatttcattacaatgtaatatatataccaataggtcatacatactcaaggcgcataaataacttaatgtctatgagagcacacttattacgtaatcaagtatattcatagttatttataatcaacaatctctgtgtttcatacaacctcctaaacatttatcattataaatactcaccttcagtgcttcataaaacactctaattcacacattaccataattccataatctcagtgcttcataaagcactctaattcacgcattaccataattccataatctcagtgcttcataaagcactctaatcttacatctctataagcacgaattcttacatttcgtgagtcactaagattctgcaagaaaagaaactaatttcttaagcaatataaaaatccattcattcacattataacaaagatatatccagttacaaatcatcacataataacatgcttaagtcatttcacaacttcgtaatcacacaatactggtactttataaagtacccttaccactcgttaaccacgagctacttatgtcactatcgttgcccgatacagcaaacgataagtaagaaacctatccgcggtttcaggagtaattactcataacggtaatgaccgtatcttttactagatcataatcgagtcacaacgataataatcggttcatatcattaccctcgtacttataatcgagtctctaacgatgataatcgtttccttacttatt

SEQ ID NO: 279528 - DNA, 736 bp, Cannabis indica
cgtcaacccacctgcctttggtaacgtctaacttcttcttgatattatcctttatggttttattaatcacttccacttgtccatttgccggaggcctggatactaacgagaagcttttgataattttatttctctcgcagaattcagtgaacaagttgccatcaaattgggttccattatcgaatactatctttatgggaatgccaaacctatagattatgttcttgacaacaaagtcaaggactttcttgcaggttatggatacaaggggctcagcctccatccatttagtgaagaagtcaactgctaccaccgcatacttagctcctcctctccagtgggtaatgccccaatcaggttgatcccccatataacaaatgggtagggcaatgtcatcattctaagttcagttggcgctacgcgaggtatatgtgaaaatctctgacatctatcacatcatttgacaaactcatgtgtgtccttattgatcattggccaataatatccttgtctaatgatatttttagacaaactttgccaacccgcatgatccccgcagaagccttcatgaatttttctaatgatttcatttgcttctgggggaagaacacactgaagtaggggcattgaataccctcttctatataatttgccttcgatcattgtgtaacgaggcactgtatacaaaacttttcgcgccttgttttgtcatttggaagttttcagttgagtaaat

SEQ ID NO: 279529 - DNA, 517 bp, Cannabis indica
gatcaaaatatagtaggatgtcacctcattttctttagtactttcttctatatttatatatagatatagatgatttatttattaatttttttttaatttaaaatattttacaaagattaaaaaatgtaaaaatatgtgtaaataaataatatctattattcacatatttgatgaaatatatataacttaaaagtttaacattcacaaagtctcatatcacagaagtatatataaaaaatatatatttaaggtgtcttattattctaataaatatcatatattaataaatcattataattttaattatttaaataaaattaaaataaataattataagagaataatttttatatgaaaaaaaaataaataacttttttataattatttataacctacatagataaatagtttttaaacaatgtgagatttttagtttgtttgtgtggtttagttttcaaacaaaataaaaaaatgtgttagaaattaggaaaaataaaaagaaaattttataaaatga

SEQ ID NO: 279530 - DNA, 518 bp, Cannabis indica
gtacgggatctcaccgcggccatacttcctctcgccacggccagataggtgctaaaaaaaacacggttctgtaactagcatttagccgcggcgagggtgtatctccccgcggcgactgtagctccaaaatcccctctccatttagtgatctagccgcggccagatatccaatttttctcgaaatggtgtttttcttggcccagctcgtcttttactagacttttacatcccaagtcctcttttattccaaagaacctgaaaacatagaaaacaagcgtaattccgtcccaacacagtgaaaaacgcacataaaatagatccaaaatataggctaaaaatagcctaataaactcccccaaactgaatctttactcgcccccgagtagaactaagactcaaactaaaaacagacaacacaatagataaccaaacttttcgatgattgaactgctatcaccacctgcacaacttcaagccatcaataacccgaatttcaacttgccaactctaagaactaa

SEQ ID NO: 279531 - DNA, 677 bp, Cannabis indica
attccggttctggaaattcctgaaccccatccggaattccggttgcacatccggaattccggttcctcgcagaatcaatcaaaaattcataactccctcaaatcaaatccaattcaaaccaaaccttccagacctgttcgaaataccccaaagaacatttctaaagcatcaacaccacccagaaaacacagataataaaaatgccattaaagctccaagctttgagttcaaaactcaaacttggttaaacatcattaacatgcattcaaaccagctcaaatcttcctaaatatgcataaaataacctctaaaaactacagcaagcatcaacaacaagtgcaccaacatatttcatcattttctttaaaaactataattttgagttaaaattgcataaattgataaaaccaactaatcaccaacacaatcatgcttgaatcaacattttaaaatcatgctctaactacagaaatcaacaacaacatacagcagcaagtataacaacaaaactaagcatgcaaccaattctaaactttcttaaaaaccaagaaaactaaaagagaagctacaaggatcttaccaagcacttgaacaacacttagattggataaataattcttgaaaaatcaagaagaactcccagcactagcaaccacacccagccgagagagagagag

SEQ ID NO: 279532 - DNA, 517 bp, Cannabis indica
tacactaatgcccatgctcttattgtcactgggttgctgaccatgccagaaggtcccaagaggatttcttttggaaacattttccttaccctcagaacacactttcttgtacttttttttcaagaattttgcatagttcttggtcagcagatctacagcttcatctgagaaaccagcagacacatctgggataaacatcttttcttctttgtgaatgaacgcaatactgttgtcccctttttctttgttcacatccttctttttttctttcttccaccttgttaaggacatttcataattctgcaaggatccaatcagttcatcaagatccagttcctccacgtttctcatttcttcaatggaggttactttagacataaatctcctaggtagaactccaagaactttacgaaccaaatttgcatttgaataagtctttcccaaagcataagactcatttgatatgtcacacaatttggcatggaactcagccaccgtttcttcttcctccattgat

SEQ ID NO: 279533 - DNA, 1306 bp, Cannabis indica
aaggaaggagctcgaggaagtcaacagggcaaaagaacaggtggagctcgagctcaagaagtcgcaggacacgaacgctgagatggctcgcgacttggaggctgaaaaagagagtgggaagaaacagtacgatcaggctgtgtctgactatatttacactactctttccaaggtccctgacttcgacttctcgctgcttggagccgaagctgcggaaatggctgaagcttttcgcgcgatgtctcctacccagactcagggtaaccttcttgatgaaaccgagggagtacaggctgaagaggtcgagaatgaagtcgtgagcaagattgcagacgaggctgctcctgatgagactactcccatcgttccaggcgtttgattattttctatcttatgttgttgtttaatttcactcttactctttttttttatatatatgcggtacacgggtactcgcacttctgtacttagagaattttatcttactttttggacaaatttctatcctcgcagggatagcttacattttaatatttacgcagtacacgggtacttgcgattttatatatatttaactttgatcacagcttggtgtgaatgcaattatatatatatgcgattttaattacagcttggtgtaataaagtaggaaaaactcggtaaattaaattactcgaaaaacttaataagtgattttattcaagcaatcagtaatacatgcgggtaccatgcccctatacttaggaagtattttgaacaaaaaatatctaagtataagtactcgaattatcataactgaataacgcgaatattactgataataaaatttcaagctctcgctattccatgctcgtggaatcgcggttccatcgagtgttgcgagtcgataagtggcatcaccaatttgatctgcgattttgtatggtccttcccaattgtctccaaagactccgtgagctgggactttggtatttggcattacttttctaaggaccaagtctcctactcgcagaggttttatctttactttcgagttaaagtaccttgctgttcgttgttgataagccgcgttttgtagttgcgctttatcacgcttttcttctaaaagatcaaggcaaaacaactgattctcgttgttctgcgagatatcgaaagcatctctgcgcaaggatcctgccccaacttctactggtaacatggcctcgcacccataagaaagtgagaagggtgtttcgccagttgtagatcgaggggttgtattgtaagaccataggacttgcggtaattcatctggccatgccccttt

SEQ ID NO: 279534 - DNA, 1337 bp, Cannabis indica
gactttgtagcagtacagacctatatctgttaaaaacttgtatgttcttcgtctggtggatgcattttgatctgattgtagcctgaataagcgtccatgaagcttaaaattccgtgcccgtctgttgcatctacgagctgatcgatccttggaagtggaaaatagtccttagggcatgctttgttgaggtctgtgaaatcaatacagactcaccatttcttgttcggcttgggcacaagtacgggattcgcaacccaagccgggtaaaaagcttcaattatgaagttgttgttgcgcagcttttcaacttcatctttcagggctactgctcgttctttatccagcagtcttcatttttgctgaactggccggatgttaggatcgatattcaggacgtgtgaaataatagaagggtcgattccgaccatatccgcatgtgaccaggaaaaaacatctaggtttgctctcagaaattttatcaactctgattttacttcgagcaacaaaccctttccaatttttagctttctggccgggatagctggatcgatctcgatctcttctaattcttccacaggtccaacattgctgcttgggtccccaagtcgaggatccacatcttcatcctcgccttgggaagtttcctacttgggaatgttttttcccttgtctgggctctggctggaggatatttccttcttagccttggccactgcaaggttgtaacattcccgagcagattgctggttccctctaagacaccctaccccattctttgttgggaacttcaggcacgagtgaaatattgatgtgacagcttttaagtcatacagggctggtcggccaagcattacgttaaaggctgaaggaacatccaatattaggaactgtgccatgatagttatgctcgtcggagcttgtccaacagtgaggggtagccggatttgtcctagaggtgcaactccttgaccggagaaaccatagacaggctggaggcatggagttagatccttgagttggagccccatcttctcgtaagcagtcttgaacaaaatgtttgaagaagctccattatcaatcatggttctggccaccattttatttgctatctggacttccacgaccagcgggtcattgtgcggaaatctaatcttgacagcatcttcatcgttgaaagttatggttggctctcctgctcgtggaactttgggcttcctttcttccacggccaggatgacttcttcttgctcgtactgagctgttcgggcatacctctcccgagctttgcccaaaactccagcgatgtgcgggcccccaataatgacttgtaagtgtcc

SEQ ID NO: 279535 - DNA, 599 bp, Cannabis indica
tttgagagtgttagcacactcggcctgaatgtgtccgaacccatcacattctctacactgaatgcccatgctcttattgtcactgggttgctgaccatgccagaagttcccaagaggatttcttttggaagcattttccttaccttcagaacactgtttcttgtacttctttttcaagaattttgcatagttcttggtcagcaaatctacagcttcatttgagaaaccagcagacaaatctgggatagacttattttcttctttgtgaatgaacgcaatattgttgtcccttttttctttgttcacatccatcttgttaatgacatttcataattctgcaaggatccaatcagttcatcaagatccagctttacgaactccaaggactttacgaaccagctttgcattagaataagtctttcccaaagcataaaattcatttgatatgtcacacaatttagcatggaactcacccaccgtttcttcttcctccattgataaatcttcaaacgcttttgccaaagcacgaagacgggatttctttacagcatccgttccttcattttaattcgtagtttttcccaagcctctttggccat

SEQ ID NO: 279536 - DNA, 672 bp, Cannabis indica
aggggggctgagaggttttaaaacctgggcaaaaaaatgaaaaatgggggagaagaagggggcttcgtgctcctgattcatatatatacttttaccggcgcatccaattgcgccagtaaaagtgtttttaaaatctgacctaagtagccaaaaacgagcgtttaagtaaatacttttaccggcgcaataaatacttttatcggcgcacaattgcgccgctaaaagtattctcacttatcacatcaaaatccacatgtttcctttaacacttttaccggagcaatggtgcgctggtaaaagtattcccacctaccaaggaaatccacgcgagaagtttccctctctttttttgagacttttaccggcgcaattatgcgccggtaaaagtaaacaagcgccacaataaatgaaataaaaggcggcaaacttctcgcacctgttggcgcttcatttggtaacttttaccggcgcatattcagtattgtgccggtaaaaccttttaacaccggcgcaataatgcgccggcaaaagtaaagcctaaatgcaagtgggatttcaaattttgctctatctcgataagctttaccggcgcatttgacgaattgcgccggtaaaaatgcattttcttgtagtgattttagtcacaataaaaatatcattatcacttaaagt

SEQ ID NO: 279537 - DNA, 725 bp, Cannabis indica
ataaaatttgcctaacatatatctaatatgttaatatgatggcaactaacatgtacactaaacatgtataagcatatgcatgacattatactaatcttacctcgattctgaattcaggtgtgtcggtcaacctgagtggaacaatctgctcggcgaattacaggctcctaaatcataataatcacaacactgataagtgacacgctaaatcacttctcggggacttaaactagaagctaaaagtttccctatcgataaatagcatggcaataccctaaacaacacaaaaatgggaagaactagggttctcaaatttgccacaaccggtagaccggttcctcaactggaattccggttctaggtagaattcttggaagccaaccggtcgaccggttccacaggccttcctgaaactggaattccggtttagtgcatgaatttttcaaaaattcataactcgaccaattcaactccaaatcacctaaaactctccagacctgctccaaataccccaaataacaattcaaaagcaacaaaacaacccagcattcacagaatcaaaatccaccatgtgagctccaagtttgagcttcaaagctcaaagcttagctaacaccacatcctgccatcacaaccaactaaattcaacctaaaacaacatataaaacatccagaaacaaacctcaaatacaaacaaagatcacagcagcaaaaacaccatttta

SEQ ID NO: 279538 - DNA, 510 bp, Cannabis indica
atcatcatttgattccttcctaaccaatttcgatttttctgttgatgatcatcatttcattatcattttctacttttaattgctttggtgttttatttcttgttgctattataaaaccacattttcttatattatatcaacgcgagaaatataatttattgactataatcaattgtattgcttgcttgttttattacataattatttatttaatacaaaagtttataaaattttgaatgtatgtcaacaattagatttttagtaaatggtcacaatagattataaatgtagttatatgttaaaaaaaaactattcgtaaaattaaattaagggattatttcacaaataaaaaaaaaaaaaaaaaaaaaaatacaaaaacacagctctacagaattttaaatatttttacgatttttttgactttatttacagaaaatacggtttttttatgttgtactcttgttaatttgttgttgattttttgttatctgcatgttattttttgttgtt

SEQ ID NO: 279539 - DNA, 655 bp, Cannabis indica
tgggttgcataagcgcaagaagagtaaatactcaccaagaacattctctgtatttaatacatccataaataacacagactcgtggactaaggatcattaacgccccaaccacgtaaaaatccttctctaattttcttacagttctctaatcttatattattttattggttgccgaaaacctcggtcaacaataagttagaaaaataatattttatatcattttacttattagaaatttataaatagtattttaaatatttaaataacctaggtatttttgtaaaattttgaaaaatgcttaatttaagatattttgacatataattaggataattattgttttattattaaatattttcaaatcatttatcttattagatatttaatttaatttgataaaataattcaaataaacctagatatttttaattagtttgattatttttttgaaaagatatttaaggttgtttttgacaaccctaaattttcaaaatagttggttaggtaaaataataatttaattatttaaatatcttacttcacaatctgttacatggacattgtttatttatttatattatttattcaaattttttaacaaacttattttttatttgatctaaattgatatgattaacttgttgacagatccaat

SEQ ID NO: 279540 - DNA, 617 bp, Cannabis indica
ttgataacgtcctccctgtgtgtctgtacagagccggaccttgtatacctgctcggagtgcgaccatgcgacgacgaagaggctgattctgcgtcgttgtctctcgatggtcgactgcgaggattacggcgctcaggatcttcgtcaatttgtgcgctctggtttggaaaccttgcggattgatcccttgacatcggatggttcaggtccagagcttcagggttagttcttcgttccctgcgtacacggttagtatgacgtctagaagttgttacctgagggttatcgttgcgaatggcgggaactcgaggagggcgtcgagctcgactctgtccatctacttcggcttgtagtgcccgcagttgatcctgaatcgcagcatattgatcagtggtgagctggatcattccctcggataccaccgccggagtgacggggggaaaatgcatggttgctggtggcgtggacgtgtccccgacttgagggccagtcgtttctgggaataggttgagaggtctgatattgctcctccctactccgccgttgatgacgtccacaggtggcactccagctccagacagtggtacactcatcattccaatattgatggacccgtt

SEQ ID NO: 279541 - DNA, 336 bp, Cannabis indica
attagttttggcatttaaatggttagaattggaaaaaatggaatttttgagaatataaaggaaagattgtcaaaagtagaaaaattccaaagtggggtccattagtgtggccggccacttgagtggtaatttccacttaatttttctattattttaatgcctaataaattctaacctaaacctagtggttgcccataaatagatagtgatggctcacactaaaagatgatgaaatttcttgccttcaggaaaaattgagccatctatcccttctatagaattcgaaccagcccctctcttttcttcatcatatgttcataccttgagtgatagagt

SEQ ID NO: 279542 - DNA, 521 bp, Cannabis indica
atgtgttttttatatcgttttacttattggaaatttataaattgtattttaaatatttaaatatcctagatatttttgtagaaatttgaataatgcttaatttgagatattttgacatataattaggataattattaattatatattattttattcttaaaataacaattgcctagcatatctactttaaaaattggtttattttattattttaattttattaaattataagataagaaaatgatattgaaaatatctatttagttattttcaaatcatttatcttattatatactaattcaatttgataaaataattcaaataaacctagatattttaaattagttttatttttgaattttaaattttgaaaagataattaaagttgtttttaacaaccctaaatttattacatggacattgtttgttaagtatttaattgtttattcaaaactttttttaaacaaacctattatttatttgatctaaattactatgattaacttgttgacagatccaat

SEQ ID NO: 279543 - DNA, 924 bp, Cannabis indica
tacccgaagcggggatggggcgggggcggggataatactatccgcaccatatccgaccccgatatagatatatataattttttttgtttttttttcaaactttgagacatatttagtttttattttctattatgttatgctttttttaagtagttttatcttttatcttctatgaattatgaatgtataataaatattagtgagaatattggtttaatttatttttttcagttattttaaattaatgtattttttttattttaccttaatggatacccgatgggttccccataaccgatgggtattcccctaccccgaatccgttggttattagacggggatggggcggggatgggggtataaataggtagtggggatgggggcggggattgcattccccgtacattaaccgaccaatttccatctctagtcacaatcacccccccttacgaggtctgacatcctcatcgaccacacttccggctggatcaaggctctgataccatttgtaacatcctcgctttaagcctccattgggcccttacacccactaaataatggctcttatacacaagtacgccactctagttgcttccaggattgatgactgaccctacaaaccaatacgagtgttttcagcgtgctttgtcctcactcgcacgcttcctggaaaaacttcccaggaggttacccatcttgaaattactccaagtcaatcacgcttaaccgtggagttctttcgctacagctaccaaaaaacaagatgcaccttgttgatataggtagtaccaatcaatccatttaagccctcttcatctgtatagtcccatacctacacagtctcaaaatccatcacacatgacctttcccaggcgatgtgaagattgcacagcttacctggtgtagacgctaaaaatctacaat

SEQ ID NO: 279544 - DNA, 849 bp, Cannabis indica
gatattggaagaccaaaaagattcttccaatgtatcatttctgggtccaatgaaattcataggtataggaagaagccctgtcaaatagagattttttctttcgaccatctttcgattgttaatacgatatataaggaccgctactacaaatagtactacacccttgatcgtgaaatatcgattgctcgttgaaccctgtaaatgtgaattgcgtgaaagtaggatactccaaattcgggagtccaagagttttataaaacgttcttgatggaaaaagatgtgaatgaaagatatcactgaattcaattgggtccatgaatctaagaaatagtgagaattcttgatctctctcaatatctctctcaattcgaaaatccaggatttgaattgatgtcctttcattaagattaagtcctcctaaattgcattgatttaccctaaagatttcatttcaattggaatttggttattcaccatgtacgaggatcccgctaagcatccatggctgaatggttaaagcgcccaaatcataattggcgaattcgcaggttcaattcctactggatgcacgccaatgggaccctccaataagtctattggaattgactctgtatcaatggaatctcatcatccatacataacgaattggtgtggtatattcatatctaaaacatatgaacaagaaaaaagtgtgaacaaatcgtaaagattggacaaaaatataccgccacaaaatgaacaaatgcaacccattatgatagtgaataaaatctcttaaaatgaagggctatttacaaaaatatgggaaaataaagataagttttgatatatatggcataaaaatttaat

SEQ ID NO: 279545 - DNA, 546 bp, Cannabis indica
aaattttgcattccttgattccacaattcttgtgctatgagatgaagaataaaatttgtaacctttagacttaccctataaagaatccgcttatggtccttgggtccaatttcttctcttgtggattatatattctgacttcagatggacatccccaaatgcgtacatgattcaaacttggtttccaacctttccataattcaaaaggagtttttgagactgcctttgttggaactcggtttaatatgtacacggatgtctttaatgcttcagtccacaaggatttaggaaggttagagttgctactaagcatactccgcaccatgtccattaatgttcggtttcttctttctgcaacaccattttgctcgggtgtaccgggcaaggtgtaatgggcaacaatcccattttcttcaagaaacttcgcaaatgcaccaggtgcttgtccatcttctgtgtatctaccataatactcacctcctctatctgatctcactatcttaatttgcttgttgcattgtttctctacttcagctttaaatatct

SEQ ID NO: 279546 - DNA, 596 bp, Cannabis indica
tggtgaaggatccgagcattacccacactcggtttcagcagattctgacatatcaccgtcctcccctcactctttatcttagggatagagctcaaaaacttgcccggtttccaggggaagaccggaatattatccagttgacctccgatgataatcttgtgaggtacgggctttatcccgaggactttactcctaagtccgtgacggggaagaagaggaaatctggtgctggccggcctgaacgagctcataagggggatgagcttatttaacttaagcgctaggctaagttaaaaggaggtgccagggccaaaaagtatgctcaggagccttcaaatcctgaagatgaggtcgaggaagagcaggtgactccactgaagaggaagaagaaacttccggcctcgcccaggcctattgaacatgcaattcgcataagggagcttatttcacctattcgaccatctcctcctgtgttcggaagagggaaagctgtcatggctgagataagatcgatgtcaggtgatgatggacttttgagtcttgtgcgggcggtcaccttgtcttttactttactttgttcttgagcttcttgattt

SEQ ID NO: 279547 - DNA, 592 bp, Cannabis indica
attattttttctttttccttcggttctaagctctttcctagccgaagtactttggtggagtcgaggtcgcacaccgacacttcctcgacatcctccattggttctacaattttttcggatcccacacggggatccaactcatcttcttcagccatttctggctcaataatttctcggaccatcaacacgggtaggtgggcagcaacgttatagcactgcctggcctccccttgatttcccctcacagtccctatcccagcctcttgagttgggaattccaggcacaagtgccgtattgacgtgactgcacagaagtccaccaaggccggtcggccgaggattgtgttataagctgttgggcagtccaccaccacaaacgtgcaatacttgaaaatgctctggggtgtgtccgggcacaaggtgacaggaagcctcacttttcccattgggataagtgttgttccattgaaccccgtgagtttggaaccactcggcgaaaggtctcggtctgttaggcctattgtagtgaaggcctctttgaacagtaggttcacggaactcccattgtcgatcaggactctggccacgatct

SEQ ID NO: 279548 - DNA, 504 bp, Cannabis indica
ttggatgacacttgtgataggaactttagaattcaactgagaagtaaatctaaccattcatatggatagaaataacttatcagaattttgaggacaagataggagaattttttgcatggtctattcgaatgacttaggaaaaattcctaatcctgatgaattgttttatggtatctctaatgattacttaatcttaaggaagtattttacattaatgttaatactagattgctatgttgatgacttagtctagaaagaacttacagtttcaaactaagataatatgtcacaacaagatgtccccgaaaaccaatagtaagaggttaaatgtacacaaatttaaccaaactcctactgttgagtgggagccatctaagatgtaatcgaacaaggaacattaggaaatagtcaaggaggatctctgaaagtgacctaattattctagaaggatgtaaaaacccatctataataatttaagctccatcagtgaagataaataacttt

SEQ ID NO: 279549 - DNA, 814 bp, Cannabis indica
gtgcccaagccaaataagaaatggcgagtctgtattgatttcacagacctcaacaaggcgtgccctaaagactgatttccacttccaagaatccatcagcttgtagatgcaacaacagggcacgaaatattaagcttcatggacacttactcaggctacaatcaaatcaaaatgcatccaccagacgaagaacatacaagtttctgaacagatatgggtctctattgctacaaagtcatgccgtttggtctaaaaaatgctggggctacataccaaagattggtaaacaaaacgtttaaagatcagatcgggtgaaatatggaagtatacgtggatgatatgctcgtaaaatctagaaaggcttgggggcacatagaggacctggacgaatgcttcaaagtcctcagaaaatacagcatgaaactaaatcccttaaagtgttccttcggagttagcttgggaaagtttctaggcttcatcgttaatgcccgaggaattgaagctaatcaaaaaaagattcaagccctcttggatatgaactcgccaacaataaccaaagaagtgcaaagcttaattggtcggatcaccgcgctcagcagattagtttcaaaatcaacagacaaatgtgtcccattctttaacatcctgcgaggaaacaagcagttcgagtggacagaggagtgtgaaaaaagctttccaagggctaaaggcacaacttgtaaaacctcccgtactctcaaaacctctggacagtgaggaactgggaatatacttagctgttacagaacatgtcgtgatcaccgtgctaattaga

SEQ ID NO: 279550 - DNA, 597 bp, Cannabis indica
gatattcgttgatagaaaagctcgcctactgcctcatcttagcaacaagaaagctaagaccttactttcaagctcatcatgttcgggtgtacaccaaccaaccactacggcaaatactgcaaaagccagatgcctctgggcgattactcaagtgggcggttgaattggggcaatacaaaatcaacttccaaccctgaacagctatcaaaggccaagaattggccgactttgtggtggaatgcacaggaaaaactgaaagcatcccagaaggcgatcccgagccaacaccacagccgaacaacattgaaaacaagccaacctggaagcttcatgtggatggatctgccatagaccagctatccggcgcaggaattgcccttgtcacacctggggggaaacacctgcatgcagcgttcaaattcggattcaaagcctccaacaatgaggccgaatacgaagccctaatcgctagactcaaactagcgaaggaaatgaaagtcgagcacatcgagatctgcagtgactcacagctactggtaaatcatgtacctggcgaatacgaggctcggggagaaaaaatgatagcatatctgagca

SEQ ID NO: 279551 - DNA, 630 bp, Cannabis indica
aagctcgatacataggtgttagtttcccataagcaacatacttttgaatggggtgattggtacaagttctgacaccctttcgatgagcaataggaaggtcgagatcatcaatagtaggagaaactaactcatgagtcacaaaatccttaccttcatgattttcaaggttgagagggctatgatgagtgtttgaacagctcttgtcttgcatgttggcctctatattcccaactttcctcctgctataaacacgaagttctttgttacctattgcttgagtttgaagtggtggtgagtttgaaagagtgtttggattttctgaggaggaaggtgatgttggattgagtgtagagaatgacgggtttgatgagttttctggagatgagttggatgtgtaatctggagacgggttggatgtgttttctggattgatatccagttggacagaaaaaagaggcaaggaaggcaaagattgagcactttgatgttcgtgcgccataacattagattgagaaaacagcttgatgattctgaaggattttccaaaactgatattcatgtgaatgctccccctgaataccagatttgggaaagaaaggttgatgttcaaaaaatgtgacatccatagtg

SEQ ID NO: 279552 - DNA, 531 bp, Cannabis indica
taaaataaggcaaaatatcggggcgttacagttggtatcagagccgatcgtccgttagctcgaaggatactcacggtatacatacagaagactgaaaaagatccctctcactataacgtaagtgttgctttaatatatttggtattgccattaatagttttatatgtgatacgcagatttttgataaaaatatgcctcctagaataagagcgtcacgtgatgtggtacttagagaaattaagagcatcttatcgcttaagatcgaccatgttttgggcatggaagataaaatacttagagctttgagggagattattgctattaatggagagatcaataaaatagtaagaaaacggggagctttgatctggtcacaagagaagtttttagtattaagggtggcactgtctcacgtccccgaattgctttattatatcgatagcatttggcatagtaccataaagaatgttaatgagacaactaggtacacaatgttgatacgggagttaattagcaatgaaattccatagt

SEQ ID NO: 279553 - DNA, 660 bp, Cannabis indica
tgcaatgaagccaagctaccgcgaacatacccacaccatcagtcccagcatggaaagtatttgtagacggagcctccaacgagaatggatccggagcgggggtcgcaatgatatctccaagcggacttcgactccaagcagccctacggttcgacttctcagcttcaaacaatgaggctgaatatgaagccttgatagcagggctgagactagcaaagactgtgggggctaaaagagtagaagtctacaacgattcccaactggtagtgaaccaggtgtcgggagagtatcagacgcgcggagaaagaatggccgcgtatgtggcgatagtccgggaactgctccacgagttcacggactataaagtggaaagaatccccagagaaaagaatgctcacgcggactgtctggctaagttagcttcagacagtgaaattgagaaactgggggtggtacccgtggaacgcttggcagagccaagcatcaaaataaaagaggccataacaacggttgggcaagaacccagctggatggtccccatcattgaatacataacaaaaggtgagttgccccaagaaagggcactgtccagaaagattcagtatcaggctcaccgttatgtgatgatggacaaaattctctaccgaagaggactcagca

SEQ ID NO: 279554 - DNA, 610 bp, Cannabis indica
atggaactaaaactccctaaatcggttcacaattgagggtaacctatcttaatactagtaactttactagtgttaggttcaataggtaagaacaaatcaatgtgtgaacaaatgtgataagtactatatgtcccatcttacaaatttgtgaagtacttagtgagttaccaatttgagggttagacttttaaagtctttaatagaattcagtttggaaaacaagtattttggtaacaaatactgtaagaattctacctatattgacctaagggtggtgccgccctaaatgagaagtagggagtatattttctcaaaaggtcaatgaatggaatgtgcacaaggccattaacggtgcaaagcgagacatgaggtcttgggtgaaccttgcaaaagtgtgtgtgtcatcaccgttttattataaagaaaagttggttcaatgctttgtcaaccaaattttcaataaaatttgtgatgattacactatagtaaagttcaagttgaaagacactttactttatgcacttgagcaaagtctctatggatggtgttgatttattcaatcaaagtgggggatatatgagatattttgattgattaaataaagtgttac

SEQ ID NO: 279555 - DNA, 419 bp, Cannabis indica
cgagagcacttgaatcgaagaaacctgaccttcgtcaacaactcagtccaaagcaagagtatcccatccaattacgaatagacgagttggaagacaagttcaggagatatcaagtgggggaaatagggagacaatctggatacgattcatacgagaagcttgagccatatcactcagatattatgaataccccttttcctcagagattcaaaaacccgcatgtctcgtcgtatgacagaaccacagatccggtctcgaatttgaacaattttaatacaataatgcgagcgagtaatgtgacgaataatttacgctgtattttgttccctaccttgcttgttggagcagcaaacatctggtttaataagtttactcgccattcaactgttggatattactttaccaggatcttagatcta

SEQ ID NO: 279556 - DNA, 580 bp, Cannabis indica
taagcattatcaaagtatattatctataaataataataacagaatcaaatcagtcaattcttattctatttattttagctctcctaaagtaaagttactatcaataacaatttagcttttaatttgctgaagaaaaataatactataaacacattttcatgcaatttatatatatatatatatattaaattaaaaggtaatggtgtcaaaattctcattaaattaatagtgttcttattgcaatattacaaaatactaaaatgaaataagggaaaacagaaaacattaatattcaatcaaagcaaattattttcctactacattaatcgagttttataattttaataataaatttgtggaagttgcatatatactatattgcacaacaacgtacgctccttctaggacgactgcttttattgaagaattttagcataatattaataactgttttcgatgcaatccttgattgattttagaaggggtgaaaaagagttcactattggtttgaatgttcaaatcaaagctaatacaataataaaaagccaaaacaaataaagaatattttatttaataatta

SEQ ID NO: 279557 - DNA, 509 bp, Cannabis indica
atataaaaaaaagagataaaaagaagtgtttaaacagctggagtcccatgctcttggtttggttctcctgagccaactggagtaggaggatctattgtttgaataagagaagcattagcagcctgaccgaaggttgaagcagcttggccagaggttgaagcagccacctcgttcccaccataagccatttgggtcgcgtagtactcaaggtacatgtccttagcctcgcccaagtagtcaaagttggcccggggattagccttccagaaatcgaagaagagctcaagaccggctgtctccaaggcattgaccttctccttcaacctgtccacctcagccgaaagctccccctccttggcgtccttctcctccttcatccgaagaagaactgctcgtagagaagtcttctcatcctgaagactgtttacctcagcagataagatctcgatggtctcctcaaaacggtcagcagcctcgagatcctttgtcagcacggagattttcttctc

SEQ ID NO: 279558 - DNA, 727 bp, Cannabis indica
ccgctactcaatgcatcagcggggaagattgcgattatatactccgtgaggtacacggggggatttgcggcaatcataccggaggtaactcccttgcattaaaaatcatgcgacaagggtattactggccaaccttgcgacaagatgctctcgcatttgcgaagaaatgcgacaggtgccagcgaatagccacatatacccaccaacctccgagtaacctacattctatcacaagtccatggccctttgcagtatgggggattgacttaataggcgagctacctaaagggaaaggcggagtcaaatatgcggtagttgcagtagattatttcacgaaatgggccgaagccaaagcactcgcaaccatcacagcaactaaattgcgcgagtttgtctataactccataatttgtcgatttggtattccatacaaactcatttcagacaatggaaaacagttcgattgtaaagagatgcgacaactatgtgacgatctgggaatcaaaaaggcgttctccgcagttgcttacccgcaaagcaacggacagactgaagctgttaacaaaataataaaacacaccattaaagggagactagaagaacgtaaagggacttggccagacgagttatcgcaagtcctgtggtcttataatacaactcctcgatccacaactggcgaaacacccttctcgctttcctacgggtgcgaggccatggtgccagttga

SEQ ID NO: 279559 - DNA, 1010 bp, Cannabis indica
gtcgagaattctgggtttcataagaactagaagaggaaaaatccaccaagaacattctctgtaataaatactatcataaatacacagactcgtggactaaggctcattaacgccccaaccacgtaaaaatctctctcttaattccttatagctctcttaattattattattatattggttgccgaaaacctcggtcaacatataatattctttttgttaaagcaattataatattctattgattttgaaaaaattaataataaaaattattaaaaaatctaataaaaatattaaattaatttaaaaaatattaattttacttaaaaaaacttaaattattcctaaaaaaatatttttaaagtgtattttatttataaacacgtatcataaaaaattaaaccaaaattatagagaatctaataaataatttaaataaactaagattttttgaagaaaaaatcaaacttatttatatttataaactcatatcttaaaaaatataaaaaattcaataaatacaaaattattttgaaaaaaaaatataaattaaactataaaaatgtaatatttacttaaacaaatatacattcataaggaaaaaaatatactcaagtttattcttgtaaaattaattttaacaaaaattgaattttaatatatatttttaatatttaaatgaattttaataaaaaatatagaatttcttaaatcacttaattagttttaaaatattaatttattgtctaattttcttaatcatttaaaatgatttttttcttaagatctaaattatttttttaagattttctaaaaaaaatgttgaatctttcttgtttttattttgagcgggtacaatttgatagctgtcaaagtttagggggcaaagttactaatctacaaagacacaacaacttttaaactgaataataagacagaacctaatagaaggactacaaatggtgatgtcttggaccatccactatgtttctcatgacatcaacataagtatc

SEQ ID NO: 279560 - DNA, 819 bp, Cannabis indica
gagtgagttatggttattttactgaaggttattcggcacccaatgcccagatttataatcctgtaattaagatgttgtctgatgtcaacttgggcggtagatgattggaaaatcgtgccaaaacactattctttgaagtctaagtgatatgttgacatcacttagccagtttcttggatctggtgaagtcgatcaccaattctcgaaggttttgtgcttttgtagaatcgagagactctgaattacccgatttgcaaatattttgtcaatattcaactttaccaaaaatgtgaaatatcaatgtgtgaatttaacttgttacaatttgtagctctcatttactaaaaaatagccagatgtttgaaatgtaactagaaccggataggcacaacccaatgcaccagaccatacgtcaactttggcgttgagtgcctattcccaggtttcccatagctcattttggtacttctatggcatacaagattgtgaatgaggtctttagtcctattttggactaagataagaagaattccagaacaaaatttatgtttgagcagcagaacccatgtgaaccaggttgaatgtcaacctgggtgttggttctttgttttggcccccaaatgatcctatttgcttctcaagaatacttatatcgtcattattaatgaaaatagaaaaaaattcgcaggagacttcttgggaaaaattcttggaagtagcctaggttgacaaaatgtcaacgtgggcactggaaccctagccctacgttcatcgtgggcgactggatcttcaatgtaatgaccgctctagtatatgatt

SEQ ID NO: 279561 - DNA, 603 bp, Cannabis indica
tttcttcacaatcaagccataatcttagtgaaaaattcataaactagtacatagtctaattttaagaattataattgattaactaaaatcaattaacctgagtcttacaagcagtttgtctcaactagtatggggaccatgggcctatataaccgagcttccaataagcagatctagaatttaccaagtaatccactaacttattaattcctcattgcatccaccctagaacttggaattgcactctcagttacatagaacgctctatatgttccaaatatagatacgctattaattattcgttgttataatcccaataatcaataatcctctatagatgatctacattgtatagggattaatttaccgttatacccttcaatgtattttatcattaaaacacttagccacctataaatgatattttagtgaactaacataatcactgaaatgagtattcaaccatttatctctgtttagccaagcttgaaggaaccatcgtttcgcttttatgtccagatagaagctacagattccatatctatgattagcgctcccactcaattgtactaccatgtttccaaaatgtacgtatcacccaga

SEQ ID NO: 279562 - DNA, 837 bp, Cannabis indica
acataattttgtttattttaactcaaaattaaaccaataaatttaaaaatatgattaaaaatatctattatattttaagtattttaaatttaaattaaagttaaaaatgtggttaaaaatatttataatattttaaatttaaatttctttatataaaatatttacataattttgtttattttaactcaaaattaaaccaataaatttaaaaatatgataaaaaatttctattttataaaatatctatataatttttatttttaaatgtatataataatattataaaaataataaaaatattcaattaattaataggatattctattaaagttaacgtagaaatctaaaaagcatcgttaaaccaataattctgttatatagccacactttatatagaatagatatatatattttttttttaaaaaaaaaaaaaaaaaaaaacctaaaacaaaccaatcaaatttaaagaaaaacacatgataaaaaaaaggtaagaaaatgcatgcaagactaaaaaaaatgatatttcttttagaaaaaaaaaaaagagcataaaaaagctcaaaaacagtgagatttttattttaaatatatatatatatatatataattgacattaaaaaagaattgataatttaaaaaaaaaaaaattaaagaaaggattgagatttatatacatactggtaaacgtagtcgcgcttcgcacgattatgtaaaagaataaatataaattttagttttgtgatttaaaattattggttgttttctatatttagttaatatattagatatatgttctacaaataaagtataatgtatactactctttctaattgt

SEQ ID NO: 279563 - DNA, 587 bp, Cannabis indica
gaacgtctagattcagtaccgtgtgggacacggggattagggttatgatcgggtgtatgggcgctaggttataacccaggttattgtatgtttatgttatgcttttcttactgagtctgtcgactcacagtgctatttttatgtgtaggtaagggcaaggctaaagttgaggagccgtgagtacgagcagatgaagattgtacatgtcggggcggttaggcctggagtgtacgatctttgggacatcgaggcttttgatgtatggtcgctgggcgaaaaaacttttgtttatgtgtataacaaacttttaagaagtattttgtaaacgggatctcggaattttatatatgtaatactttaagtttttaattaaataagtaaatttcaattaatcacgttttttattaacctcgttgattagcaatgagctgcacagtacgtttaaaatcacgctaacacacctatattagttagggtgttacaatttggtatcagagccgccaggttatcttccgaagatcgtcacgatatgtacaatcatcatcagaagtcagctcgttccacggttcagtaagcttttattgctt

SEQ ID NO: 279564 - DNA, 551 bp, Cannabis indica
aatacttccagagttctcgaactcctacatatggacttaatggatccaattcaggtagaaagcttgaatggtaaaagatatatttttgtttatgttgatgatttttctcgattttcatgggtggattttttagagaaaaatctgatacttttgaagttttccaatccttgtgtttgaaattaagagttgaaaaagattgtaacattggtaaaattgttaggattaggagtgatcatggaaaagattttgaaaatattgtgtacggtatatcttattgtatctttcataatttttctgcttctaaaactccaaaacaaaatggagtggttgaggattcccaccttcttgatcatgttttagacgaggctttgtatggcttgaaacaagcaccctgggcatggtatgagcgtctatctgagtgtttacactcttatgattatagaggaagtgttcttaaaacacagttcatcacacacattcaatttcatattattttttcatatgttgatgttcttatttttggatctacttctaactctgaagtgcaggtt

SEQ ID NO: 279565 - DNA, 760 bp, Cannabis indica
aaatatttattgcactagttttatcacaataaatagttaaaacacccaattcaaatccatagtcaatcaacatttgtttcaaccataacaattgagtacaacaactaccagcagcaatgtactcagcctcggcagtggacaaggaaatagaattttgtttcttactgtgccaagaaaccaaattgtttccaagaaagaaacaacctccacttgtactttttcgatcatcagcattgcctgcccaatctgcatcactaaaacaagccaagttagaattagtatctttagaataccagattctaaagtcgagagtactattaacatatcgaataatcctttttacagaagatacatgagattacatatgattactttgatatctagcacaaactcccacactataactaatatcaggacgactagcagtcaaatacaataaactaccaatcatactacgataaagagtagtgtcaaccttcactccattctcatcttttgttaatttcaaagtggtgctcataggattactaaccagtttagccgactcaaggccaaactttttgacaatgttcttggcatacttactttgtgatacaaatgtacctccttccatttgtctgacttgaagacccaaaaagaaagtaagctcaccaaccatgctcatttcaaactcatttttcatttgatcaaaaaatacctgcacttcatggttagatgtagaaccaaaaactatatcatcaacatgttgggttttgtgccc

SEQ ID NO: 279566 - DNA, 194 bp, Cannabis indica
gttatttcctgaataaccaaaagtagttgccaaaggtatagaatccagtatcccaaaagagtagacatatagagaggaatttcacattatcaatgattttgtgattaaggaagagtaatggtggagaaaaggttcttaatttgtatatcaagatgttaaagattatttgaaatgcacattttgctttatattag

SEQ ID NO: 279567 - DNA, 552 bp, Cannabis indica
tcctttcttggtaaactgaggattggtgctgagataagtctattcttcaactcttggaagctttgctcacacttgtctgaccaggaaaattttagattcttcctagttaattctgttaagggtgtggctatctttgagaacccctcaacaaaccttctataatagcctgctaaacccaaaaagcttcgaacctctgaggcggtctttggtctaggccattctttcactgcagcaaccttggcaggatctacttttattcccccgttagtgacaatgtggcccaaaaatgcaacctcggacaaccagaactcacattttttgtacttggcatacaattgatgttctctcagtcgctgcaaggtcaagcgtaagtgctcctcatgttcctcctctgtcttagaataaatcaatatatcatctatgaatacaatgacaaactgatccagatattccttgaagactcggttcatgaggtccataaaagctgctggggcatttgtaagtccaaatgacatcaccatgaactcataatgcccgtatctcgttctgaag

SEQ ID NO: 279568 - DNA, 491 bp, Cannabis indica
ggtttttatcaattccgaatcctacttttgtgcttctttaattctctcaagaagggtggattgtagggtaatattaaccaattgccccacaaccaactcaatctgagctcgagtcatttcatttgctaactgtcgggagatttgcttcatagtattcaactgactctgaccttttctactgaaagcctcagcaaccacgttggccttaccaaggtggtaaaggatctcaaagtcagaatccttcaccaattccaaccaacgcctctgcctcatattcaagtccttcttggtaaagaagtatttcagactcttatgatcagtgtatacctcacacttctcgccataaaggtaatgccgcaaaatctttagcgcaaataccactgctgggagttctaaatcgtgagtagggtacctctgctcgtactcttttaactgccgagaagcataagatattaccctcccagcctgcataagcacacagccgagaccct

SEQ ID NO: 279569 - DNA, 1020 bp, Cannabis indica
tccttgagctggagccccatcgttctcgtaagcaattttaaacagaatatttgaagaagccccattatcgatcatggttttggacaccattttgtttgctatctcgacttccatgactagcgggtcgttgtgcggaaatctaatctggacaacatcttcgtcgttgaatgttatgattggctctcctgctcgtggaactttgggcttcctttcttccacggccaggatgacttcttcttgctcgtattgagctgtgggggcatatcgctcctgagcttttcccgtgtctccaacgatgtgcgggcctccaatgatgacttgcaagtgtccatctattggtggaggcatcagatcctggttattctgaccttggttggccttgacatacttccgtaagtgcgggttatttttcttgatcagaagttctatttcccgcttcaagttgtagcattcgttggtgtcgtggccgtagtctccatggaaccgacaaaattttgccatatcccttttgctggtatctttcttcctgggcccgggcttcttgtacggaattagcgactgagtcgctatgtagacactttctatatcttcagttaagatagtgaatgcagtgtgtttggcgcgatcacggggagtctgtctgggtttttcggtgaactttcccttcttcccgttcccttgcttgtggttttttcctgaacgtttgccacttgaattgcaggaatattgaggaagctgggcagacgttctagtagaaggagccttctttttgttcagcttttgctcaccttctgctcgctgaatggcttgttcgagcttgatgaaaccttcggcccggtcaaggaaatcactcattgagtcaaccagtccgttttccctatgtccttccatagttcgccaaggacttcaatgccccccagtatcgcggataactttccatcctcggttcccgtgataccttggttactttcgtcatgaatctgctgatgtatgcccggagtggctcgcctggtcgctgtt

SEQ ID NO: 279570 - DNA, 455 bp, Cannabis indica
atgtgtatgttattgatgttgattcttttgatagtaaaaataaatgtttaaccgttatgaatgataattcttggttgtggcatagaagattaggacatgctagtatggattctatttcaaaattggttagaaaagatcttgttattggtttgccatctattccgtttgttaaagataaactttgtgatgcatgccaatttggaaaacaaattaaaacatcttttcattccaagaaagaaatttcaactactagacctttgcaattgcttcatattgatttatttggtccttctagaattgctagtcttggtggtaaatactatgcatttgtaattgttgatgatttttcaagatttacttgggttattttcttgactcttaaaagtgatgttttggaaaatactatgcatttgtaatcgttttaatcgaaatagtgaaaatctcacatttctgat

SEQ ID NO: 279571 - DNA, 520 bp, Cannabis indica
actcttgttcatgttattagattttttgattcacttgctaaaatccttcagagacaagattcataacttttattttgggagtctaataatgtagatggctaggaacttgatttgttccctttaagtgttaattctgggactgaaaagctatgcacaaatttagatcgtaaagtagattttactagtcagttaatggtactaaatgataaagaggtaattagaagggtgaaatagtaatttgaccaattccaattatgaaccaatacaaggagggcgaactactggtattgattatatcaatggacactgtaagtaactcactaaatataagtaaccaatatatgcaaagagctgactattgggttccttaaaaggtattgtgctcgtgcattaaagcagttggacaatagaggaccaccattcgtacaggacacgtgttgccaaaaggtttaaccttgaaaaataaattcctggaataaccgtctaaaaaaggtgtagggggtgtgcgcactaccatggt

SEQ ID NO: 279572 - DNA, 729 bp, Cannabis indica
actaaatacaagttaccctaattcttttacacctaatatacagctaatattctaacaatttgaatgtagtcattgattttagagcaaaagtgggttggagcaccttttgcagcaatgcttcgaaaacatcaagtagactatacagagtcaaatgactgcatactcagaattgtctttgtgctgctgtcaaccaattctgatgttatacaagttcgatactcatctattgctctgcaggtaaaattagccagtatgctctagtttttatccctagagcaatttaaaatcagcttacactaaccaaagaaattactttcagacaatattgttttaggagttaaagatttgatttgttactaatttattagaatatgctactcttacttgactgaaatgtccattcaatttttggcttttgtttttctattctatgtattgttctcttgcaaacaatgaagatactgcaaatgcgcttcatttctcctcatttgtaattgaatgtactatacacgtgcattgactaatacacacatgatttcacagccaattgatttgaatctagatgaggagacattgatgaaaattgtgccattttggagaacatctcttagtgactcaaatactaagagtcgacagttctactttgatcattttgagatccatccaataaaggtatgatatgacacacgctgcatttgtttaatgtattattctttcagtataatgttt

SEQ ID NO: 279573 - DNA, 84 bp, Cannabis indica
accaaacgtagataaatgatggagtactcattttatatactgagagtgcaattctaagttctttgcgtggattcaacgaagaat

SEQ ID NO: 279574 - DNA, 602 bp, Cannabis indica
aagaagagcaagaaattgctctgattcgcaaacgtaaaggcaaaatgattgcccaggaggagcccaagcggcctcggagagctgatactccggcccacggtctcgatggtgaggtctctcccatggaagaacatactgcccctcccaatattgtgctgactccgattcctgaagatgaggcgagacaggagctccggatagctaaacacaactacgccatggacaaatactcccgggggtatggtgaggtggaagcccttaggagggtcttgcgggttgagaggcaaaacactatcaacaacccggaataccagaattcgtgggacctaaatttggaccccctgtaggactggttcggtcgcttccttgggcccaccttagctccctttgctgcggagatgactggcgagtttgcgtcccagcttacccggtgtgcagctaagcggttcgctgcttgtgcatccttgaactccatctaccaagtccaggatctcagccactccctcactgtggtaagtgttttgtagtttgcttttccccttactgttttctttttcggagattcttacttatacttgcattatttttcagcttgctgctga

SEQ ID NO: 279575 - DNA, 716 bp, Cannabis indica
aatcgtctgtaggcacttcggcaactttgaagccagaaaattctctcttttcgctctgaagtttacttaacaacgaagggtgataaaatgagtaatgtgccagtaaaatgagtatttataggcaaaaggataactgcatacaaaggaaccttagacgcctcgacttcccgcctcaaaagcgaatatgggaaatcaaaagtaatcgagtgcaaccgtcaaccgtggagagagaaatttagattttcaaaatattaattgtgagagcattaattagccgaaaaccgaagggacgcccagtcagcttcacatcgagtctcgaacggtcatgcttgacacgtgtccccatccaaaggcagaacaagctcggaataagtctacacgcaacctcagaggtctcctacagacttgggggggcaaatgttatcccaaatttagccctctgacgtggcatcacaagaatggtgacacgtggattccacttggagcatctgcacggaacaatatgcctatcacaatgcctcgctggaatgatcaacacttaagcgaattcagcttgacgcatcatgagtcaccagctcaatccctacaactcagggattaacttacgtggatatggcatacacacgatcccactatcagtgtattcagcctcgatcccacgatccttgcattcagcattgatcacacgatctttctgtttatgcgcattgtaacga

SEQ ID NO: 279576 - DNA, 442 bp, Cannabis indica
tattgatcaatagtacaaagtgagtgggttatatacctcctatacttaaaatatttatgtaaataaattgactaagtataaatacatagcgagtataaacaatacactgcgagtactattgataataaaatttcaaggtttcgccattccaggctctttgaattgcagtaccatcgagttctgcgagtcggtatgttgcgttaccaattttttctgcaatgagatatggtccttcccaattgtctccgaagaccccatgcgctgggtttttcgtgtttggcattacttttcgaagaaccaaatctcctactcgcagaactctttccttgaccttagagttgaaataccttgcggttcggcgctgataagccgcattttttagataagcctgatcgcacttttcttctagaaggtctaggtaaagcgactgcttttcttcgtt

SEQ ID NO: 279577 - DNA, 721 bp, Cannabis indica
tatgttgtcccttaatttgaatttgctcttcttatcgtgttttttaaaaaataaattccacattgtaaaccagcaatctaccaaaatgcaactgtatataacgtagatatattattcataagatttttttaaaaaattttcacatcataccttgttttggatttgaggggagctcaagtctgttttgttacaaatctacattgtatgaatctggatttcgatattagagggagttattttgaacgagtaaaagcgaaaacaaatgtgtaatttcagtttcttcccaatttttctggtttttttttcgtaattttctgtttagatcattgtaggccttcttttccagttgatttttgccgaaattaatggttgccttaccctcgttttggtttcattctggttgtgttgctgatttgaacgatggaggtttgttcatcttcatcgttcattccgtgcggcttaaggtttagagcatgtggtatttttgtaaatatttgagtgtggactgtataaatatttaatggggcggcccatagtatttttgtaattttttttctttttgatattttcctgttttttcccttattattttaaataatttaatgaaaaatttataattaatttaatgtagcacataaaactttgaaattctccttcttcaatgtatatacataatttttctttaaaaaaaaactattattatatatatataataataata

SEQ ID NO: 279578 - DNA, 525 bp, Cannabis indica
attactcataaagcatatattcatttttaaatagactttcttttggtttaattgaaagactatttcaggacaagcatgacactgactactcattatggtcttgagttatattaaatggattattaaagtgtcatttatcaatggtaatattgatgaaaaaagttatatggtgcaaccataaaactttgtatcaaaagagccaaagaatatagtttacaaattaggaaaatctatgtatagactcaagtaagcttctcgtcaacaataacacaatttttattacgtattctcatttggttttgagatataagcttttgatgattgtgtatttatcacaggtttagtgggagtaagaatatgatcctggtattatattggtgaacaattacttgccattaatgatatactcattttgtattaggaattcaatatatgttgagaatgttcttgaaatattcttgaattataacaaaagagatatatcagtaaagtattcaaaaaatttggcatgaaagatactatacc

SEQ ID NO: 279579 - DNA, 661 bp, Cannabis indica
gtgtaaattgattgataaatgtgtgggcaacggtggatctgaaatttttgtttttgtttagtggggcttaaaaataaaattacatttattaacttatattaataaaaacaaaaattgtaattgttatatataaaatgtgtttatctaacaagtaggattgattttataaacatatagaaatattaatataaaaatattaatattatttatgttagattaatttaaatatataaaattattaatattatttattttaggttgattaaattatattaattttagactaatttaaatatatattgttgaccgaggttttcgacaactaataaaatatgaatataataatgagctgtaagaaagcgagatgaagactttttacgtggttggggcgttaatgagccttagtccacgagccactgctatttatggatatctttaatacagattctacacttgggagaatgtttctctctttaatacaaagaatgttcttggtgagttttttctcttcttgctcttgagcagccaagattctccgaccctaccttaatgagtcgttggaggggttatttatagttgtttggtagggtaactcccagtattgtccttacacatgtgtctagtaagtatccataaggtggctattccgatgaatatacca

SEQ ID NO: 279580 - DNA, 726 bp, Cannabis indica
acatattttatagtgtaaaaatacaaaataaaattaattctttataatattttcaagaaattaatgcaatatattattatattgaaaatattttatttaagattaattttatctttgtttataaataataatagtatttatggcataattgagaaaaagaaataaaaagttaaaaaatgtattgtatttatttaaagaaatacaaattaattaaattttaaataaatattttcattaaaattattgtgatatattttatgttgaaaatatttggtttggatttaattttgtttgtgtttgattgagaaaatagcatttgtgaaagagtagaaaagaaatgaaaaagtgataaaaatgaggcccaaaactatgaaaaatagcatttttgaagagaaaattacactctatacccactttttgtttcatattttaatttttaccttcattttactactctttaatttatacccacttttataagttatattcccattatgtgcattagaaagtctaattttgataagttttatgaggttatatttagtactttgattataaaagagggtatttatcaataacaattattttagagttatatttggttaatgtgtaataaaaaagggtagttttcaatttatcccatttttgaagataaaaaacaaagcccaagaaggagagcccatttggcccaagcctcctcttcctctctccgctgccacgtgtcac

SEQ ID NO: 279581 - DNA, 601 bp, Cannabis indica
gtataagaactcccaaatcggagttcggaatcaaaagttacgaactttcaaaaatcaactcaaaactgcccaaaaacacgagggcgggccgcggcatgcccagaccatgccgcggcacctgggacaaaacccaggttccaccaacaaggggcgggccgcggcatgctcagagcatgccgcgacatctgggtgcagaacccagaaaccagcaagcaaacttcgaattttcagcaagaaatctcaacctaatcactccaaattctcaaccaattcacaaattgacctatagaattattaacacataatagatactcattttaacatattacatgcattaaaattccagaatttcagattgcaaaagccaactcaaaatcatgcataaacatggcacatccaactctttgaacaagagcatcaccttcaactatttctacaattttccagccaacacaacatcacaataacacatgattcaatactagaaaataccctagaatcaaaatccatgctcaagaacttaaatccaaagattaacacactcaattcatcaagattataaccacacttaagaacatgcaatcacaaggcaagatacaac

SEQ ID NO: 279582 - DNA, 699 bp, Cannabis indica
tcttcttgatcagaagttctatctcccgcttcaggttgtagcattcgttggtgtcgtggccgtagtctctatggaaccgacaaaattttgtcatgtccctcttgctggtatcttttttcatgggaccgggcttcttgtacggaattagcggctgagttgctatatacacactttctatatcctcagttaggatagtgaatgcaatgtgtttggcatgatcacggggagtctgtccaggttttttggtgaactttcccttcttcccgttcccttgcttgtggttgtttcctggacgcttgccacttgagctgctgaaatattggggaagctgggcggatgttgcagtggaaggagccttcgttttgttcggcttttgctcaccttctactagctgaatggcttcttcgagcttgatgaaaccttcggcccgtcgaggaaatcactcattgagtcgaccggtccgttcttccttatgtccttccatagttcgccaaggacttcaatgcccccagtatcgcggataactttccatcctcggttacccatgataccttggtcacttctgtcatgaatctgctgatgtatgcttggagcggcacgcctagtcgtgttttacttcgaccaaatctccagatgcaatgggagttggcgtgaggaagagaattgtgcatggaattccgaagagaaagttttccatga

SEQ ID NO: 279583 - DNA, 593 bp, Cannabis indica
ggagggacatccccaagcggatggcaaaggagatagtcagaacgcgagtggctcgagaacgcctcgcaacatcttaactataatcggaggaccgcatatcgcaggcgactctcgcaaatcacaagaaaggtatgctagagaagccaaggagaggccgttaaccaatgtgaacaatcttggtgaacggccagagaagctcttcaagaaagaatgcgaggacattgtctttatggagagcgatgcgagatgggtccaccacccgcactctgacgcactcgtgatagtcgccaatattggtggagacaacgtccatcgcatattggtcgacaatggaagttcggtgaatttactgaacttccaagccttcaagcaaatggggttacaagaaaaggatttgcggcctatgacatcgagcatctatggcttctcgggagatgtcatagcaatcaaaggaatgatcaaactcccaatcactttgggaactgccccaataactgccaagtcgatggccgacttcgcagtaatcgaccaatactcagcgtataacgccgtgattggtcgaccaattctgaaggagatgaagatcataacct

SEQ ID NO: 279584 - DNA, 531 bp, Cannabis indica
tacaactaaaatagaaaataaagtgaacaaagatgcaattaattacaaatagcgatcataacataggaaaaagaaaagaccagaaagaaaggaataaatcacttactatttgaaaatgagttttcacacgatgaagagctctgtgacaggagttgaaatgagttgcgtgatgtattcagagaatttttaagattgaagattaagtctgaagagattcgcaggaaataggtcaatgacagaaagggcatgcatgattttgaggaatcaaaaatagggttttttacagaaaagctcgaaggttttatgaaagcagaaatggtggaataatggtttcttttcagttttcataccttgagattgatcaccgttagattaaaaaaaatagagatctaacggacagaaacacaggagaattggaaaagatgagtcatttaatgctaatgtgcctcgaaatcatgaaccgccaaattcaaaagtatgcaattattcaaattgggttaagacaaatataccctttgtaattatttaaaa

SEQ ID NO: 279585 - DNA, 717 bp, Cannabis indica
gatcatctcctcaggtttggggtagaaggtaagcttgatattttggtcattggtagaccaagccatgaagacgccatcgtcgaagcgcttagggcaccggccgcaggaaacgggagaaagaagctcagccctttttgccttctttgaggcttgttccttgaagtccctgagctccttcagctccgcggccagagcggccctggactctaagtttgcctggtgagtttcctctaaggatctcaccttggcaaccatctcgtccaaggcttccctggcctcccgaagctcccgcctggcctttgcagtggcctcaccttccgccctcagctcctcttggtgcttggcctccagcctgtctctccgcagggcctcatcccggatcatcgcctccgcctgggcttccctccgcttagcctcttcctcattggctttggcagcggcctcccggcgctcagcagcctcttggtaaagctgcctctcagcagtaagatcctgaagaaccttcctgacttcgttcatgtccccaaaatcagacaggacgaagccatggttgattatgttcttggagagacggccagcttcagcagcaagctaaaaaacaatacaagtataagaaagaatctccaaaaaagaataaggggaaaaacaaaattacaaaacacttaccacagtgagggagtggctgagatcctggacttggaagatggagttcaagga

SEQ ID NO: 279586 - DNA, 589 bp, Cannabis indica
ctaccaacttggatgttgagcaaagaaggcgggatgcaggaaaaccattaccactaaaacttgatgccgtgacaggcaaagtggttggtaaggaaaatcaagcttttgtacgtcaaatgggtgttgaggtcacaattacgttgccaggacactacttgaattttaatgaagtccctcaacactttaaagaccaaattgtagaaaaaatgaaggtaaaacacattaacaagtttaatgtttcaaatatttaatttcaattaatacataattttttaacaaatactatttgtttgtagtatttgtacgatattgatggccatcccgagcctgaaagagtgatgagaactctttatcatgagatgaagagaagatattctgagagaaagaatatcaggcacacgtggtttcaggaacattattctggggatccaaatgatttggcaagtgttattgaagctgtacctgatcactgcactacagagagctggaagcaaatcattgacttatttttgagcccaaaattcattgcgcgttcaaatcaaaacaagaaaaatagagggaaaatgcagtatttgtccacgcaaggctc

SEQ ID NO: 279587 - DNA, 907 bp, Cannabis indica
atttaaaattttatttgcaaaaaatataattttgaaagtttaaattataaaaatacaactttaaaaaaatataatttccatctactacattgtatatgtataccataatgtagctgcacgaatttacaaatgaattgattaaaagtgggcacaatttgcacacaattaaaaaaaaaaaagtaattaagtcgtaaagtctttaagataccagagtggtgtcaggcaaatagattttcatagtcaagccaacaacgtagtttgaaatatgtggactataaataaaatagaaatgcttagtgggatttggtaacacttttttaatcagttttctgtttttaaaagttaaaaagtgaaaatatttttacaaaaacattgattcaataaaactgtttttactttttaattttataattagaaatcaaaattttaaaaacaaaaaaatcactttcaatatttttttaaacagttttttttcttaatcaatcttttagattacgaccagacccgaacccaaatcccctccctacggccctggcgctaaactcgaattttgacttgaacccgaatccgaccctgaacctagacccgacttaaataaaaacaaaaagtaaaaaaaaaaatagaactttacagaatacacttttcttttctgtttttaaaattgaaaaacaaaagtggttacagaatgcatttttgttttaaaacaaaaattttactttcattttgtgattaaaaaattaaaaaacaaaagtagttaccaaacggcacctactcaaagaattagagagtgaacgattgaaattaaaaaatgctaagagagtgagaatcaaaagagttgatgctagtaagtgtaatgcatagagtatcattcatccttgagaatgattcattgtttaaatagtctgct

SEQ ID NO: 279588 - DNA, 713 bp, Cannabis indica
cacatatagagctcgaaacgagctttccaacgatataaagaacgtccaaaacggagtcccgagtcaaaagttatggccaaaacaaaatcgggaaaaagatggctctctgctaggttttatggccgcggcgaccataaatctggccgcggccactgggttcgaaaaacccagaaaaccagattttaaggtctaaaaatgctcactttaccatatattcgaacctcaaccaaatcacagagtaaaaacacaaatttcatgcttaaattcaccacagaatatgtatcccaaaaattagattaacaacactcaagtcaagctcaacacttgagcaaaattcaacctagaaatcaagtccataaccatgaacatcaaaaccccaaatacctcatgcttgaacacaacaaaaatcagaacttaaggttagatttcaaacacaatataaccttagaaatctcatctgaaattactagtaaacatactcctcaactcaacaatataatcaagctaaaacattaagattaacaccaaaatcacctccaattccactatcatgcatccataattttaagaaaatcaagaacaccttaattcattacataacatcagaaattaataaatcaaaaaggctaaagatcattaccacaagttcctcaagttcttcccaagcaagaacatccacaaagctacaccaaatcaagcccttttttctcaaa

SEQ ID NO: 279589 - DNA, 645 bp, Cannabis indica
cgaagtccaaattggccaagtcccctccaaaaaggaatcctcgccgaaaagaaaaggtggaccgcgcttcgtgaattatactgagctcgcggtaccacgagaccatatctatgctatcgaggagaagaatggggtcttcaagaagccacccccgatcaggggaaatcgcgacaaaaggaaccccaaaaaattctataagtatcataaagatattgggcacactactttggagtgttgggttttgcatgatgagattgaaagaactgatcaggaggggaaaattcaacaaatataaaaggaacgaggaaagtcatccccggggggatgacaaagacgaaaatcaaaacgcgagtggttcgagaacacctcgcaatatattgaccatgataggcgggccccatatcgcaggtgactccagaaagtcgcaggagcgatatgcaaaggaagccaaggagaagccgctcaccaacatgaacaatctcagtgagcgaccagagaagttattcaaaagagaatgcgacgacatcacgttcatggaaagtgatgcgagatgggtccatcacccgcattctgacgaaatggtcattgtcgccaatattggcggatacaacgtccaccgtatacttgtggagaacggaagttcag

SEQ ID NO: 279590 - DNA, 707 bp, Cannabis indica
tttggcatcttcaagttttttctttaatgtatccttcaaggttttgttgactgcctcaacttgaccgtttgcctgaggatgcgtagctgcggagaaatttttgatgataccataattcgcacagaaatcaatgaaggattggttgtcgaactgcttaccattatctaagactattttgtagggtagtccaaactggcatattatgttcttcacaataaactcttgaactttctttgatgtgatggttgcaagtggttcggcctcaatccacttagtaaagtaatcaaccgctacaactacatactacactccacctttacctttaggtaattgtccgatcaggtcaatcccccaaatggcaaagggccacggactttgcatctgtgttaactcgttgggtggagctcttggtatctttgaaaatctctggcatttgtcacacttcttaacataggcttttgaatcttcaatcattgtcggccaaaggtaaccttgccttagaattttcttggataagctttctccggcggcatgatttccacaaaatctgtcgtgtacttcggataggagttgtgcagcttcttcttaaatgacacatctgagcaatggcatcgagaatcctcttctgtacatgactccttgtactatgatgtatcgtgcatctttccttctccttttctgagcttcattttggttatctgggagtt

SEQ ID NO: 279591 - DNA, 350 bp, Cannabis indica
aaaaaatcgaagaaaaacgaaaaaattttgagttgtacggacggtatgcaaagcacaccatccaggtgcacatccttgggcgcaaggggctgcttgggcgcacaaagggtgctgccagcagccagccacgcgcacaagggtgtgtcaccacccccgattttttcaaaacttcaaaaaatcataactaattcaaataaaatcgaaattgagttctgtaaaaaaggaaattacttaattttttccaaactatccaataaaaataattccagaaacaaaaaatcaattatttctcataaaatttcacaagcatcaatcaatcatcatataacacacagatcaacatgaaacca

SEQ ID NO: 279592 - DNA, 684 bp, Cannabis indica
tgctcaaaattcacacgcagacacactggcccgtttggcctcaactagagaagtcgaattgctcgatgtaattccggtggatgtattgactcacccaactataaatcgagaagtgacaatggaaatagataccgttcaggaagtcacctagatgactccaatagtcgcataccaggaaaagggcgttttacccgatgacaaggtagaagcaagaaagctgcgacaacgagccgcctgatatgtaatgtacgatcaaaagttgtatcgcagaagttttagtcaaccgctactcaaatgcatcaacggggaagattgcggttacatacttcgtgaggtacatgcgggaattcgcggcaatcatacagggggtaactcccttgcattaaaaatcatgcgacaagagtattactggccaaccttgcgacaggatgctctcgcttttgcgaagaaatgcgacaggtgtcagcgaatagccacatatacccaccaacctccgagtaacctacattctatcacaagtatgaccctttgcaatatggggattgacttaataggtgagctacctaaagggaaaggtggagtcaaatatgcggtagtcgcagtagactatttcacgaaatgggctgaagccaaagcactcgcaaccatcacagcaacaaattgcgcgagtttgtctataactcc

SEQ ID NO: 279593 - DNA, 282 bp, Cannabis indica
gttaaatcaacatacttgtgagaagatctaagatcctggtaaaataaattccaatagttaaaataccctgcacgtaggcaggagcgttttcctgaacaagtagagaaggagaataatcatttgaagaatcctcaagttcctgctctgcctatacaacctttcacttccctgccactggggcagaaggccaatcaatccttttagggtttaccctaattttgatagattgctcaataggtacttggcttctaggaggggctttcctgttgggttttgtgccct

SEQ ID NO: 279594 - DNA, 518 bp, Cannabis indica
gtagctggtgtgttagaggttgatgccatcacaaagttgacagctcaggttgaggcattgacaaagctaattgcagggcaagctaaacaagcccaagttgtttgtgagatatgtggaggaaatcatcacttttcagagtgtcaagcagatgtggatgatttgccaatggatgaagctaaagccattggaaatttttcgcagaataacaacaacaattatgggttcaaccagggtggtaaccgaagaaacagtgggttctatcagcaacgaaatcagaaccagacacagaaccaacagtttaatcagcaacaagcctctggtggaaattctagtttgcaaacagatttactgctacaattcatgactgaaactagatcttcaatcaaagacctgcagactcagatgggccaactagcactaaggtagcaacccgtcctcaagggaatttgcctagcacaactgaagtaaaccccaagaaaactgcaaagcaattaccctgagaagcggtaaaaattatg

SEQ ID NO: 279595 - DNA, 814 bp, Cannabis indica
aatttctattagtgtgcttgatgatttgggtgttgtgagtaaggtagaggcaggtcatatgaagcttagtagaggagcattaacaatcatgaaaggaatcaaaaatggtggactttactacctacaaggctctcctatttcaagctgtaacattacaactcacaacgacaaagaagaagagatagctactctatggcacagaagattagggcatataagtgagcgaggcttgcaactcatgagtgagcaacaactgttgggtaaggataaagtgagtaaactagacttttgtgaacattgcatacttggaaagcatcacagattaaagttcacagcaggtactcacaactctaaaagaatacttgagtatgtacattctgatttatggggtccagaaaaaatcagcactcatggtggttgttcttattttttatctatagtagatgattattctaggaaagtatggatatatctacttaagaataaaaatgatgcttttacaaaattcaaacattggaaattattggttgagaacttaactaatgaaaagctgaaaactttaagaactgataatggtttggaattttgtaacaatgaatttgacctctattgtaaagaaaatggcttgcagcgacatagaacagtgaggattacacctcagcaaaacggggtggctgaaagaatgaaccgcaccatactaaacaaagtaaggtgtatgctacttcagtcaggattatctcaagggttttggggagaagctgccttgacagcagttcacctaataaatagaagcccatcaagagcaactgaaggt

SEQ ID NO: 279596 - DNA, 545 bp, Cannabis indica
agcacattgaatgtagtctttattatttttatttattttttgtcaaattaggtagaagaattatatgataatggtgataatcgagtttctaaagatttgcgttatttggctaaaggaccgaacaatactttctttcaatataaaaaatatttaataaatggttttaagtttcatacaaagaaagtcaaaaagaagttaacaactcaaaatagtggggttattatgacggccaaaactcaaagtttttcaagtagtagggatccaaatcctatttttggagatgttacattttatgggatattaacagatattatagaattagattattgttcagcaaatcgtgttgtattatttaagtgtgattggatttcggcaagtggcatcaagaaagaagaagattgcacaagagtaaacttatcaaaattgatgcgagaagatgaaccatttatattagcttcgcaagcagaacaagtaatgtatgtggaagacctcaaacacgaaagatggcatgtagctttaaaaataaatcctagagattattataa

SEQ ID NO: 279597 - DNA, 780 bp, Cannabis indica
tccctggtttgattgcaaagaaagaacctttttcattcattgtattcgttcttgttcttcaattctagggttttagttgaattagtttgctcaaatttgagattttgttagtttatcaaaaaaggttgtagaaatttgatttgcccaaattatcaattggccaaaaaaagaaaaaaaaaaacaaaacacataaatacccactagcataccctcctaaaagagttttccataagcacccaaaaccagaaagaaagcacattttccccaaaaaacagaaaacgaaaatgcagggatttagaagctaacctttagtttcgattcctgcggttgttctcgatcacttctgagaatgaaaatgctgtggaaaatggcagaaaagttggaatgaatttcttttttctggggtgtatatactggggagaagttaagagaaaggagggaaaaatgggatatttgattcgtatcaaagcgtttaaatacccatatcccttatttattgggatcgtgacacgtggcagtcagaatgcctaaggtcgcccaatctaacggccaattatggccacgcctacacgaaaaccgaagggttttgtgacgtggcatcctagagataatgaaaattaatcattacagccgtcatttttcgaaaccctcgatgggacaaccaaaaggtcacctcctcgtgacaacctttcacctgtctctcgagcaatagtttccctcagtgaccgctctagtcacatcgcgaaactaggggcatgtgttatagtgagatttctctca

SEQ ID NO: 279598 - DNA, 315 bp, Cannabis indica
tttgtatggctggccactatgcacaagaaatgccatttgtagtttccatttttttgccatacaattctaacctaaacatagaaggaattctataaatagaaagtgttggcttgaggaaacagagaactaacacacaactttgatcatttagtttctctcagaaaagcctcacgcctctctctcttttcttctcttctatttcgaaatccatgagtgaatgattagtgccgacacacatcaagtggtacctcaatcatagtatgtaagactatggaaattcaaccatcaaggaaggagaaaagaagatccagattc

SEQ ID NO: 279599 - DNA, 655 bp, Cannabis indica
aaattaaacacaaataaagttaattttacaaacaagaatggaggaatggcaattatgcattaactaggcaaaaacattaaacaacaatcatcatcctccctaaatgagaaatttagttcagaaataaatccataaccattcctatgacaatattcagcataaataaattaaagaggaatagagaaagaaactatcggtggatgaattctggatcttcactttgaattactttgctcttcctgccgctctctactgcgttgtaggtctccaaatcgcttcccctgatttccaatcgcagttttctatttatacgtgatttttaagatttctcggacaattttacccctgggccgtacgggatctcgccgcggccaagttgtagctcgccgcggccagatagacgtataaaaatacgtctctataatttctatatgtccgcggcgagggtgtatctcgtcgcggcgactggagcttcaaatgctgaggcttctgccttcatgatctagccgcagccacactaatctagccgcggccagaagtgcatcacgcctcaaattggtatttttcttagctcagctcgtctttgactggacttttgcatcccgagacctctattattcctaagaacctgaaaacatagaaaacaagcgtaatt

SEQ ID NO: 279600 - DNA, 512 bp, Cannabis indica
attccttgcactattggaaacactaggattgagcggtgtatgttggatttggggcctccattaatgtcatgccattctctatctaaaactccttaaatatgggtccacttgaagaaactgggataatcattcaacttgttaataggtcgaatgcctaccccagaggtgtcattgaagatgtgctagttcaagtcaatgaattggtatttccagcagatttctatgttcttgatatggaagatgattccatcccttgctccactccaactttgttaggaagaccattcatgaaaacagcaagaaccaagattgatgtccatgagggaaccttgacaatggagttcgagggagagacaatccgattcaacatctttgaagccatgaggtatccaagtgatgtacatgctgcttattctcttgatgtgctggatgatctctcctaaagggtgctaaatctgcatagtgaagatgatctggaagttgctataagagagaacttggagttaaattca

SEQ ID NO: 279601 - DNA, 509 bp, Cannabis indica
gagaagtgtgaaatatacacagatcacaaaagcctaaaatacttctttacgcagaaagagctcaacatgagacagaggcagtggttagaactggtaaaagattacgattgtcaaatactataccatcctggaaaggctaacgtagtggcaaatgcacttagaagacgcaactatgcaagcttgtcaatgttaagggcattaaaagtgccgatgcaacaggaaatcgagagatctaggatagagttagtaataggaaagctagctaacctcacaattgaatcaaatttgttagagaagatcaaagaagaacaagcccaagatgagtttttaatcaagaagcgggtcgaactacaaaatgagaaagccggggacttctcagttaatgaaaaggacattctactatacaaggcaagagtgtgtgtacctaataaaggagttgcaatcaaaaatcttacaagagatgcacactataccctatcctttacacccagggtcaaccaaaatgtata

SEQ ID NO: 279602 - DNA, 590 bp, Cannabis indica
ataattaaaatggcttaattattaaaataattcaagtaaggatttaaatataaatattaattgctaaaagaggtcttgttaaatatttaattaattatttaagaaaatagttaattataattaaataattctaaaaaaggaatgtctatttaattaattattttaagaaaataattaattataattaattaaatctaaaaaaggaaagtctacctattagtaacctgctattacaggttaaagaaaaatgtaaccatatggttacaataaaaatataaccattgaatagtcacccataatataattttgatattgattaaaaaatagatatattaattatgtacctgagaaaattgtatatgatttgataacgcaaacattctttattttttattaacaaatatatcacttatgttactatctatctattttgggctcaacccaactaaattctattcttaacaaatacatcacttatatttgagttatattgaaaaatacctcttttatttatcaattaatcaatcaaatttacctctaatttatatttaattgaaacatacctctttttatatgtattgtacccaaaa

SEQ ID NO: 279603 - DNA, 516 bp, Cannabis indica
tatcgttggccgatgaagcaaaccataagtaagaaacctaacctcagtttcaagactaattactcgtaacggtattagccgtttccaaccctaggtcataacctaggctcaacaaataactaatcaaagtcttgattataatcaaggccataaccatttaaccattaatatttaaccacatacggtgcttaccacttttcttacattagttcaaaactcaagcgtacgggccgacttgagtggaaaacaagctagacgatcctggtcctatatcacaacaacaaaaactcaataaaaaccttaatcaaatttctgataatcaactttaattctcacaatcgaacacaccgtactttcccccagatcaaacaagcttaaccatctcaaaaacaccctgaattccactccgaaagacaccccaaactcagatcggacttgaggagaaaaaccctgaattccccctttcctaggaaaaacggtcggccgttttctagctgcctgaaaaactggcctgcc

SEQ ID NO: 279604 - DNA, 376 bp, Cannabis indica
taagtaaatgcgattttatttataattaatttacacagctgtgaatatcccgcttttattgggctgagatgaacgcatattaaagatatacggtaagccttatctcatggggatgcatcgctgggaatggagccgagttaaccttgatggcgagctagtgctcgtcatataacttctcgatgttgatattgctttaattctgagaactacagtttcggtgtcgagacgatctttctcgcatgcatgccatcttacagcgcgatagacgcctcactatctgtcacattgcatttacatggtttctcgtcgatacacaagttaacagttagtatatttttgtctcgcacaagactgtgctgttggaatatattttacc

SEQ ID NO: 279605 - DNA, 540 bp, Cannabis indica
tagttactttttaataaaaaaaatatttcaagataaattttctcatacacatttagttgcttattttgatcaaataactttaaaactatgaatttttttttaatttttaggctatattatatgttattttattatttaagatactttgaggttacttttttttagcaattttaaactatattttgagttgttagaaacacatattttttcgatataaaaaaagatgaacaagataaaagtaacctttccctttcttttataaattattaacaaagacgtaactaaatattatagttgaataaaataagtataccatctaattttatgggttactacaataaatattataataatttatatttaaaagtttgctagtatctaaataaatttactttaaataagtaatagcaacacatcctatcctgtagtgaagagatcatatttaaaaatctagtttctattttagaaattagttgatatttaaaaattcgattttctagtaaagaaattaaaaggttacttctgattttaattattttt

SEQ ID NO: 279606 - DNA, 222 bp, Cannabis indica
gtggaggggcaaaatggtctttttgctccaatgatattttgtcctttagtggacttagaaaataagtttattatgtgttttaatatattttgttggctgaaatgaatatattgatttccttaccttcatttttcaaagtttcaaaaattagaaagttagaaaaaaattcaaaggaaaaccatctttttctctcaactctctctctattttggccctcttgga

SEQ ID NO: 279607 - DNA, 678 bp, Cannabis indica
tgagcctgatactgaatctttctggacagtgccctttcttgggcaactcacctttcgttatgtttctatgatggggaccatccagttgggttcttgcccaaccgttgctatggcctcttttattttgatgcttggctctgccaagcgttccacgggtactacccccagtccttcaatctcactgtctgaagctaacttagccaggcagtccgcgtgagcgttcttttccctggggattctttctactttataatccgtgaactcgtggagcagttcccggactatcgtcacatatgcggccattctttcgccgcgcgtttgatactctcctaatatctggttcacgaccagttgggagtcaatgtagacctctactctttgggcccccacagcctttgctaatctcagccctgctatcaaggcttcatactcggcttcgttgtttgaagctgagaagtcgaaccatagggctgcctggagtcgaagtccactcagggatatcattgcaacccccgctccagatccattttcgttggaggctctgtccacaaatactttccatgttgggaccgacggtgtcggtgcgttcgcggttgcctcggcttcattacattcggtgatgaaatctgccaacgcttgtccctttatggagatacggggtatgtagtgtaagtcgaa

SEQ ID NO: 279608 - DNA, 506 bp, Cannabis indica
ctcgtcaaggagaacaacctacagtaaaccatttttcccagtttgttactttttccgatgacatttttgtagcttcgcccttttctggcgagttttcggtgacatcgtgtaccgttttgacaaacggttggcatgggtgtgatctactcatcgaggtggtcgctttgatatacactactcctattttcggcaacgtttccggtacaccaatttttaccgccattgattgttaatgtgcaccgcttaggtgaggcttcggaaccccaaattttaaatatagtcatattatatgtcgttggactcagttttgaatgtagaatgcgataatgataattatttaaccatttggtggtataggtgagagtaatatgtaagattggactaaccaattggagctcgggacttaagagcttaagatcgtcttttggaaaaagtttaacgactcgggagaggtagggactcaacttgattattggacttgatttttatatgtgtggtataacatt

SEQ ID NO: 279609 - DNA, 565 bp, Cannabis indica
aacaccggagctgttatcaaacgctgcttcaactcctgaaagcttgattcacacttatctgaccacacaaatctctgatttttcttggtcaattcggttaggggcatagaaagtttagaaaatccttcgacgaaacgtcgataataccctgctaacccgagaaaacttcgaatttctgtcacagacttgggcctcggccaattcttcactgattctatcttgtttggatcaaccataattccatttttcccaacaatatgacccagaaaggacacctcggacaaccagaattcgcactttttgaacttggcatacagcttgtgatccctaagtcgctgtaacaccattcgaagatgatgctcgtgctcctcttctgactgagagtatacaagaatgtcatcgataaacactataacgcagttatcgaggaaatccttgaacaccctattcatgagatccataaaggctgcaggagcattagtcaatccgaacgacattaccagaaactcatagtgcccatatctggttctaaaagcagtcttcggtatgtcctcctcccgaattc

SEQ ID NO: 279610 - DNA, 558 bp, Cannabis indica
ttataattattaaataaataattttagcatttataggattgaattggaaaatatggtattattgaaagaagaataagtggttaaaaaagtggcaaaattgtaactagagattggttcctttaagtgggcggccctagtgtttattttgcccaatatttcattcttttttaatccatataattcagccctaagctctagttgaaacactataaaaggtacatgatgctctcatctcatcctcttgtcaatttaactattgccttcaacctagatgagagagttccttccttagtaatttcaaacctccttcattgttctttacattcaaaacccttagtgaaagagtgctatgcccaggcatagcaagtcaagtactcaatcgtagtgagtaagacggtggtaacaaaacccgaaggagagaaagagatccaggttcagatcttgataatgttctgcgacagaaaggaatcaagggctagaaatcttgaacagaaggagtcatattatttcgctgcaatcaatgtaagattttcttaaacctttatgtgtttatttcat

SEQ ID NO: 279611 - DNA, 510 bp, Cannabis indica
tcgaaatcattaccctcgatatcatctaccccccgctttcctaatggatatggatcattaggtaaatgttcgccatggtaataccaattagtataacttctattgaaacctcgtaaatacacatggtccttaatcattgtaatattccctttagatacattacaacaatctacacacggacaatgaatacgatcgtgatttgtagaattctttaaggcaaactctaaaaatgcatcgaaccctacttgaaatcgcagtgtgtctctctcctcacgcatccatgatttatccataacaaaaatcctatccaaaaaaattcagtatttagtaactacttatagctagttactaattacacaatgtaactaactaagtttctcacaatttattcatattaatttataaattactcaaattctcgttttagattagttcatattattaggttgttttgttgattagaatgttattaaaatgttaaatattttaataaataaaattgaggggaaa

SEQ ID NO: 279612 - DNA, 396 bp, Cannabis indica
attatttatactgttatttttgaattcagaatgcatttttatgtcatatagtgaaatttcataattttgcattccggtgcccggtaacatggaactcggtgtttggctcagtaaaatcacaacttagtatgttagtatattgggacggttatttagacattgggaatgtcgggattggtcgggaatttagaatttcccaaaatacccctttagtgttagttatgctattttagtgagaaggggcaaaatggtcattttgccccattgttattttgtcctttagtggactttatatggtgaaaatatatgagtatgtggcatttcttttggctgaagtaaagagttaaaatagcatttttattttctcattattcaaaaatttcaaagttagaaaaa

SEQ ID NO: 279613 - DNA, 442 bp, Cannabis indica
aaaaataagaatttcaaagctctctctccctctctcttttcggccaagcttgggagctgctagggctgggtttctttgtttgattcatgtgattttcaaaaagttcatagtaattctagtagaggtaatccttgttctagcttcttttcttttagtttcttgatttttgatgaaaaagaaatagtttgcatgcttagtttgagttgttcttgctgctgtaatttgatgttgatttcagaggtttatttatgatttaaaatgttgattcaagcatcatagggctagtgattacttgattttattaagatatgaaattttggctcaaaactatggttttcaaagaaaattgttgaaatctgttgctgttgttttgtgatctttgctgtagttttcagaggtgattttatgcatgtttaagtaggttgggattgatttgaatgca

SEQ ID NO: 279614 - DNA, 644 bp, Cannabis indica
ggtccccatactagttgagacaaactgcttataagtctcagttaattgattttaattaatcaattataattctaaatttagactatgtctagtttatgaattttcactaatcaggacttaagtgtgaagaaaagagattctagggtttatttattaattaagagactttaattaaatgttaaaaaatataaattagttactagaaatttcaatctagaatatttcattaaactaagtttatttatctaaattaattttaatatagtccaatgaaaaattaatttcatttattttaaaattaattatgttgctaattcaattttaattaggttaaactagtataatgagtctaatacaattatttaaataaggcaaatgggccttcacaattgggattgttcatgtgagggagggttgagttcagtatgtcgtactcactactaatggccccctaactctcacacaaggcccaaaggagaggaatttaacatttcattaaataattgttattcattgaataagcccaatactaattgggcctaaataaaactatcaatggtgatattttattttagcaacctagtccatttaaatatctaaaaataaatgggcttcctatatgcatctaagtccaaaagcaaaca

SEQ ID NO: 279615 - DNA, 575 bp, Cannabis indica
ttaaagttttatatggtgttgtttttttataaaatctaccatcaagttttttcttttgcattttaaattttgtatattctatttttaattttattatttttcttgtataatcttgttttgatagttgtgagaggaaagagtacggagcaaatataaagttttcttcaaagaatttgttttccgaaaatttcttgtttctataatgttgaattgttataatgggatatattgtaatctttttgttattggtttgttctatatttgcgtcatttttatggctttggcgccttacaaggctatagtgcctattatatggttggcccctaattatttagggtagtttgtttaaaattttacggcttcttgtattgaaaatataacaaaatattggcacaataaaattgcaaaataaacaagttatgcactagacaaattttaagttaaggtatgatgtaaagaaattttaaagtgatattttaaaaatattttcaagtgaaataaggtttaaggagaattaagtttaaacgataatagtttttagctatggttggttcatatttttaggaattattagc

SEQ ID NO: 279616 - DNA, 754 bp, Cannabis indica
aactaaaaattaacattcaataataaaattaagaattcatgttttggggttttgaaataacccttaactaaaagaaaactactcagaactagacattataaccaaaatcataatatttagtaaaagtagaaggagaagaaaaagaattatgatgaagaacacttcaaagccgatctccgtctcttccttgctctctctctggttttctctctctaatttgtagcttttggattcccctccatttgtagtctaagaggtcttatttatagtaatgggaaagttagttgaatcctattagaattaggattctatttatagtggatagataaatcctcttagaattaggattctatttataatagtattaggaaatatctcggataaagataactcatcttttaaacaaaagataaaaaatcgcaactcttcttgaaaatttatctttattttcgctatctttttttttagaaatttcctgctgcgacgactgatagtattttggccataactctctcaatattactcggaattggacgattcaagatgttctggaaagctaagaacgagatctaaaactttcatgttgagctccaagtccaattctgcctttaagttcgtccgaatttgcaattaagttccgccttgtacaatcgagctcgccgacttccattattttccaccaaaatatgttaaaatccctccaaaagactctaaatggatgaatagtatttaaaataacctaacaaattaaaat

SEQ ID NO: 279617 - DNA, 742 bp, Cannabis indica
  modified_base (508)..(508): a, c, t, g, unknown or other
tttctacctctttttctcctacaagctcactgctcacctatgaaaagtgtaaaaaaaaaacaactaattatatgttaaatattatatcaattataatcacacaattaagacactttagtaagatataaataaagaatatattattttttaaaaatgattaatgatgattacataaataaaaagaagaaatttttacataattgataaaaaaattaaaaatatgttaatacggacaaattttattttacggattgaacttttttatttcaaaattgttcgatattctttttagttgtcttgtagttgtcatgagatgtcttttttttatttgtttttggtttgtttatttagttgtatttattagttgttgtgatgttaatttttcggtttatttttttataaatcgttattttttagttgttttattatttttttttataattttgaaactttaaaatcgtattttgtaaataaaaattttaagttataaaattgtaaataaaacatntttttttaaaaaaaaaaaaatacatattcaattttaataatttttaggtttttttttatttttgtactttaaaatagttttttttattgtatttttacggaaatctacataaaaacctacatagtaaccgattgaacaacttaaattacaatcaaaattcacataacaatccacataaaaactaccagaacaattcaaaccgtaaattaaaaaaaaatagcatatgagacgagg

SEQ ID NO: 279618 - DNA, 663 bp, Cannabis indica
atattataggtttatatacacattagttttataaaacatatcgtttataacataatttacaattagtcactaaattcttaaacaaaaacccctagaacttaaaataaaactaatatttacgtggcgcgccacgtaactctcttctagtatatgtatatgtatgtatttatgtattaatttaactacttgaccacttgtgatgtgttgttcttgttactaaacaataatagtaataatttcaataatatctaacaagaataaaatgttaggaaaaatgtttttgaaaatttttcataattataattttaccttaattacaaaaatatacttattaaattttataattacaaaaatacacagtttactcaataaaaagtaaaaagaacaattaaaaaacaaccaagaaaataattttatgacaactataaataaactataaaacaactagaaaaacagtaaattatttttactgaaaatatatttttgtaaataaaaaattcaaaaaataaaaataaaatttatccgtatcgacatatttttgtaatttttttttaaaatttttgattttattatgtaatttttcttctacaaaaagaactggagtacattttatatatatatatatatatatactagcaaaaagctacgtgcaagacacgtata

SEQ ID NO: 279619 - DNA, 577 bp, Cannabis indica
ataaagttatgagatatttgaagagaacaagagagtacatgctcacatataggaggtcaaatcacttggagatcattggatactctgactctgactttgcgggatgccaagatagtaggagatccacttcgagctacatatatatgttaggtggtggagctatatcatggaggagtgcaaaacaaacactcatagcttcatccaccatggcagcagaatttgttgcgtgttatgaggcatccaaccatggtatatggctgaggaactttgtcactgggctgcgcattgtggattctttcatgagcacactactcgtatgggtgttttagattatgaggatatctagattcagtgcgagtttgtctttattatccttagtgtgttttatttgtttcgtgaaatatgtgtattttgatatttttctgatcagaaattatgttattcagtttatttcactttgtatatttaagctaaagttttgatctccataaagtaaagtaggactaattgaaaattgacatgaatagattaccatgcatgtaattttcataccacattatcatgattgatctatgtc

SEQ ID NO: 279620 - DNA, 589 bp, Cannabis indica
taggataagtactatgtcctttccagggcattgggtaaagtaagcttgggttggatacatggagtatgcattggaagggagtgatatttaacttgaactagatatgataaacttaccataatatgtattcaattcaatatcacctagttgatcctagatcaagtaatcttaatcctgaaatagttaggttctagttcagttgcattatttgtgttcttaaatctattcgttgtcgaccaaatggttattctcgtgaaatataggttaaggacatggtagttcaattgagtgggaccgctaatcatggatacgaaatctatagcttctatccagatatagaagtcaaatgatgatttcattcgagcttggcttaacagagataaatggttgagcactcatttcagtgattatattagttcactagaatatcatttataggtagctaagtgttttaaggataaaatacattgaagggtgtaacgctaaattaatccctactcaatgtaaataatctatagaggatcattggttattggaataaaaataaatggataatctcatagcatatctatatcatggaatttatagg

SEQ ID NO: 279621 - DNA, 639 bp, Cannabis indica
gtttaggtgtgaatgcataaaggtaaaagcagctgccacttgatttctttacgaagatagggttcacctcaaagaggcacgatacgctacccctataaatacactcaccaaagctatcagctagaaggacagacagagagaagtaaagaggagaaagaaggtgttcagtcccatcacgcttgtcttatcaatcttcaaacaaattttccctttgctttctattccctttgctgtagaggctgtttgtaagcgtcgaagcataaacagcatgcttgcatacaaactctcttaatctctcacttcaaacctttcagaaaagataaactccaaaagaagagtgtgtttatatgcacgctctttgtttaccttcttcttttcctttcttatttatcttatttctctctacacaaaaacagtttgcgttgatactgtttctatctcactaaaaatacccatttacacacagttgagaccattaatctgtaaatctccattttattaataaaacctaatatagcttaaatgctaccgtagacgtaggcaaatgattttctgccgaactacttaaatttgtgtgttacatattctatacatatatttatacttatatgcgtatttagcaatatatacatataattt

SEQ ID NO: 279622 - DNA, 1049 bp, Cannabis indica
aaatttccaatatattacaaatagcatgctgtaatgttgtttacaaaattttacacaaaattttatctgctctgaatttgagaatttgttttgttggatctgatctcacaaaaccattagtagttttgtttcaaggtcggtacattgcttacaatattttggtttttcaaaatcttgtgagacattatggccggagagttaattctagacccaactacatgattaaattagatataaagaaggcatatgataccgtagagtgagattttatcgaagaagtcttacaagcttttgagtttcctcaagagttcattcaaccagtcgtgatttgtatcaagactcctcgatttactctcatgataaatggtgaactttatggtttctttgaagcaaaaaggggagcttcgccaaggagattcaatgtcccctcttatctttattcttggtatatggaatatttatcaaggatcatggataaagtgggtaggaaaaaaagtctttaagtttcataaaagatgtaggaatctcaagcttaatcacctgtattttgcagacgatgtgtaactggtattggcaacaaattctgcatgtaaaggaagagactaataataaacagaaaatcattaatctgcattaaatactcgattcaacaagggtatcagctggtatgccctcaattgtttaatgattatatcgatcgttttaacatatatagttacagatgggaggtgtatcatgatctgacttggctgaaaaattgcaataactccctttgagagctcttaaaacaattaaaaagtctaggctatatatgttatttgacccacaaattatcttgctgctacaccccttgctgctatatacagtgacgaagtcagaaatttagttgagtgatggcttaaataaatattaagtcaaaactaataaaaataataataaatgtatctttcaaattttcatctttaacaaaataaaataatactgttgacaaaagtaaaataaaatattgtcaatggtattattttattttttaataaagtattattttt

SEQ ID NO: 279623 - DNA, 652 bp, Cannabis indica
aataaaataataagtttttaacaacaaaaaaaaaacaaataatagttaaataaacaaaacaagtttaatatactagtaaaaaaaaaagagatataaaattgtacactaattatatataattttatatatacaaagagaaaataaaataggttgagaagaaaaaaattaaaaaaaaaagagagacaaaagagaaattaagaaaaaaaaataaaaagaaaattagagagaagagaaagaaagaaagaaaaagtcagcaactgaaattataaatgtaatgtttagaaaaaaaaaaaaagttagtatttggtataaattttccaaataaaaagaaaccctaaaatgtaaatgtaaaataaactaaaaaaaataaaactaattaagttagaaacaaaaatatgaaatatgggtttggataataagtttacaaaaatatgacttatcaaataccataaaaagtcttaaatgtgaaaaaatatcatagaagagtggcaaacctataaatgccatatttttgtaatttttatacaaaatctcatattttatgtaattttcactaaataaaatggaccttgtattttctaaaatagtaaatataggaccttgagcttaatttttgaattttttttttagtataactaacttgaagacaatt

SEQ ID NO: 279624 - DNA, 551 bp, Cannabis indica
gtgaaccaatcatgggcattctcttcaagcgtagccgcgagaatgcgacacttcgcgagttgcggcacctggtccacttccattatggtgttaaatttctctaggtagtctaacgggttagatgtacctttatacttgagggattcagataaacggaatccctttggaagttgggcctgtcgcacttctgcggtaaacggcgaggtgccgtgcagcttgtatacgggcttacgctgctgttcgagcattttcaaagcttgcagaagcatactttgatcgattcctcctgtcgcaggaggtggagtcgctacaacagtggggctcgcagccactgcggcaaggtttgaagggatgttaatccctgtggtcgcgatcggcgcgataggcgggttggcaactgcgttgacaccctgatcgcccatatggggatcatggagtgtctccgtgttgcgcgggccgcgggagcgcgccctaaagactgcattgagatgatcacgcagatcacctcggtgtacacggtagcgtcctccctgctgtgtttgcacagagcc

SEQ ID NO: 279625 - DNA, 632 bp, Cannabis indica
tttcaaattatcattgacttccttagcttcctttttcaatgctatgaatattgtgggtaagaaatcttatattaagataacatccttattattatggcacgatatatcgggtcatatttctaaagaaagagttgatcgattacttctagctaaaattcttcctcctgttgatgtttctggttaagatacttgtgctgattgtacttgtggaaaattgactaaaataagaaagcagactgctaactgtagtcactctttataagagattatcgacactgacatcagtagaccttattccaccacgttgtgcaaaaaacaagtagtttataacttttatcaatgattttcctccttatggctttacctacttgattcaagaaaatctaacgctcttgataaagtcaaaatcttttgaaatgttcttgagaaacaattagaaggagtcatcaaagttattctttcagatcgtggaggagaatattatgatcgttattcagaatatggagtacacatgaggccttttgttgaatattttcaagaaattgtgtagtttctcaatacaatatgttaggttcactgagcaaaatggcgttgctgaaagagaaaatcgcactctcatgcatatggttaga

SEQ ID NO: 279626 - DNA, 582 bp, Cannabis indica
gtcacgcctagggggcaacacctacatgctgcaagcaagttcggaataaaagcatctaacaatgaagttgagtacgaagctctagttgtcaggctaaagctagcccaggaaatgaaagctgaacacattgagatctgtagtgattcacagctggtggtaaatcatgtatctggagaatacgaagctcggggagaaaaaatgatagcacatttaagcaaaatacatgatctctcgactgcgaggattgcgttgctcaggatcttcatcagcctatgttccttggttaggatatctcacggattggtctctcgatgttggctgattcaagtccagaccctcagggttggctcttcattccctgcgaacatggttattacgatgtttagaatttgttacctgagggttgtccgtgcgagtagtagggactcgaggggggcgtcgggcccagttctgtccatccaattcggcctgtagtgcacgtcaatgggccctggatcgcagtatattgatcagtggtgagctggatgattccttcagataccactgccggagtgacagggggaaagtgcatggttgctggtg

SEQ ID NO: 279627 - DNA, 594 bp, Cannabis indica
gtagtaacttacatcagagctatgtgatccaatctgatcttttagcttaacatcagataaaacaaattgcagacataagaaactgtactttaaatggtggtcacctgacctgagtactttgtttcttttatcgaaacatttgagcgtagtccccccagaaggccattcacttaaaagcaaatgttcattcagtacttaatgtggtcatccgacctggtactttattggtagtattttcttaaatgttccctattccaatactgtggtactagaacgagttgcattttttcatcatacttacataatttgtatgctccgaagtcgagaacttcgaccacttgatatggtccttccaagttaggtgcaagtacacttgtcgtactatccttggtgtttaggaatacccttctcaggaccatatctcccacgaagaattttcgagcctttacctgtttgttgaaatatcgagctactttttgttgatgtgctatgaactttaagtttgcaatggctcatttttcttcgatttcatcaagtgattctgctaggagtatgtgattggtaccttgattgtgttgaaatttattttaccag

SEQ ID NO: 279628 - DNA, 272 bp, Cannabis indica
tgttttatatggtattgatcaccctaatggtggcgactgtatttgacttagaaaatataacaggacactgatatcagtttgttgaaaaccttcgaaattatttaggattgtattttttagtattttctcttatcattcctacttgctatgtgcttataatttctgaattggattttgtgttaaaccattattgatttctatttattattttgtagtatcatgtataaccatgatgaattccttgttatcactgttgactgaaaataagctaa

SEQ ID NO: 279629 - DNA, 510 bp, Cannabis indica
aacatttagaatatttaaatatcattacctaaagagaatgaatagacatgaaattctatttcaaagaatatagatttcacatatattggtaatgccagaagcaaattaatatatacatattttattatttcttgaaatcaatagtttcaaactattgttggtacaggatatgtatatatatagttactatataattcagtttgcatattcccaaaagtggatatataatttactaatatttgttagtgatccaatataatcaaagtgataaagaatcacaaaatgattatttgaaaagcttcctgaagaagtcttacatacaattgctacttggagtagtaaaatatatttgtatgtacctagatgtataacttttatctagttatgaaagtaataagaaataacttattatatgtactggttgtacatttaaatatataatatatcaagtcatgataattagactgatgaatagtctattaataaattagacgacttgttaaaaagata

SEQ ID NO: 279630 - DNA, 313 bp, Cannabis indica
aatcctaatatgattaggttcaatcttaagagtgttattcgttctatttgtgaatttatcactaagtaagggcgaaactgtaaagaaagagattctagggtatatttgttaattaagagactttggttagtctaattaataaatataataaatgaaaatattatttaataattaattatagttattaaatagttgaaattgacatttaaatggttgaatttgaaatttaaatggttgaatttgaaaattggcaatttttcagaaaatgggatgcagaaatgataaaacatcaaaattgtaaaagtgaggccca

SEQ ID NO: 279631 - DNA, 608 bp, Cannabis indica
aagaaccttcctgacttcgttcatgtccccaaaatcagacaggacgaagccatggttgattatgttcttggagaggcggccagcttcagcagcaagctaaacaacaatacaagtataagaaagaatctccaaaaaagaataaggggaaaaacaaaattacaaaacacttaccacagtgagggagtggctgagatcctggacttggaagatggagttcagggatgcacaggtagcgaaccgcttaggcgcgcaccgggtaagctgagacgcaaactcgccagtcatctccgcagcaaagggagctaaggtgggcccaaggaagcgacggaaccagtccgatagggggtccaaatttaggtcccacggatcctggtactccgggttgttgatggtgtcttgcacctcaacccgcagaaccctcctaagggcttccacctcagcatacccccgggagtattcatccatggcgtagttgtgtttagctatccggagctcctgtctcgcctcgtctccaggaaccggagtcagcacaatgttgggaggggcagtatgctcttccatgggagagaccccaccatcaagaccgtgggccggagtatcagccctcc

SEQ ID NO: 279632 - DNA, 871 bp, Cannabis indica
aatctgatgaaccaaagccaaaaccgaaaaaactaccgccaaagaattctcgttatgttgtagtattgaagggtttttattaacaacggtcaattcggagcaagacaacaagaatatcccaccaatgaaattggcaatttattagcaaaacaaaagctagtgagaacaagattatagagaagcaaaggtaatgaaatttattgtagtagactatcttattaatttgtttgtttgttttacctttattattgttattgaattgtaaagtgtaaacagtaaaaagtaatcattcatgctgttattgtgtttgttattattcatccatgaaaatcaataataagaaaaaaaacaaatacaaaattttcattacagaacataataaatgcaaattacaatgtctcaaagtattctttttactgtaacaattttttgttttgaaacataagattatattacttttgtgagactcatgtaaaatccaataacaagatggaattgccttaattttgagctatcataagtaatttgaccaaaactgtcagctgttagtgaggggtggaagatcatgacttgatccactgaatatagtctcccacggtctctccgacggtcttgaaggggctgctgcttcccacaacttatcatctttgctcttcaactcaccatacacacatgcatatcccaagttgtcctacttccatctcttaaataaattaatatataacttgcattaaaataaaatctaaatgtcacataggctatataaatattctcgttttacatcaaaacctatgtttgttcgattagagcattcttaatattaaattctcagatttcatattaattaggatcataaatcaacattaaagat

SEQ ID NO: 279633 - DNA, 688 bp, Cannabis indica
agagtcgtgatttaatccaattttctcagcggttgtacttctattatcatccacagaagccaaaggaacacaagtaatctatgatcaatgtaacgcccgtacttttataaaaatattaattttatttacaagcgttaaacgcggaaaatcataatgtcgcatttttatttaatacttgaaaatgttcacaactggccagttttcgtacaaaagacataataattaataactaaaataattgcgacataagtttaataacgtaaataaataaatagagcgccctagaccgcccgcagttatatggccctcagcgagttcacacacacaagcatccaaagttccactcgccaccggctttctaaactttcagttaccttggtctgcacatggtaatttgataagggtgagctactaaactcagtaaggaaatgtgtgtcaggtagtcacataaataaaaacaaaacttaattaaaatgcacatgcacatatttaggcagatagcaaaacataaacttaatcatatcactagtcactaataactaggttctaagctaaatcacataataatgattacgcccgagtccaattttggcaaataaactcgagctattggactaaatggcggagggctgggttcagtaaaatcgtacccactactaaatcggccccctatctaccatatagaccc

SEQ ID NO: 279634 - DNA, 602 bp, Cannabis indica
aagggattccggctatccaaatccctaaagtacaaaggtacctctaacattgattatttagaaaaattcaatactattatggaagtggatcaggtacctctgctcaaaaaatgtcgcattcttgcggcaacgttggaagaaaatgcccacaattggttcaaccaattgcctgaggcctctatctcgacatgggagacctttgttgacctattcctcacgcatttccaagccacgatgacctataggccgccctataccactctggctaacatcaaacaagaacccggtgagtctttgcaggactattttaagcgttttagtgccgaagtaacaaaagtttagaaggctcccgagtcttcgctattctgtatgttaataacaggtgtcctaccgagaaccgatttttggaaggagctgcaggctcgaagaccagaatcgctagtcgagttctttgccatggcagaaccacataaaaggattgagaattctctagcagaattggagaagggcaaagacaagcgtaagtcaccagtgccgcggtcacgatcccgcagtccccgagggaaaagttccagaggtcgaagcccaagaagaagcagtcc

SEQ ID NO: 279635 - DNA, 620 bp, Cannabis indica
acttcaagcatgaatggaatatcgacgtaacaacctttaagtcatacaaagctggtacgcctaacatgacgttaaaaggctgatggaacgtccaataccaaaaattgtgccattatagttatgcttgtcgaagcttgtccaacaatgaggggtaggcgaatttgccctagaggtgcgactccttggccggagaaaccacatacgggcaggagatagggggttagatctttgagttggagcctcatcttttcatatgtggtcttgaataagatgttggaagaggctccattatctatcatggttctggccaccatcttgttggctatctggacttccacgaccaacgggtccttgtgcagaaatctgattttgacaacatcctaatcatcaaatgttatggtgagctctcttgcgcgtgggattttcagtttcctctcttctacggccaggactacttcttctttctcctgctgtactgttcgggcatacctctctcgggctttgcctgaatctccaactatatgcgggcctctaataatgacttgtagatgtccatctactactggtggtagcaagtcttggttgttatcgcccctctgattctgatcggcctttacata

SEQ ID NO: 279636 - DNA, 482 bp, Cannabis indica
aggttcgaaattgaagagaagaaaagagaagaagagtggcggctatagagaaagaataaaaggctcatgttttattatttaacttgaatttaatttacatacttttatttatttactttttattgtctcatacaacggtgactacgggatgtatgtgatagagcacatcgagcatagtatgctagagactacgtttgataatgtgcgcgatgaaaatatgaagaaatttagagagcagtggtgtgtagatttgtcttaccagaatttagcatgaacaaatattgtttttttttaattggtatttattaagataacaatgtaactagtttttttattggtatgtttatatttttttaaaagttcatacaaactttatgcctttctttcatgcaacaaattataataattatgtaaacataaaatatcacaaattccaatgtttaaagtagtccaacattaattcaataacaatacataatagt

SEQ ID NO: 279637 - DNA, 496 bp, Cannabis indica
gcacagcatgtttaaaaatcacgcaatacgcctatgttagttagggtgttacaaataagcattaccgcacacgcataaatatactcagcaactttgtatcatatcaaaacttaccatgcttctctaacaatttacacatttcaaataagcatacaattcaaataatcaataaataattcactaatcagcgaataattagcacttactaaaccatgagtcgaacgagtcttcgcagccaatgtacatatcaaaccagtcttcaggatctttaaaccttggtcactctgataccatgttgtaacaccctgactctcagggacgccacgtgtgtgtgcttttataaacttattatcactaatctataaattttggaaaagtgttgtttattttaaatctttaataaaattaaaaataaagacttccattttaaatactattgcaatataggatcctctgtttataaaaaaaaaatcattttacaatagattacatttcc

SEQ ID NO: 279638 - DNA, 319 bp, Cannabis indica
actcatataatgtaaaaatgagaatttttttaattaaatagaaaaactaaacataaaattaaattttataatattagccgtaacactattaagagtaatatatatggtgtgatcatttatatggtgatttaaaatattagatacgtgaaagattgtgttgaaggactacgcgtgctttaataatcttcgacattcacgtaataatgatcatttaatgcgagaattttactaaataataataataataataataataataataataataataataataataataataataataataatataattgtatgatgatatgtac

SEQ ID NO: 279639 - DNA, 675 bp, Cannabis indica
acttagtaactgccattcatttattaatgttaacgttgtttagtttaattattgtaattcaatgtgtaaaaacggattgacaatgaatgcaatccttgtataactgatcgaacacctgctttgtatataaaggggtgatccaccgtgaaatggcacctacgaaactctggctacagtggactaagcagaccgtgatctaactgaaccactataatcttgtgtctcattgttatttccagttttctgttaatcatttctcattcccagtttgagtactcgccactctaggttgaatactcgcacttgttcttcacatagaattctttctgttatcaataatatcatataaaattggtgttgcgaaattcacttgacaacaattgtgaagtcatcttgtgtttatgcagtatgtgacaaactgggcatctaaattaattgttagagttggtggaattgaaattcttgtttgagcaatggaagagaacagcacatgagcagtagtattgtgattatcttatagcgtagttagtagttagtggtatgtatcttactcgagggcgagtcagaatctagtttgggggaatttgttaggataaaattagtctaagtttcgggtcatattttcggttagttttcactctttgtttctagttttagggctattttacgcttgat

SEQ ID NO: 279640 - DNA, 894 bp, Cannabis indica
aactaaaagtttccctatcgataaaaagcatggcaataccccaaataacataaaaacgaggaaatctagggttccagaaaattccccaaccggcagaccggttgcacaaccagaattccggttctggaaattcctgaaccccatccggaattccggatgcacaaccggaattccggttcctcgcaggcagaactcaaaaattcataactcttccaaatcaaatccaaatcacacaaaaccttccagacctgttctaaacatcccatagagcatttctaaagcaacaaaaccgagcttcaaccacagaaactcatttcaccattaaaggttcaagattgagttctaaaactcaaaacttgactaagcaacctatcatgcattcaaatcataccaaaactacttaaacatgcttactaaagctgcagaaaacaaatacaagctcatgcaataatcacagcaacaaatttccaattttctctttgaaaacttaagcttttgaactaaaaattccataactcaaatcaacctaactatcatgcatcacaagcagcttaattcaactcaaataaacatgtataaatctctgcaaacaacaacaaaatcacagcaacaacaacaacctaaactaagcatgcattacaccatttttcatcaaaattcttcaagaaaacttaaaaggaagctagaggaaacataccaacaacaagaggtcacaaaaccttgctaaaagagcttgaaatccaagaaaaatggcaagaatccttgctgcacaaggaggccgaaagagagaggaaaagagagagagcttttttgaaaattttctaattttttctaagtttgggaaaagaaaataaatgcaacataaccccatttacttcagccaatattaacatc

SEQ ID NO: 279641 - DNA, 653 bp, Cannabis indica
gacgatgatgatgtcgaccaaatttttcgatgagttgttaaaagctaaggcaatacgactccccgagccgaaacgacccaacgaggttggtatgacaaatgatccaaattattgtcggtaccaccaaattgtgagtcacccattgtcggattgctacatcctcaaaaacattatcgaaggcatgatcaagagaaaagagattgagattgactcttctcttgggaaagcgacaacaaatacaacttccctaaccgagaatgaccaaataccaaatgatcccacacaaagggacataatttctgtggcatttgaagtcgacaaggaagttacaatagtccaagcccactcagacatgccaaggccaggaaacccaaatattcctacattatatgagctcatgacagagcctaatttagaaatttgggaggactggtatgatagtgaagaggatttagaaagtacatggcaaacatgtactcgaaaaaaaccggcaaaaattccatctcggaagccatctggaagctccggagtcaaatttcggagtagaccagatataaaggatcaaaagagtaagaaaaggatcggcaagcaaaaggccgtttccaaaagaaacgaactcgaacaaccaaaacgaaatctagtaactctggagg

SEQ ID NO: 279642 - DNA, 514 bp, Cannabis indica
aggacgtgcaaaatgataaaagggtcaattctgatcatatcctcatgcgaccaggcaaaaacgtctaggtttgctctcagaaattttatcaatgctgattttacttcaagcaacaaacctttttcgttctttagctttctggccgggatatctggatcgatctcgatctcttctaattcttccataggtccaacattgtttcttgggtcccctagtcgaggatccacaccttcatccccgccttgggaagctccctacttggaaatgttttttcccttgtctgtgctctcgctagaggatacttcctgttgggttttatgccctaaataaaactccatttcaatgtaatccgtattattcaatatcaataaagaaacagaagtatttttcattcatttgtgtatgttttggttcacattatcaattatttgtctatttgatttataaattcatcgaaacccctttcacattcttgttcttgtttattgtgtcgtcagcaaagtgaaaagtaaac

SEQ ID NO: 279643 - DNA, 609 bp, Cannabis indica
gtgagtttctttgatttccagctctccttctactcggttcttctcctctgatcgcgatttctttgttcaatgattgttgtttttgagttttttttgtacatcaatggaggtttcctggtttttttttttccttttcgtttttgattttggattttcgggattcagctggtttcctaggagttctacattttgaattgaatttgattttgctggtttttggaagaaaaatggttgagattgggttgttggggttggacggctgggtcacgaagaaggatcggctggtcacgaagaagatggagtttccctttccgttttctcagccggcatttttgtaattaacaactttttaatttccatttttgtttatttccttttttggggtcataaatgtaaatttcatctatttttagtctataatagaaaaaatctcaataaataataccatgaggttatggattattttgtttttttttttacatttatatgggattttttatgctatatttttgtaaaaaaagatgtaaattccatatttttaagactaattaggatttttgctcctgaattttgacatgtaccaaattatgtccctgaacttttaaggtc

SEQ ID NO: 279644 - DNA, 676 bp, Cannabis indica
aaacccagaaaaccagattttaaggtctagaaatgcccacttttccatataatcgaaccttaaccaaaccatacccaaaattaatttcttacagataaaaatcctcacaacagagagcaaacaacaacaactctcaaaatccaaactacacaatcaattctaaatcatgcattaaaccaagaaaactcaagctcaagaacttgagcttcaactcaacaatccccatattttccagcaacaaaaacaacaataaacatgactttcaacttagaaaattccctgaaaattcagccaagaacacaaccatataatccatacttaaatcaagaaggtttttttacacaaaatgataaatttgacaaattatttacatttttaatgccacatgtcattttttacttttatacaatttaactttttcatttatacatttttaaattttgttaattacaattatacgaaacctctttttcctctatcttttacttcatccctatcttcaattgtagaaaactcatctccaagccctgctgtcaataagattgaccttctcctcctcctcatccctcaatggccacgcaaagtccatctccctccccatatcgttcatctccattctcatttgcttctattaatttgtaagttatttttttttgtttaatttttcataaatata

SEQ ID NO: 279645 - DNA, 619 bp, Cannabis indica
cttgctgcacttttcttctcatatggccaaaggaaaattgatgaaagcattgatagcgaggatgagaagcaaagcaagtcttctaaggcatctaaattgaaaaaataggatcttttattttggtgactcttttctgttatttgttgaatctattatcagacaatagttagtgttattggttgaatgtaggtattatatttgattttatactatgtacctggtttaaaacttttaggatatttgacatttactccttataatatgtttattgtataggtttgtatttcccaaagttgtttgttttttttaattgttcaagttcttatatacggtcgcacaactatggagaaactattaaccaactgaatacaaacaatgtttttatatttctaaattgtgctatgaatgtatttttattctttgttattccattactcctttttcctttattttagttatgttttatcaattcttacctgactgcttttaaaactgtaaagaagaagtcattccggtacttaatatttacaaagtgtcacaactgtaacaaaacgattttgcaactattaaaaaactgtttcaaatttcataaaaatgaaatcccatgtatttagaacat

SEQ ID NO: 279646 - DNA, 630 bp, Cannabis indica
attattaaaaataaaatagtttatgagaaatttatgggtcactttttatttatatataataaaataaatctcattaaatccaaaaaaaaaatacgattgaatttttgttgttgtacatctacgatttttcttttcttctcttctagaattaccattttcctataaaaacactcattaaaagaaaaaaaaaatatattttagcacatacagtataattaagaagccataaaatttataatttcgtcttctgttaaataaaaataaaagctgctttgtacatgctgcgacaaaaaggaatgccaatcttattaattctccatgttctagctattaatgcaaaccaaaaaaagaaaaatacatttacttaaacccacgaaaacttatcataattaaacttgaggcattagatgcaaaaaaaaaaaaaaacaaaatcagagagtaaattacagcactgtttttgatcacgtgctcataaattagaagcacaattaaatatattagcgaaatagtgactaacatccaaatttcagagttgacgaaaaatctgcaactgaatgaggtaaagactactacaatatttactttataaaactaatttggtttcaatatcttactattattaacaccatt

SEQ ID NO: 279647 - DNA, 535 bp, Cannabis indica
gtggctgtggttattgtttgtggttgctgttgatttctggagtttaattatgatttaaaatgttgattcaagcatgattgtgttggtgattagttggttttatcaatatatggaatttttactcaaaactatgttcttcaaagaaaaaatgaagaatctgttgctgcacttgttgttgttgcttgttgttgttttctgagattattatatgcatatttaggaagatttgagctggtttgaatgcatgttattgatgtttaaccaagtttgagttttgaactcaaagcttggagctttaatggtgatttttgattctgtgttttctgggctgtgatattgctttagaaatgttctttggggtatttagaacaggtctgaaaggtttggtttaaattgggttttatttgagggattatgaatttttgattgattcctgcgaggaaccgaaattctggatgtgcaaccggaattccagatggggttcaggaattcccagaactggaattccggttgcagaaccggtctgccggttggg

SEQ ID NO: 279648 - DNA, 641 bp, Cannabis indica
attttatttgataattaattatactttattaaataaatagttttgacatttataggattgaatcggaaaatatggtattattgaaagaagaataactggttgaaataaagtgacaaaattttaactagagaatggtctcattacgtggccagccttaatgttatttttggccaatattttattctcctttaatccatataattcagccctaagccctagttgaaacactataaaagaaacatgattctctcactcatccacttgatgacttcaaccaaatcagacctagttttctatgtcggacaactagtaaatgagagagttccttccatggtgattttagcttccttcattgttcttcatcatatttgaacccttagtgatagagtgccaagcccacaaatagcaaatcaagtactcaatcatagtgagtaagacagtggtaatcaaacccgaagaagagaaagagatccaggataagatattgataatactctacgacagaaatgaaaaagggttagagatctgagcggaaggagtcattatatttcgctgcaatcaatgtaaggttttctaatcctttatgtgtttaatttcatattttttgagatattcatattttaggatgttaattcaacata

SEQ ID NO: 279649 - DNA, 564 bp, Cannabis indica
gactaacaaaataagcccagctgtcccaaagaccgtacgctccaggcctaaccgccccgacatgtacaatctccatctactcgctctcacggctgctcaaccttacccttgcccttacctacacatgcaaagaatatttgtgagttgacagactcagtgagaaaagcataaacaataacatattaataactcggattataatcaggcgcccatacacccaaccataaccatatccctgtgtccaatacggtgctgagtcaagaacgttcgtacgacaatactatcaaccataatgttagcctatactcagtatgctggtcatactctagccataccgatgtgacagcatcgattagtatctgagccaaacatacatctattaacatccaatataactctacgtatattgataccgctatcaatgtaatctaacatgcataaataacatgtacgctaaacgtgtaaacacaaatgcatatcattatactaatcttacctcgtttttcgaatttaggtgtgccggccaacctgagtggaacaattgctcgacgaattacaggcccc

SEQ ID NO: 279650 - DNA, 875 bp, Cannabis indica
ggggagcatcaggagtgtgaaccccgacaagttcggccaaaatggcatccatagaagtacctgctacaacaaaagaaaaaaggtaagtgttagaacatccatggaaaacaacaaacactcagatatagcaatcaagctagtcctaccctgactctctaattcggccctagcaaagttccgaatcttaacgctggcaacatcgtctccgagatagctgtccgaaggccggaaccagctggatgaaatataagccgaagggtctaagggaacgggctccggaggaccagaacccatccgggaccgacctaggaaatctcctaagttggaaaaataaaattccttcatatggtctccccaccgggtcgagggcatcctaaacctatgaagacgctcatcgaaccctaaaggcctaagactggcatattcgccaacataaggaacgtaatgtactgctaaaggagacttaccggagccggaagtgctggcgccaggagccccagtgttcggctcctgagccgaaggctttggcctaggagcccttctctcaaccgagtccccaatgcgaaggggcttcccagagatcgcttggcttctcctctcaactgggctccccacgcgaagtggcctcccggaagctgcttgagccttggagtaagctttctcctgagccttccggtagagatattcctggtacttcttctcggcagtggcgatgatctcgtcccggaagatcttctccgcggcaggcgccctcacatttggacagataaccctggagaggttagagtcctccactgattggtgcggcaggatgagcttggccttccgacagttctccgttgtgaccaggcccccgacgtcaagttccgcccggt

SEQ ID NO: 279651 - DNA, 640 bp, Cannabis indica
aatcataactatgacggcttcggggcttggagtcagacccatttgatggccggtgccatgctcccgctccaagattactttgttaattttcttgtatttgtcggccttgcgccataccaacttattcctcaagcttaccgcctgctctcaggcttatttattttttacaccgcccgcggctgggggtctcccagcccggcggaaattttatatttttatgaacttgtatccgtccccaagaaaggggacaaacttaaggatggtttttatgggttccggatccaccctgctaacgagggggtggttccgtataataggcagactcacgttaaggagtaccgccaccgctttttcttctcctccgggttcagggccgtggaccacccggagcttctcacggagtgggtgcggatcccaccttaccagcggacgcttcccactcaggctttccttcgaagggcccaagccttcgcctcctacgaccacgccgatcttgatgtcgggggcctagtcaccacggagaattgtaggaaggccaaacttatcctttctcaccaatccgtggatgactccaacctctcacgggtcatctgccccaatgtgagggcgccggttgcggagaaggccttccgggatgagc

SEQ ID NO: 279652 - DNA, 452 bp, Cannabis indica
tacaattgcaacaatacaaattagatttttcgagttctggttctaccatttctcgaaatgacattcagatttgtgttgcatccatggaacaggggctttatgttctaagaccagacgaaccatttgccctacataacgaactgtttaaagtagctaaacctagaaaccacaaaaagcaaaagatcgataatgatgatgaaacatatctatggcatttacgtttaggtcacataggctatgacagacttaacaggttaaccaaagatggtccattgaaaaatgtcatcttaggtgaattacctgtatgcgagtcttgcctagaaggaaaaatgacaaaacgttctttccactgcaaaggaagagcgtgccaaagaacaactaggcataatacattcagatgtttacagaccactgaatgtcaaagctagaggtggttatgagtactttgtcac

SEQ ID NO: 279653 - DNA, 906 bp, Cannabis indica
ctcaggagcttgttacgcgctctactgagttggcctcgcagtcgatgactctgttcataaaggctgctgccgcaggttcgaaggaagccgactcgctgaagaggcaaaatgcccagtgtcaggagaacataaaaaggctgaagcaagaagcggctaggaaggagaaggagcttgaagagcttagcaaagctaaggagcaggcggagctcgaggtcaggaactcgcgggtgaagatcgaggaaatgactcgcgatttggaggctgagaaagagaatgggaggaaacaatatgatcaggcactgtctgtttacatttataccactctttccaaagttccagacttcgacttctctctcctcggagcagaagctgctgagatggccgaggcttttcatgctatgtcgcctactcagacccaaggtggtaaaggggaccttcctgatgaggtcgagggtgcggatactgaagaagtcgagaacgaggtcatcagcaaagctgcgaatgaaactgctcctgttgctccaaatgtctgatttttttctatgttatgctttttaattttacttctctctttttctttatatgcggtacaggggtactcgcgctttgtacttagacaaatttccttttattttggacaaacttatatcctcgcggggataattaacattttcgcagtacatgggtactcgcgttttctatatatatattctcgactttaattacagcttggtgtaataagtagaaatatttacaagtctgataaaattttgaaaatttagcaatcatgaatcaatttcatttatataatcaatagtacaagagtgaacatagtcgaataatgcgagtactattgataatataattttaaactcgcgccattccatgctcgtggaatcgcagttc

SEQ ID NO: 279654 - DNA, 493 bp, Cannabis indica
tctcctttgggtcttgtgtgagagttagggggccattagtagtgggtatgacatatggaacccagccctccctcacatgaacaacccaaatagtgaaggctcatttgccttatttgaataattgtaataagttaattaaaatagtttaacctagtaaaattgattagcaacataattaatttcgaaatatatgaaattaatttttcatcagattattttgaaatttatttaagaaaaaaacacttagtttaatgaaactttttcaagataaactcgatatatttttctatatttaatcaaataaaagaagttataactaattagattcttctagatacttaattatttggattttcatagaaaatatattaattttcgatcaacttaaattagaaaattttgaaattaataattaagtagaattttctaggaaattagttattcagatattctttaaaatatttttgaagtttgaaaatttgttaattttgga

SEQ ID NO: 279655 - DNA, 538 bp, Cannabis indica
atttccttgcatattcatgcatcgtgtcaaacgtatatgattatatatttaatgtttttccaacagtttatggcatgtaaaaaacctaggtttcttagagcttgcaagtgaatatggctctttaatcgatcaaataattctatcacgatcacaattggacatatgtatgtacaaataaatttggcttaattatttccaaaacagttttgagaatcaagtaaaagcagtagcagaacctggtagccttcgattgagaacgagcaaagtaattttctgcccctttttttgatttgttttcaagagtttcaactctgttagtgtcagtgttagtttaattttcttcagaaaccagtttctctagtttaatttgtgttatttgtgcgttctgtgattttaaaaattgtcatttgaaaacctgtttctatatgaagatcacagtttctatatcaggtgttttttgggcttatcctatacctaatttggaatcagttaaaaaccagtttctgagattgcattttctatattacttagaattgat

SEQ ID NO: 279656 - DNA, 548 bp, Cannabis indica
aaagtccttttttcgcaagttagttgacaaaatattttttcctttatggtaagattggtttgcattcatacccgatttcttaccttgtatattcggtttttagttgctcttttctatgttaggaaagatgcacttttcagctggactttcctttatttgaaaacttcttgtaagagaagcaattctcttatggaaagttggttttttaaggaaactttgttattgtattttccttattgaattcaattgtatcttgatacaatcagaatatataatctgtttatggcaggaatcaataattaatagaggatcggacctgattatagcaagtttcctgtttctggtctgatctgctgcgtcagcatccgaatctgatgctgcagatcgtatttttctttggaacgttttgtacagctgtagattcgatcttgtgactgcctctaaggtttctatgttctataaatagagcctagagagcagccattcgaataagctcttccattatttattttttgcatttatctcatttgagagaagagtgtttcttt

SEQ ID NO: 279657 - DNA, 782 bp, Cannabis indica
ttcaagtttgttgattgtggtaattcttgaagagcttgatttaattgcatatattgatgttgtctagggcttgattttgtggttttaactctctattattgatgactgtagttagtgaaatatgatgttgagttgtggtttggaatgagtttcgggttcaaattcgtattttttgaagtggtgttttttgggtttttagcccaggtgtcgcggcatgggctgtgaatgccgtagcccacctgttggagtttttgggttttcaacctagatgccacgtcatgacttgtgagtttcgcggcccgcctaggattttctgggcaaattgggtgtaaaacttactttatgtataactcttgaatccaaactccgtttgggatgttttgtatattgtgggaaagcttgttccgagctctatatgtttatgtgtaattgaaaagccaagtatatgataatgtgaaggttaatttggggatgaatcttatttgtgaaatcttaagaattgtgactaagattatcgacacttgttcaggagcacccggggatttggaatctccacatacttaggacaccaagtaagaaaatagttagcatgcagagttaagtgctgtagcactcatatatgatattatgcttatgattaaatgaggaatcaggattaggattattaacccaaaagtgagcggttatatagttgagggttattaccgtaataatctaatagtctttaatataatgccatgctttatatgttgaaataaagaattatgcattcaaggcataat

SEQ ID NO: 279658 - DNA, 599 bp, Cannabis indica
aagtcagaaagttttcttgagttagggcgaaaaagttcatgaagcttagaataagcaagatggaagacagacacaatgtgggtcaaagacaagctctatggctgtaagcccacatgaagacgtggtaaagaagattcgcagaagtttctaaccctagggttttcctaagcgttctttctacagcatagttgcattcaaagtgtaaacatgcaaagaaaagcataaaagaaatcagaaacttactcaaagattcgaatatctgagttcaagccaaccaacaatcgtctgaaggcacttctgcaactttgaagccagaaaactctctttttgctctggagtttacttaacaacaaagggtgataaaatgagttatgtgccagtactatgggtatttataggcaaaggggtaactgtatcaaaaggaaccttagacgcctcggcttcccgcctcaaaagcgaatatgggaaatcaaaagtaatcgagtgcaaccctcagccgtggagagagaaaatcagatttcaaaatattaattgtcagagcattaattagccgaaaacagaagagacacccagtcagcttcacatcgagtctcgaacgg

SEQ ID NO: 279659 - DNA, 81 bp, Cannabis indica
taacaacttaaattagatattttccaaaatcttaaaaagatacttagttaaattgagatattttctagatagttatttcta

SEQ ID NO: 279660 - DNA, 539 bp, Cannabis indica
gcggccgccatagctcgtgattcagctgctgttttttgcttggaaaggtgagactcttcaagagtattggtggtgtactaagcgtgctcttgattggggtctagatggtggtttggatctgattgttgatgatggtacgaatttatattatacatacagatgtggttgtggttggggtcgtggggtcggggctggagtggggttagggctggccggagttagcagtcgggatgtggtggtggttggggtcgtggtggtgctccggtcacactttgtggctggttggggttgggttgaagaagaagaaaacgaagaagatgaagaagaaaagaaagaaaaataaaaagaaaagaaaaagaaaaagaaaaaaagatttttttaaaaaaataattaattaattttaattttttaaattaaaataataacacccaccaataatatttcaacacgtggcagttgaatggggtttaacagatctgttaacttggagaccaacgaacaaataaaaaacctgaccttgaggactattgccgctattt

SEQ ID NO: 279661 - DNA, 662 bp, Cannabis indica
ttttatagtccgtgaactcgtggagcaactcccggactatggctacataggcggccatcttttctccacgcgtttggtattctcctgacacctggtttactaccagctgtgaatcgctgtagacttatactctcttggcccctacggtttttgccaatctcagccctgctatcagggcttcgtattcggcctcattgttagaagctgagaattcaaactgtaaggctgcttggagtcgaagtctgttcggggatatcatcgcgacccccgctccggatccattttcgttagaggcgccatccacgaatactttccacgctgggactggtggtgtgagtatgtttgcggtagcttcagcttcatggcactccgtgatgaagtctgccaacacctgcccttttatggaaatgtgtggaatgtagtgtaggtcaaattggcttaactccattgcccatttgaggagccttccggatgcctctggcttttgtaagacttgaagaagtgggtggttggttaatgccttgattgggtgagcttggaagtaaggtcagctttctagaggccattaggagacaaaaaactagtttttcgatcaccgggtaccgcgtctccgctcctatcatgcgcttgctgacatagtacacgggatgctaagttttttc

SEQ ID NO: 279662 - DNA, 519 bp, Cannabis indica
ttagcaactgcagaagcgtcaatcaaattcatttcacctttaagagtatgagatttatataatttgctaatattaattatattctatactaattatgtcttcctttaatcgacacgattaagcaaggcgacctataaggaatccaaatagagaaaaaattattttaaaaaatatacatatttttcaataatttttaaaaataatatttattcttataatgaagactttaaaaatttatttttcttaagacccaatacaacttaaagtcgtgattaagatacgatacaatattgaacgtgtcaataaatctaaacataactcgtttagttattaggtgatatatgatatgacatgcttaacctgttgaataattagatcgcgctgtgtgttattcaaacatgcatgtgattgacacaattagcttattatatgtatatattttatttatataatttgctttttttttttatttgaattcatataatttgttaatttattatattctatactaattatgtc

SEQ ID NO: 279663 - DNA, 742 bp, Cannabis indica
aaaaattcttcatgcacattggaaaaattcaaatcatcttagtctcattgctatgaaccgtttaattcctgaacatcttttgatggtttgccaaacacctcaaatactaatgagtttttcaaagtagtagaaaaactatttcacactagtgaaatcgctaaagctggacatcttatggatgaaatggcaaccattaagtatgaaaaatcaaaggagtgcgaggttttattctgaaaattattcatgttcagtccgagttgaaagaacataatattcctcttcccggcttttacaccattctttaagttcttcatgaactccctacctcttttagctttatcaagactgcctaaacacttataataaagcatggagtgttagtgaccttatttctcagtgtgtagctgaaacaagcaagataacaaattgaaaagaatgagtcttctcactttgtttctcacctcaagcctaacaaaggataaagaaaatatgaaaagaaacaaccacaaccagaggctaagggatctcaagcaaataagtgagagggagtcaaagcttaaagtggcacttatgttggagttgatgttatctatgttggcacacttattcttgaattacagtttagtgttcagattattttgaacagtaatttcttgattcctacttttaaagtaattcagtttcgcttccgcttttagttaaacaatgattttcttttcgttttgccaattatagtgttaac

SEQ ID NO: 279664 - DNA, 865 bp, Cannabis indica
cataaactcgcaaaatgaaacagaggcaaatgaaaaaacattttaaatcgcacaaaaatcgcattaaaatcgcataaaatcgttgaaaatcacagtttagcaaaacaaataccaaaacaacaaagaaagtcagattgacatacccttttctcaaatagggtagcgacatcaggttgcttcacatcatgtttcgtaaccgtgttgggggtgctccaattcaacattcgagggaatctagtccctctgcactgcccgtacttcttccccaaatcttgcatcacctcaaaggcccagtattgtagcgccggtgcatatccgtagacattgtacttcgcctctggttgagtaatttttttctccttcttccctttcttcttatccttagtagatttatcaaggtagttcttcctcaggtcagtcatacttttggctgtggatgacaacaacttctgatatgaaagaaggccccacggatattcgaagaacttctcctcgttttctactaacttcagcatatccgaccatatataaacaccctcagcccttgatagtagcacaccttcaacaaatgcacacagccccagcttgtacacgtcgtcggccacatcgcacgcctcaaaagctagccaaagggttttgaaagtgacccgtttggcattattgaggtagtcccgcaatatccgatcagactcacatagtgtagtcaattcttcagtcgaggggccaccgctcatcttcagtcccgtgatcaatccaaactcagaccttccaaatctggcctcggttttacccacgtaaaaccacacttcatcattctttacctcagtcactttcattttcctcaacagtagttgatgcacaatca

SEQ ID NO: 279665 - DNA, 658 bp, Cannabis indica
aattgaccattttacccctagctttagaaatgcttaggttttaacctcaagggtattttagtaattttgtttggggttgggtggctgcctagaggtgtggcacgtggccacttatgttcagccaaaggaaaattgagttttcccaatttggaattatctcattttttgtaaaaagaaagaaaaaccaaaataagaagaactctctcttctttctcctttccctcttcgaaaccagcaaggccaagggaatttgctgctgaattttggagttttcagctaaggattcaagctaggttcaagtggaggtaaaccctagaccattagttgcatgtttttaagctttttctttggtttgagtatgtgaaattttgttataggagctgttagagtttgatgttggttgggttcgaattctagggttaggttgagttgaatttatgccatagtagctggtttagagattgattgttagttttatgcaattttaggtttaaagttcaaagctttgagctttaatggcataattggatttattggtttgttctgtgaattactgcttggattctattgtttatacattgtataggtatactggagagtttggtaaggtttgggattgaattgaatcaagggggatgatttttggttcccagcagta

SEQ ID NO: 279666 - DNA, 521 bp, Cannabis indica
ttcaggttcccggggtgttaaagttcaaattcagtcaaatggcgaaaaactgggacaaaacttggaaaaaattggaaaattcagctccagacgcgtcagtagtcgcgacctccagagagccaggtcgcgaccctttttcctggtcgcgactctggtcgcgacttcgagaattggcagaaactcgatttttcgagttttgcctgtagtcgcgaccagcttaaatgctagtcgcgactaggtacggaaatcgcagatttgacctaattttgatttttctctcaattggaggcacacctctcatccctatataaggaatacgactctgaaggtcaaagtaagcagaaaaagacctaaaaagtggatgaaggtggagaggaagctatcttgaagacccggagcgatatcaccttctagtttctttcttttacccttaatttcttcttttatgtttagttttgtttctgaattaatcatggatgtttttagagttatgttgaactaaatttcccattaagggagga

SEQ ID NO: 279667 - DNA, 920 bp, Cannabis indica
gatgaagcgaggcaggagctctggatagccaaacacaactacgccatggacgagtactcgcgggggtcacgccgatgtggaggcttagaggaggatttgcgagttgaaatgcaaaacactcttaacgatcagaactaccagaatccgtgggatctaaacttggaccccatgtcggaatggttcaattgtttcctcgggcccaccttggctccctttgccgcggagatgaccggcgagtttgtgtctcagctgacccggtgcgcgcccaagcggttcgctgacttgtgcatccttgaactccatcttccaagtccaagaatctcagccactccctcactgtggtaagtattttgtagtttacttttctccttattgttttttcttggagattcttacttatacttgtattctttcccagcttgctgctgaggccggccgcctttccaagaacataattaatcatggcttcgtcctgtccgattttggggacatggatgaagttaggaagatccttcaggaccttactgctgaaaggcggctttatcaggaggatgctgagcgccgggaggcccttgccaaggccagtgaggaagaggccaagcggagggaagcgcaggcagaggcaatgatccgggaggaggcccttcggagagataggctggaggccaggcaccaagaggagctgaggacggagggcgaagccactgctaaggccaggcgagagcttcgggaggccagggaagccttggatgaaatggctgccaaggtgaggtccttagaggaaactcaccgggcaaacttggaatccagggccaacctggccgcggagctgaaggagctcagagacttcaaagaccaagcctcaaagaaggcaaaaagagatgagcttctttctcctgtctcctgcagccggtgcgcca

SEQ ID NO: 279668 - DNA, 560 bp, Cannabis indica
tcttttttagaatagttgagacttttccttagataaataaaatctatgcctagaagtatagaggcttctatagattccattagaaaaatgctccaacaacttactaaagtaagttacttgcactagagtaattaaatcaccaggcataacactaggattaggaagttttgttaagtccattgaatagacttattaacaaaatttcatttcttatccttgtaatagaaaactttttggttactccatatgaatggtttaaccacagttctcttggctttacttcttagttccttattttgactatccattacttatttaaactaacaatgaattttcatcactggtgtctcccaagtcataacaagggtgagttctttgaaaccctcccactacgacaaggtaccgtgactttctgtctaagaacataagtgatattgacctcatcggttgtgtcaagacaatagaggtagtgagaccatcttatatagaataagatgatagaacacttttgaaatcaagaaaaattatctcctatactttgctaatttatttttcagact

SEQ ID NO: 279669 - DNA, 1056 bp, Cannabis indica
ctgagaacgcaagtcttcaaagggagccagtatacaaaaagccatccgagaggcagcaagagcgaatagacaaacgcctttctaagcaaactcctcgaccaatctcaggtaattcatctcttgttataaactaataggtagagtttgacttatacttatctttcatttatcttcgcagatatgacttttctgaagtccgcacctgtcctgaagatcaaaccgaagggtggagaaacgacgacttcgccggttgtcgcccaaaagaggaagagcgatgcgatggctacccttgccaccgactcttccaagaagctggccaagaccgcgcaggaaaaggggaagaaagtcgtaatcgatccacttgttcgagctcgcgacttcttagccatgcaagagaaattcctggccgagatcccttatgaggatcttgttacgcgcagtcgatgactctgttcataaaagctgctgctactccttcgaaggaagccgactcgctgaagaggcaaaatgcccagtttcaggagaacataaaaaagctgaagcaagaagtggctaggaaggagaaggagctcaaagaactcagcaaggctaaggagaaggagctcgaagaactcagcaaggcgaaggagaaggagctcgaagaactcagcaaggcgaaggagcaggcggagcttgaggtcaagaaatcgcaggcgacgatcgtggagatggcccgcgatttggagactgagaaagagaatgggaagaagcagtatgatcaggcagtgtctgattatatttataccactctttccaaagttccagatttcgacttctctcttctcggaacagaagccgctgagatggccgaggcttttcgtgccatgtcgcctactcagacccaaggtgggggagggaaccttcttgatgaggtcgagggtgcacaagctgaagaagtcgagaacgaggtcatcagcaaagtcgcggatgagactgctccggatgagactactcctgctgctccagatgcttaattatcctctatattatgtttttttaattttaattctctttttt

SEQ ID NO: 279670 - DNA, 562 bp, Cannabis indica
tagtaatataggaaggcttagtggtgtgtcgacatattccaattttagatgaataatataagaaggcttagtgagtggtgtgtcatttaaattttaaataatagattgaggggatatgaaaaattggagacaaaaatgtgaccgaccttattgctgcgttaaacccaaacgctaccattatggtccatcctaatatattcatgctgcaaatgtaaccaaacaaaattattactatataataaaatgatttatttattaggtagacacataacatattaattttaattagaattataattaagttgtttaccatatggagagggcatccactgaaacttttgcattctttagatatccagcaaagaggatgagtgccataaagtaccacacttccaaactgagtcaatttaatgtaaaaaataaataatctttattaattttgataattaaataaagtgaaatttgattttctataattaaaaaatattaaatttttttctctaaatgcatacttaataatattggtcatatatgaccatattcctaatatcccacaaatact

SEQ ID NO: 279671 - DNA, 766 bp, Cannabis indica
atgctagaaagacaactaccacgtacaactgtagaggagcgcaacagaatggttgaaactcgttggcataggacaaggttgaggggatagtccatgttgtatgcttggtacactaggccaagtttgcctgagtgacattgtaagccgcaggaggcgcttttgttgaaaaggaagcttgctggcaggagtgtggaagtagtgcagggaccgtcagattcttgttagtcacgacagaggtcgagagttgataaccgagatggttcagatggggacagacatggaatgcttcagttgctacattgtgtgtcgagagggacgcacatggagaccaaggcaggcagaggccgcaatcgtcagaggatggttgtacttggaggtgttcgcatgcgagttttatttgatccatatggaagcgccgaggcagttgagtggaatgtgttggcttgttaaatcaccagagggcgtaagtcacacaaagacatcgatagagacgcggagttgtggaataaaggcatcaaggaagccagcagggctgagaagaccgagcgcaagcattgagatggcgctagagtttgtgtggaggccagagggccgtgccagtgagacttagtagtcatgttggcctgcgaaggtcgagaagggtgctacagtttgcatgaaggccagagggctgcgtcattggaacttagtacaccgtgggagccagaagggcgtgatgcaagtgtgaatcagttggatggttgagtgggaagttagtgcatgcatg

SEQ ID NO: 279672 - DNA, 522 bp, Cannabis indica
tttcgatttcaattgtatctatcgattatggtttaacatgattcaattcatattaccaaattctatgcaatagcaagtttactcaagtaatttatagtcttttcagatatataaatctcaattatatgcaaattttctaatctcgtgataaattaaacatgtaaaagacattaaacacaaaaactctataagctatccaaattatataggtactcttgtcctatatattaatttggttttatttcactatagcataattgacactcccttctgagattttgtatcaaaatcataaacaataattaaaagtaattaagtacaaatgaaatagaatatatagaaattgaggcgaaattaaatcacattataaccaaaaattaatgtcaaacaatatcgatctaaaccctaatgaaatgtttagctattcatgttcatcgtagcaatttcacacataattcagaatggaagaaaaaatagaaaagaaaagaatgctgaaaatcttgttgagaaagccttcactat

SEQ ID NO: 279673 - DNA, 612 bp, Cannabis indica
aaggtaccccatcatcgagaaactagttttctgcctcctgatgggctcaagaaaattaaagccatatttccaagcacatccgatcaaggtactgaccaaccacccgctccggaaagtcctccaaaaacctgaagcgtccggaaggctcctcaagtgggcaatggagttaagtcagttcgatttacactacgttccccgaatctccataaaaggccaagccttggcagactttattaccgaatgcaatgaagccgaggcaactgcaaatgcaccaacaccatcggtccccacatggagagtgtttgtggacggagcctccaatgaaaatggatccggagcaggagtgccaatgatatccccgaccggactgcaactccaggcagccctacggttcgacttcccagcttcgaacaatgaggcagaatacgaggccttgatagtagggttgaggttagcaaaagtcgtaggggccaaaagagtggaagtctatagcgactcccagctggtcgtaaatcagatatcgggagagtaccaaacacgcggcgagcgaatggccgcatatgtaacaatagtccgggagctgctccacgagttcacggactacaaagtaga

SEQ ID NO: 279674 - DNA, 476 bp, Cannabis indica
tcctttaatttaaaaaaaaaactttctcagcaaatattcgagtcccatctcagaattaaacaaacaaagatatatagttgatatatacaatatgggtatagagattgagcaaccttcagttggtttatcaaaggtggcgaattctgacactcatggagaagactcgccctattttgctggctggaaagcatatgatgaaaatccttatcatgaaatcactaacccatcaggtgtcatacagatgggattagctgagaatcaagtaagtacacacatacataataatctgtatatatataatcaaattaaacacacttcattagtggttattaattaataatataaatgactaattttcttttcttcttttatatgctaacaggtttcatttgatttgctagagaagtacttagaagagaactcagaagcctgcagctggggaaaaggagtgtcgagttttagagaaaatgactttg

SEQ ID NO: 279675 - DNA, 661 bp, Cannabis indica
actggtcggattgccgcactcaggagatatccttttcaaaatcaacagacaagtgtgccccattcttcaatatcctgcgaggaaacaagcaattcgagtggacggaagaatgtgaaaaagctttccaagagctaaaagcacaacttggaaagcctctcgtactctcaaaacctctggacgaagaagagcttgaaatatacttagctgtcacggagcatgctgtgagtgtcgtgctaatcagagaagagaacaacatacaacacccagtctattacatcagtaaaagactcattgaggccgaaggccgatacccaatgatagagaaactcgcttattgccttattctaggaacaagaaagttaagaccttattttcaagctcatcctatttgggtgtacactgaccaaccattacgctaaatattgcaaaagccagacgcctctgggcggctactcaagtgggcggtggagttggaccaatacgaaattactttccaaccccgaacagcaatcaaaggtcaagccttagcaaactttgtggtaaaatgcataggcaaggaagaaagcgtaccagaaagcaaccccgagccggtacaaacacctcagaccagctatctggtgcatagatttcccttgtcacgcctgttggaaattattttacc

SEQ ID NO: 279676 - DNA, 711 bp, Cannabis indica
gtttaagtccctgggaagtgatttagcgtgtcgcttatcagtgttgtgattgatgtgatttaggagcctgtaattcgccgagcagattgttctagtaaggttaaccggcacacctgaactcggaattgaggtaagattagtttaacaatatgcatatgtatttacatgtttaccgtgcatgttagtaagccagttagattacattagatatgtatgttggctttcgtactatccgacagtatcacatcggtacgactagagtatgactaacttaccgagtataggatgatattatggtcgatagtaccgtacaatttgatagtatcacatcggtacgtctagagtatgactagcgtaccgagtataggctgatacagtatcacatcggtacgactggagtatgactagcgtaccgagtataggttcatgctttggtcaatagtaccgtcgtacgaacgttctagactcagtaccgtgtgggacacggggattagggttatggtcaggggtatgggcgtttgatcataaaccgggatatatgtattttatatgatttatgcttttcttactgagtctgtcgactcacaatgctatgtttatgtgtaggtaagggcaaggctaaagttgaggaactgtgaggacgagcaaatgaagattgtacatgttgaggcggtttggcctggatcgtacgatcctcgggacatcagggct

SEQ ID NO: 279677 - DNA, 509 bp, Cannabis indica
acactcacttctcagatctcgcacaaaatcatagacagttaattggtcatcaggtaattaaaagtagttaagcacgaatgaaataaaatacatagatactgggggaaaaataaatcatattaataccataaagtaatatcaaacaatatccatctaaccctaataaagtgtttagctacacatgttcatggaagaaaaatcacacatattaactttaagaaagagaagaagatagagaataaaataatgctgaaaaccctctacagaatgcctccaatattgacttctgtctctgaaatttgtactcctttcttccctctaaattgcttgacttaaatcaactccagtccaccctttatataggctttcaaggactaaaaagatataaaaatgcacatgttaaatgcctattccaattaggaaaccaccaaacccacgtgagagaaaaatgatgatttttgggcagtttagggggcaggccgcggcccgtgttggagtttcaccagatg

SEQ ID NO: 279678 - DNA, 220 bp, Cannabis indica
tccggggggatcaactggagccaatactcctgctgcacccctagtactccttacagcaaagctccagccgcctgacctgggttgagatggggcaaccggtttttgatccattcgtagaggtgtcccaatcggatcaagttttcaatctcgtccttgagatttttgcattcgttggtgttgtgcccaatgtcattgtggtactcgcatctcttattgggat

SEQ ID NO: 279679 - DNA, 889 bp, Cannabis indica
agtacaagtgagtatcaaacatagtattgtattaaataatactaatataatacaatataattcaacacaatataatacaatacaatacatcacaatatatcaaaagaaccctcagtggatattaatgctatattcatagatacgtgaaatttcaaagctacaaaatcggaacacacacaacacgtacgtgcacaatcaaacaagccaaaaacgtattacgtaagcacaatccttaaaaataataattcaaaaaaatatttcatatttaagagcatctccaatagtaatatatactctttaacagtatcaaaaatttatatattacctaaaaaatataataggtaattttatctttattttacattattattttttatactttttattttagaatgttctcataataagtacctcttataattattaaataaaattatattatactttaatatatttatatatattaaataattaattttaaaaaaataataagaaaaaaaagaaaagaagatagcaagaatgccatttttaagcattttacttagtattttctaattaacaatgataaacatcgattaaaaaaaagtcaaaaatatatctttataatttatattctttaaagtatcccccatcagagaggctaaagcacgtccacctgtctatgaaaattggtaccatttaataatggaatggctcatagtccaactttccaagtgtaccaataattacgaagcaagaaatggtacacacaattccagcaaaataaataaataaagggatattggcggctaaaccacctaaattttacggtttgtaacacttaaccaccaaaactgaatttttgacggctaaactacctaaactctggttccgttttgctctgcacacc

SEQ ID NO: 279680 - DNA, 1165 bp, Cannabis indica
agagcattgcacctctagagcaaatctgtctacccctcactgttggacaagcttcgaggagcacaactgtgatggcaaaatttttgataattcaggtcccatcagctttccatgtcatgttatgccaaccagctctattatgacttaaaagttgtcacatcagtttcccatttatgcgtcaagttgccaacaaaaattgggtagggtacctcagaaggaaccaaagaatagcacggaaatgctataaccttgccctaactaaggttaaaaaggaaagtacctccagccagagttcggggaaaggaaaagtatgcccaataggaggttgcccaaggcaaggacgaggacatggatccccggcttagggaatcaaacacaaatgtaaggccggtagaggaattcgaagatgtggaaatcgacccagatatcccgaccagaaaactaaaaattggtaagggtttgttgctcgaagtaaaatcagagttgataaaatttctgagagcaaacctagatgtttttgcctggtcacatgcggatatggtcggaatcgacccttctattatttcacacgtcctgaatatcgatcctaacatccggccagttcagcaaaaatgaagactgctggataaagaacgagcagtagccctgaaagatgaagttgaaaagctgcgcaacaacaacttcataattgaagctttttacccggcttgggtcgcgaatcccgtactcgtgcccaagccgaacaagaaatggcgagtctgtattgatttcacagacctcaacaaagcatgccctaaagactgttttccacttccaaggatcgatcagctcgtagacgcaacagccgggcacgaaattttaagcttcatggacgcttattcaggctacaatcaaatcaaaatgcatccgccagaccaagaacatacaagtttccgaacagatatgggtctctactgctacaaagtcatgccgtttggtctaaaaaatgctggagctacgtaccaaagattggtaaacaagatgtttaaagaccagatcgggcgaaatatggaagtgtacgtggatgacatgctcgtcaaatccagaaaggctggggggcacatagacgacctggacgaatgcttcaaagtccttagaaaatacaacatgaaactaaaccccttaa

SEQ ID NO: 279681 - DNA, 740 bp, Cannabis indica
ttccatttatatatatgaggcagtgaaacagaaaacagtacgtactagctattatattactgatctccgattttgtttgagtacgctatataaatacatgtttctttcgaaaatttacttgggagagatctgagaactgagaaggcacgggttcataaataaaattaattacgaaacagaaaaataacaatttggataactgaacgggcaatataattacttcctttcaccatcttcaataaaatattatgatcatgatcattttgccgactaaattaaaaagctagttttcctatgttagctatgggaagtggctaacctagttttcctataattgccgtgggaaatggaaacgacccaccattaaattatatatggatcattgattgtagtatgtatcatgatcaaaattattatatttgatcgaatattgatcatcaccgtattatgtctttagagcatctccaactgagttgcccattaaacacaatatgcaatttgctcttaattttaagaattttatataaagtgtgttgtttaatatagataatgatgacatgatttttttttttaatttttttattaggaaaaagttatttttgacctaacaattcattaatttaatttgatatgggactatatgatggacaatttttaaagttgttaactattggagtattttcttaagagaatatgataaatttaatgtagatgagagagaagataaaaaaaatatatat

SEQ ID NO: 279682 - DNA, 496 bp, Cannabis indica
cagataaaattggtgatgcaacgtatcgactcgcaacactcgatggaactgcgattccacgagcatggaatagcgagagcttgaaattttattatcaatagtattcgcattattcgattatgtccattcttgtacttatacttagaacgaaaatgcagtgatttgaaaactaacctttagttctgatttctgcgattgctttcgatcacttctgagattgagaatgttgtggaaaaatggtaggaaatctggggatggattttcgaagtgtatgtaatggagggaaagaagaagttaagagtgagagggaaaaatgggaattttgattcgtatcaaagtatttaaatacccatatcccttattaattgggattgtgacacgtggcagccagaatgcctaaggtcgcccaatctaacggccaacgatggccacgcctacacgaaaaccgaagggttttgtgacgtggcaccataaaggtaataattactaataatta

SEQ ID NO: 279683 - DNA, 554 bp, Cannabis indica
atgttcaaaagggggagttaaagttgcgagtgaagatgaagaggtcagttttaatgtttttgccccaaccgacattcctacctgttgcaagattgagatggtgaagggttcttttgttaaagctgataagaagaaagcaaagcctaaagagcgacttcgaacgattcggcggcgttggaaaagattgatgtgtggtaattctgaaagtgaacttactcttgtgcaaaactctgaaattagcaacattggaggtcaattttcttcatttggtacaaggaccctattggatgcaagaggtggacttgatccaatttgaagcagtgttgaggtcaaaccctttctgagagggtctcaggtaagtctcttctctctgcatttcattttatacattggggacaatgtcatctttagtttggggggagagatttaaaaattttattttctgcattttaattttctgttttagtttttttgttttagttaaggaatggcaataagttagaagatagttgtatactgctgattagtgtaatgtgatctgaaattgtaaaata

SEQ ID NO: 279684 - DNA, 687 bp, Cannabis indica
ggttataattttttttttttaaaaaaaatgtggggatcaaatgtctcggatataataaaaatagaaccggttctataacataatgaataaaaataaataacacacaataactcaaaccggttataattaaaatataaccggttctgtaacacaatgaataaaaacaaaaaacacaaaataactcaaaccagttataattaaaatagaaccggttctataatagtgttataatgaataaaaatcaataacacgaaataactcaaaaccgattataactacaatagaaccggttataaaatataatgaatataaacaagtaacacacaataatttaaaccgattacaattaaaaaataaaggggaaattagttcctaaaacactgaaacataaattaaaaacaaaactagttctacaataaaaaacctcttaacacataatacctcataaaaccgattataatgttttttaaaaggtgaggatcaatttgaaaaaatactgaggcataaatatgaaaagaaccaactccataacaaaataaataacacaaataataacacacaataactaaaaatataactggttatatgaataaaaactaataactcaaaccggttataattgaaatataaccggttctgtaacataataaatacatataaataacataaaataactcaaaccagtta

SEQ ID NO: 279685 - DNA, 497 bp, Cannabis indica
gttcccaaagcaagccctaactcattccgaagagaacatggtgactggatgtttctccaaggctaccgaccaacaagggtcacctcaactgctaagctgacctcctacacgggccctgtaactcgatcgaaagctcgtgccatgcaggaatcagtgaatccctcttttcaaaaagttcaggaagaagggtgtacatctgaacactctttagaagacactccccttattgaacacagtgagggggtgtctgctgatctcattactcagttcgaagcactaaccattggcaatgataaaaatatgccggtgttagtaactgggacaatcagtaatgaagagaagattcaggaactgcaaaggttattggctgagagggacgaagaagtagcccgactctcaacagaattatctcatcaagttaatatgagacaaaaggagagtgagattgggcaacaatcctcgtcctcagtgccgcctgtaggcaacacacaaccgcc

SEQ ID NO: 279686 - DNA, 555 bp, Cannabis indica
tagcatgcatttactctcagtcttatggtagtggaagattcatacccacaccacctaccccgagcctagcaggctctcaattattcttactagatcacctcaagtacaccttctagtatactcccgaccattccttgctcatagttagaatctttctaactagaactaatgctaataagcattaccacacatgcataaatatactcagcaactttatatctaaacttatcatgcttctctaacaacttacacatttcaaataagcagacaattcaaataatcagtaaataattcactaatcagctaataattagcacttactaaaccatgaatcgaacgagtcttcgcagccaaagtacatatcaaaccagtcttcaggatctttaaaccttggtcgctctgataccatgttgtaacgccctgacccttagggacgccacgtgtgtgcttttataaacttattatcactaatctataaattttggaaaagtgtggtttaatttaaatctttaattaaattcaaaataaagactttcattttaaatactgtcgtaa

SEQ ID NO: 279687 - DNA, 712 bp, Cannabis indica
ttatataatatagaaaccatacacctaaccattatatttttttcattaaaatttaaaaataaactcaataattaaacccaaaaaatatctatctcttctttactatcaactaaatcatagcatagataacttatggtttattgtttcacatctcattccattggcagtgaacaattctccattgagtgtgtgtgatatatatcaggtatatatctcctctatttattagaattatatttattcaaatgttttgtttataatagtattatatatcctcaatatataacaaagaaaaggaaattaagaaattatatttgtcaattaatttgataagcaactttcaggtagaactgagccaaaagattttccaattacattggcacaaaaggattgagctaatttgtttccaaaagtttgaattattacgactaatcaccaacaatctgaaattagaggtatgttctatttgaattaatttattcattgggcttatatatttgtgtatttgtgtatttatgcgatttttttttttgtatgatttactcttttaaaattaaaatatgtttattataaatttaaatttaaatataaaataataaatttttaaactaaaaaacataaagctacagactaatttcattaacaatcatcaatataaaatttaaaattctaatattaaaaaatacctttttttttacttagaaacataaag

SEQ ID NO: 279688 - DNA, 642 bp, Cannabis indica
ttccctcatcatgacccattggtcatagagacccccatcgctaataaagtggtggccagagtcttaattgacaatggaagttccgtgaacctactcttcaaggaggccttcaccgcaataggcttgacggaccgagacctctcgcccagtgggtcccaactcacagggtttaatgggacgacacttatcccaatgggaaaagtaaggctcccagtcaccttgtgcccggacaccccccagagcacatttaaatactgcactttcgtggtggtggactgtccaactgcttacaacgcgatcctcggccgaccggccttggtagattttggcgcagtcacatccattcggcacctgtgcctgaagttccctacccaggaagctgggatcgggacggtgagaggaaaccagggggaagcaaggcaatgttacaatgtcgcaacccacctgcccgtactgatggtccgggaatccattgagccagaagtggctgaagaagatgagttagacccccgtgtggggtccgaaagaattgtggaaccaatggaggatgtcgaggaattatcagtgtgcgacctcgactccaccaaagtactccggctgggaaagaacctagatccggaggaaaaagagaaaataataaaa

SEQ ID NO: 279689 - DNA, 747 bp, Cannabis indica
aggaatatttttttagtgtaatttttggtgttgtggttggagtagaaataatttttgacaccaaatttggtgatagtgtaacactaaattttgtgtctccttggagatgctcttaaatcataaatatgcacacgtgaaaggttcagatgcattacatttatttttattttattttaaaacttaatatttttaatatcagaaactaaatgctaactttttcaaaaaaaaaaaaaaaattgttctcattaacaattttcacatgatattggcacttcaattcgataatcatgttccatatattacactggttcactcagctatggtaatttagtattgcatcgctcttatttacttatttttttttaaaaaaacaagtaatatttagttttttatattaagaatattaaattttaaaattaaataaataaatgtaatgtatttgggtcctccacgtgtccatatttatgagttaataacagaattagtagtaacagtgtaagaaaattgtaacattaaatatacattaggtatttatatcgcaatttaaccatattaaattataaaaacttttttaactagttgtaattttggaacttttttaactagttgtaattttggggtagttgccaatatttatgaatcaaatctcctaagttcgtgccgatttagtggtgtgtcaaatgaacccgtatttacaattatgtaaatgttgagacactgatgggagtactactgtaactcaaattt

SEQ ID NO: 279690 - DNA, 556 bp, Cannabis indica
ttcaacccaggtaaaccgagagtagtcatccaccaagaccattacatatcttttcccactgatactttcattctgcattggccccattaagtcaacatgcattagttccaacacacgagaggtgagaagtctattaattgtgggatgagatgccttgtgctgttttccaagctgacatggaccacatactctctccttggaaactttcatgttaggaattcccccttacagcttgaagcttcaccaatctttggagatcattgtagttcaaatgtcccagcctgtagtgccataagtcaggtttgtccaagaaggtcctgttgcacactatggtattgcatacagcatagcactggtctacaattctgtttcctattaagacagcacacctatcagatgaaactaaacattgagttttagtgaaacttacagagagattgtcgtcacacaattggtcgatgatgatgagatttgctttgagtcctctcacatataggacattagtcagctaagctgctccattcacattcacatcacctctcccagcaatctgccc

SEQ ID NO: 279691 - DNA, 620 bp, Cannabis indica
ttcataatttaaattttattatacttttaatcttaattttaaattattacacttaatttatttaatttttttatttaaatatttaaaaagtaaaaagtgaaataagttgaaaaattttttagaaaaaaagttgctacacttgttatcgattgactagtttgaggcctcatacttagttcatctaattgtaacaaaattattaaatatcatttaaaaataattaattatttaaaaatttattataaaaagagaattttaatttgtgtagaaagaagtttaatttttataaaaaaaataaattttattgtaaatattataattaaatgacttaattaaaataattagagtaaggatttaaatataaataaaaaaaattatttattaatattaattgctaaaagaggttttgttcaagatttaattaattataattaattaattctaaaaaaggatgtttacctattagtaagctgctattacacgtcaaaaaaaaatataatcttacaataaaaatataaccattgaatagtcacctattaaatatattatattttaaaaaccaaaataaagaaaaaaaaaactaaaaaccttctactctatatatattataggaaaattct

SEQ ID NO: 279692 - DNA, 663 bp, Cannabis indica
tagttgcaaaaatatcaaggttattttattttctgtcttttcaataaaaaaaatataaaaaaaacaataaaaaaaacaaaattgtgaccgagtctgtcaattgagctttcttaaaaattcttgttatgtttcattatattcttagacactatttttttgctcttaagtgttgattagtgctttatgtatctctttgtgttctcttgttcattatttacaaattattttggggggcattttttgaaaaaattaaagaaaaaggggggcatattttttcgatatttttttcgattcttggttaatatttttcttttactttttcatttatggaaacatgtgttaattgctttctatctagtgtgtttcctttatttttggagatttggtcttattcttgtagtgctttaggaaacttgttcttaattatttaattatttttttggtttcctttttgatggcattttcggttttggtagggtgtttaatttttagattttgtggggatatgttatttcctttttccatttaaggaaactttgaccaatttttgaaaaatctttttggtttcctttttttctccccacacgtggtgtctaaggtaaggaagttattttccttttccattttttttttctgattttgggtaagtaaaatcaaagtgta

SEQ ID NO: 279693 - DNA, 645 bp, Cannabis indica
atgttctggacttaacagattttgtacacatattaaaccacaaacatgtaaacataaatgacttctaatcttttattgataacaaatcagattagattgtaatgggttttatttagggcataaaatcccaacacttattgcattgagttgtaatccctctcttcatctcttcatctctattctctattttatgtgtatattttgtttagtgttgtaacattatataatctgtgattttgtcctttgtattatttgtcattgagttgtaatcttgttggtttgatatttctattggagcacaacaatttccaacagtcaaaagttccatactttcctaccttgcttgaatggaatgtaagaaattaacatgtgataatacaagagtaagaattgtgatattttgtgatttactatttttttagggtgtgtttggaaagccacaatgtaattgaatttgtgagtaattggaggtaattacacaatttggcatgtttgtctgaccatgtaattacactataactgtgtaattggaagtaattgaggggtttcagttacactctccaattctcatggccccccatgagaattgaatgtaattagactgtgtaattactaaaaactttccatattaaacattagctatta

SEQ ID NO: 279694 - DNA, 683 bp, Cannabis indica
gatagatggacacttgcaagtcattattggaggcccacacattattggagatacgggcaaagctcgagagagatatgcccgaacagctcagtacgagcaagaagaagtcatcctggccgtggaagagaggaagcccaaagttccacgagcaggagagccaaccataactttcaacgatgaagatgctgtccagatcagattcccgcacaacgacccgctggtcgtggaagtccagatagcaaacaaaatggtggctagaaccatgatcgataatggagcttcttcaaacattttgttcaagactgcttacgagaagatggggctccagctcaaggatctgactccatgcctccagcctgtctatggtttctccggtcaaggagttgcacctctaggacaaatccggctactcgtcacagttggacaagctccgaccagcctttaacgtaatgcttggccgaccagccttgtatgacttaaaagctgtcacatcaatatttcactcgttcctgaagttcccaaccaaaaatggggtagggtgtcttatagggaatcaacaatctgctcgggaatgttacaaccttgtagtggccaagactaagaaggaaatatcctccaggcagagcccagacaagggaaaaaacatttccaagtaggaaacttcccaaggcgaggatgaagat

SEQ ID NO: 279695 - DNA, 656 bp, Cannabis indica
cccaacaattatctgtagcatcccgtaatcagaaaacttctaacctttattgtaaatttaggatcagcaaaatttgcatttctcatatttagcataaaacttatgcttctagagacgttacaacatcatccaaaggaatcacaatacccttactgaagacaattgtgaagtcatcggtacgaaaactgttttaagaatatcctcctttcgagtcttcaactggtaataaccagatcgaagaccaaacctagagaagatgatccttccctaaaattatttaatgtaacatctgtccttatcaaaggatacttaatcttcacaaataaaactggtgtactccagaatgaaatacttaaactggtaatttcaagcccaacctttcctacaactgaatcttcactcctttcaattctacagttaccatccaattcagaattttggatacaggttttactcccattaccacttcaattcagaatcaatttctcgcttaaccaataaccctagtggctcctctaaaagcatctagaaacattgagccacaagattgtgtcccaatctcactaatgttccctttataatattggccacactaactgaaaagttgatacatccctcccataataaccccttcagccttaaacaccgggaataat

SEQ ID NO: 279696 - DNA, 385 bp, Cannabis indica
gggttgacttctttcaatttttatacgacaaccctatccgtctgacgacatctgactcctaaagttgatacgagcttgacatagcttttgccgcagtattgtcctttatcattaacctcgagggccaatcttttgccttgatccatgagcttggatatttcattcatttgcgtaggccctcgtgtaggtattactgttgcacactctacctctgggactgaatcagatcctaaacccgagttggccatatctaacaccattaacaaactaaaatttaaagttatatatatataacaagtaatctatacgaaatattaaatgcataaacaaattgttaaatattcagcataaacaaacacaatataaagtaagctatatatcaagt

SEQ ID NO: 279697 - DNA, 856 bp, Cannabis indica
ttaccgtagtaacttacatcagagctatttgatgtaatatgatcttttagcttaacatgaaataaaacaaattgccgaaatagaaattgtactttaaatggtagtcacctaacctgagtacttttttccttttgtcgaaacctttgagcgtagtccgcccagcaggccattcacttaagagtaaatgtttattcagtacttagtgtggtcgtccgaccatggtactttattggtagtattttcttaaatgttccccattccaataccatggtactagaatgagttgcattttttcatcatacttacctaatttgtatgctctgaattcgagaacttcgaccacttgatatggtccctcccagttaggtccaagtacacctgccgtactgtctctagtgtttaagaatacgcttcttaggaccatatctcccacaaagaatttccgagccttcacttgtttgttgaaatatcgagctactttttgttgatgggccatcaatttcaagtttgaagtggctcgtctctcttcgatttcatcaagtgattcggccaggagtacgtgattggtatcttggttgtacatcaatcttctgtgggatggtggctcgagttctataggcagcatagcttcatatccatacgccatagcaaatggtgtctgtccggttgcccttttctcagttgtctgatatgaccatagaactttaggaagctcttttggccaatttcctttggcatcttcgagttttttctttagtgtatccttcaaggtcttgttgactgcttcaacttgaccattcggttgaggatgtgccactgcagagaaacttttgatgataccatggttcgcacaaaa

SEQ ID NO: 279698 - DNA, 560 bp, Cannabis indica
ttttgttgcttggaatatgtttattggggcataatatgcaggtctggaaagtttggttgagtttggaaacgatttggttaggagtttgaattttgttggttttctgggtaaaaccggttacccgaattttgcagcagagggggaaaaccgatttttcagcttatcgtttcgtgtcagtttcaggtttctaatgtgttgttttccctcctagtttggcatattattttatcaagttgtaatagatagggttttggttttaaaccttagtcctagttgtgatttagcgagtcacttatgtgtgttgatattgatgttatttaggagcctataatttgtcaagcagttgttccactcaggttgaccgacacacctgaattgagaattgaggtaagattagtataatatcatgcatatgttattacatgcttagcgtacatgtgttattgcctgtttgattacattgatagcagtaatagtatacatagagtcgtgctgattactgataaatgtatgttggctgaaatactgatcgatgttgtcacatcaatatggctagagta

SEQ ID NO: 279699 - DNA, 519 bp, Cannabis indica
ctctgaaatcgtactctttttttcctctaaatggcttgcctcaaatcaactccagttaaccctttatataggctttcagggactaaaaagatataaaaacgcacatgttaaatgcctattcgaattaggaaatcaccacaactcacgtgagagaaaaagacaatttttgggcagtttaggggggcgggctgcggccccacaagggctgggccgcgactcgtgttggagtttcaccggatggcttcgttttgacggtgatttttttgctgcatccactcattgtattttggccataactctctcgatattgttcagaatcggacgattctagatgttttggaaatagaaaagagagatctataacttttatgttttgactttttccaaaatctaatcaaaagatagtcgaattcaggcttgaagtttcagctttattttcttacacaattttctctattttatatatcatctttttgtaagattttttttttatctttttttccatcttattcttttgat

SEQ ID NO: 279700 - DNA, 650 bp, Cannabis indica
acaactaataaattataaaaacccttttaattcgtaccataggtagtaaatagcattacaaaaatatattttactgttttagcatcacttaactatttttcataattattttaagtattaactaaataaattcatgaaaaatacaaaaatgattgaaaacccaatctaaccattctaacacagtttatactctatactaagccctaaataattaacttttaattttctgaataatctaggtatttttcataattaactttagaaataacacaaataattcatgaaaaatacaaaatcgaccgaaaacctaatctatcaattttgtaacagtttataatccataaccaatcatagaaaataaacttagatttttctgagcaacctaagtatttttcataattaatttaataaataacacaaataattcgtgaaaattacaaaattaactgaaattcgaatctaccaattttgcaatagtttatatcttataactaatcatataaaataaatttagatttttctgagtaatctaagtatttttcataattaatttaacacataaaccaaataattcataataaatcaaataattgcaagaaaattatgaaactttaccaaacaccctagaataatatgtagaatcgaaatct

SEQ ID NO: 279701 - DNA, 416 bp, Cannabis indica
gacattgctcgtcaacttggagtaccatacaccaaaaaaatatcacttgattgtgtaacgaggtggaattcaacttttctgatgcttagcacagctttatcgtacaagacagtatttgaacgtgcaaggctgcgggagttgcgtttgaggtgtgccccttcggaaattgattggcaaaatgctcaacaattgtgtgataagttagagttgtttcatgaagtaacagaattaatttctggaacaaagtaccctaccgccaatattttttttccaaaaatatgtgaaattaagacaaacattgaatcatggatgttatcagaggtgccttttattaaggacatggcaactcaaatgatgtccaagttccagaaatattggcgagagattcacgggcttatgtgtgtggcggttgtttt

SEQ ID NO: 279702 - DNA, 670 bp, Cannabis indica
atatagcaaatgacctttattattttttagtacctaaaatacccttagttatataagggtattattaacattatattcattctccaaatagaaacagaagctctgttccaaaatctaaatgacaaaccctccctctcattattttttccgtttagtttggatttctttatattttttggtaaattatcctgattaatttctcctaaaaggcgatgaaatatttttctctcatccatttattcgattcattcgttggatccaatcattttctcctaattcctcacaatcaaaaacgacgaagctctgctcattttcttcttcttctggttttctcacatctccaaattacaatgattacccccaaacaacgaccaaagtctcagtcaaatttttctgtcggtggtatatacattttttttttttgaaaataaagtgatagattgatcggaaaactagacctcacggtcattacaaatgatagtctttggtatcgttggtatatacattttgtattatggtatatatatattttctatactatggtataccatttagaaaataaaataaaaaaacttggattgtatattaattttgttgtatagcatacatatatttttaattaaagaatatcaatctttagttttttctttctttctttatttcattcgtc

SEQ ID NO: 279703 - DNA, 883 bp, Cannabis indica
cagcctatactccgtacactggtcataccccagccgttagtcatactctagccttaccgatgtgatactgtcgaatggtacgaagccaacatacgtatctaatgtaatctagtaggcttcctaacattcacgctaaacatgtaaatacatatgcatactgttatactaatcttacctcgattctgaattcaggtgtgctggtcaatctgagtggaacgaactgctcggccaattacaggctcctaaaccataataatcacaacactgataagtgacacgctaaatcacttcctggggacttaaactagaaactaaaagtttccttatcgataaaaagcatggaataccctaaacaacacaaaaatgggaagaactagggttcccaatttttccccaaccggtagaccggttctacaaccagaattccagttctgggaggaacccagaatcaccaaccgaaattccgggtcctacagaccatactgaacctttcagtgcatgaaactttcaaaaattcatatctcatgcaattcaatcccaaaccatatcaaaccttccagacctgttctaaataccccaaagaacattctccaagcatcaaaacaaccccgtaagcacagatacaaaaaatgccattaaagctccaagctttgagttcaaaactcaagcttggttaaaccccactaacatgcatccaaacctgattgaatctactcaaatatacataaacaagcctctgaaaacaatagcaaacaaataccacaagcacagcaagctatttcaacaattcaccattaaaatcaagatttagctcaaaactccatacttgcttaaaattaactaatcaagcatcaaaacctgctctaatctactcaattaaaca

SEQ ID NO: 279704 - DNA, 594 bp, Cannabis indica
tcctctatgatgcgcgatttggtccctacgatccaatggcctcgataaaccgatatagactcgcgtgtctaggttctatcagctcgacatgcgatgtctacaagaggcaattacctaagggcgcagacgttccaaacgtactgatgaccctgcgagctcaacaacggaacatgaacggtcaactcgcagatgcggaagacgcatacgttgatggacttagtaactgtcgttcatttattaatgttaacgttgcttgggtttaattattgcaattcaatatgtaaataatggattaacaatgaatgtgatccttgtgtaaccgattggacacctgctttgtatataaagaggtgatccaccatgaaatggcacctacgaatcctttgctacagtggactaagcagatcataatctgactgaaccactataattctctgtcttactgttattttccagttttgttgattgttttcccattcccagtcgagtactcgccattctaggttgaatactcgcacttgtcattacccataaaattctctttcgtattaataaaaataatataatttggtgttgcgaaattcactcgacaac

SEQ ID NO: 279705 - DNA, 475 bp, Cannabis indica
aacttggatgagtttttgagattacacattgagttagcaaactcgggggaaaatgaggccttaagtgatgagaatcaagcaattataattctcaattcactaccggaatcctacagggaggttaagacagccattaagtatgggagaactgagatcactcttgaagaagtaatctcagctttgaaatcaaaagatttggaaatgaaggttgaaagaccggggcatactaatggggatgttaacctaagtaggggaaggcctggacaaaagaaaccatggcataataagggtagaagcactagtagaggttcaagcactaataggggttcacacaagggcagcaatcatcatcacaaagggaggtcaaattcaaagggtcctaaagatccaaatgggtgctaccattgtggaaagttaggacatttcaagagagaatgctacttttacaagaaaagcaatgggaaacaaaattcag

SEQ ID NO: 279706 - DNA, 463 bp, Cannabis indica
ctcgctaaacaaggttggcatctactttgcaatccagatactcttgttggaaaagtctataaagctagatactttccccactctgatttcttgtcagcagaactaggaagtaacccaagctttgtctggagaggtatttggactacccaatctctactccgttcgggtgtcagaaaaataatcggatcaggggacacagtaagcatactaaaccacccgtggctacctgtacaagataacccatatgtttcaacaatacaccctggtttaatgaaccatgttagctccctttttcatgtgcatagccactcttgggactatgaccttgtacgagatatgttcaataatcgagatgctgatattattttgggcatcccactaagctcaaatgtctccattgatacatggtcttgtgagggggaaagaacgggcgagttctcggtcaaaagtgcttataacatgc

SEQ ID NO: 279707 - DNA, 715 bp, Cannabis indica
cttgcacctccaccggtagacgtacatctgcaagtcattattggaggcccgcacatagctggagattcatgcaaagctcgggagaggtatgcccgaacggcgtagcacgagcaagaggaagttatcctggccgtagaagaaaggaagcccgaaattccacgagcaggatggcctaccataaccttgaacgacgaagatgctgtcaaaatcaaatttccacacaatgacccgttagtcgtggaggtccagatagccaacaaaatggtggccagaaccatgattgataatggagcctcttccaatatattgttcgaaactgcttatgaaaagatgggactccagctcaaggacttagccccatgtctccagcctgtctacagtttctccagccaaggagtcgcacttttaggacaaattcgtctacccctcactgttggacaagctctaatgagcatgactatcatggcacaattcctggtataagatgttccttcaggctttaacgtgatgttaggccgaccagcattgtatgacttaaaggctgtcacatcgatattccattcgtgcctaaagtttccaacaaagaatggggtagggtgtctgagaggaaaccaacagactgctcgggaatgttataaccttgcagtggccaaggctaagaaggaagtatcctctagccagagcacagacacgggaaaagacatttccaagtagg

SEQ ID NO: 279708 - DNA, 521 bp, Cannabis indica
atcatttcaaaaaaaaatttgctaacttaccttttaaacttcatgttatttaaaaattaaatattcaataaaataaaaaatgataaatacatacccttttctaattttaaaatttaatttaagtaaaaataataaaatttaaaagttaacaaaaaaatctcttatttccctttttaaagtaccatgattatagtaatcttattctaaataaggtcaaaataaattaaaatagaatattttataaaaaagaatttaatatctcgccttagatttaaaaataagataaaataatcaaattttaaagaaaatagaaaaagaggtaagcaaaactattttaacccattttcaaattcaaattacagtaatatctaaaattaattttgaaaaattaaattaatttatttacgataattagatttgaaatatgaaaaagaaaatcaaaatacaaaactacacaaaaaatcggaagttaatttcatgaaatagcatgaaaaatataagaaaacgaaaaaaataggcag

SEQ ID NO: 279709 - DNA, 649 bp, Cannabis indica
gtttccacaaatgaaaaaataaaagaaaaaatatctacaaagaatcgaaaaatatgccccccatttttcctttaatttttttcaaaaaatgcccccaaaaaaaaaatttgcaaataatgaacaagagaacacaaagaaacacataaagcactaatcaccacttaagagcaaaaaatagtgtctaagaatataatgaaacataacaagaatttttaagaaagctcaattgacaaactcggtcacaaatttttatttttttttttgattaaaagacagaaaaataaaataaccttgatatttttgtaactagaattcacaatgtccgcttgtctttgtccctgatgaaaaaatcaaactcataagaatagtcagaaattattttatcaagctaatgaagtaatagaatgaggtcataccggttacacaggaaaaattgactcagtcaccaagaatattaaagcaaatcaaacagtatgtaacagctttataacaccattttcgagaatgaaaattttttaccacaaactgtgtcaagcataagtgtgtgaaagtgtaagcagggaacattgcccaatttgtcaaaaagactttttctgataaattgtaaccataggagacgctgtcacactacctcaatggtagccctttt

SEQ ID NO: 279710 - DNA, 786 bp, Cannabis indica
gtatttagagactctgtagaagtatcagggtacacttgaggctgtctagtgaggactggtctagagcctgagagaacaggagagtcatcttcgatccacacatcttcatgtccttctaaatcatcaaatttcacattcattgattcaactacagtgagagtccgtttgttgaatactctgtaagcccgactgttggtggagtaccccaaaaatgttccttcatcactcctgggatcaaacttggtcaagtgatcccgatcgttcaggacataacacgtacatccaaagatatgcatgtggctcacgttaggaggtcttcctttccatagctcataggcagtttgagaggtaccagtgcgaagatgaactctattgcacacgtaacaggcagtattgacagcttcagcccaaaatcgttttgaaatatccttggcctgcatcatgacccgagccatttcctgtagtgttctgttttttcgttcaacaactccattctgctgaggagtttttggggctgagaactcgtggtgaattcccatgccattacagaactctgagaatatggaattttcgaactcttttccatggtcacttcttagtcgaaaaacttttccaactttggagtctttctcagtttgcaatctcagtatcaaggcagagaatgatccaaatgtgtcagacttgtctctaagaaattcaacccaggtaaaccgagagtagtcatccaccaagaccattacatatcttttcccactgatactttcattctgcattggccccattaag

SEQ ID NO: 279711 - DNA, 1464 bp, Cannabis indica
atccacattatcaaataaatgtatatgtataccagggtcaatgaaaaactaccattttttcaattttttttctactaagtgatcatcatggagtgatgccagattttttacaagtgttaaaattaaacaaaatcaaaccaaaaagagtaagtatacgtaatatccctgcctaatcttcttgccattttcccaatcttaatactaaacatttgaattttcaagaatcgaatggactaacttgtcctagtctagtcagtcaataatatcgtagctaaattttttttgttttttttaatcaaaatatcgtagttaactttacttgggtactcctaaaaacgacagaaatcaaactttacaactgcaataatctatacagcaaaaaacgacaatgttcttattcaaacgacaccaattttataaagaccctattcaacatttgaaaagtgcaggtggactcgactggagtatggtaaacgccccaaagtcaataatttttaatcatgttaaacgacatcaaacatgaatttatatcgacaattgcatattaacaagaaaagtggaagttcattaatgggaaaatatcaatatattatataatgataaaaagagtagcaagtcagattgtagttgaacgaagaaatataaaagtggaaaatttgtatatagttaacttatacagtgtataggtttgggaagagaatcaaagaaaaatcaacacatattgaacgttatcttttcatttcttctttctcactttttggaatcacgcatatatacacataatgaagtcctcatttattgatgatatatataatgaaaaaaaaaaaaaaagaaataattcaacaattgagtctcaatgagatgcagccgtgaggcccggaacacgttgaaaatttgagtagtactgtttaggaatcaagatatgattatcataattaacaactccaattcaataagcatcatttcctacaagaaatgtcacttttaccagtatatttttgtgctggcaaaagttgctattgcgctggtaaaatataatttacttgtgatgtgctggcaaaaaggagttggcaaatcaatgttggtattagaacttttgccaacataaaatgaaaagcgctggcaaaaatgatttttcccagcgcgtaaatgtgctagtaaaagttagattttagccactgcaaatgtacaatagtaaaactttgacctctttgccaatgcagtttgcgaaaatgtgctggtaaaagttaacacagtagcgaactgtgatagtaaaagtgacaattcttgtagtgatattcttatctgtgggaaaaatataagtaagttttttgtttttaaattttaaaataatttttttatatttttatacaattacacgcaaaaatttctataacaactaacgaaggcaacctaaattgtaactaaaatctatataacaactcacgcaaaaaccacgaagaa

SEQ ID NO: 279712 - DNA, 571 bp, Cannabis indica
caacttttactgaattagtgtagttgttggtcaaaaatagtaatctttctgctgtactgtaagagtacgaattttaatattagggccttgacccatgtcttattataggtagtagtgacgagataacaagtcttaagcagcgggatttgaggtaaggaaattaagtagttttatgtgttgaactgcataatttaaattatttgtctattgaaatattatttgtgatgtattattatgaatgtgtatatagtactgagaatgtgtggtatggacacaatatgagtttgtgaatcgatatatattatggttggtacgatttgtatgttgtatgttgtatgatgtatgtggtgtgttgtatgttgtatgttgtatgttgtatgctaacgtctcaggtacaaatgaggggccatggtggggtatgatacggggtaaggccgttgaatgtagagataccctactatataggcccaagttattatatgggcagattaggcccaagatattgtggggtcaggctaggcccagattatgtaagtaataactatgatatgctaatgttatggtaaagaca

SEQ ID NO: 279713 - DNA, 520 bp, Cannabis indica
attattattattattatcataatttaataaattaagactttaaaaaattatataacatggatgtatgaatggattactattaatttaccaggagtgtcaatgacattgatgagttggccatctgtgcgtagagtgtggtgcaattcacaagtggctgtaacaccagaggaacttgttttcgagttgaaggcctttctaccaagaatggtattgcctgtggcacttttgccattgcctgttttccccactaatacaatagtaagagccttattttcattgcatatggaggcattttctcgatcactatattcacaagcatatccacccatcctacacaatcagattatatatagagagaaatttatgaacagaggtaaagatatatgatacttgccaaagcaagtaagagaggagaggagaagtcagagtgggagagagatgatatttcagtttgcattttataatatatatacagtagaatctctatttaagaatactctattcaagaataatttctaat

SEQ ID NO: 279714 - DNA, 564 bp, Cannabis indica
tttttttttgtatgaattgatgacattttttagtagaatgggtagtttctcccatttatatatgttgggcatttatatatgttgggctgatattaatgggcccttcacctacatcttcttatgaattaaaccgtcgttgtacgttagaacagtaccgtagtacattaggttttctgggaaaacgggattgatgaataatgttgacatttgaccatactacgtacgcctacacgtgtatttaactgtgtaattcagaaatttaaccacccctcttttgacacatcagatgtgcccaatggagtacatcccagtagagtacagctaactaaaaaacgtactatagggttattctccacgacttatataacacacttgagacgttttccaatccagcctcaagtttatagagaaattaacttgtaatttagttattagcattacatatatcaagtatgagttcaggtccacactgggttattttcaatggaccaaatgaaggtatctatagtaggtacgaagacgctgtaagcaaaaacactaattctgatgcgtccataaaaataa

SEQ ID NO: 279715 - DNA, 715 bp, Cannabis indica
tttttttttttttttgataagtcgatcgtcttaaattaattggaaactagctgtagtgtgtaactgaattaataataaggttgagatgcaaaatggccctaaatttggtaactaagttagtaaatgtccactttttaaaaaaattaagaaaatggccaaatctaataaattagctaataaaaattataaaaatacatttatcacatatttttttaaaaaaatgtatataataataaaattaagttacataatttttttagtattgcatattattatattgtaacaaaaataaataaatatattagatcatttaaatatatacaacagtattagatatatcgtagtacagaaaattaatataccgtagtaataaaattatataccacaaagaaattataacaatgctaaattaatacttaaaaatataaatatatatatatcatgctaacaaaattatatataccaccatatatgaatacataccaaaaaattaatttatatataataaaatagaaactaaatatcatattaaataaataatatattatagacgacaaaaatcacataccatacaataaaacgtatatacctacaataaaaaataaaataaaataatataatattattaaaaaaattatatatatcatattaacaaaattatatatcactatactaaaataaaaactaaaaaatgcattatctaaaataaaatgat

SEQ ID NO: 279716 - DNA, 781 bp, Cannabis indica
aatggcaatattatttaatatttattttccagttattaaataatgacaattggcatttaaatggttaaattagaaaattggcatttttgagaaaatgggaaaggaaaataacaaaatgggaaagttgcaaagtgaggcccaattccctttgtatggccgaccactatgcacaagaaataccgtttgtagtttccattattttagtgccatacagttctaacctaaacctagcgggttttcaataaatagaaagtgttggcttcaggaaacatagacaaacaacttcgaacattggtttctttcggaaaagccactcgcccctctctctcttttcttctctctaaatttcgaagcacttgagtgaatgagtagtgcccacacacatcaagtggtacctcaataatagtatgtaagactatggaaaatctgcatcaaagaagggagaaaagaagatccagattcacatcttgattatgctctgctacagaaaggaatcaagggctagagatctgaatggtaggagtcataatattccgctgcacccactgtaaggttttctaaactttatatgtgtttattttcattgttttagaattcatattagggtattaatcaaacatacttgttagtaaatctagatcctggtgaaataatttccaacatttatctcattagaaaatcaaaccaagttagaccaccaatgaagattcgaaattaaactacaattaataacagaaataacatggtcaatataaattcatacacaagtcagaaattataa

SEQ ID NO: 279717 - DNA, 867 bp, Cannabis indica
ttctctatatttcgaattctatagtgttcttcacaaaataaaaaattcaaccattagtgattgagtgcatgcccacacataacaagttagtccttaatcataatatgtaagactgtgaagaattcaaacaataagaaggagaatcaggctcagatcttagtgatactctgctacagaaaggatacaagggttagaaatctgagcggaaggagtcatttaattccgctgcaaccactgtaggttctcataccttttatgtgtttattttcatcgttttagaaattcatatttaggatgttaaaaacatacttattagtaaatctaaatcctggtaaaagatattccaacacttttttatttttatactttaagggcgcgtttggaaagccatctaggaattggaattggatataattggaggtaattacacagtttgacgtgtttgtgtggccacgtaattacatagtaactgtgtaattagaggtaattgttaagctatttttagcctaagttttgggtcacattttatagttgtttttcttctttattattatttttggaatagaattatgcttgttttctttggtttcaggtttctacacttgggatgtataaattggataaattttggaaaacagtgatctataaaatagagaaatttttgaaagaaaataaagctgaaatttaagcctaaattcgactatgttttgatcgtattttggaaaaagtcaaaacataaaagttttagatatcttttttatctttctaatgcatcttgaatcagctcatttggagttcggatgagaaagttatgctcattttactaaaacagatcgaagtagaaaattccatctcgccgcggcgaga

SEQ ID NO: 279718 - DNA, 536 bp, Cannabis indica
agaaacacgtgcccgcggtctccatgagaacactaaatgaaggaatcatggctgagcttgccatactctggaaagacattgctcaggtctcccggagacgaaaaggtgatgactcagactctgagtgtgaagaccgggagccatgtgccaggcacatcctagaggcggagctccccaaaaattttaagatgcccaaaatggcagcttataccgggaactcggaacctagtgatcacctgtcacggttcaaccgagtaatgacactcatgagagtcagcaatgacggcaagtgtttatgcttcccactaacattaagcgggtctgcagaagaatggttcaagaggttggaaccaggatccgtggactgctggaataagctgcaaaccagcttctggagacaatttatcaccgcaagaaaagtcaatctggaggtcagcgccctgactaacatcaagcagctacctaccgaaacattgaagaatttcataaagaggtttaaggaagaagcctcaaagaccaagaaagttgatgacgga

SEQ ID NO: 279719 - DNA, 1227 bp, Cannabis indica
atgattatatttaatgtataaaattctattaactccaaaacatatatatttgttcatgatcatagtgtcgtcagcacagtggaatacaatcatgattatatgttcaaaagtttaattccctgatttttaagttcactggatttaaactggcttgataataagcgataaggtatacttacaccttggataagtgttatgtcctttccaagacattagcaaagtttacaagtatcggatgtatggagtatacattggaagggaccgatattgaactcggataagatatcacaaacttaccgttataactttctaagtcaatatcaatggttgatgttaggtctatagatcttaatcctgatatggttaggttcagcttagttgtattatttatgttctttgacttattcgtggaagctaaattttggttctggtggatacttacatcttgggaacatggtagttcaattgaatgggaatgctgatcatagatatggaatttataacttctacaggtatttagaagtgaaacgatgatttccttcgagcttggctgaatagagataaatgagggtccgggtatgggttcgagtctaggttcgtatctagatccatgtcaaggtctgatgagaacactaaggctaaagatacaagtaaagttccagttggccaggtgacaagggcgcaagccaagagattcaaagaagaactcaacaacttagtcgacagaattttaaaacaaggagaccgcagtcaacactgcaggagagcaaaaatttgtgtttctcatcaaagtggactcaatttagacccaagttgagcttatcacgttttccaaggcaattggcagctttccttttctaattttgtttcctttattttgtctttgttttatttggaaagttgtctttcttttagtttccttttttcttggttgaaagttggctatataaagccttgtaaacactttgaaaaataagaatattttggaataaaattttgagaggtttttcttcttgagttcttgagagaactattcgaacttatcaaggagtattccttgtggcgttcaaccttgctctgataccaaatgatacgaaccacaccaacagttgtgatgaaactcgacaccaaatatggcagactctaagaaatctcaaaatttggatgtggaaccgcgacccaatgcttagttaagcatgaaccttggtatgaaggaagacgccacaa

SEQ ID NO: 279720 - DNA, 527 bp, Cannabis indica
ggggtcaatttgttaattaagagactttatatggtctaattaataaattacataaataacaattttatttagtcattaattattattaaataaatagttttggcatttacaggattgaattagaaaatatagtattgttgaaaagagaataagtggttgaaataaagtggcaaaattgtaactagaaactggtccacttaagtgtacgaccatgaagtttattttgcccaatattttattcttttttaatccatataattcagccctaatctctaattgaaacgctataaaagaaacatgatactctcatctcatcctcttgcttgtcaacttaaataatgtcaatttaactattgccttcaacctagatgagagagttccttccttagtgatttcagcctccttcattattcttccatattcgaaccttgagtgaatgagtgtcatgcccacacatagcaagtcaagtactcaatcatagtgagtaagacagtggtaattgagcccgaatgagagaaagagatcca

SEQ ID NO: 279721 - DNA, 574 bp, Cannabis indica
gaaggaatgtgacaaggtggagaaggctccaattttagttaaaagttttttgaagaaagaaaatatcaatcaaaggttgaataatgtgaagacaagtgctcaagtgaagttcaatgagagtatgaattcaatgcatatatactcttattgatggtttgagttgtgagtttagagaatttgagttaaggtggagattgttagagtttgactccaattatttatttctttatttatttatcaatatatgtaaagttgcaatttttttgggtaattattaattgtgagaaaaagaaaagtcttggtgaccaagttttgatgagtcttcttaaggaagatttggaatgtcttggtccccaagttgtcttgatgcccaagttttgtaactttataaatatgtattttgtgtgagagagaggtatgtgtgtagagaaaaatagtgagttttgaaaagagaggtgtgtgtgagttcgctatatggtgagagtgagtaagaagcaaagggtgtattggaatttgagtggagagattgaaataagaagaatatgtaattttgaagtaataagtgaaatatatc

SEQ ID NO: 279722 - DNA, 500 bp, Cannabis indica
actcatccaaaccccgcctactacccaaaaaagcatcatcaatagctttatcatcaatggtttttacaccacaaaaacaaatctcaaccaactggtttgattcctgggaaaacaacaccttgttgcaatcacaaaaacaatcaatttcagtgatcaaataaaactcctcggcactaaaccgtatgcaacggccagcaaccttagcccaaaattctttaggatttggctggtacacttccctcaacaataggctatgtacaacttgggggtggaaaacatgctcaggtatatcaagaaaatgaccaaactgggtgtcacggaacatagacagtaaattgatagataaagttttcttaatattatcaataacagaaaaattgctagtgcaaacacatttggatctgtaataatcaaagggactaaatttgtaatctcagacctgcaagttaacaaacataccaacaataaatataaattgcaaataaacaagtatacaaact

SEQ ID NO: 279723 - DNA, 360 bp, Cannabis indica
aaaataatttccaacaaatccatcccaagtatgatgtcaaacttctttaattccagttctataaggtcagcactcaactccctatcctcaatcctaactggcatagacctaatgcgcctattggaaataaccgactccccgctaggcattaaggtcccaaaccctctttcaagaatatcacaaggcgtacccaaaagatcaattactctcgtagccacatatggacgtgtagctcccaaatcaaataatacagtatacaaggagttgttgacaggaagctgacctatcaccacagaaggactagctgcagcatcagcttgggtgatagcaaacacccgagcaggtataggctttgcctct

SEQ ID NO: 279724 - DNA, 623 bp, Cannabis indica
caacagattcaagacatttctttcaaaatcatatttttgagctaaaaattccaagcttgaaacaaggcaaataacatgcattactaacagcttaattaacttcaaattaacatgcttacatctcagaaattatcaacaataaaacacagcagcaacaacatagcaaaaatcaagcatgcattaaactattttcatcaaaattcaacaatttttaaaaagaaaagaagaaggctaacctagcttgaattgaaccttaaggagagatgaaatcacaagcaaaatttaaagaaaaaggctagctccttgctgctccaagagggccgaaagtgagaggaaagaaagagagagcttttccaaatttttttctatttttttctaagtgttgaaaatatgaagctttgaagagtaaaatgaaataaaagggattcttttcagccaacaaacaattaaaataaacacataaaattcatttactaagtcaactaaaggacaaaatatcattggggtaaaaagaccattttgcccctccacactaaaataacataaataacactaaaggggtatttttgggaaattctaaattcccggccattcccgacattcccaatgtctaataaaccgtc

SEQ ID NO: 279725 - DNA, 712 bp, Cannabis indica
acccttgccagtgcttccagaggccaaaaaaggggcaaggagatgctagcccattacatgaaccggctggttcctgaggtcagtgagcaactagctggtgttgataatgactcatctttggatgcgttggtgggcggagtcttgaaggagttcaccagggtaagcttttttgatatttccctttaactttccacacttactgaatatgctaaagttttttctttgtccaggccagtctgaagttggcctacacttactcccgggctaagtctgttgcttccaagaatgcggctctgtccgacaccttgaaggtggatgcggacttggccaagaaggaagctaaagaagccagggcggaagccggagctgttcggttggagttgggcgaggccaacaagaagctgttcgctgttgagaagaagatcttcgtgctgactaaggatctcgaggctgctgaccattttgaggagaccatcgagatcttatctgatgaggtaaacaatcttcaggataagaggacttctctacgagcagttcttcttcggatgaaggaggagaaggatgccaaggaaggggagctttcggtcgaggtggacagattgaaggagaaggtcaatgccttggagacagccggtctcgagctcttcttcgatttttggaaggccaatccccgagccaactttgactacttgggcgacgctaaggacatgta

SEQ ID NO: 279726 - DNA, 563 bp, Cannabis indica
cctagggttagaaacttctgcgattcttgcttattctaagtcttcatgaacttttttgccctaactcaagaaatttttttgacttcttgagttctgacttttctttggacatagccgtcctttaatctgttgagtactcctggtcggcatatttgctcgtttatcgtttgatattccgtccaacactcatctgtgtgttgtcttttgtagatgaactcaggtgagtcttgggaactcgggcatcagattgaccaggatttgtttcaacttctgcacgaggatcatcctcgtcttcgttctagtcctccttctattgaaggacattcttctgaccttgtacccagccataggatgatggctcgtacaaagaaaaccatgcgtctggctgacgctactgatcctcaagtggctcagcttgccactcaatccagcaccgaacaggattctgccgtcccgatggaggaggatcgtgagggggatgctgaggtccacgaggttgaggagctggacgtgttaggttttatgccctaaataaaactccatttcaatgtaatctattttat

SEQ ID NO: 279727 - DNA, 502 bp, Cannabis indica
tagtaacgaggttttaaaagtactaaaactttttactttttaacatggtggcgtacgcaactacgtaggatcaattgtaaatttttaattaaaattttaaataatttatagtgtcgaaaataaggttcaaatattttgttgcatgcatgattgttttcttttatacgcatggtaagcaactgtttaaactttatatattctcattaatataaattattcaatttttttttttaaaatttacgtgtggtcctaaatagttataacatacacaaacataaaaaagtatggactaaaaacgatttctctaagtgtaccagaacacccattgaaggggtgtactatatagaaatttctatatgtatttataaactaaaaactatgtgtatatatgtataggatagttgtaacgtcctcgcttcaagcttccattgggtccttacaccacggaatgaatgactcttatacacgagtacgccactctggctgcttcctggattgatga

SEQ ID NO: 279728 - DNA, 480 bp, Cannabis indica
atactaatcttacctcaatttcgaatttaggtgtgctggtcaacctgagtggaacgaactgcacggcggtttacaggctcctaaaccataacaatcacaacactattaagtgatacgctaaatcacttaccggggacttaaactagaaactaaaagtttccctatcgataaaaagcatggcaataccctaaataacataaaaacgagaaaaactagggttcctgaaaatcccccaaccggcagaccggttgcacaactgaaattcccgttctgggaactcctgaaccccatccggaattccggttgcacatttggaattccggttcctcgcaggaatcattcaaaaattcataacttgctcaaatcaaatccaattcaaataaaaccttccaaacctgttctaaataccccatagaacatttcaaaagcatcaaaaccatccagaaaacacagaaacgaaaaaatgccatgtgagctcca

SEQ ID NO: 279729 - DNA, 207 bp, Cannabis indica
attctaaaccaatcccaagcagcaaagcacaacaattcactcaaaatccaaaaacaccattaaagacctaacttaggttttctaagctctaacttgaataattcacaacctaaggcttaaatctaacttaaaacagtaggaataactattattcaacttcagcaaatgaatctaaactgaacatacatatacagcccccaattcaaa

SEQ ID NO: 279730 - DNA, 549 bp, Cannabis indica
aaaataacttaaaagtatattattttatacaaaatatttaaaaaattatttcagttgatggaaataatttacttattattttattaaataaaaaataataaaaaaacacaattttagttatataaatacatatatatatatatgtgataattacctttctctccatcactttagattattaaaataatagatttataaacccatttattgatgtgtgagggccataacctttactaaaaaaatatcacacttaaaaaatatatgtattttctaatttcataattgtaaagtaaaatagtaaaaaagctccacaaaattaatttagtataagtgattataatttttgtttaatgtgggcagtgagcacaaatatctttaggggaattttatttgcactttaaaaatttataaatgcactatattttaataatttttattttaaataaaatttatatctgtatttatattagtttttttttatcaaaattccttcaattcaaattgttaaaaaataaatctatcaaaaaaaattaaatattataataaaaa

SEQ ID NO: 279731 - DNA, 489 bp, Cannabis indica
gagttataggaaaagttagaaaatctttatatgtcaaaatccctaacaaatagattatatttgaagaagcagttatatgaattaaaatggttgaaggagaagatgttaaggatcatataaatagatttaataaaagcataactcaattgttaagtatagaggtcaaaattgatgaagaggatcaagctattattttgttggcatcttaagcaaaatcatatgagacattagtgactacacttttggttggaaggactactttaactgtagatgaggtgtcaactactcttttggagacagattgaatcaagcaaccaagtggtgtgtctcatactaatcaagctcttgtgacaaggtcagaatcaagtcgtggtaggagtacatcgagaggaagatatgatgacaaaagagacaatcgcgctcattcacgctcttcgaggaaagtggagtgctactattgtcacaaaaagggacatgttaggcgaaatt

SEQ ID NO: 279732 - DNA, 559 bp, Cannabis indica
gcccccgcataccgcttcagttctttgtgggtagttcctccaatatggggccctcctgagatcatggccactctcccattgggtcggggtggcagaccggggatatgctgggcatctccggtgggagcaactggagccagtactcctgctgcaccacctggtgctccttgtggcaaagcccctgtcgcctgacccggattgaggtgaggcagccgattcttgatccattcatagaggtgccccaatcggattaggttttcgatctcatctttgagatttttacattcattggtgctatgcccaatgtcgttgtggtactcgcatctcttgttggggtccctccgggagctatctttgtacagaggaggtggtctccggtagtgcgtattttgcctagtagcaaagtacacacgctcttgggagtccgtcaactccgtgtactgagtgtattggggagtgtatcccctcttttgtcgcttctcctccgttcgggtgctgcctttggaggatcgtttactcctcgagccctgggaaggacctgccaggctggcagttggag

SEQ ID NO: 279733 - DNA, 646 bp, Cannabis indica
ttgcttatacaacatcttgtatccaatagaggttcgatcaccataaggtttttgaagttgaagagtttgattgatggcagccgttcctggagggataaactctaaagcctgtttagctcttatgagttcagctgaaagcttgtagatctcattgtccttctcatcaagaagtttgttgagattcttaacagtgtcctccagcttgactttttcagactctatctgctccttggcactattcagacctctaatctgcttggtcatatattcccattgagcaaacatctcttcatatgcattttgtcttccattactgtcgacttcagacacagtggagactccatcatcctcagattcaacagactgatgactttgagccatgaaagccactacctgtttatcctcattagaacttttgcttgcaatagagtctttttcttcgtcactatcgctccaggtggcaacaagggctttcttctttttgagagtgttagcacactcggcctgaatgtgtccgaacccatcacattctctacactgaatgcccatgctcttattgtcactgggttgctgaccatgccagaagttcccaagaggatttcttttggaagcattttccttaccttcagaacacagtttcttgtac

SEQ ID NO: 279734 - DNA, 505 bp, Cannabis indica
ggaggaagccacctgggagctagaatcggacatgagagctcaatacccagagatgttcaggttagatttcggggacaaaaccctttaaaggggggatagttgtaaaggccgtttagtttaatttggaaattagaagatatttagggtttaattatggaaattatttattgatatttaaataattatttatgttgatttatttaaatgcataatgcatttttacgtcatatagtgaaatcgcataattttgcatttttcagtgcccggcaacatggaacgcggtatatggctcagtagaatcacaatttagaattttagtatagagggacggtttatttagacattgggaatgtcaggattggtcgagaatttagaatgtcccaaaatacccttagtaccccttttatgttattttagtgtggaagggcaaaatggtcattttgccccatttatgttttgtcctttagtggagtttattttaacttaataatctgatttttatgta

SEQ ID NO: 279735 - DNA, 665 bp, Cannabis indica
tttactaagtgctaataatttctgaatattattttgtgttaaaccttatttgatttctatttattgttatttgtagtatccaacatgacaatgaccaaccccatagtgtcactgttgactgataataagctcaatggagctaactttatcaaatggagagagaacattaacattgctctcattggtgaaaatgccctgtttgtgttgactgaagaggctcctgagcagccaggtgagaatgcaaccaaggcagtcaaagaaaagttcgagcgttggcagaatgctaacaacaaagctcaatactttatgctgtctagaatggttgacaccttgaaaataaggtttgcaaacactcttgcggctgtagaaatcatgaaccagttaattgaatctttcgggatggcatctattcaagctcgcttttaagcgactaagaatttaatcaatgcagggatgaaacctcatcagagcgtgcgtgatcaccttctctaaatgactagttacttctaggaagctgagaatcatggaattgttatagatcagacaacccaagtgagtttgatcttaaacagtttgactccaccctttctacccttcacttgaaattatgtcatgaacaagttggagcttgactttcacgagttaatcaacaaccttcagacatt

SEQ ID NO: 279736 - DNA, 905 bp, Cannabis indica
aaatatctcatatatccccccactttgattgaataaatcaacaccatccatagagactttgctcaagtgcataaagtaaagtgtctttcaacttgaactttactatagtgtaatcatcacaaattttattgaaaatttggttgacaaagcattgaactaacttttcattataataaaacggtgatgacacacacacttttgcaaggttcaccgaagacctcatgtcttgctttgcactgttaatggccttgtgcacattccattcattgatcttttgagaaaatatactccctacttctcatttagggcggcaccacccttaggtcaatataggtagaattcttacagtatttgttaccaaaatacttattttccaaactgaattccattaaagactttaaaagtctaaccttcaaattggtaactcactaagtacttcacaaatttgtaagatgggacatatagtacttattacatttgttcacacattgatttgttcttacctattgaacctaacactattaagatatattaccctcaattgtgaactgatttagggagttttaatcccatccctttagaagtcttttccactaaatctctagttagtggctttgcaaacggatctaccaaagttttcacttgatctcacataggatattgagatgactcctctttgaatcaactcacttacatatccatgtcttagacactttatgttcattgtttggtaggacaaacccctcgggttgttccatatagacctcctcatcaaggtcaccatttaggaatgtcgtttttacatccatttgatgaacatacaagttgtgtaatgaagccaatgaaataacacccttatggtagtttttttagcaacaggagcataagtatcaaaataatcaata

SEQ ID NO: 279737 - DNA, 1168 bp, Cannabis indica
ttatatttgtgatagtttaattttttaatgatagtccaaactgcaaaatcgcataaaccgcactgcaccgcactattttttgcagtgtgggtgcggtttgagaaattgaaaaaactacatgtgtgaattagtttgaaaaaatagtcaaaaactgcaccacctgcactgcgaacactcctatctatgtgttaagttatcatgatcattactactatgatactatgattcattcatttagcagccacccacccataacttgaaatgtacatgtgtgtgtgttaatatatagaatatgattaggtgtgtaccacttgaccactaccatataaatatatttgactccttctcaactaataacaaaatatttataagaagattctaagctgcaccctataatctattctttatttattgtggcacatatatacaatgattttttagtttaacctttctttagtcatagtatataaagatatttagaataaatagtctattttacaatggtatatggaaaaaaaaaaaaaaaaaaaggaagtagcagtgaaatcaaacctccttttcacttaattcattctagctgcttttagggctttatagtttgcattgctacatatggagataaattacaatcaaatacataatacaataaatgttaaacatgtcaaacatgagtgaacaaatctccatattatataacttacaagaaatatctccaagctaaagcattatccttggggtcatgggaaacatccttctttgatggttctgctactgctttcctctttcgttttcctaccatggttgataaacctaaccaaattaaagcaaaacaaatttaacagttaatgattacatatttcagcaaataaactatagaaaaataatagagcaatagaagttctactacacatttacaatcgtatattatcatcaccctaaagtcactcaaaacaacttaattcaaatagtatttacaacaataatactttttgtaaacaaattataatccttaaacaagacaactctaatcacagattaatagagagtgcaaaactcatcggtttagttttaatcttctcaccttgttacacatttaagtacattaaaatgatgtgaaagtcatttcaattaaatgaattccaaaactttaaaattaaaccaaacaaaa

SEQ ID NO: 279738 - DNA, 415 bp, Cannabis indica
aacctacttcactacggatgaatatttaagatattcaaactcaactaacatgcattgataattaattatataataagaaaaagttagttaaagtatatacctataaatgcaagctcaaatacgctacacacaaaattatgccgaacctacaatataaagaaatacaacgaaattgcaaaattaattatttcattacttataactagttataaaaaatagtaacaagttacttagttactaaattatacatacatatatatataatcaattatatctcacactattatctcaaaaaaaaaattatatcccacactaattcaattttaaaatttttatttctaaactaattcaatacctccaatgtaatatcttaacttagttgcaatagtgtaaacccaataacactgatgaaaca

SEQ ID NO: 279739 - DNA, 538 bp, Cannabis indica
atgccgcccgaggatggggatctccccgcccggcggaaattttgtatttttatgaacttgtttccgtccccaagaagggggacaaacttaaggacggtttttatgggttccgggcccaccctgctaacgaaggggtggtcccgtataacaggcagactcacgttaaggagtatcgccatcgctttttcttctcctccggatttagggcagtggaccatccggagctccttactgagtgggtgaggatccctccatatgaacggactgcacctactcaggcctttcttcggagagcccaggcctttgcctcttacgaccgggccgatcttgacgtcgggggtctggtcactacggagaactgcaggaaggccaaacttatccttccgcatcaatccgtggaggactctaacctttcccgggtcatctgtcccaatgtgagggcgccggtcgcggagaagaccttccgggacgagatcatcgccacggcagagaagaaataccaggagtatctctaccggaaggcccaggagaaggcgta

SEQ ID NO: 279740 - DNA, 586 bp, Cannabis indica
caaataccttatgaccaagaaggatgcaaaaccgagactgattcggtgggtacttctacttcaagagtttgacttagagataaaagataaaaagggcaccgaaaacctggtagcagaccacttgtcaagattagagctggaagagagtcagaatacaaaggaggtacaaataaatgagcaatttcctgatgaacaactctttagtgtgagggaaaacctgatggtaccatggtatgctgactatgttaatttcttggctgcaaaaataactccacccgagctttcgcgtcaacaattgaagaaattcttttctgaggtgaaacattactattgggaagaaccaatcctctacaagcactgcgccgatcagataataaggagatgtgtgcctgaagaggagatgtattctatcctaaatcactgtcatgctttaccatgtgggggacattttagtggaaatagaacagctgcaaaggtgttgcaaagtggattcttttggccaacgctattcaaggatgctactacctttgtaaaggcatgtgatcgttgtcaacgaacaggtaatatctcaagaagaaacgagatg

SEQ ID NO: 279741 - DNA, 95 bp, Cannabis indica
tgacctaaaagtaggcttaacttacaaatcaaagaacacgaatagccttcataaatctaggaaactttattcacatagtcatgtttactttccaa

SEQ ID NO: 279742 - DNA, 1114 bp, Cannabis indica
tcccagacctgatgaaattttcatggtccttttgggtgaaggtagagatttgcctcttaaggctgctggtcttatggggtgggaaaaatttagagaaaaatacttttgtcatttcatcccatgtcccaatagaccttggccttaaggaatacaaccagcttttggctttatccttgagtgagaaaggaaagaacttcaatctcaccaagttaatgatgtcagcttggttgttgaatgtggccaccacctcttcgaaggcctgaatatgcacatatggactctcattttccataccatgaaaggttggtaaaagttgaatcatgccaggtttgaaatcgaagttgggcatattcatgggatacattatgcatgaaggtgtggccgtacgcgtaggatgtagataatcctgtagcgttcttggttggatttcctgttgttgagccatcattggaagtgcaggaagtatgggtgatggtggtgaatgagaacgagtggaagaagacgatttaggagagttttctaaaatttcaatttgttgttttacaaatctccctaatttgtctctatttcgtgacattcacttttttttgtgtgtgtattttcacttgttaaataatgtaaattacaactatgtaataatgcaagggtattcacacaagatattcccaggccgattgggaaggttgccaaggtaccgcttcgtcccacacttttactagaactccccggggttgctagaaagtgtagagggtactctatcacaaacctttaaagccaatctttcttagacagaatgatctcagtttgtaccacttttaccattacacaattgggtttacactaaaaagtttatgaaaatattttatgcacaatttttttttttagcctaaaggataaaagtctacaactaacctaaaataaataaaataaaaaaaaatggctaatcctaaaaaaaaatacacaaaataaaataatgtaaaaaaaaaaaataacaccctaatatagtagcaaaataataaatacaactaacaaataaactaaaaaaaaaaaattaaactacttgttttttttttttactaaaagagtaaagaagaaaaaataataataatatata

SEQ ID NO: 279743 - DNA, 115 bp, Cannabis indica
tgggcctacacaaccgagcttccaataagcagaaatagaatttatctctattaagccaagcgtaagtatacctatcactgattatcatgccagtctaatccagtgactgacaaat

SEQ ID NO: 279744 - DNA, 390 bp, Cannabis indica
ttataggtaaccacctaggtttaggttagatttaattagcattaaaataataaaaaaaatagatggtaaaatccacactaagtggccggccatgtattggattgggccccactttgtaattttgccattttgtcattttcctatcttattttctcaaaaacgcaattttccaatttagcaacttaaataccaattctaattatttaataacgaaaaattaattattaaataatattatcattcaatatattttttaattagacttaataaagtctcttaattaataaataagacctagaatctctttttctcacatttaagtcattgcttagtgaaaattcataaactagacatagtctaattttagagttataattgattaactaaaat

SEQ ID NO: 279745 - DNA, 633 bp, Cannabis indica
cagctcaattcaactcaaataaacatacttaaatctctgtaaacaacaacaaaatcacagcagcaacaacaacctaaactaagcatgcaacatcatctttttcatcaaaattgttcaagaaaacttaaaaggaagctagaggaaacataccaacaacaagaggtcaaaatctatgctaaaaccagcttgaaatccaagagaaaaatcctcttttcttgctgctcaaagggccgaaactagagaggaaaaagagagagcttttcctttgaaaattttgtaatttttttctaagtttgggaaaagaaaataaatgccacataatccatttacttcagccaatattaacatcaaataacatttaaattccacttacaaagtccacaaaaggacaaaacaataatggggcaaaatgaccgattggcccatccatgctaaaataacataaataacactaaaggggtatttttgggaaattctaaattcccgaccattcctgacattcccaatgtctaataaaccatcccaatctactaacatactaagttgtgattttacatagccaaacaccgagttcgatgttaccgggcaccggaaatgcaaacttatgaaaactactaaatgacataaaatgca

SEQ ID NO: 279746 - DNA, 740 bp, Cannabis indica
atatttaagttgaaaattaattttttaataattttagatcaacttaaagtacaatacttttcatagatattaaattaaaactaataattatttcatttttattcaagattagttaattatttatttctattttaataaatttaattaaatagaaaattatatttaagttggaaatttaaattttagatcaacttaaattagtaacaattttttcagaatatattttattttaataatcatttttaacataaaatttgaaatacattttcaaatgtagtattttaaattttttcaatttgttaattaattttagagtaacttaattgaagtaatatttttttttaatgattagttaaaataaatagactaaaatatattagattttaattagaaaatcaataattaatttatgatacatctaaatagttatattctagttaactttttggtatttttctaaatatatttaattatatagaaaattaatatttaagttaattttattcaagaaacttaaatatttgatatttttcttaagatatttatttaaataaaaaaattatattcatgttgaaaaagtaatttctttattaattttagatcaatataaattagaataatttttagatttatttattttattttaattgaattcaaaaatgtatgtttttaatacattggatttaaaatttaatttagatattgtttatgaaaattaaatttgagtcaaaaattaatta

SEQ ID NO: 279747 - DNA, 883 bp, Cannabis indica
cttgagtctaaatacagtggtagccaagaacacactggagttatggggctatttcacatttttgttgcagaccaattgccaaactcactaaagatctttgatcactcttctctctgagtgaatctctttattacttttgtaatgttgtccatctagaataatcatatattccaataaattcgcaaaatatgatggttgtaacaacatatgctggaattcataattacttttagaataatttgagttgtacttcttatgtgttattatgcttacagtataatattaatcagtgtaaaagaataagtttgttgtgcaatgaaatatacatcaataacgctatagggtgttgggcaccgtttatttagcatttctcttacttcaatcatactttgggtgccaaaatattgaggaatggcttccattgttattagaaatagtaaaatgggtgttgattattattggactgattctatcttgcctcttaaagatttatacttttaattatcttctagtgttattcattattattattattattattattattattattatttgttctatttcataataatgcctttactgaaactagctatctgagcaggacatgtgacaataaacaaagaaaccaagtggattctttctcgtgccagcagaattgattggatatatattaatgttatgaaagttgttgggagtggtggggcgtgtcttagtttacatacctgtcaagttttgagtatcttacattgaaaaagattaataattcatctgagtttcgaattaaagacctcacattacacatgctataattgtaatcttggatgtctatgttcgatttgacagtctcacaccatgactataatcactaggggtgtacatc

SEQ ID NO: 279748 - DNA, 512 bp, Cannabis indica
gattgatcctcttgaattcccttgctgcaaacaccaacaattcacaacaaaaccccctggttttggctgcttcgaagagaaagaaaggagggagagacttgttcttactttttggtattttctctttagttttacaaaatgaaataaaataaattaagggaaaatcaatttcccttggctgaaggtattggcttgctaggtgtcaagtcactaggctgccacctaacttctcccttggcaatttactaaaatgcccttactcataaaactagggtattttcaagactaggggtaaaatggtcaaatttcataaccccactcaatcccgataattattttctctaaaatattccccgctaataaataaagttctaaacttacccatatgatcaaactagtcatccatcgcattttccgttgtcgccgagcaaaaattacaaaaatagcatatttcacatataagctaaataatacccatagagtttaataaaatctccgaaattgagaaatta

SEQ ID NO: 279749 - DNA, 975 bp, Cannabis indica
gcagagttaacaaatttcaaaaaaaccagcaagctttttccaaaacttgcaataaaccattcataatctcaacaatgcattcctacatcagattagatcacaaatagtccaataaagcatcaaatctttagttatgcatggtagcaaaatatgcctatttcactactaattaatacctaaaaaaaggttaaaaaatcatgcatcaattagaggggttcaactaggtcttacttttccaagtaagatctagcttgctaaatgttaaagctggccaaaaattaacattcaatcaacatttcatcacaactaattgaacaaagacaagattactcaatcattgcaaaatcaaagtactagtccatacaagggttcataaccacccaaatctcaaagattttagttcatagctgaaattaacaacatcaaaccagaaaataatagagtcatggagtttaagagaatattaaagagtagaaaatgatacaaaatggaagaggagagcaagagaaatgagttgggagctcaaatcttctctttgtaggttgccttcttctccttcttcttagtcttcttcttctcttctttgtactctctcctctctctttttcttttctgtacttagctttctgaaatttcgtactgccttcctcttgttgcgaaaattattaaacactacgcaagtatacgcaatcaagtagtaaactcacacaggtgaggtcgaaccacagggaattggattaactactactaaactatacctataattctatttggcaaatcgaaaataattttgatttaaaagaattaaagtaattcagaaaacttataacacagttaaagtttaagcaagatgagatgatagggaggagaatcctgttgttgtttacccaaatcgttaatgcctaattgctatcctattcttgaagtgaatgacagattataaagtaacctagctcttttcagatcttctaggtt

SEQ ID NO: 279750 - DNA, 504 bp, Cannabis indica
aaacattttttgtaaagcaatcggagcaagctcgtagtgagtatcgaactcgtttggaagcagtggttgattgcattcgtttgctattacgacaaggacttgcttttcgtggtgatgatgaatctgaagactcgagtaatcaaggtaactttcttgcaattctaaaatttctttccgatcatgatgatgacattaaagcagtttcattgagcaatgctcctgagaatttaaaattaacatcacctgatattcagaaagatattgtacgggctgcagcttttgaaacactagatgtcatcattaaaggaattggggattcaatgttttctattttagttgatgaatctcgtgatgtttctattaaagagcaaatggctgttgtattacagtatgtagataaagatggacatgttattgaacgttttgtggggattgaacatgtggccaataccacagctgtgtcacttaaaggtgctattgataaattatttctagatatggatt

SEQ ID NO: 279751 - DNA, 548 bp, Cannabis indica
aattagaaagttagaaaaattcaaaggaaaagcatttttctctcaactctctctctctattttcggccctttgaagcagcaagaatttgggaatttctttggtttttcaagctaattttgtgtgcaactcaagctttaggtattgttcttactcttgtcttcttttagtttcttgaattttgatgaaaagaaatggttgcatgcttgatttggttgtctagttgctgctgtgttttgatgttaatttcagaggtttaatctttttattttaagtagattagagctagtttaatgcatggtatttgctttgattcaagcttggaagtttttagctcaaaactatggttttcaaagaaatatgttgaatttgttgctttgcttgctgtagttgtttgctgctattttcagaggttaatttatgcatgtttaagtagatttgggctgaattgaatgcatgttagtgatgtttgatcaagtttgagtttggaactcaaagcttgaagcttcaatggtgattttggtgtgtttgcttgaagcttggtttttat

SEQ ID NO: 279752 - DNA, 580 bp, Cannabis indica
ttgttgcttgtatatttatttattttttttaatttttgataaatacctgtcgaatgatgacatcttgaaaaattattttgctaagaatcgcatcaaaatcgcacattaatcgcataatatcgccaaaaatacacaaactaacaaatcaagattagttaacatcgcattaaaatcgcacagtaatcgcacaatattgccaaaaaaatacagaaccaaagcgaactaaaaacaagatcctgtaagttaacatcacacaaaatcgcacgataatcgcaaaataatcgccaaaaaaaagaaccaatcaacctaaaaaacaagatcatgttagttcacatcgcactaaaatcgtacaataatcgcaaaatatcgccaaaaaatacgaaacaaactaaaaaacaagctcctgtcagttaaaaatcgcactaaaatcgcacaataatcgcataatgtcgcctaaaaatcggtaaacaaaccataaaagtattaatctaggagaaaatcgcacaatatccaacaaccagcaatacaacacatattcatttaaatattagaaaaatggttcaaactcgagctttgcatg

SEQ ID NO: 279753 - DNA, 607 bp, Cannabis indica
aggtacaaaaggagatgaatgcgcatagtctcaattttgttgtacctcatgcatgtttggtttgattgttaatgattgttattgaattaaaatgtcttcaaggtcaattcatacataatatatgtatcccgtcgatatgatattatgtacgtttttaattggttaccttatgtgtagtagacaatgttatggtgattgattatattgtccaagtgggagaatgttagaattatttatttgtggactaatataatactataataacaatcattaattatgtgcctaatatttctcatacaatcataatgggatggttaacaactattaattatttagaggcacatgagagcacccatatgactataattggcccattgagttatagtccaccatcaattagtccttattaacccaataagttatataaccctttagggttagatgggtatgttaaggtatgtatatattaaggatggatagtttgtgtgaaaatgatggttagacataagtgggtttgctccacaattgcctcttgattactcttcactctctagcatattgttttgtgtgttttggacttggagattgatcaatggctcaatatgat

SEQ ID NO: 279754 - DNA, 587 bp, Cannabis indica
tttccgtacttatgctggtatcattgtactgtactcataaacaatattcactataccgatgcactctgtaccctaactgtacaagtgttggtagtgcgattaacattttaaacatgaatgtacacataacatatacatacactcagatattgatatcacacattatagttcttaccttctttccagattcaagtgtgctggccgacctgaatggaaagtctcgtgctagatggatgccctaatcacataatgaaaccgggtaaatcacatgatcaaaaaccctaatccaagaaatctgaacctacaaccctaggttctgttatactctctatggattattcttgtaatacccggaattaagaaatggattagcaaaaccctaactagataattatgtataattgaggaattatattattatatagttcaatatatgtgattttatatgaattttaatatattaagaccctgttggtgagtcacgggcattttggtaattattacccgagaagggtaaaatgatgaaattaatttaattacgttcttaatagaagtatattattatatagtatgcctgtgttgtcttt

SEQ ID NO: 279755 - DNA, 867 bp, Cannabis indica
gaaggtttggtcacttcaacttttgataactctatggtatagagttatttttatgcttttaaactaaaagtattgtgagaagagtagtgaaaatgtgtttgtttgcttaattttaattagttttagtgttattttctatttagtaagctaacttttaagtcttgtaaatattgatattgttgggtgtgtttttccaattaattgtgcttgtttgttgttgaaaaaggaagaattaaattgataggaaaaagaaaaggaagcaaggaagaaaaggaacacaagctgaaattggggcagattgctgaagcaatgctgaagcgaattcagcatcctggcagtgacgtggaaacacgagtttcacttatccacctcagcaaattcggtccagtcactcaaattacaccagctggctgatgtggaagaaaagggactaaacctagtgggccaaagtggaaaagtttgggcttctattttggggtataaagtttgtaccctaaaaacccaacacctaaaagaagagaaagaaggaagtacaccatcttttatgaccattacgtgagttgccaatttttttatttgaaaggagtaattgcagaaggacaggggaggaagaagaaaaagggggaccaagtgcaagggagaaggacacaagctcttgtgtttgaatttcttttatcttccctttatcttttcctttccttttattttcctttcgttatttcttgtctttagatatttcaaactttgtgaactgtaaaaacatacgggcagcagccatggatgaatctttttcagcttggattttgttttcttacttaactatgagctagattttttaggcttgaatggctatgaacttctatgttg

SEQ ID NO: 279756 - DNA, 478 bp, Cannabis indica
tcattgagagctgaaggaagcgtctgcaagtagacagtaatattacaaaacaacaatggtggagactcgcaacacacgtcaaccccgtcctcctcaagacgctcaagatcccgacgatgaggaggtggcctcaagagtgaacgtgggctctgaggaaggagaaggaacccacgacgacgaatacgaaggaaacttcgatgagtacgacgcctatgacgaaggcagttacacagaactagtgctcttgagacaaaaggctgctgatcacgaagctgaaatcacggcccaaaaagaacaaaacaaaaagatgcaagaggtgatgcttgccatgcaaaaagccatggaggcagcaggaatccacgtgcatcataaagccatccctgctggacttggagaaacaccaggagaatcctcgccaagtgcccaaaagtagaaatctagggaacctagccctataaggtatccctctgaaggaaac

SEQ ID NO: 279757 - DNA, 681 bp, Cannabis indica
ttctgggatgtatggatttagaccatgcactaaggaatgaacaacctgcacctctcactaaggaaagttcccatgatgataaagggaatttgagaggtgggatcgttcaaatcgcatgagtctaatgattatgaaacacaacattccagaagccttttggggcacagaatccgaaggggttactatggctaagaatttccttgaacaaattgaggaacgttttgctaaaaacgataaggttgaaatgacaacacttcttggttctttaatgaacatgaagtataagggtcaaggaaatgtaagggagtacattatggaaatgcatcatattgtctcaagattaaggacacttaagattgagctttcagatgatgtacttgtactcatggttttgttaacgcttcctccacagtttaaccaatttaaaattagttacaactgttaaaaggagaaatggactctcaacgagctcatttctcattatgtgaaagaggaagaaaggttgaaaaaggacaaaaccgaaagtgctcatttggccactactcctaaggataagggcaagaaaaaaagaaatttgagaatgaagctgctaagggtccagttcaaaagaaacaacaacaggattctaagggttgtttcttttgtaaccaacctggacatgtgaagaaagattgtgccaaa

SEQ ID NO: 279758 - DNA, 887 bp, Cannabis indica
aagtcagaaagtttttcttgagttagggcaaaaaagttcatgaagcttgaaaaaagcagaatggaaaacagacgcaatgcagttctaaaacaagccttacggctgaaagctaacgcaaggacatggaaaagaagagtcgcagaagtttcaaaccctagggtttcctacagtgttctttctacagcaaagttacattcaaagcacaagcatgcaaaggaaaaacataaagggaatcagaaacttactcaaagattcaagtgtccggattcaagcaagcctgaaatcgtctgtaaactcttcagcaactttgaagcctgaaaactctctctttttgctctgaagtttgcttaacaacgaagggtgatgaaatgaggtaatgtgccagtactccaagtatttataggcaaaagggtaactgtacgtaaaggaaccttagacgcctcgacttcccgccttgaaagcaaatatgggaaatcaaaataatcgagtgcaaccgtcagccgtggagagagaaattcggattttcaaaatattaattgtcagagcattaattagccgaaaaccgaagggacgcccagtcagcttcacatcgagtctcgaacggtcatgctcgacacgtgtcccctttcaaaggcagagccagctcggaataagtctatacgcaacctcggaggtcccgcacagacttgggggcaaatgttatcccaaaattggcactctgacgtggcatcacaagaatggtgacacgtggcatctacttagagcacctggtcggatcaacatgccgagcaggatgcctcgcttggggctgaacctctataaaatttctgtggcttcttattattattatttgctttattacgtattcttattacaacatatcgttt

SEQ ID NO: 279759 - DNA, 555 bp, Cannabis indica
cccgattggagatcaattgaaaagaccgtcttcccctgaagttgatcaaaaagatcatcgattctaggtaatggatatttattcttaactgttagcttatttaactcccgatagtcaatgcacattctcagcgacccatccttcttcttgacaaacaataccagagctccccagggcgacacactaggctgaataaatcctatgtcaagcaacccctggagctgaattttcaattctttaagctcaggtggagccattttatatggagccttggaaactggttttgctccaggttccaaataaattataaaatcaatttcccgctgaggtggtaaacccggaagttcatcgggaaaaatatctagaaattcccgaaccactttgatgtcttctggccaaacagagtctggccgagtggtgtctaataccacggccagaaaccctaggcaaccatcacacaacaactctttagctgacaaagccgaaatcactgggatccgagatccctgaaccgaaccgacaaaaacaaacaattcctcaccttctggttggaag

SEQ ID NO: 279760 - DNA, 732 bp, Cannabis indica
cttcccctgcactgcgtcagaatcggcgagaggtccagcttcctgctaggcagtggattgtttacacagatgcggcattagatttgggccatatgaagcatagttatggagttgtggcttttgataatgaaggctgtagcagagctggttttatggccccctgttctggtgtagtttcccctgaggttgcagaaggcaaagcaatccttgcagctattaagtggattcaagcaatccagctccctattttgactattgcctcggattgccaaagtgtggttgataaaatttatagctcttattgtaataactctattcttagtgatgttgttaatggtcttaggaattcattgttgttcagtcctaatctgtctgtgctttatgttccaagagattgtaataaaacagctcactcgcttgccaaggttggattaggattagacaatgaatgtatttggaatggttctttaccttccaatctcacctgaactttgtactctctgatttatcaatgaatctcaggttttactcaaaaaaaaaaaaatgtaacagttcaagaaacggaaacaattaactcttattaagttgtattaggccctattgtattttattgtattgaattggattatatatcatatttttatataatactatgttaaattttaatttatactaaaatattatatatttagatgtccataaaagtcaataccacacatagttttacataaa

SEQ ID NO: 279761 - DNA, 372 bp, Cannabis indica
tctagggatcaccccacaaaaaatactataaatacccctcaaacacattaaggcaggggtcgagaattctggatttcataagaaccaaagagaggaaagctaccaagaacattctctataataaatacactcataaatattaaagactcgtggactaaggctcattaatgccctaaccacgtaaagatctcgtgcattaatctttctgtagctttcttatatattattaaattggttgtcgaaaacctcggtcaatattttggtgctttcattgagagctgaaggaagcgtctgcaaatagacaacaacctcataaactagaacaacaatggtggaaactcgtaacatgcgtctgttgggttttgtgcccta

SEQ ID NO: 279762 - DNA, 648 bp, Cannabis indica
aaacttcccaactattccaacaattcaagtggcaagcgttcaagcaacaaccacaagcaaggaaacgagaagaaaggaaagttcaccgataaatccggacagactccccgtgatcatgccaaacacactgcattcactattctaactgaagatatagagagtgtgtatatggcaactcagtcgttaattccgtacagaaagcccgggcccatgaagaaagataccaacaaaagggacatgacaaaattttgtcggttccacggagactacggccacgacaccaacgaatgttacaatctgaagcgggaaatagaatttctgatcaagaaaaacaacccgcacctgcagaagtatgtcaagaccaaccaaggtcaaaacaaccaggatctgctacctccacccgtagatggacacttgcaagtcattattggaggcccgcacatcgctggagattcgggcaaagctcgagagaggtatgcccgaacagctcagtacgagcaagaagaagtcatcctggccgtggaagaaaggaagcccaaagttccacgagcaggagagccaaccataactttcaacgatgaagatgctgtcaagattagattttcgcacaatgacccgctggtcgtggaagtccagatagcaaataaa

SEQ ID NO: 279763 - DNA, 753 bp, Cannabis indica
tcgcacctgcgtttattaaaccaaagggcatcactttgtaacagtatagtcctcgatcagtaatgaacgaggtgtgttcctggtcgggctcatacattgggatttgattatatcccgagtatgcgtccataaagctcaggagttcgtgacctgcagtggcatcaacaagctggtcaatgctaggaaggggaaagctgtctttgggacaggctttgtttagatctgtaaagtcaatgcatgtacgccatgagccattaggcttaggcacgagtacggggttcgctaaccagttggggtaaaacgactcccgtataaagccgcaggcaaggaggcggtcgacttcttcttttagcgcttggtacctcgcagggtccattttgcggcgcttttgtcggacacctcgcacctcggggtcaatgttcaagcaatgacacatgacttgcggagatatcccgaccatatctcaatggtgtcttccgcggcttgggctgcggcggcgtgatcgaggattcttggatccaagtctggttcatctatgtgcggcacctcctcgattctaaggatctcctggcgaggaggtggcgcctccaacaggtagataacatttaccgtctttttctccgtgagtttgactgctgtgttgtagcattcccgcgaatctgcttggactccccgcacagaacctactccagcaggagtagggaacttcattgtcagatgatagattgaggttatgatcttcatctccttcag

SEQ ID NO: 279764 - DNA, 618 bp, Cannabis indica
cttttcttatagctcttataacagtatctctgaatatataattcttagataatagtatagtcttagcttaactgtttttcgaccgatcccttgcccagtgaatatgcatcactatttatagggctaggaagcttggggaggaagagtttactctctcgttacaatgcgtataaacagaaagaccatgggatcaatgctgaatgcaaagatcgtgggattgaggctaactacactgatagtgagatcgtgtatatgccatatccacgttaattgatcccttagttataggaattgtgctgatgactcatgctgcgaaagctaaattcactaagtgttggttgctctgcgcggatcgctgaatatcttgctccggatatgccagcaaggcatcctacttcgcctgtcttcccgagcagatgttccaagtagacttcacgtgtcaccattctcgtgatgccacgtcagagtgcataaattaggataacatttgccccccaagtctgtacgggactttcaaagttgcgtgtagactttatccgagctgattctgcctttggatagggacacatgtcgagcgcggcgtccgagactcgatgtgaggctgactgggagtccctt

SEQ ID NO: 279765 - DNA, 516 bp, Cannabis indica
cttcagtatcatttccagtaataacgatgtcatcaacatacaccactaacaaaatgataccaacagttgatcttttataaaacacagaatgatctgacttacttttcaacaaaccaaacttctcaacagcctgactaaatttaccaaaccaagcacgagggctttgtttcaatccatataaagatttgcgaagatgacaaactcgcccttactccccctgagcaacaaacccaggaggttgctccatatatacttcttcctcaagatctccatgaagaaaagcatttttaatatcaagctgatgcaaaggccaatgatgagtagctgccatggaaatgaacagtcgaacagatgtgagtttagcaacaggagaaaaagtatcacaatagtccactccataggtttgagcataacccttggcaacaagacgggcctttaagcgagcaaccgtgtcgtctggattgaatttaactgtgaacacccatttacacccgatggcctgttttccggaaggta

SEQ ID NO: 279766 - DNA, 578 bp, Cannabis indica
tattgaatttgttgtttaattattgtagttgaaagtctatcactgcattgaaaagatcaactctgtaataatgctccactgtaattgcatcttgttgaccacgacttcttcctctttttgtagtatagtgagcattaaaatctgggacaggtatattaacacgttcacaaaaaaaatttcacctcatcaactaattcatcccatccatcttctctcaatttttgaatgagagtcttagtggatgaaacaagatgcattgcatttaaaatatcttgagactgaagttgcaaagcttgacagagtatatttgaaatctctagaattttttttcataagatgcaaaataaaaacaaattcaaaagaagttaatgactcataagctgcatccgcatctcctcgttgagcaaaagtagtgccatcttcaataatattcaataaaacttcacatgttgcactaaacatctttattaaactagaaatagatttcaaatgagaactccaacgagtatcacctgccctttgtaaagaaccaatttgattaagtcctttcccactttctagttcatcaatctcaagta

SEQ ID NO: 279767 - DNA, 704 bp, Cannabis indica
aacatgcatttaaagttgtggaaggtgaatttaaacatctcatgaaagtggtgcaacctagatttgttgttcctagcagaatgacagttgctagagatatataccaactttatttggatgaaaaagtaaaactaaaagaggagttgatcaagatgggtcaaagagtgtgtttaacaactgattgttggacatccatccaacaaattccttatatgtgtctaacagcacactacattgatagtgattggtgtttgcaaaaacgaatcataagtttttgtcaaattccaaaccataaaggagataccattggtaagatgattgaatcgtgtttgcttagctggggaatagagaaggtgtttgctgtgactgtggacaatgcatcggccaatgatgtagttgttagtcttgttaagaggagagtcaatgcatggaaagggtctgttcttgatggtgattttatgcattttaggtgttgtgctcacatagtgaatttaattgtgaatgagggcctaaaagatttgcatgattcaattgctgctattcgtaatgttgtgaggtacattcgatcatgtgatagtcagtagtcccgtgatccgtatggggaaatacagggtaagctgtgcaattccacatcgcctggggaaggtcaattgggatgattctgagactgtgtaggtatgggactacacagttgaagagggctt

SEQ ID NO: 279768 - DNA, 152 bp, Cannabis indica
ggaaattacacaaaaaattaatgaatttaggcttttatagaatctaatttgaatttttatgaattaattatgattttttgaatttggatgaaaatatttgaaatcggatgcgcgcaggggtatgcattgcataccctgtgcctcaaatcttg

SEQ ID NO: 279769 - DNA, 732 bp, Cannabis indica
atatatatacatatatgttattttattcatttatttattatatatataataggtttaactcggtcgaaccgatccttcacattcttccctccttacagatttttcgtcccgaaattttaaagtacaacctcaggttgaaaattaaacaagtgaggatacttcatatacatctcagactctaactcccaagtagcctcgtcttctctattatttttccataagaccttgactactggaatctctctgttcttttacacttttagctctcttgccaagattttgacaggttgttcttcataagtcacatcttcctgaagagggatagcctcatactcaataacatgtaacgaatctggagtatacttcctcaacatacacatatggaacacattatgaacatgtcccaactgtcctggtaagtttaatcagtaagcgacctccccaatcctctcgataaccttaaaaagatccaatatacctcgaggctagcttacccttcactccaaatctcgttacaccacgcataggagtaactttcaagagacataatcaccacatcaaactcaacttcccctcgatggagatcggcatagcttttctgacgactctgaacaaccttaagtcttcttgattccctaatcttttcagttgcactagtgataatctggggtccaaatgtgacatgctcatctggtctgcccaaactcaatggcgatctgcatggtctcccat

SEQ ID NO: 279770 - DNA, 600 bp, Cannabis indica
atgaggattaggaatttttgcccaagtcattcgaatagactatgcaagaattctactatcttattctcataattctgaaaagttatttctatccatatgaatggttagatttactttctcagttgtgttctaatgttcctatcacaagtgtcaaccaaatgaagatgggttaagaattttaaaattctcccactcaaatatggtagtgtgatacaatgtcaaagaactttattggtatcaatttctattacaacagtaaatattaactggaacataaatcaagatcaagaatatattctgataatttgctaatttattatatttcatccttgtttaaaatatgtgtcacaaagagtactgtggtgtattgagtatagtccagagttcaaaatgaactacatattccaatagtatagttcacccctaagtatatagagattatgatccacccctaagggatatagagatcatggtccatccctaagtgttatagtgatcgtgtggagttatgaatataatctagagttcaatagatataaaagatcgttgaactgcatattattcttaactttttccacccctatcagatcaaaagatctt

SEQ ID NO: 279771 - DNA, 550 bp, Cannabis indica
agcatatcgtccacgtatacctccatgtttcgccccaagaggcctttgaacatccggttgaccattctttggtaggtcgctccggcgttcttcagtccgaaaggcatgaccaggtagcagtatacccccttatcggtcctgaagctagtgcactcttggtccgccgtgtgcatctttatttggttatacccggcgtaggcgtccatgaaggatagtaatttgaatccggaagtggcatctaccatctggtcgatcctgggcagcgggaagcagtccttcggacaagctttgtttagatcggtgaaatctatacaaactcgccaagtcccgttcggcttgggcaccaggaccggattggctagccattccggatagtatacgtcgcggatcatgctgtttgtcagaagcttgtccacctctttctctagggcctcggcctttactgaatcgagggggcgtcgcttttgttggactggcggcatgtccgggttgacgttgaggacgtgggtgatgacatggggacttatgccggtcatgtcctcttggcgcc

SEQ ID NO: 279772 - DNA, 859 bp, Cannabis indica
atttagggtagtttgtttaaaattttcactttttgtattgaaagtataacaaaatgttggtacaataaaattgcaaagtaaacaagttatgcactagacaaattttactagttggaatataaggattatttaagttaaggtatgatgtaaagaaaatttaaagtgatattttaaaaatattttcaagtgaaataaggtttaaagatgattagtttaaacgataatagcttttagctatggttggttcatatttttaggaattattagcaaaaagaaaagtggtggaatttagtattcagattctaatattattacttaaaattaatcaagtaattggaagaataataaatacgaagatattgaaataaaaaaatgtgggaacactaattgtcaaatgcgattttattgcggtcagatatatttgggaagttaaattttatgaaatttagtttgtaatctatgtcgtataggaatgtatcatttgtaaatgtttttatggtaacttaaaaggatacaatttttggaagttttacaacatgtcatttggaaattaaaataggaataattatgtcataataactgaattggattattttaagtaatttcaattcaatatagattgattataatcaagttttaccataaataaatatgtataaaaattgtttttttggaataagtacaataaaggaatttgtaatattttagaaatagagacattaataatgaattaaaatggttgattttgtctattttgggaaggattatggaataaatgggtcattaatgtttaataatcaaggttattttgtttcattgtattgaattacactaataattgataatcaaggttattgaa

SEQ ID NO: 279773 - DNA, 654 bp, Cannabis indica
atgaacttgcattactcaaataaacattacaacaaaaagtgaatcaaagatacaaaataacctcactttgcatatggaatcatccctaaccttccaaggaagattaggccattatgctaatcattctcataaaatttctaaagagaaaagatgagaagaaaagttgagagaattttgctatagtttttctacactaaaaattacacaccaaaaattactaaaatgagctcctatttatagagccataaaaggactaaaaataaataaataaaaatttgggattataaaataaatattaagattaaatttgacatttcaaatcaaaaataaaattaatattatttttgttatcattgtgattttgacttctactctttggatgaaggttgagtgtggaagaggaaaatagggttgatgatgacctagacttatcatcattgcatcacatgctttggaagagacaaaattgatgatgagcttcatgggctaggcttaaccttttgggttgggttgctttggacttcaacaaaaatgccatttttttcttcatttcttttcaactttgctccttcctctttctttcaacaaaaatacactttaattcctacaagaaagacataaattgaatcaaaatcaaatattttcatttataaa

SEQ ID NO: 279774 - DNA, 528 bp, Cannabis indica
atggagctggagtcggattgaggatggggaagctcggatgtcttgggtttgaggtcacgaaccacggccatggcgggagccgtcttacaacggtggagactgtgggttcgtctgggtgcagaggatgattgagggtggtcaagttgttggattggtattcggaaatcattgtgaagagggtttgtttgggagtgtagcaaaggctgagagagatgggcatcatcatcctccatagacattgaggaaagatttgagttttgttgttaatttgggggaaaaggagagaagcgaagagatggttggaatggtagttgggttaatgttgggagttggagttggggccaattagagggaaaggacttggtatcataggctacgactgaacagtgggacccacacaatgactagtcctcctcacaggctctcttctgctctgctacaactaagaccgtgtttggtacgatgaaaattattgaactcccttttttactttttacaaacgaaaagattttaaattttttttttttt

SEQ ID NO: 279775 - DNA, 865 bp, Cannabis indica
atttagtatttattcaaaataaaagtaataattaattatagaaaaaaataaaaatatccctaataaaaattaatatataatctaaaaatatcaaatttaaatttaaaatcatattcattttaaaatatctatttatttatttctttactttcttataaaatccatataatataaagagttaataagaggtgtaccatataaaaataatttaggataggggcattgattaaaattagtattaatataattataatttagtttagataaataatatatattataataaatattagagtatattatttttataacaaacttttattatatttattcaagcaaatatccgaataaaaatacggtgaaattaatatataagaaaatatcaaatttaaatttaaaatatcataacaaaaatatggtgaaattataatttttatattaacataaacaaataaaaaaatatccgaattaactaaatttaataaatatttattaatatatttatgacatataatttaaattttataataatatcaattaaaaatatttaaataatttatatacacttaatatttaatataaatttgaatttaaataaataattccttctatttttaattttatacctaattttaatattttaagtaaattaaatattttaaaattttaaatttaagtttttaatttatcatttcaagtttacaatattttattaataataattcataaatataaaataaccaataaaaatatctaaatttctgcataaaaaagatatttcatcgcggcacgaaaggcggctacgttacctacaaatctatatatctatatatatagattaaggagaagtatgatgcggtgatgt

SEQ ID NO: 279776 - DNA, 629 bp, Cannabis indica
atttaatcataaaagattaattttcacacaactcaaattctcaataattttgataccatgcatatcaaaattaaacactaatttagacaccaaacatgtctaaattatactttattttaagacaccaaacatgtcttaaacttttcatattggagtatcacccccacactttcacatttcactatcaagataatatcttgattttaaaatatagaagaccactttgtctctataatttttcttaaatttaatttccttcttgaaattatttttaccaaaaatttgacaccaaatatgtcaatattttcacttatgcacatagccaaacttgatttagaatttgaattcaaaatcaaataaattaatcaacaatgtctcaacacattgtggctcacccccacatttctagcatagtgtatataaaatatcacttttgtgtatttcctcttgaaatgactttttaaggtcaccttaaaaaatatcatttgacatttttagttttctcaataaatctaaaatgtcaaactcacattactactcataaaataatgtgattatttttaccataattttaaagctatctcctcattgagattagcccaaaattataccaaagttaacaaaattct

SEQ ID NO: 279777 - DNA, 800 bp, Cannabis indica
tttttcttggatttcaagctaattttagcaagagttagtgatcccaagttgttggtatgtttcctttagccttcttttaagttttatgaaattttgagaaagtttgataggttgcatgcttagttttgagttggtggttgctgctgtgtttatatgttgttttcagaggtttaagcatgtttgattgaatggaatgaaactgttttgatgcatgtttggttggttttaaattggtgtagagttttggctcaaaaactatgtttttcaaagtgaaataatggaatttgttgttgcacttgttgttgatgcttgctgttatttttagaagttattatatgcatatctaggtagatttgagctggtttggatgcatgttagtgatgtttaaccaagtttgagttttgaactcaaagcttggagctttaatggtgatttttgattctgtgttttctgggctatgttattgctttggaaatgtttagaggggtatttagaacaggtctggaagttttggtgtgatttggggttgattggaatgagttatgaatttttgattgtttcctgcgaggaaccgaaattccggttgtgcaaccggaattccggatggggttcaggaattcccagaatcggaattccggttgcagaaccggtctgctggttgggggatttttaggaaccctagtttttctcgtttttatgttgtttagggtattttcatgctttttatcgatagggaaacttttagattctagtttaagttccggggaagtgatttagcgtatcacttatcagtgttgtga

SEQ ID NO: 279778 - DNA, 517 bp, Cannabis indica
taagcccaatggtcccttctcttttttttttcaagttttgaagtagttaaagtagtgaaattgtgttataggagctgttagagtttgatgttggtttggttcgaattctagggttaggttgagttgaatttagcccatagcagctggttttgaggttattggttggttttatgcaactttgaacattgagttcaaagctttgagctttaatggcaaattgattttgaatggtttgttctgtgaaatactgcctggattttgttgcttatgcattgtataggagctctggaaggtttcatggcaattggtggagagttgagcaacaaatgaaaaactttggggaaactggtgcaaaccggctagccggtttgcagagccacaaaaaccggctagccggttttggcagggttccccgggcctttcattttctcaatttttgccatttcgatgcctcggttgggtgtttccccatttccagagttagaataacccattaagagcatagcagaacctaggg

SEQ ID NO: 279779 - DNA, 626 bp, Cannabis indica
ctcggtttcttgcctgaccacaactcgtatggtgtctttgggacaaactttctaggtacttgattcaagatataagcaacagtccttaatgcctcaccccacaaaaattctagcaagctagaatgaatcaacatacaacgtaccacgtcaagaagtgtgtgattccttctttcagcaactccattttgctggggtattcctggcattgtatatcttgcatcaataccatattcttgcaagtatttggcaaaaggcccggggttccttccagtctcatcataacacccataatactctccacctctatcagaattgacagctttaattttctttcccttttgaagctcaacattcgtcttgaaaatcttgaaagcatctaaagatttagatttttcacgaatgaactcaacacggccatatcgggaaaaatcatcgatgaaggtgataaagtatttataaccacccatagtaggtggaacaaaaggcccacaaatatcagtatgaataagctctaacacatctgcacatctgtctgacttacttttccaactttggcagtcaacttttcctttacacaatcaacacaggcagtaaaatcaaaaaaaatcaagatcctgaagcacacc

SEQ ID NO: 279780 - DNA, 672 bp, Cannabis indica
tgaccctccaaaatccatgacacaacctcgtaacaggtcttcaagtatctgaatagttcgctcagattgcccatctgtttgagggtgaaaggccgtgctgaacttcaaactcgtacccatggccttctgcaaactcacccagaacattgaggtaaatttagggtctctatctgaaacaatagactttggtaccctatgaagacgaacaatctctttcacatacaaatcagcatactgatctactgtataggttaccttaacaggcaagaaatgtgctgactttgtaaagcgatccaccacgacccaaactgagtcgtacattcctgtggtcctgggcaaacccaccacaaaatccatcgcaatgtcttcctacttccattctggaagtgataatggctgaagtaatcctgtaggtcgctgatgttctgctttaatttgttggcaggttaagcacttagtgacatagtctaccacatctctcttcatcccataccaccagaaatatggcttcagattttgatacatcttggtggttcctggatgcagtgagtaaggggtagtgtgagcttcatccagaatctctttcttaagttcagtgttaacagggacacacactcgtgctttgaacagtagcattccactgtcagagatcgaaaagtccttagctttgcc

SEQ ID NO: 279781 - DNA, 507 bp, Cannabis indica
atttttcaaatttttgttgaaaagatacttagccatcaaattgggttccattatcggatactatcctcataggaattccaaacctacagataatgttcttgacaacaaagtaaaggactttcttgcaggttatggagacgaggggctcggcctccgtccatttagtgaagaagtcgactactacaaccgcatacttagctccttctcgcccagtgggtaataccccaattaggtcgattccccatatagaaaatgggtagggcgaggtcatcattctaagttctgttggcggtacgcgaggtatatgtgaaaatctttgacacttatcacatttcttgacaaactcatgtgtgtccttattgatggttggcaaataatatccttgcctaatgatcttttagacaggctttgccaaaccgaatgattcccacaaaagccttcatgaatttctctaatgattttgtttgcttctgtgggaggaacacaccgaagtaggggcattgaata

SEQ ID NO: 279782 - DNA, 166 bp, Cannabis indica
atggaatatatagcttctttctaaacatagaagtgaaataatgatttccttcgagcttcgctaaatagagaaaatggttgagtactcatttcagtgattatgttcattgaaatatcgtttataggtggctaagtgttttaaggaaaaatacattgaagggtgtaac

SEQ ID NO: 279783 - DNA, 568 bp, Cannabis indica
actatctctacggggagaaatgtaaaatttataccgaccacaagagcctgaagtacttctttacgcagaaggaactcaacatgaggcagagccggtggctagagcttgttaaggactatgattgtgaaatccactaccatccagggaaggccaacgtagtagcagacgcgctaagtagacgcagttatgccagcttggcaatactggcacaaatggagaagcccctacaacaggaactccaaagaacttgtatagagatcattacacaaaaactagctgacctaaccattgtctcaacgctgctacaggaacttaaagatgcacagattgttgatgagttcttacagaagaaaagagcaggcttgccagagatggaggcataagatttctccgaaggtacaaacaacatgctgaggtataagggaagagtgtgtgtagccaacgacatagagcttaaaagaaagatcatgattgaagcacacactacaccctactcaatgcatccagggtcaaccaaaatgcacaatgacttaaaaccttgtatgtggccagggatgaagaaggatgt

SEQ ID NO: 279784 - DNA, 877 bp, Cannabis indica
gaagctaagttgaaaggaggtgttcgggcaaagcagtatgctcaggagtctatgaatcctgaagatgaagctgaggctgaggctgaggctgagcaggtgactcctttgaggaggaagaagaaactcccggccacgcccaggcccgttgaacatgccattcgcataagggagcccatttcacctgttcggccatcccatccttatgctggaaaaggaaaggccgttatggctgagatatcaggtgatgatggacttctgactttctgggcgggcagtcactctgcgctttacttctttttcagcttcttggcttccatactttgtattttttgttggtttttgctaaccatgctgtttttgctcttgtgcagacatgtctcggcagatgatggacgccttaaggaagaggatgagcggaagctctagcgcctcccctccggccaagaagtccaaggtcggagaggggtcttcagagaagaggccttctggagaggtcattgacctttctgaggagctggctgctgcaaatccttctactccccaatctgccaagtctaaggagtctgggccaccaacatctgggtccgaactggtcaggaggattcctgaacggatgcaggcaccaactctacccgtgcccgtgctgcctgaggtcaagaagggcagggaggtgatggctcatcacatgaaccggctggttcctaacgtcgatgagcagctggctggtgcggaccactcatctctggatgtgttggtgggcggagtcttgcaggagcttaccagggttagtcttttcttttcgacacttccctttcagtttttcatacttagcttcatacgctgaccttttcctttgtgcaggccggtttgaagctgg

SEQ ID NO: 279785 - DNA, 509 bp, Cannabis indica
atctatctttgagaacacagccgagccttgcaattgatcaaagagatcgtcaaatccttggcaaaggatacttattcttgatggtcaccttgttgagctcacggtagtctacgcacatcctcatacttccatctttcttcttgacaaagagtaccggcgcaccccaaggtgagtaactcggtctaatgaaccctttgtctaagagctcctgtagttgtattttaagctcttttaactcattaggtgccattctgtatggagcctttgaaattggattagtccctggggctaattcgatgatgaactccacctctctgtctggaggtagtcccggtaaatcttctggaaagacctctggaaattcacagactatgtgcacattctccacatttagttgcgtctctattgcttgatccactacgctgaccaagaatgccagacaccccgccttcattagctgactagcttttagggaagagattaatggagtcctcaaggccagcttgtcg

SEQ ID NO: 279786 - DNA, 718 bp, Cannabis indica
gatcaagaataaattctaataatttgctaatttgttcattatattacatccatgtttaatcaaaaatatgtgtgccataaggatactgtggtgtattaagtatagtctagcgttcaaaatgaattacatatgtcaatagcttcatccatccctaagtgttatagatatcatgtggagttatgaatataatctagagttcaatagatataaaagattgttgaattgcatatatcattcttaacttctttcacccctatcagattaaaagatctttttattaaacaaaatcctaataattgcttcagaattaacaattattcataaactttgaattgaaaattcttagtgtttatgtggtattatctctttgcagagaagaatataccatagattttgtatctgtaatataacacaaactgtaacgccctgtccaattgggacgccacgtgtgtgcttttgtaaaattcttatttagatactatataattataccaaggcctatcacaatggaaggactagcatcagcctcagtctgagttagggtaaacactatagtcgtagtagctgtgggcaattcctcttcatgtgacccactatcccacagtggaaataggccctggcctgacactcgccatgatggcgccttttacatctcgggcattgagggaaactctgccaattttcgttcccaccatgacggaagccttggttaccctgg

SEQ ID NO: 279787 - DNA, 640 bp, Cannabis indica
gatgcttggctctgccaagcgttccacgggtactacccccagtccttcaatctcactgtctgaagctaacttagccaggcagtccgcgtgagcgttcttttccctggggattctttctactctataatccgtgaactcgtggagcaattcctggactatcattacatatgcggccattctttcccgcgcgtctgatactctcctgatatctggttcacgaccagttgggagtcgttttagacctctactcttttggcccccacagcctttgctaatctcagccctgctatcaaggcttcatactcggcttcgttgtttgaagctgagaagtcaaaccgtagggctgcctagagtcgaagtccactcggggatatcattgcaacccccgctccggatccattttcgttggaggctccgtccacaaatactttccatgttgggaccgacagtaccggtgcgttcgcggttgcctcggcttcattacattcggtgatgaaatctgccaacgcttgtcactttatggagatacggggtatgtagtgtaagtcgaattgacttaactccattgcccatttgaggaaccttccagacgcttcttgcttttgcaggacttgccggagtgggtgattggtcaacagct

SEQ ID NO: 279788 - DNA, 536 bp, Cannabis indica
tttgcgaccttttgcccagtgaacatgcatcactctttatagggctataagcttggagaggaagtctttcccctctcgttacaatggatataagcagaaagatcgtgggattaatgctgagtacaaagatcgtgggatcgtgtgtatgccatatccctgcaatctgatccccaagttatagggatttcgttgatgactcacaatgcgaaagctggattcgctaagtgttggttgccctgcacggattgttgattgctttgctctgggcatgtcagcaaggcatactgctcggactgttccctctgggcagatactccaagtttattccacgtgtcaccattatgcgatgccacgtcagagtgcaaaacttgggataacaccttcaaacaagggtaaaaatttcattcacacacaaatttaaacccaattaatttttagataattcaccaataattaaagtgcctataattcaattcaaattgcattttgggcccgaacccagttcggcccgaaatacccagttgtgactataccgc

SEQ ID NO: 279789 - DNA, 655 bp, Cannabis indica
acaaataatcaaaagatgtgaatataagaaaattggtggagactacatagtcaaaataaattaaataagagagtgactatgtcatatggaacgagaagaaactcaaaaaattttctatgattgacagatttcgaaaaatcatcaaaaaatatttttaataattttttaactacataattatcattaaaataataataattattaaacggagtcaaaaaattaattaaaaatcatagaaaaatcagaaattgaattttaagcacgctggaaaaaaaaacgtcgaaaaacgacatcccacgcggccccacgcgcccccacgcgccgcctgcgcgagtgggcttcgcggctgggagtccttcttcttcctcgggcgggtctgaagtcgggtcacgcgacccggttgcctccagtcgggtctggcgtgaaattccggcaaaaaaccgcggaaaaattcgggaaattgatggttttgctcgggattgaatttctagtcaatctatgtctctaatttcggctattaattgctaaaaaaaaatgatctaaagaaagctatccaaaaaaaagaacataaaaaaattgatttggaatatcaatcttgatcaaaatacaaaattaatcattgaagaacattcataaacaattaataatgagaaat

SEQ ID NO: 279790 - DNA, 594 bp, Cannabis indica
tttatattcatttatacataacacatttttttttcactattgattagctcatattttctaactatccggtcaccgttgcccatgcagaacggagtttttccaaattgaccttgatcaaatcttatcttcgttcaaccatgtctcaagaaagattaagcggtttagctatgttatccattgaaaatgatttagttgcaaaacttgattatgcaaatttaattaatacttttgcatctaaaaatgcaagacgcataatatttaagtaatacattgaaaagtttatgtgatgatttattggtttggaatgtatttatattactagggaaatttcattaattgaccctaataaaatatctcatttcaaaatttataccctccactaatttatacaaattaattccattattttccaaaactacccaaaatacccttttattttaattttccctccctaactcttactcttctcactctctctctcttcgtccttctctcttcttcatctctgtcaaccgacccaccccccacaccacaccaatatctcaaccgacccacccccaccgactaaacccagacgccgacgacgacgaccca

SEQ ID NO: 279791 - DNA, 451 bp, Cannabis indica
ataggctaaattcaactcaacctaaccctagaattcgaaccaaactaacatcaaactctaacagctcctctaacacaatttcaccatttcaaaataagcaaaaacttaaaaaactaaagaggggttcactagggcttaccttaacttgaatctcccaaggttccttgctaaaatcaccaagattcagcagccctttatccttgcccttgctggttacgaagagagagagggaagaaaggaagcttttcctttgaatttcttattttccttctaattttctaaatgggataaatgaaataaattcatttagggaaaatccatttcccttggctgaaaacaagtggccacgtgccacacttttaggcagccacacaaccccaaacaaattaccactttgccctttaagttaacaacttaggtgtctcaaaagctaggggtaaaatggtcaatt

SEQ ID NO: 279792 - DNA, 614 bp, Cannabis indica
aatcatgcgaaattgaaaatagtgtgggatcaataagaccttactaaagctacatagtaaggtaaagaaacgatcagagccctgattagacaaaaaaaaaaaaaaccactgctaagaacttttatagagaaaataattactttttagctcttgtattttattacatttttgaattttaaaaatatattatcttaaattatattttagagtttatattgaaatatatacaccatatatttttccatgaatataactggtcacttgttataaattgtattttccttgcgttgattctaaaagtataatagacttttaaaacaccctgtcctttgagaggaaatcgctgagaaaagaaaccgagaactaatagcattaaagtttttttttatcaaaaaaaaaaaaaatagcattaaagttttagatataaaataactgggctaccaaagagtacaacaacactttatttttagtaggatagatttcaaccacacctatatagtatttatttagtattattataagaaccgattggattaaaaatcctatgtgggcacatatgtataatgtatatgctattataaagtgtgatacaaaattaagtgaccaattatgtt

SEQ ID NO: 279793 - DNA, 622 bp, Cannabis indica
ataacatatatactataatatacatatatatcatatacacataatatatacattaattacacaactatatatgttacatacctcacacatatataacatatatatacacattaatatacatgatatatattatatacacatatataacatatattatgtatgcatgtctcatataaatacataaaaataatatgagataaagtatggtaggccatttatattaattcagatgttggttgatcatatatttcattatagttctatgattcagagtatcgtttcctatttgatccctttgaattacatattcgaagttgcgatcggatctattcattaaaaagaatcgattcaatacatttcttatgtacccataggtgctatattggatttgaatcagatttcggatcaatctatattgattaactgcctccattatgttgttgctagcaaataccattatttttggtttttggatcttccaaatcattcccgcaggaggtccggacccatttttttctgatccttcgataaaaagattcattttcttcataaaaaataggaggtagaaccaataaatatttctttttcgattcatccctggagttgaatacctcattcaaga

SEQ ID NO: 279794 - DNA, 922 bp, Cannabis indica
agaatatattttattttaataatcatttcccacataaatttttgaattacatttttaaatttatatatttcgaaaattttcaattttgaaaatttaattaaagttgaaaatgaatttgttaattaattttagatcaacttaaatgaagtaattttaattaatgatttattaaaataaatagactaaaatatattgttctaattagaaaatcaataattagtttatgaattatctggatagatattttctaggtagacttttggtatttttctagatatatttaattaaataagaaaattaatatttaagttgattatgttctagacacttaaatatttgattttttttcttaagagatttaattaaatagaaaaattatatttatgttaaaaattgatttatttaattttagaccaacataaattagaataatttttccagttttattttattttacttttcaagaattttgaaaatgtatttttttaatacattggattttgaattcataatatttattggaaaattaataataaggatagaaaataaaatatttaatatttttctagatcttcctaaggtataattttataaatattaaatgaaaatttatttttagatttatctaaattagtaatcttaattaaataaagatatgttaaaataatagattaaataagtatcaaatgaaaatacaaccctttaaaataatgaaacttttagttataaggtatattcgatctccattgctggtccttacatggttaattattttcaatataacctcgagacgctagacttcgtcccccttatggatggttattcgttgaacgcatttaacaccgtaagatctcatttgataagtgttttgtaagttttcgttctctattagactctcccctaccggtgactacttagagat

SEQ ID NO: 279795 - DNA, 794 bp, Cannabis indica
ccaagcgttccactggtactacccccaactcttcgatttcactatctgaagctaacttagccagacagtccgcgtgagcgttcttttcccgggggattctttctattttgtagtccgtgaactcgtggagcagctcccggactattgttacatacgcggccattcgctcgccgcgtgtttggtattctcccgatatctggtttacgaccagctgggaatcactgtagacttccactcttttggctcctacggcttttgctaatttcagccctgctattagggcttcatattcggcctcattgttcgaagctgcgaagtcgaaccgtagggccgcctggagtcgcagtccggttggtgatatcatcgccactccggctccggacccattttcattggaggctccgtccacaaatactctccatgtggggattggcggtaccggcatattcgcggttgcctcggcttcgttgcattcagtaatgaagtccgccaaggcttggccttttatagaaattcggggaatgtagtgcaagtcaaattgacttagctccattgcccacttgaggagccttccggatgcttcaggtttttggaggacttgccggagcgggtggttggttagtatcttgatcggatgtgcttggaagtatggcctcaatttcctcgaggccatcaggaggcaaaaaaccaacttttcaatgatggggtacctcgtttcgactcctatcatgcgcttactgacatagtacacgggatgctgagttttctcttcttcccggactagggcagcgctg

SEQ ID NO: 279796 - DNA, 694 bp, Cannabis indica
ggaggttggtgggtatatgtggctattcgctggcacctgtcacacttcttcgcaaatgcgagagcatcttgtcgcaaggttggccagtaatacccttgccgcatgattttcaatgcaagggagttacctccggtatgattgccacaaatcccctcgtgtacctcgcgaagtatataaccacaatcttccccgctaatgcatttgagtagaggttgactaaaacttctgcgatacaacctttggtcatatattacataacgggcggctcgctgtcgcaactttcttgcttctattttgtcatcaggcaagagccccttttccagatatgcgacgataggagtcatccaggtgatctcctgaacagtatctatttccatgatcacttcttgatttatagttgggtgagccaatacatctaccggaatcacatcgagcaattcggcttctctagttgaggccaaacgggccagtgcgtctgcgtgtgaattttgagcacgcggtactcgagacacggttacttttttgaacttctgcattatttcgcagacaatggctaaatatttaaccaatctcccgcctcttgccagatattctccattcacctggcataccacgatttgggagtcgctaaaagcctgaaggtactcgactttcatctcgagagcgagtttcaatcctgcgattaatgcttcat

SEQ ID NO: 279797 - DNA, 558 bp, Cannabis indica
ccccactcaccggaccacctcacggaccaccccctcactcaccggaccacccacgacaccccatttcttctccactgacggaccaccccctcaccacccgaccccagacgtccagaggaaatcgcgaaaccaatctcagacgacatcgcgaactcttcgaagaagaaatcgtgaaaccccagacgaccagcagaggacatcgcgaccaccggagacgagatcgagaaaccccaattcgcgacacccccaaacgaaacccagatccaaaacaataaaaaaaggtatttttctaaacttttttgttgtttcattactttttaattgtttgtgcttcattgtaaagtaatgtagttagtttatgttcaatttgtttgatttcgtttgaatttcattgttttggtatattttctggtttttgtgcaaaatttgcgacgtatcgcgactatgttcacgacataacgcgacatcgtctagaaaaattggggattttatgataaccgtggttttcacgacgtgttagcgatatactagcgacataattagcgatattgcatttag

SEQ ID NO: 279798 - DNA, 811 bp, Cannabis indica
gcggggttatggattttgaccattttacccctagctttagaaatacctaagttatatctttaagggcattttagtcatttgctaataaatagagataggtggctgccttaggttttgacacctaatcaagttaatttcagcaaaggattaacttaatccttttgtctcatttgaagaaaaatcaaggaaaagggaaaaattagaaattgcattgttcttgaaccctctctctctctttcttgctttcggctgggacaaatcaagggagtttggtgttgattgttggatttcagcaaggatttcataggagataatcaatctaaggtaagctccattgaacccttcttagttttcaagtttttaagttaggttgaaatggtgttttgggataataggagctgttaaggtttagattacttagggttcgaattcaagggttaatttgagttgatttgagtccctagctactgtttttaatgcttgttaatgattctaagcaagcttgagttttgaaactcaagctttgagctttaatggcataatttgaattattggtttgttctgtgatttgttggttggaaatggatgtttatgcattgtataggtatactggagagtttggtaaggtttgggattgaattgaattaagggggatgatttttggttcccagcagcagaaccggaattccggttctgggagaccagtaccaaccggtcgaccggttggtgacccagaaccggattgccggttgggaaccggtctgcctgttgggggaaattccagaaccctagttttggccaattttgagat

SEQ ID NO: 279799 - DNA, 187 bp, Cannabis indica
tgaatgttgtttgtgaattctgggaaaaatagttacttttctgtctctgtaattatttttgttggatagtttggaaaattctaagcaatttacttttttatagaactcgatttcgatttaacaccttctcacacgcgcggaatggctgcaagcagccttcctgcgccatgaatcctcggcttgcatc

SEQ ID NO: 279800 - DNA, 907 bp, Cannabis indica
gacctgaacccagtcccaaacccaaaagtggacccgaacccgtaccctatgacccaaaatttaaaccaaaaccggaagttgaccgggacttgaactatgacttggacttggaatcataattgaaattggacctagatctagaatcgtaaccggaccaggacccggactccaaattagacctaaacccaaattaggagctagactcggatcccaacccaaacttggactcgggacccgaacacaaacctgaactaagacccaaacatggaaacagactagggacatagaaccagggtcgagacctagaaccgtaccccagtctcgatcccgaaccaaaatagagaaatgggacctgggacctgaaccagaactagaccgagacccgtgacactgatccagatcttgactcgggattcgggtaacggggcctggaacaaactagtagccggtgtctagatctcgaactaagactaggaccagaacccagacgaagaaccaaacccgaaccctgacctagatgtgggacccaaaattagaacttgaacaagaatcgctgaaccaggaccctagaacaagacaaggaccgtgaccaggacccggaacaagacctagaaacaaacacagacctagccgcagacccaaactaagactagaactccggcccagacacggtcgtgtaaccagacacggtcgtgtaaccagaactgagacccggacctggacctaaatcaaggacctgatcccaaacacaggcttggacttagatagggatccagattcgaacctggactcagaccaagacccagactaggatcgaaatgctagacctagatctagaccgagatcttgacccagacccaaacttggacccgcactcgggacccgaacttggacctggacccgaacc

SEQ ID NO: 279801 - DNA, 946 bp, Cannabis indica
gaacttcagagctcttctggctagtttcctttggcctcttcaagttttttcttcagtatatccttcaaggttttgttgactgcttcaacttgaccatttgcttgaggatgcgccactgcggagaaacttttgatgataccatggtttgcacagaaatcagtaaaggattggctgccgaattgcttgccattgtctcaaactatcttgtatggtagtccgaatcggcaaattatgttcttcacaataaagtcttgaactttctttgatgtaatggttgcgagtggttcagcttcagtccacttagtgaagtaatcagccgctaccactgcatactgcactccacctttacctttgggtaattgtccgataaggtcaatcccccaaatggcgaagggcgacggactttccatctgtgttaactcattgggtggagctattggtatctttgaaaatctctggcatttgtcacacttcttaatatgggcttttgaatcttcaatcatcgtaggccagaagtaaccttgccttagaattttcttagataagctctgtctggcagcatgatttccacagaatccgttgtgaacttcagataagagtcgttaagcttcgtcttgagtgacacatttgagcaatggcatcgagaatcctcttttgtacataattccctctactatgatatactgtgcagctttcctcctcattttccgagcttcatattggttatctgggagtttcctagagtcgaggtaggctgctattggtgtcatccaatttggggatgtatccatattttgcccgatttgatctttaaacattttgtttaccaatctttggtatgtagcaccagcgttttccagaccaaacgacattactttgtagaaatatagacccatatctgttcagaaacttgtatgttcttggtctggtggatgcattttgattt

SEQ ID NO: 279802 - DNA, 982 bp, Cannabis indica
taacatacatatactatataatagagtgtatttatttaattttaatatactaattattagttgtagttaataataataaagtttgtttggtaaaagaagatgaactgtgcaatatattatatatatggactgtactcactcacccaagattagttggattcttaaaatctcatctaaaagattacattaaatatataatattcttatatataaaaatatatatttatatatatatatatatgacgtttttggaaagattgacccaaggccctacttataattaattccttcaatatatatatatatatatactagaagagagttacgtggcgagccacgtaaatattagttttattttaagttctaggggtttttgtttaagaatttagtgactaattgtaaattatgttataaacgatatgttttataaaactaattgttaagaatgtcataattgtgtatataaacctataatatacacattgttattcaaatgttttatgttataaacgattttttttatatagagtttaaattttatattgatgattctaatttagggtgggtattggtgtagtttttttaatttaaaaaagattgtttaattttttgggtttaattattgggtttaaacgtttaaaaaaagattgtttaattttttgggtttaaaaaaaaatcgtgtaagcctaatattttaatcgtgtaacaatattaatatttgttaattttttatttatttgttaacgtttaactaataaaaaaaatatcaaacattggagatatacggtttgttatgttagagagatatgtggctaggatgattttttttaatttaaaaaaagattgtttaattttttggatttaattatttggttaaataaaagattgtttaattttttggtttaattatttatatatttttgaaagtttaacgggagatcaaacctatcgttaaatttaacagaatattcttttattttta

SEQ ID NO: 279803 - DNA, 628 bp, Cannabis indica
atttagggtgggtattggtgtagttttttaaatttaaaaaagattgtttaattttttgggtttaattattggatttaaacgtttaaaaaaagattgtttaattttttgggtttaaaaaaaaatcgtgtaagcctaatctgttaagctaatcgtgtaacaatattaatatttgttaattttttatttatttgttaacgtttaactaataaaaaaaatatcaaacattggagatatacggtttgttatgttagagagatatgtggctaggatgattttttttaatttaaaaaaagattgtttaattttttggatttaattatttggtttaaacgtttaaaaaaagattgtttaattttttgggtttaattatttatatatttttgaaagttaacgggagatcaaacctatcgttaaatttaacagaatattcttttatttttaaagtatattctgttaaaccaagaaatgccgttagataggcacttttaatatataaagatatatagtctatttatgttatttttgcatatatatataaatatatatatatatataagttaaatcagaaacaaattacaaatccaaaaccgattttttgtgtggttagtacctattgggcaatattaat

SEQ ID NO: 279804 - DNA, 543 bp, Cannabis indica
attagttttggcatttaaatggttagaattggaaaattggcatttttgggaaaatagaaataaaattgtagaaactgcaaaacccaagtgaggcccaatcacaccatggccggccccttctttgtgtttcccaattattattttcaattttttaattcccaagtaattgctaacctaaacctagcagttatctataaatggaaagtggtggatcacaccaaataagccagttaatcaattactctgtaattaaggaaactgtttatcgttttagaagttcatattaaggttgttaaatcaacatacttgtgagtagatctaagatcctggtaaaataaattccaacacaaccatgctggacagcatgaagtatcaagctttgttgttagcattctgccaacgctcgaacttttctttaacaactttggttgcattgtcacccggctgttcaggagacggcttagtcaacacaaatagggcactttcaccaatgagagcaatattaatgttctctttccatttagggaagttagatccatttag

SEQ ID NO: 279805 - DNA, 573 bp, Cannabis indica
gagtccaaggagaagaagtcatttttaatgtgttaaaggcgatgacttacccgaaggcaagtgataactgttactttgttgatttgattgatacaattgtgagtgagaagaaattgatagatgaccctttagaactgagtttaattgaagatgatttgacggagctagaggaaaaagaagcaatgggttatgttaaatggcttgattcttatgggccattaaacagaaagtactatgaagaattgggagtagtaccaagagagcttgcgccatcaactgaaaaacctgcagaacttgaattgaaggtgcttcctagtcacttgaggtatgagttcttgggaaaagataagaagctgccagttatagtgtcagcctcactttctaatgtggaaacagatagattgctcagagtacttcgggcgcacagcaaggctattgcatggacacttggtgatgtcaagggaattagtccctcaactgtgatgcatcgaattctgatggaagaaaatgctaaacctgttggaaattattttaccaggatcttagatctactgacaagtatgttgattaaca

SEQ ID NO: 279806 - DNA, 663 bp, Cannabis indica
agcatgaacaattattatgttttttttaattggtatttattaagataacaatgtaactagtttcttttattggtatgtttatgttcttttattagttcataacaattttaggccttcctttcatgccacaaattataataattatctaaacataaaatatcacaaattttaatgtttaaaaaagtctaacatgaattcaataacaatacataacagtacaacacataacaatacgactaaattaaaaatttatttttaacatcggtaggtgcaagtgcttctgttgtgccccttggcactacatttgccacaatttcgtggtatgataatcctttcaccattacaagcagttcagtttgagttaattcttccaaactttttcttcttgggttgccctactggttgcttctcaacaggcactccaattgtcatgttctttatgtcatcaggcaattcccaatcatcctcgtcaccaactggaataattgtaacttcatatgcgctcctccaatattctattgtgtaatatggcgagcatagtgcgtacatgctaatacttcgttgctgagctacaacacatgcatgaggacaaggaaacttcatgcactggaataagccgcaagtgcaagtctgttcctggaagtccactatgccaccggtctc

SEQ ID NO: 279807 - DNA, 508 bp, Cannabis indica
aaaatcataacaatacataaatgataaacaatgaatataactgaaaccggttttatctgtcaaaccaaaaaaaaatactaacatatataatcaaaacaacacacaatgtaccataattattcaaaaaaaaaaaatacaagtgtaaaaaccattttcgaacttagaaaaaaaataataaaaacaaaattaaaataaaagtaatatcataaatggaccaaccccattatagtaccctcaaaacctgtaaaactaattttaaatctgtgaatcttgtgaaaccagtttcgaagctgtgaaaaatccataaaaataaactaaaatcaaatctctcatgaattttgttttttcatcagacaccattcttattcattgctttgtgaaaagaaaaataaatggccctacattatttgggaaccaaaaaatcatagcagttactatgttgatgcctaggaggaattcaaacctcaagttttttagtttgttaagggcaaaccaggtgcctaactgt

SEQ ID NO: 279808 - DNA, 768 bp, Cannabis indica
ttcttcttatttcagccacaactgcttgaactcggatgctatcttagcgagttgagtcggatagttggacagaagggtggagatagtccaaaatgatgatgaagctcagaatcttcttttaattttgaattaattgttttagtttaagaacaatttggatttcaatttcatttttttagtttgagattttattccctatttttcatattgttgacaattcctttaattttggaagatttttagaataaagttttctattttggaaactgcatatatgaattgagcttcatttattttatcttgtgtatgtcaataccaattatatttttatgttataatgattgtatgtgtttttattattgatacaaattctatagtatcgtaaactcttcaaagagttaatactacataaacacttagaatttcttttttatgtttatgaataattgttaattctaaaataattattaagaatttgtttaataaaaagatcttttgatctgataggggtggaaaagttaaaaataatatgcagttcaacgatcttttatgtctattgaactctagattatattcataactccacatgatctttataacacttagagaatcgtgatctctatatcccttaggggtggactatactactgaaatatgtagttcattttgaactctggactatattcaatacaccataatactctttgtcacacatattttttaaacatggatgtaatataattagcaattatcagaataaattcttga

SEQ ID NO: 279809 - DNA, 602 bp, Cannabis indica
gatggagttcagggaagcacaagtggcgaaccgcttaggcgcgcatcgggtgagctgagaagcgaactcgccggtcatctccgcggcaaaaggagccaaggtgggccctaggaagcgacggaaccagtccgataaggggtccagattaaggtcccacggatcctggtactccgggtggttgatgctcgcctcaacctccgcccgcagaatcctcctaagggcttccacttcggcgtacccccgggagtactcgtccatagcatagttatgcttggctatccgaagctcttgcctcacctcatcccccggaaccggggtaagcacgatgttgggaggagcaggattttcttccatgggggagaccccgccgtcaagaccatgagcaggagtgtcggctctccgaggcttcttgggctcatcctgggcaatcattttgcccttgcgcttacgaatcagagccacctcaggctcctcttcgccttcctcagcttcctccggaagggctcggggctctcccgtaccctcagcaacttcctccgagaagtcccactgcttcccttggccttctcccggaagcacctcctcgtcatccactaagtcaa

SEQ ID NO: 279810 - DNA, 535 bp, Cannabis indica
aacccaaaaaattcccccatgacctgactcaaaactcaaccaaactttaccaaactctccagtacacctaaacaatgcatacacaataaaacccagccagaatttcacagaacaaaccaacaaatctcaacttgccattaaagctcaaagctttgaactctaaacttaaaattgcataaaaccatcaacaccaattaaaaccagctgcaaggagttaaaatcaactcaacaagaccctaaaattcgaaccctaggcatatgaaaacctaacagctcctattactccaaaacaccatttcaacctaacttaaaagcttgaaaataaataaccaatggtctagggctttacctcactagcaatagcttgaatccttgctgaaaatccaaggaaatgaaaggaagaaatctggtttttgcctttgaattgccccagccgaaagcaagagagagagaggaaagcttgaacttttgattttttaacttttccttatttttctaaaaatgagaaaaggaatttctcaacctaggcttggct

SEQ ID NO: 279811 - DNA, 216 bp, Cannabis indica
ccaaaattgggaaactaggtttgctaaaatgcaagctagaatagaggagcaagataatgagattcagagattgaggcagcagggtgctcctgcggtgccggtgccggaagttcctgtggcacctgcccctgtttctcaagccgtccggttttcgtgggaggtccgaacgtcatgaaagccgaacagtggctaacggtaatcacaagaatattgaac

SEQ ID NO: 279812 - DNA, 1062 bp, Cannabis indica
aaaggcctcctagggcaaaatatgaaggtatacgtggacgacatgctagtcaagtcaaaagcgtgcactagccacgcagacgacctagaagaatgcttcgaagtagtccggagatacggaatgaaactcaacccaaagaagtgcacctttggggttaagtcagaaaagtttctgggcttcatcttcagtcagaggggaattgaggcaaatccagaaaaaattcaagctctcctgaacatgccttccccaaagaaacacaaagatgtccagagtctaaccggaaaggttgctaccctgagccgttttatctcccggtccacagataaatgcattcccttcttcaacattttgaagaagtgttagaaattcaaatggtacgacgaatgcgaagaggcattcaaaaagctgaaagagcacatggccaagccaccaatcctatcaaacccgttctcgaagaggacttgttcctatacttggccgtctccgagaatgcggttagcgcagccttagtacgagaagaggagaaaactcagcatcccgtgtactatgtcagcaagcgcatgataggagcggagacgcgatacaccgtgattgaaaagctagttttttgcctcctgatggcctcgagaaagctgagaccctacttccaagctcacccaatcaaggtattaaccaaccatccgctccggcaagtcctacaaaagccggaggcgtccggaaggctcctcaaatgggcaatggagttaagcaaatttgacctgcactacgtcccacgcatttccataaaggggcatgcactagcagacttcatcacagagtgcaatgaagctgaagctaccgcaaacatacccacaccatcagttccggcgtggaaggtatttgtagacggagcctccaacgagaatggatccggagcgggggtcgcaatgatatccccaaacggacttcgactccaagcagccctacggtttgacttctcagcttctaacaatgaggccgaatacgaagccttgatagcagggctgagattagcaaaaaacgtgggggctaaaagagtagaag

SEQ ID NO: 279813 - DNA, 893 bp, Cannabis indica
tccagctggttccggccttcggacagctatctcggagatgatgctgccagcataaaattcggaactttgctagggccgaattagagagtcagggtaggactagcttatttgccatatcttgtgttggtggtttcccacggatgttctaacacttgctttcttttgttgtagcaggtatttccatggacgccattttggccgaacttgctggggttcacactcctgaggctcctcctgcctttacttcttccccgatggcccctgctttaaagatttcttccagcgctcctccagacactattgatttagtggatgacgaggaggtgctgccgggagaaagtcaagaaaagcaatggggcttttctgaggaagttaaagaaggtgcaggagggctccgggctcttcctgaggaagttgaagaaggtgaagaagagcaagaaattgctctgattcgcaagcgtaaaggcaaaatgattgcccaggaggagcccaagcggcctcggagggctgatactccggcccacggtcttgatggtggggtctctcccatggaagagcatactgcccctcccaacattgtgctgactccggttcctggagacgaggcgaggcaggagctccggatagctaagcataactacgccatggatgaatactcccgggggtttgctgaggtggaagcccttaggagggttctgcgggttgaggtgcaagacaccatcaacaacccggagtaccaggatccgtgggacctaaatttggaccccctatcggactggttccgtcgcttccttgggcccaccttggctccctttgctgcggagatgactggcgagtttgctataatttataaacactacgcaagtatacgcaatcaagtagtaaatctcaca

SEQ ID NO: 279814 - DNA, 533 bp, Cannabis indica
caaggattctggggagaagcagctttaacagctgtttatttaatcaacagaagtccatccagtgcaaatggattcaagactcctgaagaaaaatggtctggtaaacctcctaatctttctaatcttagagtatttggttgtgcagcatatgcacaccaaagtgttgggaaattagaacctagagctatgaaatgtgtttttctgggatatccagaaggagttaaaggctataggctttgggtttgggaacaaaggggatttaaaaccattaatagcagggatgtaatatttaaggaagatatttttccatgtttgcctatttcatctaaccctagtgcaggtacaaaagacactgaaaatgcaggtaacactgcaaatgaaggaactggctctattcaggtggaacaaacagtgaacacacctgaacagaaccaaggagatcaggttcaggtggaacctggggaccaggttcaggtggaacctgatgatgataacactgacattattgatgaagggactcaagaggacttggg

SEQ ID NO: 279815 - DNA, 470 bp, Cannabis indica
aataattaaattcataaataataataaaataatagaaattagtgctaattgccttttctaatccaaattactaaggcggtcgttacaattatccccccgttaaaaggatttcgtcctcgaaatctaacttgaatagctctggatatgctgagtcctcatatcagactccaattcccaggtggcttcctccaccttaccgatcctccagagcacttaagcagaacaatagtcttgttccgaatttgaataggttgttcttcataggataagtctaattgcagttcaagggcttcataactcaagagatgagtcgggtctgacacgtatttccttaacatggaaatatgaaatatgtcatgaacagccgacaatgctggtggtaaggctagccgatacgctacctgcccgaccttctcaagtatctgaaatggcccaatgaacctagggcttaacttacccttcttcccgaa

SEQ ID NO: 279816 - DNA, 661 bp, Cannabis indica
taattttttatctttcattttatttttatttaaaatttagttttaattatatttttttatttcaaatttacataaaaaaaatattttaattaaatttatttttaaaacaataattatacttataaaaacctataacatattcaacttataataattttataataatcactctgaaaataattaaaatatcacgagttcaatactttagaagtaatattttcttttcttttctttacttatatttaatttaagatttcaattaatttaatagttttaaaattctattatattatattaattaattttatctttcaagattataatgtttaatgtatttaaaatttttagatataaaattaattatttacatcaattacattatttataaaatcatgaatgaactagtaaataatatacattcatattatgcttattcttcaacttagtttaaggtagggttctgaaaaaagcccaaccagcagactggttcctaaccggaagatcggttcctggggatcaaccggtcgaccggttgttacaggctcccttgaaccagtcgaccggttcagtgaagggaaccccaaaaatgtctttcacaactcaaatcgagcccaaacttaagctcagaaattaaaaacaccattagagagccaacttaagc

SEQ ID NO: 279817 - DNA, 1009 bp, Cannabis indica
aaaaatatatataattttaaatactttgtaccaattttttattttgcttttccagcaaaaatatattattaattgtaacatttggcatacgaatcttattgaaaaatgtgtacgattcatttttctagcaatctggctaaaaacaaaaagaaagaaacatcgtaggagatatcaccaaaagaagaaaaggataaaagagtacgtattttacacaaagacactgaaacctaaggataatgatagtgaattccatgacagtgagtagtaaattttccccaaacccaaactacttatgagaattcttatacttctgatttagcacaagatcattaatggatttattgtttgttgacattgactatggcagtgggttttaacaacatggacggatgatgaatgcaaattaatcatggagaattgtttcaaggcactcccagaaggaggtaagttgatagcttgtgaaccggtattgccaaatgaaaccgatgacagtcaccgaactcgggctctcctagaaggagacatcttcgtcatgacaatctatagggccaaaggaaagcacaggacagaagatgagttccgaaagctcggcctcgctgccggtttccctaatttccgagctttctatattgattatttctacactgtcttagagtttcagaagtagtagtagagaagtaatgaatgataacttatttagaaataatggtagagggaataaaatgtaactttctctagaaattcataacaaaattataaagattgtgatttttgttacatttgaatttggaatttgttttgccacacttaaagtcataatttattatgtactttcaggtcataaatttgtgtacttgagtttacggttaattaaaaaactatttaaaattaggctgtttggctgtgttttcagtttttagttttcaaaaacagtttttaaaagtgagaacagaaaacagttttttatcattttaaaaaccaaatagtgtttggctaatattttttaaaa

SEQ ID NO: 279818 - DNA, 525 bp, Cannabis indica
cgtggaacatatagagcgtgttgaccaaaagtcaatcacccatttattttgatgataaacaaatatttgattattatttgttactaatcttttcttgatcattttgcaagcaagttcacagagtatctatatttgctcggtaaagtcaaacataatcaaagaagtagattcaacaagtatataaactacttcatacttcataagagcaaaagattcatcaagggatcaacaactcaagaccctattcaaaagaggtcttcaaaagtccaaagtcaaaagtcaacctaaagtcaaagtcaactctcgggaaaagtcaactttggatcaaaacatgcaaatcaagctaggaagctcatctacatcaagactacaaacaatcaaatggtataaatttgctttagtcttgttaaagtgatttgcatagtacactaggatttataagttcaaaagtttggctcactaacttgtgcgacaagttatttcacaaaaaatgatatctaaattttctaaattgatttttaagat

SEQ ID NO: 279819 - DNA, 516 bp, Cannabis indica
cagaagtagccttgccttaattttctttgataagctctgtccggctgcgtgatttccacagaatccgtcgtgaacttcaaatagaagtcgtgcagcttcatcttgtgtgacacatttgagtaatggcatcgagaatcctcttccgttcatgaccccttctactatgatgtaccgtgcggcctttcttctcattttctgagcttcatttcggttattttggagttccccattgttaaggtaggacgctattggtgtcatccagtttggggatgtgtcgatcattttgatttcttccgtgccagtgatgctaggctcttcaaggatctggatagggaccaagtttgccttgtcacttatattgctgctttccaatcgagccaatgcgtttgcagttgtattttattctcttggaatttgtctgagaccgtagcttttgaattgtgcgagcaggtcatgtatttttctcagatatgctatcatttttttctccctgagcctcgtattcgccggatacat

SEQ ID NO: 279820 - DNA, 524 bp, Cannabis indica
gaaagttcttgggtcccgaagctgttcagagaacaagtgaggcagttgacaagattagagtgcgaatgctcgcggcttagagtagacagaagagttatgctgatccaaagcgttgggatattgatttcaagatcggagacatggtatttcttcgaatatttctgatgaacggaattaaacacttttggaaaaaaggaaagctcagcctgaggttcattggaccttttgaaatccttgagaggatagggcgagtggcgtacaagttggctatgcccctagcggtggcagctgtacacgatgtgtttcatgtttcaatgcttcggaaatatgtcttagactcgtcaaatattctgagctatgaagcattggaactccagctagacttgtcatacgaggaacaaccgatgcagatactcgatagaagagagaaagtcttgagaagcaagacagtggcgctggtgaaagtactgtgtgttaggttttatgccctaaataaaactccatttcaatgtaatctattttat

SEQ ID NO: 279821 - DNA, 667 bp, Cannabis indica
ggatacactaagaaaagactcgaagatgccaaaggaaattggccagaggcttcagtttggccatgcctcttgccaaagctggaagagtctcaaattcaattcttcctactccatgggaggtgatctacgtaccaattggagctttaactacctttataatagggtcactgcgaaaatctccctctttcgccaacagctattggttgcgatcgttcctcaggtgcttcaatttcacaaggcgattgaagacattggcattgttggccatttcatcatcgagtggcctagttgggtgtgcaggagatttctcctgaatgacaacaaagtcacctcttgagtgatcgccttaatcatagttactcatacaacagcagcaactatttacttcaaactattcctcatcggggttgcatgtgcgaagggagtttaaatgatttctcaagttcaactcttctccgtgcacttgcaaaataatcgtactacatctcgtcaggtccttgggaaagtacgttaaaaaatcacctcaatcatccaaaaaatatttcttgctgtgaaatggtttgtttgtcctcacccatcaaacttcaaaccaaccattattgttgtaaagactgcttagtttaatttggaaattagaagttaatcatgtttaattatgaaaattatt

SEQ ID NO: 279822 - DNA, 592 bp, Cannabis indica
gcagcttggccagttcttcctcaatatttttcccttgtactttcccctaactccctttttctgaccaccacttgaacctgcatcagccattctacaaatacaagctacgaataattaattaatcatactattgacgaaagaggcatgtatttcattaaatcaacagtggcgtctatattacaatacttgaaagtctacaagtcatcataatcatcatcatcatcattaacatctacattattttcattatcactatcactagtgtcttcatcatcactataaacaatgaagccatctaaatcttcacggttagactgctcatgacgacccatgttggtcacttgaattgggtcaacatcatcacgaacatattgaacatcatccaactgtggaagttgaacgactaaagaaattcctgaagagtttctttcttgtatagtcgtggtctcatcatcatcctcatccgaaaagtcccagacattgcgaggggtgtaaaaattgacaaggttccaatcaactccattcttcaagtcaggaatgtaatatattaattttgcttgggatgcaagtatgaatggttcattttggtacc

SEQ ID NO: 279823 - DNA, 692 bp, Cannabis indica
taacaatggggcaaaatgaccattttgccccttcacattaaaataacataaataacactaaagggggtattttgggaaattctaaattcccggccattcccgagattcccaaagtctaataaaccgtcccgatctactaacatactaagttttgattttactgagccaaacaacgagttccatgttaccgggcactggaaatgcaaacttatgaaaatcaagaaatgacataaaatgcatctcagaattcaagaataacagcataataattatttaaataactataaataattttccataattaaacatgattaactactaatttccaaattaaactaagcggtctttacatcaacacccttaactgaacttacaaagaagaatcagcggtttgtgtggtccgataagtgcgaagctagtttttaggagctgaaacagaggttgattaccgctccaatgctagctttgccttcagacaaagagaaatttgtagtttattgcgatgcatccagacagggtctggggtgtgtgctaatgcaagccgatcgggttatcgcttatgtctcccgtcagtcaaaggattatgaacagcgatacccgactcatgatctagagatggtcgcggtgttttttgcattgaagatctggtggcattacctttatggagaaaggtgtgaaatctataccgacca

SEQ ID NO: 279824 - DNA, 643 bp, Cannabis indica
gagagaaagttagatcaaccgaaaatgtcaggaagaggaaaaggaggaaagggtttgggaaagggaggacccaagaggcatcgcaaggttctcagggacaacatccagggcatcaccaagcccgcgattcgccgtttggccagacgtggcggagttaagcgtatcagcggtctcatctacgaggagactcgcggtgtactcaagatctttctcgagaacgttatccgtgacgccgttacttacactgagcacgctcggcggaagaccgtcaccgccatggacgtcgtctatgctttgaagagacaaggccgtactctatacggattcggaggttgatgagtgtgagtcagtctatgctttaatctttttagggtttataattattgtttttgagatttgcaattgggattaagcttttggaaatgctcagatttcaatcttgagttcttgtacattgaatatgaaatgcctatatgaaatgtccatatatatgaaaataatccgtatcagaaaagaaagctttggagcacaagaaggagatcgctaaacgattgggtcgtcctcttattcagacgaattcttacgaggtaatcatggggttttggttttgaacacttttatgtcataattattatatgggttt

SEQ ID NO: 279825 - DNA, 645 bp, Cannabis indica
tctccaagaacataatcaaccatggcttcgttctgtctgattttggggacatgaacgacgtcaggaaggtccttcaggatcttactgcggagaggcagctttaccaggaggctgctgagcgccgggaggctgctgccaaggccaatgaggaggaggccaagcggagggaagcccaggcggaggccatgatccgggatgaggcccagcggagggacaggctggaggccaagcatcaagaggagctgagggcggaaggtgaggccgctgcaaaggccaagcgggagctccgggaggccagggaagccttggacgagatggttgccaaggtgagatccttagaggaaactcaccaagcaaacttagagtccagggccgctctagccgcggagctgaaggagctcagggacttcaaggaacaagcctccaagaaggcaaaaagagccgagcttctttctcccgtttcctgcggccggtgccctaagcgcttcgatgatggagtcttcatggcttggtctaccaacgaccaaaatatcaagcttaccttctaccccaaacctgaggaaatgattgccaaatttcgggagaagaagaagaagcttgatgccatggtagaggcgcgtatcggacctcgccttcctccgcgta

SEQ ID NO: 279826 - DNA, 884 bp, Cannabis indica
ggttcatctataaaggacaacacacaagatgagtgtttggtcgagatatcgaacgttaaaatgggcaaatatgccaacgaggagtactcaacagattaaagaataagaatattcaacgaaaggtcaaaactaaggaagtttggactttttcgagaaatagggcaaaaaaatttcatgaagcttacaataagcaagatgaaagacaggcattatgcagttcaaaaagcaagcattacgaacgatgaaatcgcatgaaccgtaacaaaggaaaattgcagagtttctaaatttacggtttcctacatattttctacaacaaaatcaaaagtacattcagagagaaaatgtgcaaagtaaccataaaggaaatcgagaacttactcaaggaatcaaacgtctgggttaggttacttcaagccaaacgagcagttttgatgaaagcacttcagcaaacttgaagcaaaaaacctctcttttcgctctgaacttacttagcaaggaaggttggtgaacatgagtttttggacaaatgctcactagtatttataggcaaacaacgaaaaggggtaatcatttcaaaagaaactcaaatgcctcggttccccctaaaagcgaatatgggaaatcaaaagtaatcaagtatagccgtcaaccgtggtgagagaaaatcagattttgaaatattaattgtcagagcatttattagccgaaaaccgaagggacgcccagtcagcctcacatcgagtcgcgaacaggcgcgcctgacacgtgtcacccattcaaatgcaaagacacctcagatgaagtctacacgcaacttcgaaaatcccgtacagacttgaggggcaaatgttatcctaatttttgcactctgacgtggcatc

SEQ ID NO: 279827 - DNA, 471 bp, Cannabis indica
taatatgctcatcatactatttaatagatatgtcattcacatacgtctgtatgacacagacctaattattataccaccatgcccatttatgtctacgtggcgtagacctatgtgttgcgctcacacatctatttaaatctacatgacgtagatccacgtgttgctctcacacgtctattagagagggagagagggttcggttgagagggagaagccaccagaaaattacatttcatttcatcaaaaatcaattttagtcaaacatagtaattatgggtgaaatgaccaaaatgcccttagggcttaaatacccacatacaccctcacaagggtaaaatagtcattcaatattcaattaatttcaaataaatttcagattatcactcatcaaataaaatgctaaataatcaatccaatttacatttcgaggccgaacccggttcggcccgaaattcccggttgtgactatac

SEQ ID NO: 279828 - DNA, 510 bp, Cannabis indica
acacaagagatttgtacgtggtatcactgttctttcaaacactactagtccacggggccacgcccagagaattaaatcaattagtaaagcatcaaagattacaaaagcaaatgacttaaacaaatttagactccatctgtgatttgccgcaaccttttgtaatccatcttgctaatctgatctctgaaacacaccaagtagtgaactccctttagctattgatgtgtgcttactttgtaacgtatccgcttcaagcctccattgacctctcacacccatggactaatggctcttatacatgagtacgccactctagctgctttatggactgatgactgaacctacagactaacacaagtgtttccagcgtgctttgtcctcactcacacgcttcctgggaaaacttcccaggaggtcacccatcctgaatttgccccaggttaagcatgcttaactgtggagttctttcgagatggggctcccaaaaaacaagatgcaccttgttgatat

SEQ ID NO: 279829 - DNA, 1008 bp, Cannabis indica
ttaatttctgtaaaaaaaaaacaacatttacagttgagatcttctttattttagtgttttaattttttaaaaaaaagaaaaaaaaaataaaaagaaacaatttaaagttttttatggcattcctcattactttttcccatatttgtaagtttttttaaaaaaatgccatatttagggtaattaagtttttatgccatatatatcaaaacatatattcattttcccatattcttgtaaatagcccctacaaaaatatagtgaaaaaaagttagtttttatttttatgggcatacaatatattcttacaaaatatggtaataactttacagaaaagaaaattaaaaaaaaaaaaaagagaaccccaacaaaataccataaataaagttaacaaaatactctaagaacaaatgtcgctgaaaaagtcggcagagtagtcatcgccatcataaaaatcaccaaaatttatcatcgtcctcgaaaaaatcatcaaaatttctcatcaacgttggaaagtcattagtattgtcatcatcgtcgaaaagtcattgggttttaaactcaggattcttaatttcagagaaaatgcaatgtattcccccatcaggaaaaattaattagtgcgatttcctcttggcagacgaatcttgaacctccctgtcaaaacaattaccaaacagaacatgagcaggttggctgccattgctgcggaaccaattgaagtccaagaactgaagatctatcatatttctctcaaccacttctttaaatttaaaatatggggctccattcgatccaaattatttctcggctttgcgtttcctagcttaggtatgagagtttagcttcaattccaatacgatcgattatcatatatgtgtttcacttgtgggagtattggacacgactccggtacttgtatggaggctagggaaatagttctcaatgaagcgagttaagagataccatcttatggatcatggcctcaagtggatgttaggttttatgccc

SEQ ID NO: 279830 - DNA, 904 bp, Cannabis indica
aagaaccgtttgtttttgttggttcggttcagggatctcgggtcccagtgatttcggccttatcagctaaagaattgttgtgtgatggatgtctagggtttctggccgtggtagttgataccattcggccagatactgttcggccagaagacatcaaggtggttcgggaatttctagatgtttttcctgaagaacttctgggtttaccacctcagcgggaaattgatttcataattgacttggcaccgggagcggaaccgatttccaaggctccttacagaatggctccagcagaacttaaagaattaaaaattcaacttcagggattgcttgacttagggtttacccgacccagtgtgtcaccctggggagctccagtattttttgttaagaagaaagatggaactttgcggatgtgcattgactaccgggaattgaataagctaacaatcaagaataaatatcctttacctaggatagacgatctttttgatcaacttcaggggaagactgtcttttcaaagattgatctccgatcgggctatcatcagttgagaatccgagaggaggatatcccaaagacagctttccgcactaggtatggacattacgaatttctggttatgtcttttggactgaccaatgctcctgcagctttcatggacttgatgaatagggtattcaaggatttcctcgatatttgcgttattgtatttattgacgacatccttgtatactctcaatcagaagaggagcacgagcaacatctccggatgattctacaacgacttcgagaacataagttatatgccaaattcaagaagtgcgaattttggctgtcacaggtgtcttttctagggcacattgttagcaaagaagggatcaaagtggatccaggaaagat

SEQ ID NO: 279831 - DNA, 839 bp, Cannabis indica
tattgagttttggttgttgtgacataggaccgggatcgtctagcttgttttccactcaagtcggcccgtacgcttgagttttgaattaaggtaagtgttgacttcgcttttagccaacgacaatgagtctttttgataagcgataaacgatatgtcgtaatgagaatatataataaagcaataacaagacacagaaattttatagaggttcagccccgagcagttcggtaatagcctaatcctcgttatttgtattgacttaagaacaaggaagaagtttccttttcttatagctcttacaatagtatctctgaatatataattcttagatagccttagcttactgcgtttcggcttataattttctcgggccctttgcccagtgaacattcctcactatttatagggctggaaacttgaggaggaagagtttcctctctcgttacaatgcgcataaacagaaagatcgtgtgatcaatgctgaatgcaaggatcgtgggattgaggctgaatacaccgatagtgggatcgtgtgtgtgccacatccacgtaagttgatccctgagttgtagggattgagctggtgactcatgatgcgttaagctgaattcgctaagtgttgatcattctgcacggctcgttgaatatttcattctggatgtgccagcgaggcatcctgctcggcatatcgttccgagcaggggctccaagtggagtccacgtgtcaccattctcgtgatgccacgtcagagtgccagatttgggataacatttgccccccaaatctgtacgggacctccgaggttgcgtatagagttattccgagctgactctgcctt

SEQ ID NO: 279832 - DNA, 624 bp, Cannabis indica
gatccttgtatgtcacatgtttggttgtttccaagtataactctgcccccatttgatttcctgaaatcaaacataaagtttttattgttagtcatgtggaaagtgcaaccagagtcaaggatccattcatctttgatggatggtccaacttggtacacttcaccactttcatatccatctgtaacattagcatcatgcatatcagatttatttttagagttagagtatttagaatctccctgtccatgtggtttttgtttgttatttcttttcaagaagtaacaatctcttttaaagtgcccaggtttaccacaattgtaacaaccattagtttcatcaggatttctagtgttagaattagatctgcctctttgatatcctcctggtttgtttgaacctctgccttggcttctacctctgttattccaaggttttcttggacctggtctgcctctactcaaattaacttctccatttgagtttccacctttctctgttctcatctctaagtctttagatttgagtgcagaaatcacctcctctagggttatagatgtccttccatactttatagcagtttttacttccctgtaggattcaggtagagagtttaagatgattata

SEQ ID NO: 279833 - DNA, 785 bp, Cannabis indica
tttacgggttccgggcccaccctgcctatgaacgggtggtcccgtataataggcaaactcatgttaaggagtatcgccatcattttttcttctgttctggtttccgggcagtggaccatctggagctcctcactgagtgggtcaggattccttcttacgaacggaccgcacctactcaggtctttcttcagagagcccaggcctttgcctcttatgaccgggctgatcttgacatcgggggcctggttactacggagaactgcaggaaggcaaaactcatccttctgcaccaatccgtggaggactctaacctttcccgggttatctgtcccaacgtgagggcgccggtcgcggagaagaccttccaggatgagatcattaccactgccgagaagaagtaccaggaatatctctaccggaaggctcaggagaaggcatactctaaggcctaggcagcttccgggaggccacttcgcgtggggagcccgatcgagagaagaagccaggcgatcgccgggaagccccttcatattggggactcagcggagagaagggctcccaggccacagccttcggctccggtggtaagtctcctttagcagttcattatgtcccttctgttggcgagtattccagtcttaggcctgtagggttcgatgagcatctttataggtttaggatgccctcgacccggtggggtgaccatttgaaggagttttatttttccaacctaggaaatttcctaggtcggtcccggatgggttctggccctccggagcccgtcc

SEQ ID NO: 279834 - DNA, 506 bp, Cannabis indica
ttacaggcttacttatctgcacatagggggtaaataaggggtgagctgcaaagcccagtaaggaaaaacaaaatactatgtaccagcattcacacatcatagcacaaacatatacatcaaacatacaacaaactaatcataagtataaatagaggcagccacacaaatactgaaataccacacactcacactccagcttccatacaaatctggagtgtcttacgttcttaaccagaacgcagtaccaataaccagtgcacccttacgtacactgcctcacttaccacatcaccatacatgtgtggtttccaaccacttccaagtacctggaacatgattaaacagccatatacaatccatcgacaaaacactatttcaccgaaactatcacattccacagtttcaatacaatttattcaagcagtcatactaggtactcaaaccatataaaaagcaagtataaagtataattatttttccttacctcaactccgctgtaattaact

SEQ ID NO: 279835 - DNA, 505 bp, Cannabis indica
atatataaaaaaaaaatcaattataaatattttggataaaaattttccctaaaaaaattgttagaaagtactagtaatggtgtcgagtataatatattaagtgtagtttgatatgaagttacatatattttagtctaataattattaattaattatgtaacaatactcacttaaaataatagtaaaaatgtcatgatagaaataaattttgcaacgtattatcccatttttctaaattattggtcaatgaaattagaactcggttcatattcaactctaccaacaaattttgccttagaaactaagaaatcaaccactagattccctaaattaatgtaataggagagtcccaaaacatctcaatcaaaaagtccaatcttttgaacttagacgagggtataattgtcattgcaaaaataaatgtcaaaacgaaaaaagaaaaaagaaatagaaagacataaaattttccgaagtgaatcattagatatggttcaatcatgtatct

SEQ ID NO: 279836 - DNA, 636 bp, Cannabis indica
tgatatttcagtaaactaattattgaaatgagatatcaatcatttatctctatcaagccaagctcaaaggaaatcatcatttcacttctaaatacttatagaagctatatattctatatcaactcaattgaactactatgttcccaagatgtaaatatctgccaaaaccataagttagcttccacgaacacctctaagagcataaataatacaactaagcttaacctaaccatatcaggattaagatccataaacctaagaaaaacaattgatattgacttagaaatatataacggtaagtttatgatgtcttatctaagatcaatatcggtcccttccaatgtatactccacacattcgatattggtaaactttgccagtgtccttgaaaggacataacacttatccaaggtgtaagtataccttatcgccgattatcctacaagtctaaatctagtgaaataagaaatcgtggtaattaaacttttgaacatataatcatgattatattcaactgtgctgacgacaccataatcatgaaaaaatatatatgcatatttatatatatatactggacttaataggatttatacattaaacataatgatgaaataaaatatgtgaaccatgcaacat

SEQ ID NO: 279837 - DNA, 557 bp, Cannabis indica
actagaaacaaagagtgaaaactaaccaaaaatatgaccccaaaacttagactaattttagcctaacaactaaccatgcaggtaactcaatcaactttgatctaagacctactactccaagtgatgaacagggagagaagactgttcaggttgaacaaggagagaacactgttcaggtggaacagggagagaacactgttcaggtagaacagggagaaaacactgttcatgtggaataaggaaacctgagggaaaatcaggcagaggagttggaagactaccagttgactagagacaaagttaaaagagcacctagacagaatccaaagtatagcttcaacatttggaatgaagacattgcctatgcattgttaagtgctttgtaaggacaaaagaacaaaccaaaaagttgtggagaagctatgaagtgcaagaatgctaagaagtggaactgtgctatggatgaagagacagactctttcagaaaagagaagacttgggtttgtgttccaaaacccaagagaaagagtgttgtgaaacatatgtggccctttaga

SEQ ID NO: 279838 - DNA, 1002 bp, Cannabis indica
cacttggttaatggtgaattttgtgaatcttgaaatcttgtcttgaacaatctggagataggatgccatttttgaatctttggcctggtatgacccgttgagttggtttacgataagttgagaatctgacatgacttcaatggttttggcattcaactcaatggatagatctagcccagcgatcaacgcctcgtattcagcctcattgttggtaagtttgaagtcacatctgatcgcccgctggataacatctccttgaggggaggtaaggacgattcctaggccactccccttactattgcttgatccatctactgctagcatccatgtcgagttggtttgctcgtttaagcataataattccttttcagcttgtacctgtccaacacaagaaaagtcagcaataaaatctgccaatacctgtgacttgatggctgtcctcggttgatatgttatgtcgtattcactgagctcaacagcccatttggtcatgcgtccagaaagttccggtttgtgtagaatgctacggagtgggtattgggttagcaccactataggatgacactggaaatagggcctgagcttgcgtcctgctgtgacaagcgctaaggccaatttttccagctgagtgtatcttgtttcagcatctagcaatgtcttcgaaacgtagtaaatcggttgttgctttccttcatcttctcgaactagtgcggcgctgaccgctgcttctgaaactgccagatacatgtacagtgtttctccatccttaggctttgctaggagtggaggggagctaagatagctcttgagttgtcttagcgcttcttcgcattcctccgtccacacaaagtctttggtctttctaagagttgaaaagaactagtgtagcgctgaccgctgcttctgaaactgccagatacatgtaccagcatttctcctatctttaggcttttgctaggagtggaggggagctgagatagctcttgagttgtcttagtgctt

SEQ ID NO: 279839 - DNA, 667 bp, Cannabis indica
tgaactgggtttttggaaatgttaatggcacttgtactatcacaatataggaccaatgagttctgtggaaacccataatcagtaaccattttattaagccagatcagttgagtacaacagcttccagctgcgatatactcagcttctgcagtggagagggaaatggagttttgttttttgcttaaccatgacacaaggttatttcccaagtaaaaacaccctcccgacgtacttttcctatcatctaagctcccagcccaatcggagtcactgtatccaacaatggacatgttggtatctctggagtaccacaagccaaactctgaagttccagataggtatttaaagatacgcttaacagcagacagatgagactgtttgggattagcttgataacgagcacacaagcctacactaaagcaaatgtcaggtctactggctgtcaaatatagaagactacctatcattcctctatatagggtgggatcaacagactcaccagactcgtctctgctaagtttggtagtagtacttaaaggggtaggggcatgtttagtgtgatctaagccaaacttctcaagcatttttctaacatatttggattgtgagataaaaataccttgatcagtttgcttaatctgtaaacctaaaaagaaactcagatccc

SEQ ID NO: 279840 - DNA, 906 bp, Cannabis indica
actcaaagctcaaaaaaaatactttttttagaccaattgagctcttcactagaacgcttccgtttcacacccccgaactgtttgtgttttccaggcaaagtcaatggaattcggtctaattgagataaaatatcatcccccgtcaatacaggaggtggtgctctcttctcaggcttaccattgtactttttgcttctccttctcggatcactcatttcgagaaagcgtctgtggccaacatatccaatcttactatttaggccaatggaaggagtatgttcattgcaagtgggacacgccatatacccttttgtgctccaaccagacattagagcataagcaggaaagtcatttattgtccacaacactgccgcacgcattgaaaacacagttccgttgtaggcatctcgggtttcaacacccgtctcccacaactgtttcagttcatcaattaacggtctcatgaatacatctatgtctttcccaggagatgatggacctggaattaataaggtcaacaacaacgattcagaactcatacacttccacggtggcaaattatatgggacacaaataactggccacaggctgtaagagttgctcatgttgccaaatggattaaaaccgtcagtcgccaatcccagtctgacatttctaggttcaacagcaaaagacggatgaaggcggtcaaactgcttccattcttcagcatccgcaggatgcctaagcacaccgtcttcttttggtctctgcgagtaatgccaccgcatatcctccgcagtgtgtcttgagcaatataatcgtttcagcctaggtgtgagtgggaagtaacgcataactttgtgaggaacttttttccccttaccctttcttttcacccatcgtgattcgccacatacagggcaa

SEQ ID NO: 279841 - DNA, 523 bp, Cannabis indica
atatgctcgtaaaatcgcaacatgcggaggatcatattacccacttgcaggccatgttcgacatattgcggcgatacaagatgcgtctaaatccgttgaaatgcgtctttggggtgggctctgggaaattccttggttttatggtaaatcagcgaggaatagaagccaatcctgcgaagatcagggcattggtagagatgccatcaccgactaagccaaaggaggttcaaagcctcacaggtaaagtcgcggctttaaaccgctttatatccagatcctctgataagtgtaaagagtttttccagactttgaaaggcaacaaaaggtttcattggaacgaaaaatgcgagcaggccttccaagctttaaaaacgcatttggggcaacctccaatcttatcgaagccgttgtccggagaagttttgtctatctatttggccgtctccgaatatgcgattagttcagtactaatacgcgaggaccaaggacgccaatacccggtatattacgtcagtaagcgatt

SEQ ID NO: 279842 - DNA, 342 bp, Cannabis indica
tcagatctctaacccttgtaccctttctgttgcatagtattgtcaagatctgagcccgaatatccttctcttggatttggatccttcacaatcttccaaacgatgattgaggtactgtttgctgtgtgtgggcactactcttttcactagggtattcgaaattggaagagcaagacaagagaaaaggggtttggctatagagagaaaagggaaggctcaactttctgaaaaagaggcagtttcctaaattgctaaacaattgcttaactgcttgatttggtgtgagccatcactttctatttatagacaactgctaggtttaggtgttggaaatattttacc

SEQ ID NO: 279843 - DNA, 793 bp, Cannabis indica
tgaataccttgtcaacccgttgtcccaacactgctccaatcgcataatcacttgcatcgcacatgatttcaaaaggtaattcccagtttggtgtagtcacgatcggtgctgagattaacttatccttgagaatctggaatgcttcaagacaatctttcccaaattcaaaaggtactccactagcgagaagattagatagaggtttggcaactttggagaagtctttgataaatcttctgtagaacccggcatgacccaaaaagcttcgaactcccttaactgaaactggaggaggcaagttctcaattgtagatactttggctctgtcaacctcaataccttctttcgagattttatgtcccagcactattccttccgtaaccatgaaatggcatttttcccagttcaacaccaaattagaatcttcacaccttgttaagaccaattccaagttgcttaaacattggtcaaacgatgaaccaaacactgaaaaatcatccatgaacacctcgatgcatttttctattagatctgaaaatatggccatcatacacctctgaaatgttgctggagcattacacagcccaaatggcattcgtcgaaaagcaaaagtaccatatggacatgtgaatgtcgttttctcttgatcttccggtgctatagctatttggtgataccctgagtacccatcaaggaaacaatagtactcttggcctgccaacttgtctaacatctggtcaatgaatgggagtggaaagtgatcttttcttgtggctttgttgagtttccggta

SEQ ID NO: 279844 - DNA, 665 bp, Cannabis indica
gcaatgattccacttttgaagcaaaaatttgatcctagttgctttattttgaatggagagctgcttcacatgcgttgttgtgctcatattttgaatttaattgttagaggtggtttgtctgttatcggtgatagcattgataagattcgagatagtgtcgcttattggtcaggcacaccaaaacggtatgagaaatttgaggagaatgcttgtcaccttggagtgacatgtactaaaaagttgtctcttgattgtgttacaagatggaattcaacatacttaatgataaagacagctttattgtacaaaacaatatttgagcgagcaaagctttgttatccaaagtataaatgtttgccatcagaagatgattggattagagctcaaaagttatgtgaaaggctagaagtttttcatgaggtgacaaagttattttctagtacaaagtaccctactgccaatctattcttcctgaagatgtgtaaaattaagaagaaaattgaagaaggaatgtcatcaaatgagttatttattaaggatatgtcaactcaaatgatgtttaagtttcaaaagtattgggaacagattcatgggattatgactattgcagtggttttggatcctagatacaagtttttgttgctccaattttattttcctcaact

SEQ ID NO: 279845 - DNA, 700 bp, Cannabis indica
cttagtgcctttcatgtacatgtaaagaacttctaacttcaattcatacaccaaggggtccacctccaactcctcatgcaaaacttcacgcaactttttcagtgtacagtcaatgtccaatatcaatgtcttactttttgaggaatcaaatacccagttgaaaccctccaaagtccaaacgccatcatacagtacaggcacaaatacagatgaatctgtcccaaagaaatacaaacaaataaacagaaaaaatcagcatacaatatcgcacatacatcgcacaaggtactacggaagtcgcacaatgtcgcctaatacaactataatatgctggagtatcatgtcgcacaataatcgcacacaaatcgcataaggtcgcagattaaaacatacatgttaaaatcgcataatgctgcacaaatgtcgcacacaaatcgcataacatcataatcgcacactaatcacataactatcacaaatgtctcatacaactataatatgctggagtatcatgtcgcacaataatcgcacacaaatcgcataaggtcgcagatttaaacatacatgacaaaatcgcataatgatgcacaaatgtcgcacacaaatcgcataacatcataatcgcacactaatctcataactatcgtacaatgtcgccaaaattaatcatgtcacccctaacctcaggttcctcatgaaa

SEQ ID NO: 279846 - DNA, 772 bp, Cannabis indica
aaacagtgaaaaagaaaaaaaaaataagaaaagtataaaagtaaaatgttcttgtcaaattaaaaatgtaatgtttgaaaaaaaaaatgtagtatttggtgtaaatttctcaaatagaaagaaaccctaaaatataaatgtaaaataaataaaaataattaagctaaaaacaaaaacataaaatatgggattggataataagtttataaaaatatggcatatcaaataccataaaaaatcttaaatgtgaaaaaataccatagaagagtggcaaacctataaatgccatatttttctaactttttttatgaaatcccatatttcatgtaattttcacttgtttaaaagccttttcattgttccttgtattgtccatgcttagattattttgcttttctttcctctcacttttatacattcgaacaattttaataacagtatctagatagttgtttttgacattccatttaagtaaatagttcaatgatcctatgtattattatgtacaaagaatatacattttaaaacagaatgcaagtaattaattatttgtaataaaattaaggaataattatatgagtcactattttttttaaaaaaaaaaattatatttttacgtttaaagaattttttttttccacttttacgaatttccataaaaataacaagaaaactacattaaaataacatcaaaataactaaaaaaaaataacatacaaataataaaaaatcaacaacaaattaataagaatacaacataaaaataccgtat

SEQ ID NO: 279847 - DNA, 514 bp, Cannabis indica
gtggtacagactcgtagggggcctagttgatccagcccaatccacaggcgatggatcctgcattgcagaacccaggaagcgcaagggttccgccagctgttaatcttgaacagccggcaaacgtgggtcacggtgtaacgacttctatagatgaaattgcgcatggtgtgcaagagactgggaataacagttcagcacccaacaaagcattcataacacagttgttccgcttgttaccaacactcaaacgaccattggagatgatactgagttacaaaatctccgcgctgctcttggactcgtgcaaggtcatgccaataccctgcatcatgatcaggaagatctttgcgcagcggtaagtctcgcgttcgaggaacaaaggcgtatgtttaccgagtggagagacaaagagatggaagcattaagggctcatcatatacaaattgaaaatcgtagtcggcaagctactgtgctaatcgaaaagcctaccaaactgtaggtcagcaacctccaa

SEQ ID NO: 279848 - DNA, 613 bp, Cannabis indica
acatattgtgcagctcgttgctaatcaatgaggtttagggaaatcgtgattaattaaaaattttgctttttaattaaacttacaaaatattttatacaaaaatactcaagatccctattacaaaatactttacaaaagtttactgtctaatacaaaatacttgttgcctagcgactaattacataagcaatgttgtcccgaagatcatacgctccagacctaaccgccccgacatgtacaatcttcatcggctctctctcacgattcctcagccttggccttgcccttacctacacataaacatagcactgtgagtcgacagacgcagtaagaaacgcataaatcataatcatacataaatctcgggttatgatcagacgcccatacccctgaccataaccctacctgtcgtgtcccacacgatactgagtcccgaacgttcgtacgaaggtactattgacaagtaacagcctatactcggtacactggtcatactccagctgctagtcatactctagccctaccgatgtgttatagtatcagcctatactcggttcactgatcatactccagctgctagtcatactctagcctaaccgatgttatacggtca

SEQ ID NO: 279849 - DNA, 660 bp, Cannabis indica
tttttcaacaattggtatcaagagccaaagtttattgaattttagggcttcaaaattttttcactaatttttttttaaatctgaaatttgtagtgatttttcggattaatgtgtttaaggttgtgtgaatatgagtattatcactctaaatttgttcatatatgtcttggaaacaatcttttacattttctattaagatatatatgagctttaacaatggagaaacccattttggattcatcattttttgatgtattattctgtattttttgagtaaatgggtattgaaaaatgatagaggattgaaaatgggaaaaaacacctcaaacggcgttgaatttggtggccggatgtgggagatatggtcgggtcacggaggagtcacgaactgggtcgcgtgacctgagtttcagacccacgggaattttctgggcgaaagggacgaagaaaaatgacgtgtcatttttcagcctttgggaacaatcaaaaaatgacgggtcgttttcaagtcttcaggaacatgcaaaaaaatgatgtgtcgtttttggttttcggattttcctcaaaatgacgtgtcgttttttggctttcggtatttgtctcaaaacgacgtgtcgttttgtgtcttcgggatcagcctaaaaaacgacgtgtcgtttt

SEQ ID NO: 279850 - DNA, 546 bp, Cannabis indica
gaagcttatttattttttatcatacaatttgtttagttatgttttatcctctaaaataaagatatgaaaagattgataataaatacattaaaacattttacacacatagcattatcaacaaccatttacgttttaattatcaagaatttattagctttaaagttatatttatatagtcattagcctatatgaatcttttgcaattatattataagtaaataatattggagttttgaagccaaaaaaaaaattataagattttatttatgtagcatttatgtacataatacatataatatatcaatttataattttttttaattatattttaatataaatttacaaaattacatcataataataataaatggtggatatgattaaatcacattacactattttatttattttttatttaaatttagtaataattaattggtaagagagaagagtagttatatctagaaaaaaaaaaaaaatcaaaattagtgataaaaaagtatagttgtgagaattaagttgtaatgaccgctctagtaatgtgga

SEQ ID NO: 279851 - DNA, 462 bp, Cannabis indica
gtgggtgttgttgctgtagtgggtgcaaaaaaatgcatctactggtaaagaaggcaccaataatgatgttgaaaagactaataatttgggcattcttgcagatattaatgaggtttgttttttatgtggttttcaattttgattatttgttttgtagtctgtttatctttatgtgttgttttatagtttttctacttgttttttttttttttgtttatctcaggagttagacactaaggtggatgatgacaaagttaatgttggtgtagctattgcatctaccattgatgttgtgcagaaaatggtaagttttttttaatcatttttttttttgatttgttttagtgttgctttatagttattttgccatatttgttttttttttaaaaaaaaaaaaagaaataactttttatttgtaaacagtgttggattttgtgcgctaaataaaacctatttcaatat

SEQ ID NO: 279852 - DNA, 521 bp, Cannabis indica
atcataagcgatgaagggagtcacttctgcaacaaacagttcgaagcactcctttcgagatatggtgttcgtcatagaactgctctaccttatcatccgcaaagtaatggccaagctgagatttctaaccgggaaataaagatgattttggagaaaacggtgcagagatcaaggaaagattggtcaagaaagttagatgacgcactgtgggcctatagaacagcgttcaagacgccaatcgggatgtcaccatatcggttggtgtttggaaaggcttgtcatctaccggtggagttagaacacaaggcgtactgggcaatgaagactctgaacatggatttaaaggctgctggacagaaaagattactgcagttggatgagttggaggaatttcggaatgaggcttatgagaacgctaagatctacaaggaaagaactaaaaggtggcatgaccgaaacttagtcaggaaggagtttcaacctgggcaacaagttctacttttcaattcaaggttgaagtt

SEQ ID NO: 279853 - DNA, 238 bp, Cannabis indica
aactaacctaaatatcattttcaaaaaaaaaattgctaaccactttttaaatttcatgttattttataaattaaatattcaataaaataaaatgataaatacgtacccttttctgattttataatttaatttaagtaaaaataacaaaatttaaaagttagtcaaaaatatcttaaattaatttatttatgataattagatttgaaatatgaaaagtaaaaatcaaaatacaaaacta

SEQ ID NO: 279854 - DNA, 631 bp, Cannabis indica
atgtttttttaaaatgattgtcaaatcaatacttaataataacccgactcatgttagtattagactggttatattttttttacatatatttgtgctaaatattagcttcaatttagttatattaaaaaaaacttgttaaaaattgagtttagggtctattttgtaccaatttaaaaaatataaactctaaattatcatttaataaaacaaataatataatcgataacttttacaaaacacaagatccaaaataatattaactttatttttttcttaaattaattaaaaatctaaataaatcaaattaaatttcttttcttttttttttaattcatattaaaatattaatttatatacatatttatcacacgtgtagcacgtgccatgtgccatagacttttcaattttgtcatagcactatatttatgctgatttatttttattaaatatatatatatagggtaatactatggtaggacctagcaaaagttctctaacggtagggaattttcttttaaaccgtttgattttagtatcttgtagttattgtgatgtaaggtatatacttttactatagaattgcttgtatacaattaaaactttatccatattataataatatttaataata

SEQ ID NO: 279855 - DNA, 706 bp, Cannabis indica
ctaagtgaaatgagtactcaaccatttatctctgtttagctaagctcgaaggaaatcatcatttcactttctatttgccagatagaagctatagactccatctttatgtttagcgctcccactcaattgcactaccatgttcccaaaaagtacgtatcaccctgacccgaaagtgggcttaactaacaaattaaggaacatgtgtaatacttttgagattgaacctaaacatatcaggattaagatcatttgatctaggatcaactaggtgatattgaattgaacagatactacggtaagtttaatatatctggaacaaaattcaatatcggtcccttccgatgcatactccatgcatccaacccaagctttactttaaccaatgctctggaaagaacatagcacttatccacggtgcaagtaaactatgttgtagattttcatatcagttaaaccctgtgttctgataaatctaggaatatacattcaatcacataatcttgattactttccactgtgctgacgacacaataaacaagaatataaatgtgaaaagggtttggatgaatttataaatcaattagacaagtaaatgataacatgaaccaaatgacacacaaatgagtgataaatacttctgtttctttattgatatttaaaagaatagagattacattgaaatggagttttatttagggcataaaaa

SEQ ID NO: 279856 - DNA, 446 bp, Cannabis indica
aaattgtgagttgtacggacggtctgcaaagcacattcttgggtgcaaggggctgcttgggcgcacaaagaatgctgccagcagccagccgcacgcacaagggtgtgtcaccacccccaattttttcaaaactttcaaaaatcataactaattcaaataaaatcgaaattgagttctgtaaaaaaggaaattgcttaattttttccaaactatccaataaaaataattccagaaacgaaaattcaattatttttcataaaatttcacaagcatcaatcaatcatcatataacacacagatcaacatgaaaccatccaaatcaacacatatcatcgttttaattcatattcatgaaagtaaatcattaccatggctctgataccaattgttggaaatattttaccaggatctagatttactaccatgtatgtttcattaacatccta

SEQ ID NO: 279857 - DNA, 585 bp, Cannabis indica
tatctataatagaaattaaacatataggctcacacaggcatacacatttggatggatcctatcatgttgctaggtcatacacagatgaaagaagtttgtaaaaattacctgttacaaattatttacttgatctatcgtcaattgaacctttggttaaaattagatcatctgatctatcatcaagttaaccaaggcaatttagatcaagcaataataggttttagaaaacttacaaacaatctaaaacacatactcctgcaacaaggttagatttggatagttggatgtaggatttatttaattttaatcatttatttcgaaaaataaaataaaattaaacctaccattttgaaaaattaggttttgggtaacctaaatgtcatttcaaaataaattgctaactttccttttaaatttcatgttatttaataaattaaataataaaatagaaaatggtaaatacatacccttttcttgttttacaatttaatttaattaaaaaataacaaaatttaaaataccttatttcctcttttaaaattatcatgattattgtgatcttattttaattaaggtcaagttacc

SEQ ID NO: 279858 - DNA, 598 bp, Cannabis indica
taggctgctattggcgtcatcaagtttggggatatgtcaatcatttcgatttcttccgtgccagtgatgttagggtcttcaaggaattggataggaaccaagtttgccttgtcacttatattgctgctcgccaatcgagctaacgcgtctgcagtttgattttcttctcttggaatttgtctgagaccgtagcttttgaattgtgcgatcagatcatgtattttgctcagatatgctatcattttttctcctcgagcctcgtattcaccggatacatgatttaccacaagctttgagtcactgcagatctcaatgtgttcggccttcatttcctttgctagcttaagtccagcgattaaggccttgtattcggcttcgttgttagaggccttgaatttgaacttgactgcagcgtgcaggtgttgcccccaggtgtgacaagggcaattcctgcgccagatagttgatttgttgccgacccatccacatgtagcttccagatcggtttgtgttctttgttacttggctgtggtactggctcgagattactttctggtatgctttcttttttgcctatgcattccaccacaaagttggc

SEQ ID NO: 279859 - DNA, 597 bp, Cannabis indica
ggaagaagtatgaagggcctgatgggggacaaccagtggaagaagagattaaggatcaaccggtaccaacatcaacagaaaagaagactactgagattcttgcaccaaaacaagagtctccaccaatcagtatagatcatcatgtgaagataccgtacccacagagactccgaaagaccaatctagacaagtagttttcaaaatttctagaggtctttaaaaggttgcacatcaacatcccttttgctgaagccttggaacaaatgcccagttatgtgaagttcatgaaggagatcttgtcaaagaagaggaaaatggaagactatgaaacagtggcattgactgacggttgtagcaccatactgcagaagaaactccctcctaaactcagagatcctgggagtttcaccatcccttgcaccattgggagaatagaatggataaatgcattgtgtgacttgggagctagcattaacttgatgcctctgtcagttttcagaagattgcagttgggtgaggcaaagacaactacagtaaccttgcaattggctgatcgatcactagctcatccaaggggagtcattgaggatgtgttag

SEQ ID NO: 279860 - DNA, 796 bp, Cannabis indica
acaatactatcaaccataatgtcatcctatacacaatatgctagtcatactctagccatattgatatgacagcataaatcagtatttcagccaacatacatttatcagtaattagtacaactctaagtatactattactgctatcaatgtaatctaacaggcataataataacatgtatgctaaacatgtcataacatatgcatgacattatactaatcttatctcaattccaaattcaggtgtgccggccaaccagagtggaacaactgctcggcaaattacaggctcctaaatcacatcgataacaatatggataagtgatacgctaaatcacaaccgaagacttaggttttaaaccaaaaccctatatactgcaacttaacatggtaataccctaaactagcagggaattaaccaaccaaaactctgaaactagcacgaatcaacaacacgaatttctcggggaacccagcaaaaaatctgggtaaccggttttccaggcattgtaaaaccggttaaccgatttattgattttaattaatcaattataattctaaaattagactatgtcttatttatgaattttcaataagcaatggcttaattgtgaagaaaagaatttttggggtcaatttgttaattaagagactttgtatggtctaattaataaattacataaattacaattttatttagtaattaattataattatcaaataaatagttttggcatttataggattgaattggaaaatatggtattattgaaaagaagaataagtggttgaaataaag

SEQ ID NO: 279861 - DNA, 695 bp, Cannabis indica
attttgagatagacagccaaatatttttcatttgacccaacaagacgacttggtctagttaagagtctctttgaagaactaattgatcacacaaaaattattggccaaggtagccacatacacgcatgcgacaaggactacccaaccaccatgctcgaaccgttcagcctattttcttgtctcaaacagcaagacaagcgtacaatgcttacttagacaaaactcttggccaacacctaatttggtattaataactctccagctaaaataaattctagctagagagtgagggacaaactgtagaggtaaaaatttgcttaatatttgtgatatttttgagaagtccaatatgcaagtcagacgagcccatcaataatggatccaacaatgttgggcccaataagacagtcagacggactcactaggccttgaaatagactaacgagtgagcctatgggccacaagccggatcgtcccgcaaccgggtccgagcccggccagtcagccaaacgggtaaaatcaagtaaatatggaaccagtcaggaggacggttactactccctaataattagggaagtaaccaatttgaacgagtccaacgggtgacgtggacagagggcaacgacactgagaacacacgataaaaggaaccatacgatagacgctggacagaacacattcgatactcacactac

SEQ ID NO: 279862 - DNA, 606 bp, Cannabis indica
tgctgtgatggttgcgagtgctttggcttcggcccacttcgtgaagtaatctactgcgactaccgcatatttgactccacctttccctttgggtaactcgccgattagatcaatcccccatattgcaaagggccatggacttgtgatagaatggaggttacttggaggttggtgggtatatgtggctattcgctgacacctgtcacacttcttcgcaaacgcgagagcatcttgtcgcaaggttggccagtaatacccttgccgcatgatttttaatgcaagggagttacctccggtatgattgccacaaatcccctcgtgtacctcacgaagtatgtaaccacaatcctctccgctgatacatttgagaagaggttgactaaaactcctgcgatacaacctttggtcatatattacataacgggcggctcgctgtcgcaactttcttgcttctattttatcatcaggcaagagccctttttccagatatgcgaggataggagtcatccaggtaatctcctgaacggtatctatttccatgatcacttcttgatttatagttgggtgagccaatatgtctaccggaatcacatcgagcaatttggc

SEQ ID NO: 279863 - DNA, 724 bp, Cannabis indica
gtactaacatctgcctaacgtcttctgaggggaatatacctagtgaacaggtaaaaatttactaaaatgatggaagtagttatgtacttagtatacatcattactagattcagagatgccctgtattgtgaaactttaagaaaagctagaactagtaacttatgtttacattgtttgatagctattctaagtgattaggggtggaccatcctatggtcattaagataagaaagtgttcgtttcaacaaatactacttttctaagaaaatgactaaatcagaaaacaaagtagcaaagtagatgagatatttaatttttgagaattatttcccatattaatttttgaattgtatttttttaatgtagatattttgaaatttttctattctaaaagttaaattaaatttgaaaattaattttagatcaacttaaatcaagtaattttcattaaagatttaactaaaataaatagactaaaatatattatatgttaattagaaataagtaattagtttatgaattatctagatagatattttctaagtagactttttggtatttttctagatatatttaattaaattagaaaattaatatttaagttaattttgttcaagacactgaaatataaatttttcttaagagatttaaataaattgaaaaattatatttatgttgaacattaatttatttatttttagactaacataaattagaataattt

SEQ ID NO: 279864 - DNA, 627 bp, Cannabis indica
atttaaaattttaagatctcatcttttacttactatatttatataaaattaacatttaatataactaaagtagtcccagcatagtggaagtgtgaaggatgaaaaggtttatagtttgttggttgagggacctgagttcgattctaccgaacttcactttttaatgttaatttttaaaaatcaaaattacattttaatattatgtacaaaaattattaatcatgatataatatttaatttctataataataataataataaataatatttttcttgaatattatttgaagtgattttaatttattttctttaaatatcttattataattatggattataatctaatgtaggtattaaaaattattttagctataggtaaatatagactagatagtttttctttttatgaatttgatttattgtatgttgaaattggacaagataaaaatattactatggatgatagagtaaattaaaaaatacaaatctactaatttttatgatactttagaacttatttcagattttttttttattatttttatgtcatgaaatgtaacatataattttttaaaatttatttattaaggggcccaaaattttttatcgtcttaggcccccatttct

SEQ ID NO: 279865 - DNA, 471 bp, Cannabis indica
taataacatgagtggctgggaacatgttatacataatggaattcaagttttcttaacggatcgaatagtagttcccttatagtgttaattctgggagtgccaacagactagatccaaatctataataagttataaattaactgtcatgttgaattaatgatacataaggagtcaaaagataattagaagggtaaaatagtaattttgaccaactataattatgaactaataattagagggcaaactacttatattgattatatcaatgacaagtaagaattctgtaaatataattctatattgtcaaagagtgcaattccatatttatagtggaataataataaaattaataaaacaagttattctattgatgagatcgataataattaagtatttattggagcttcgaaatataggttcatggttttcaagttacctctatacaacactgtacatggaaaagttttattc

SEQ ID NO: 279866 - DNA, 659 bp, Cannabis indica
atatgactctctaaaggcccaacgccgctttccaccgcttccgaacacaaacacagaaattgggtaattagacataaaataacatgacaacatatatgacacattaaatatatttccaaaatatgcatttcataattattaattaacctcatacataaatcttaattatttaataatacatggtatttatcatatgcggtctttacagagaaagtagtgactagaaagaatgaatttacataattcctttgtgttgccgttgaacacaggacaagcctgagccgccaccagaaggccgtctccctgcctgcaccaagggttattgcgctattataaatttgtgtttatatgtttgttttcgtatttatggagttgtggccacactttggtattttggatttgtttggttatttcaaagcttcatttcgtactatctcgttgataataatgataaaatattcattaactaatttgcaggggcagtgctatgtgtataacagtggatatcatggatcatggaccggcacccctgacatttttgacaagagctattttgagtatgttttctgttactgccatggctgctatggagttccacaatagcatataggatgaattaggtcgacaatatatagtttctgcgaaaatttgagccacca

SEQ ID NO: 279867 - DNA, 768 bp, Cannabis indica
atgcattaccagacacctactattgagtgggggaaataagttggtatcagattaatccagaaagggaacattggaagataatcaaatgaatcttaagatcaagaagaggaactatatgttagttgataagagtagtatttaatactcttagaccacaccaaatcaggtttctagacttgcgttgatgctagaaaatctactgataagatggtgattactctggggggtggaccagtgattttggagaagtataaaaattgatccagaatctctaactctaccagtaagactgaatgctaaagttgcaagaaagatacttatttagcctatgaaaagttctataccgtgtaaaatattcccaacaggaatcaccactatgttggacctaatgcccagccctagtggtgattctatatgtcctaatgcccaaggtggttttcgatcaccacatcttagcactcaacttgttattctcagtgatgtttaagtcatttcaacatccatgatcgccacttaacatggactggtgcttagcccttggcaattacaagttcaagagtcttgcctcaaacgtggtggtttaggagtctcgcctcaaattatttcagtatagaaactaaatttttataaaaaataattatgtgagcagtgtacgaagtcgtaaattttcaccagataagatgattagtgtgacagtcagtagtcccgtgatccgtaaggagaaacaccgggtaagctgtgcaatcccacaccgcctgaggaaggtca

SEQ ID NO: 279868 - DNA, 609 bp, Cannabis indica
aaaggtgaaattctaaaggttcacaagcgtaaactgaaggcatgcactgatgagctccgacgatcatatcaatcacctgggggtcatgatgacgttccacttgctactgatggcggtgatacagctatggacccgtagtcctagctgctatggtttgttttctctcctttaattttattgcaagtggggacactgtttattttaagtttgtggaggagaaggcaattttgatatttttaatttttcattttttttatttattttggtttttatgggtagatttaagttttatttttatttttggatgattgtatcaacgttaacttatgacctatgggaatttatgaacttatgctaaaactctttgacattatttagtatgtgtgaaagactttggattgtgtgcttaacctgctatgcttgattttgatattgtgatatgagttatgtgttgttctacttgttctatatattgtgattttatgtgcttatgtagacttggtttgatttggttgatattgagataactagaacttgtgtgattaatttattgaggcgaaatcctaaaatcttgttgtgtagaggtgattaaggcaaattttctttgaa

SEQ ID NO: 279869 - DNA, 796 bp, Cannabis indica
atactgtgagcctggaaataaggtcgtaattttctcgacgatattaccaaggcgaacgccaatttttccatttggggatagcgggtctcagcatccagtaatcgtttactgacataatacaccgggtattgtcgcccttgatcttcgcgtattagtaccgaactaatcgcgtattctgacactgctaagtagatggacaggacttcgccggtcatgggctttgatagattggagttgcccaaatgcgtttttaaggcttgaaaagcctcctcgcatttttcggtccattggaacttcttattgccttttaaaatctgaaaaaactctttgcacttatcagaagatcgcgatataaagcgatttaaggcagcgactttacctgtgaggctttggacctcttttggcttagttggtgatggcatttccaccaatgccctgatcttcgcgggattggcttctattcctcgctggttaaccatgaacccaaggaatttcccagagccaactccaaagacgcattttagagggtttagccgcatcttatatcgacgcaatatatcgaacattgcctgtaaatgggcaatatgatccttcgcatgttgagattttacgagcatatcatcaacatatacttccatggtgtttccaatgagatctgcgaacatcatgtttacaagtctctgataagtcgcacctgcgtttatcaaaccaaaaggcattactttgtaacagtataatcctcgatcagtaatgaacgaggtatgctcctggtcgggctcatacatcgggatttgat

SEQ ID NO: 279870 - DNA, 568 bp, Cannabis indica
aaaaaactaaaaaacaaacaaaaaaaaaaaaaaaaaaattaaaattaagcccctcccccaaactaatttcacattgttcccaatgtgaaaataaaacttaaagagaagaaagcttaccttaggtccatgccacatcaacaagcggttgacgcccataataagcgtcatgcaagacaacttgaaagttgtttttgaagatgccctcaagcttggcatgtaatgagtttgaaccaaaatccgcaccaacaacaaaagaccttggatgatgagcttggggagaagcctttggtaactcgaagagaatacaatatggagaatgcgacattagtggaaaataagggtccattggtggttcataatatagtggtgttgacaacctcaaatcaacaactacaagtgattcttctgccaccaatggcacctctttcttgcttttctcaaataacctctcaattggttgttcaatttcctcatgaccatccgcatccttgactgtgatttgatcttcaataatttcatcattgaggatggatgtttcttcattcaccaaattgagatcatcatttgt

SEQ ID NO: 279871 - DNA, 647 bp, Cannabis indica
cttccttttccagattactgcagagaccagccgcctttccaagaccatagttaatcatggcttcgtcctgtccgaatttgggggcatagacgaggtcgtgaggatcctgcaggacttgtctgctgaaaggcgggcgatccaggaggaggctgagcgaaaggaggctcttgctaaggcgaagctcgaggaggaggctaaacagagggaagcccaggcggaggcgatgctccgagaggaggtcctgcggagggataggctggaggcgaggcaccgggaggcgctgagggcggagggcgaggccactgccaaggccaagcgcgagcttcgggaggccagggaggccctagacgagatggccgccaaggtgaggtccttagaggaattgcaccaggcggacttggagtccagggctaacttagccgtggagatgaaggagctcaaggactttagagatcaagccttaaagaaggctaaaagagatgagctcctctcccctgtttcctgcaagcgttgtatcaagcgctttgatgatggcgtctacatggcctggtcgacaaatggccagagcatcaagcttgacttctaccccaaacctgaggagatgattgccaaatttcgggagaagaagaagatgttggaaattattt

SEQ ID NO: 279872 - DNA, 523 bp, Cannabis indica
gacattatactgggaatggattttctgttcaagtgttcagccagtatagattgtaagcagaaaacagtgacttttcagcccgatggtgaagatccatttatttaggatggatcagtccatgggtcttggatctcagttatctttgtattaagggctagagatttactatgcagtgactgtgtagaatttttagcagtggtaattgattttagcatacctgaaacatttgggcatgaggcagtcaagacggtgaaagattttctcgacgtgttttccgaggagttgccagggttgtcgcgccgcgacaacgagaaattgatttcgtaattgatatggcacctggagtcgaacctgtttctaaagctccatatagaatggctccagccagactcaaggagtttaagttacaacttcaggggatgtttaacattgggtttattcgacctagtgtatcgccctggggagctccggttctgtttgtgaaaaggaaagatggttccctcagaatgtgtattgattatcg

SEQ ID NO: 279873 - DNA, 1110 bp, Cannabis indica
tccatggtgatattctcccacttccactcaaggagtgtcagtggctgcaataatcctaccggtctctaatgttcagccttgatctgctaacaaattaagcactaggatacggctgagcatcagttggtttggtcggtttttttctatataaaaatccaaaattaagttttcggtttgaattggtgcaatccgaaaaccaactgaccaatccaaaacatatcttaaaaccgaccgttttgaacctcggtttggtcggtttaaaccacccaaaccgaactttgttttttttaaaaaaaataatccaatatattctataaatacattattttacattttacaactacgaacatataaattaatttttaaaaactaattatcttattctttaactttaatatcaataagaaataatatattatttgtatatattattagtaactataatacatgaaaaaaaaacttaataaattaataaataaatatatatatatgtatcacggttggattctgttttttcggtatgtttattaaccaaaaaaaaaaaaaccgaccattcaatggcagtttaaatcgttagcggttttttcagttttcggtttcgtcggtttcggtttcggttccaacagttttggtaggtcagtttgaacggttttttcggttttccagattttatgctcacccctacactgggatacaaattctaccacatctttcttcatcccacaccaccaatagtagggtcttaaatcttggtacatcttggtagttccaagatgcagtgagtttggagtggtatgagcttcctcgagaatcttatttctaagtttcgcactacctggaacacaaactctggtcttgtataacagcatcccgttatctgacaccgtaaaatctttgggttgacagctaaaacctcttctcgaatctttaccagttctacatcagttaactgagcggctttaattcttccaacagactagattgcaatgtcaaattatgaagtttgcctacaacaaactcaataccagatctgaccatgtcatcagctagttgaggtgaaatcttactcatactggttacctacctgggacccttcctgctcagggcatc

SEQ ID NO: 279874 - DNA, 498 bp, Cannabis indica
aaaaaacaaaagaaaaacaccaaaaaattcaagagaagctctcttttcttcatctctctctttttgaaccagctaggaaccaggggatttcttgctaaatttgtgatttctaccaagatttcaaggagaatcaaactaaggtaaaccctagaacccttgagtatgtgtattttcaagtcttaagttagtttgaaatagtgaaattgtaatatagtggctgttagagttagagttgtttggagttcgaattttatgtttaatttgagttgttttaggatcctagcagctgataatgttgattggtttaagttttatgcatatttgagctttgagttcaaagctttgtgctttaatggcaacttggattttagtggtttgttctgtgaaatactggctggaatttattgtgtatgcccttattaggtactctggaaggtttcatggcatttggtggagaattgagcaacaaatgaagggttttgggaaacctggtgcaaa

SEQ ID NO: 279875 - DNA, 511 bp, Cannabis indica
actaatcagtacatatcaattaatcctaaattctaacggtgcttttggaatgcagtccctgccaagactttggtgaatggatcaactaggttttcctctgtgtccactttctcctccagtacatcccctcttgccacatattctctgatgatgtgatacttcctttctatatgcttgctctttttgtagcttcgaggctccttactgttggctatggctctagtgttatcacaaagcaaaactagaggcttttccattccatgcacgacaccgagcccagtgaagaactttctgagtcagacaagttctttggcagcctctgcagcagctatgtattctgcatccatggtagagtctaaaatcgcggtttgtttagcacttctccaaaccactgctccaccccaagagaaaataccatcccagatgtagatttcctgtcatcaagacatgcctggaaatctgagtcggtatagcctacgggatttaaagcaccacccttgtagactaacac

SEQ ID NO: 279876 - DNA, 615 bp, Cannabis indica
agagataaatagaagttaagttaatatttatagtgtttgaaaaataattaattaaagtacataaatagttaattaattagatcaatatttttttttttgaaaaaattaaaagttatttattttaataaaagtagaagattttttttttttgatttttttttttttttaaaaaaattttagaaaacgtgattgatatatagatttagagtaatattgaaaataataataaataaatgtttataaacttaataaaaaaaaaaaagaaagaattaaggagagaagagatagagttatttgaagtattttagagcgccacatcaccgccttatacttctcctttatatgtatatagattgttatagggaaatttcattaataaaacatgataaaactcccaatattaaaatttataccttccactaatttgtataaaataatgccattattttcctaaactacccaaaatactcttttatttaattttccctccctaactgtctctctcttcctcttctctctcttcgtcgttctctctctccaccacaccaagaacccaaccggtgtgatagaaacccaccccaaaggcctaaagtctcatccccttcctcaatctcg

SEQ ID NO: 279877 - DNA, 703 bp, Cannabis indica
ataccgcaaaaatggtataaaaacacaaactctcaaaattccatacaaggtcatacacctaggaattttccaaatttttaaatagcaaaggattcctgaaagtggtcatctaccggaatccttatatccaaattttaaaataccgtattctgaactacaagtggcttgatccttcacaaagaaggtatgtaggcagctcggttaattaaatggactgagttcagctgcaattccaaatttaccccaaatttcccaaatttattttaattatttaatgtcattgtaattggaatcaaagggtatttcctttaaataaaaggattgtaattaagaggttattcttataatcttggatgggtcgaacttaaattaataaactcttatgctataattttggcataggtgaaattgtgttttgcatttattttaatattctaaatgtaaaatttttgcttaacaggtagatagcatgatttgaaaaattcatttatttttcgaaaaatccgtgtgcttggtgatattatactcttgactaattttaattttatacttaaaagaacatagactcatattaggtaattttctagtaattgaattgatttatgtatgctaaatttgacttgtggaaagttgtttggaaaattctagaacttgcttgcttgctatttgaggcgaataataaattatgtatgactaggaaagt

SEQ ID NO: 279878 - DNA, 496 bp, Cannabis indica
ttattatggtagtggacccacatctacatctgacaagaaataaaatgctcatggaagataaaataaattaaaaagaaatatgaaaaactccttagttttttcacaaacagctaattttaaataataatcactacactatagtactttgttcccttttattctcaacttttagagatgagagaaaaaaaaagttatggaatgatctgaaatatatatatatatatatataaatagggtaggtataagagattaagagcttctatcatccttatatggaatgacaaaaatataaaaaaaactaattttctttgacagtagttttaatgttattttttttaattgcaaagttttagtttttttaaaaaaagtaaattaagaaaagaaactattttctttgacagagttttaatgactatttttaaattgcaaagttctttgacaggattttatcaatagataaaacatgataatttaaaaagaaataaaaactaacaca

SEQ ID NO: 279879 - DNA, 669 bp, Cannabis indica
atttgccaaatttcataatcgaaagcggctgctatggagagaaaaattcagatagatttgagcatggcgaccggactaaaagtttcctcatagtctacgccttctctttgggtataacccttggcgaccagtctagctttaaaagtttcgactttgcctccagtgcctcttttcttcttgtagacccacttacatccaattggatgatagtcattgggtgcgtctacatattctaagactttgttctttttcatggaatctatttcgaaatccatgccggatgaccattgtttctgttcgggacttaccattgcctatttataggttaatgggtcgtcatcaataccgtcaccaacaaccatattgatttcaccatccaagccataacgagatggtttagtagaaaccctcccactacgacgaggagtggtgaccttctgagctggaacttttgtggtagttctctcacttgtaacatcttgttttgtttcaaccgagggagtgggattatcctctacttgagtagaagaggatggaacatcagaaggagttatacctgaaatcatttcttctaaaacaactttacttttcggcttgaagtctttaatatagtcatcttcaaggaaggtagcatttgtagaaacaaacactttgttatccttgtgacta

SEQ ID NO: 279880 - DNA, 507 bp, Cannabis indica
atacaaggctggtcggcctagcattacgtcaaaggctgaatgaacatccaatatcaggaaatgtgccatgatatttatgcttgttggagcttgtccaactgtgaggggtaggcggatttgtcccagaggcgcaactccttgaccagagaaaccatagacgggctaaaggcatgaagttaaatccttgagctggagccccatcttctcgtaagcagtcttgaacaaaatatttgaagaaccccattatcgatcatggttctggacaccattttgtttgctatctggacttccacgactaacgggtcgttgtgcgaaaatcttatctggacagcatcttcgtcgttgaatgttatggttggctctcctgctcgtggaactttgggcttcctttcttccacggccaggatgacttcttcttgctcgtattaagctgtgcgggcatatcgttctcgagctttgcccatgtctccagcgatgtgcgggcctccaatgatgacttgcaagtgt

SEQ ID NO: 279881 - DNA, 904 bp, Cannabis indica
tcacaacactaataagtgatacgctaaatcacttcccggggaattaaactagtaactaaaagtttccctatcaataaaaagcatggcaataccccaaataacataaaaatgagaaaaatctagggttcctgaaaatttcccagccggcagaccggttgcacaaccagaattccggttctggaaattcctgaaccccatccggaattccagatgcacaaccggaattctggttcctcgcaggaaactttcaaaaattcatactttgctcaaatcaattccaaaccacaccaaaacttccagacctgttctaaataccccaaagaacaataccaaagcatcaaaacagcccagaacacacagatactaaaaatgccatgtgagctccaagctttgagtttcaaactcaaacttggctaaagctcacctacaagcatcaaaccttgattaaaattacatattcatgcataataaagctgcagaaaacaatctctaactcatgcaacaactacagccaccaatttcgaaatttctctttgaaaacttaagcttttgaatagaaaatccataactttaaacaacaccactaatcatgcactaccagcagctcaattcaactcaaataatcaagaataaacttcagaaattaaccacaacatacaacaacaaggacattccaaaatcaagcatgcaaaccacttctttttcatcaaaaattcaagaaaacttaaaagaaagctagaggaacataccaacaacaagagatcacaaaatcttgctaaaagagcttgaaatccaagtgaaaatagccagcctcttgctgctcaaagagggccgaacaagagagaaagagagagagcttgatagaattttggtttttcttgattttttctaactttgaaaataa

SEQ ID NO: 279882 - DNA, 572 bp, Cannabis indica
ggaccgataagggggtatactgctacctggtcatgcctttcggactgaagaacgccggagcgacctaccaaagaatggtcaactggatgttcaaaggcctcctggggcgaaacatggaggtatacgtggacgatatgctcgtcaagtctaaagcatgcaatagccatgcagacgacttagaagagtgttttcaggtagtccggagatacgacatgaagctcaacccaaagaaatgcacctttggggtcaaatcaggaaagttcctgggcttcatcgtcagccagagggggattgaggcaaacccagaaaaaatccaagctctcctgagcatgtcgtcccccaagaagcataaagacgtgcatagcctaaccgggaaggttgctaccctgagccgtttcatctcctggtctacagacaagtgcatccccttcttcaacatattgaagaagtgtcaaaagtttgaatggtcggacgagtacgaggagacattcaaaaagttgaaagagcatatggccaagcctcctatcctatcaaaactcgttctcggagaggacctattcttatatttggcc

SEQ ID NO: 279883 - DNA, 370 bp, Cannabis indica
acgaggggctcggcctccgtccatttagtgaagaagtcgactgctactaccacatacttagctcttcctcgcctagtgggtaatgacccaattaagtcaataccccatatagcaaatgggtagtgcgaggtcatcattctaagttctattggcggtacgcgatgtatatgtgaaaatctctgacacttatcacatttcttgacaaactcatgtgtgtccttattgattgttggccagtaatatccttgtttaatgatctttttagacaggctttgccagcccacatgatcctcacaaaagccttcatgaatttctttgatgatttcattcgcttctgcagggagaatataccgaagtaggggcattgaat

SEQ ID NO: 279884 - DNA, 436 bp, Cannabis indica
gggtgatacgtactttttgggaacatggtagtgcaactgagtgggagcgctaaacataaagatggagtctatagcttctatctggcaaatagaaagtgaaatgatgatttccttcgagcttagctaaacagagataaatggttgagtactcatttcacttagctgaaatatcatttatacggagctaagtgttttaaggataaaatacattgaaaggtgttacggtaatttggattcctattcaatgtaaatcatctatagagggtcattgatcaaattagcattataacaatggataattaatagcgtatccatatggtggaatatatagagcgttctatatgactgagactgcaattctaagttccaagagtggatgcaacaaggaattaataagctagtgaatttacttggtaaattcttgatttagcttatt

SEQ ID NO: 279885 - DNA, 595 bp, Cannabis indica
tttgatattaacaaaataatataatttggtgttgcgaaattcactcgacaacatttggcgccgtctgtgggaatcgactaagatttcattcaaagaaaaatatcatcatggctggaaatcacaccaacggaggagctaacaacgggtccatcaacattgggatgatgaacgtaccattatctggagctggagcgccacctgtggacgtcattaacggcggagtagggaggagcaatatcagacctctcaacctattcccagaaacgactgaccctcaagtcggggacacatccacgccaccagcaaccatgcattttccccctgtcactccggcagtggtatccgagggaatgatccagctcaccactgatcaatatgctgcgattcaggatcaactgcgcgcgctacaggccgaagtagatggacaaaaccgagcccgacgccctcctcgagttcctgctattcgcaccgataaccctcaggtaacgacttctagacgtcaaaataaccgtgtacgcaggaacagagaaccaacctcgaagttggacctgaaccatccaacgtcgaggagtcaatccgcaaggtatccaaacca

SEQ ID NO: 279886 - DNA, 645 bp, Cannabis indica
ttaaaattaataatattcaatattgtgataattattgaaatttgaaatcataatagtgatttaaataaaaataaaaattactattatactttgtaatagtaattaaaaaaattattattcgtcataaatttattttcgaaattaatgaaaatgctcatctggttaaactatcaaaacatttaaatttaatttaaaatgaaactaattctaaatattaaaatttgaaaataatttttaataaaaaaataaacaatacgaacaaatttattattaattgcaaggtggattaattatatttaggtttaactatgttgaccctctacgtggtaatatctaataatttgttattttttctatttaaaaaaaaagtcacccaataatttctcataaaccaagaattcggttatatagccacattttatataaaatagatataatttgttatatatataataaaaattgaaaaattaaaatatttttattttcatgttaaaaaaaattaaatttaaaattttttaacttaacattgaatcactaaatatatatttttatataattatattattattattaattttttattttattatagggtaaatactattttagaccctgcattttctaaaatagtaaaaataggaccct

SEQ ID NO: 279887 - DNA, 581 bp, Cannabis indica
tccacagtcttcctcactatgattgaggtattacttgatgtgcgtgggcactactctatcacttagaggaatttcgaaacagagaagaaagaaagagagagagtggcagctcagggaatttgtctgtgaaaggaaaatcaagcaattgtgttgtgtgtgattcccgaagcctttaccttctatttatagaataccacccagggttagggttgaattacttggcattaaaaaatgaaaaataaatgataaagggcaagttaagtggccggccatggcattttggaaactagcctttcacttttgcaactttcctattttatcatttctagtttcctattttctcaaaaactgccaattcagttattcaaccaaataaatgtcaaatctaactatttaataactataattaattattaaataatattgtcatttattatatttattaattaaactaatcaaagtttcttaattaataaatatcccctataaactctctatttactatttcgcccttaataagtgataaattcacaaatagacatagtctaacttgagaagtataattgattaattaaaaccaa

SEQ ID NO: 279888 - DNA, 374 bp, Cannabis indica
ggtacaaagcctaactggtcgaatcgccgcacttagcagattcgtgtcaaaatcaacggataaatgtgtcccattcttcaacatcctgcgaggaaacaaaaagtttgaatggacagaagaatgtgaaagagcttttcaggacctaagggcacagctcgcaaaacctcccgtcctctctaaacctctggacggtgaggaactggggatatacctgacagtaacggagcatgccataagcgccgtactaatcagagaagaagatggcgtgcaacatccagtctattacatcagtaaaagactcatcgaggccgaaggccaatatccgttgatagaaaagctcgcctactgcctcatcttagcaacaagaaagctaa

SEQ ID NO: 279889 - DNA, 599 bp, Cannabis indica
acaaaaacaaaaaaaaaatccgatctaaatataaatatatacacagattataaatcaaaaatatacatacaacaataaaaaatgtatataccaatctaaaacctaaaactatataatatcaattctaaaataaaaaaataaaaaaaaaacactaaccaaaaatggtcggtggtgcgtcaacggcgtcggggtgttgtgcgtcaacaaggtggtggtgcgtcggggtggtggtgggcagccaagggggggaggggtcaggctgatgggggaaaagggggaaatggggtttttgaattttgaaaagaaaaaagaaaaatgggggaaatggggctgatggggctgatggggtatttataaagggtttagcggcggacatagtaattaaaaaaaaaaataaaaaaattaatactattagtggcggacccccgccactaatagtccgccgctattatttttgaaatggatgagcgggatttatcccgtccatttattagcggcggagcaattacggcggggttcgccgctaatactaatagcggcagagcattagcggcgggcattagcggcggactgcccgccgctaataatatttcaaaaaa

SEQ ID NO: 279890 - DNA, 880 bp, Cannabis indica
aaacttgaataagcaagatggaagacagacacaatgcagttcaaaaataagctctacggctgaaagtcaacataaggacttggaaaagaagagtcgcagaagtttctaaccctagggtttcctaagcattctttctacaacatagctacattcgaagcgtaaacatgcaaaggaaagcgtaaaggaaatcagaaacttactcaaagattcaaatgttcaagttcaagcaagccaacaatcgtttgtaggcacttcgacaactttgaagccagaaaactctctcttttcgctctggagtttacttaacaacgaagggtgataaaatgagtaatgtgtcagtacagtatttataggcaaaaagggtaactccatacaaaggaatcttagacgcattgacttcccgcctcaaaagtgaatatgggaaatcaaaagtaatcgagtgcaaccgtcaaccatggagagagaaattcgaattttcaaaatattaattgtcagagcattaattagccgaaaactgaagggacacccagtcagattcacatcgagtctcgaacggtcatgctcgacacgtgtccccatccaatggcagagccagctcggaataagtctacaggcaacctcggaggtcccgtacagacttggggggaaaatgttatcccaaaattgacactctgacgtggcatcacgagaatgatgacacgtggactccacttggagcatctgttcggaaggatatgccgagcaggatgcgtcgctggcacatccagaatggaatactgaacgagcagtgccgaatgatcaacacttagcgaattcagcttaacgcatcatgaatcaccacctcaatccctacaactcagggatcaacttacgtggatgt

SEQ ID NO: 279891 - DNA, 560 bp, Cannabis indica
acatagggtattgttgttgggatgagcctccaatattgccaaccataggttgtgtctgagatcctccagcggaatccgaaaaaaatataggaggagactatgagggaagcccgaacatgtaatgcaactgaggcgattgtgaagagccagcagacatgttgggagaatttgttgttgttgttgaaaaaactgaagcagctgaggcgatcgtggttgttgttgttgttgttgttgttgttgttgttgttgttgttgttgcgtccttgacgttggagggggggctaaactggacacgctaccttgcggttgtgatggtaaaaatttttgtaaaaaattatcaaaccgcgggtcatgcagagacgcgtcactggaggtgccagactgatcaatcttatcacgcatttttaacataaactcggcgaagactcccatatcttccggagtaatggatgaagtcggtacttgtgattgagctcgactttgagtactagaacttgatgtcgagctgcctttcaatttataacccaatcctcttagatagtccgaccggctcccaagaa

SEQ ID NO: 279892 - DNA, 793 bp, Cannabis indica
agagttctattcatctttcagccaatccattttgttgtggatttttgacaactgtgttgtgtcttctaatgccttcttttgtacagtagctcttgaactcttctgagcaaaattcgagtccattatcagtccttaaaaccttaatgtaacaccctgtttgtttctcaatcattgttctccaatttacaaaggtttcaaatgctagattcttatttttaagcaagaacacccagactttcctagagtaatcatcaatgatactaaggaaatagtttgcaccccctaatgtttgaatcttagaagggccccataggtctgaatgtatgtagcttaacttttctgtagttgtatgcattcctttagggaattttactttgcaacttttccctaacacacaagattcacagaattctagcttttcttttagaccacctttgaatacaccttgtttgtcaagttccatcaatcctctttcacttacatgtcccagcctaagatgccacatttttatactattcaccagtgatttgtctattactggtgcagcagaaccagtaacagagtgtccatcaagaaaataaattccatttttgagtttgcctttggcaacaacaagtgatcctctagtaactttcagtgtgccatcatctatcttaacagtatagccatttttatcaaaagcaccaattgaaagtaagtttctctttagatcaggtacataccttacttgttgcagagttctaatttcaccatcatgcattttcatttgaactgatccaattccttcaatctt

SEQ ID NO: 279893 - DNA, 738 bp, Cannabis indica
agctgtgttacgtatcaaaatgggtagaagctgcagcaacaccagctaatgatggaaaaacagttcttcggttccttcagaagaatatattcacacggtttggtactccccgagcgatcataagcgatgaagggagtcatttctgcaacaaacagttcgaagcactcctttcaaagtatggtgttcgtcatagaactgccctcccctatcatccgcaaagtaatggccaagctgagatttctaaccgggaaataaagatgattctggagaaaacggtgcagagatcaaggaaagattggtcaagaaagttggatgacgcattgtgggcctacagaacagcgttcaaaacgccaatcgggatgtcaccatatcggttggtgtttggaaaggcgtgtcatttaccggtggagttagaacacaaagcttattgggcaatgaaaactctgaacatggacttaaaagctgttgggcagaaaatgagaacgctaagatttacaaggaaagaactaaggagtttcaacctggtcaacaagttctactcttcaactcaagactaaagttgtttcctggtaaattaaagtcaaggtggtcagggccatttacagtgatcaaggtgtttccctatggagcagtggaactaaaaggtgaaggtcctaatacttttaaagtgaatgggcagcgattaaagctctacttgggaggtcaatttgatcaaaccaagtccgccatgattctggc

SEQ ID NO: 279894 - DNA, 577 bp, Cannabis indica
aaatgagatctcaatcatatatctctattcagccaagctcaaagaaagtcatcgtttcacttctatatccagatagaagctatagattcaatatctatgtttagcgctcccactcaattgtactatcatgttcccaaaatgtacgtatctccacaccaaagggtaggcttaactaacaaatcaaagatcacaaataacactcttgagatcgaacctaaccatgtaaggattaagattcacagacctaagatcaactattgatattgacttagaaagatataacggtaagtttatgatatcttatataagatcaatatcggtctcttccaatgtatactccatacattcgatactggtaaactctgccaatgccctggaaaggacataacacttatccaaggtgtaagtatacctgttgctaattatcatgtcagtctaaatctagtgaactaacgaatcacagaattaaactttcaaacatataatcatgattattccactgtgttgacgacactataatcatgaacaaatacatatgttctagacttaataaaatttatacattaaacataatcat

SEQ ID NO: 279895 - DNA, 605 bp, Cannabis indica
aaccatgcaacattaaatgttatttcagatctatattaataagtaaatgtgattatattgaaatgagtttaattagggcataaaacccaacaagagccccatcttctcgtaagcagtcttgaacaaaatatttgaaaaagccccattatcaatcatggttctggacaccattttgtttgctatctggacttccacgaccagcgggtcgttgtgcggaaatcttatctggacagcatcttcgtcgttgaatgttatggttggctcccctgctcgtggaactttgggtttcctttcttccacggccaggatgacttcctcttgctcgtattgaggtgtgcgggcatatcgttcccgagctttgcccgtgtctccagcaatgtgcgggcctccaatgatgacttgctagtgtccatctattggcggaggcatcagattctggttgttttgaccttggttggccttgacatacttctgtaggtgcgggttgttcttcttgatcagaagttctatctcccacttcaggttgtagcattcgtttgtgtcgttgccgtagtctccatggaaccgaaaaaattttgtcacgtccctcttgctggtatctttct

SEQ ID NO: 279896 - DNA, 944 bp, Cannabis indica
gatcaaaatagtttgactttattttttaagtattgtaaattattcaaaaattttcttaaaatttacaagtgattcttaataatttcaacgaatacaaaaatagactaaaagactctcctaaataccgaaacaaataagaatatacaaaatattctttttagagaattaatgtattatagaataatccttaaaaggatagctacataaagtgggatgtttctaattttgtgtaacttatttgtttattatttaggtaccattgtttgagaatatggagagagaaatacttgagttgatttgtgcgcatcttaaggtagtaatctacacagaaagcagttatatgatccgagaaggagacccacttgataggatgattttcatcacacatggcacagcttgggcctacacaaacaataatagtgatagtgtaagtacaagacgccttaagaaatgtgattattttggagaagagctgttggagtggtcaaggactcacaccaacattactgattttcccattgggaccaccaatgtcaagtcccacactaaggttgaagccttctctcttatggccaatgacttgttgaatatagttaagaacaactataggttcttcaggcggaatattccgaccaatcaacaatgctgcgagatttcggtgcagttggagaatgatgatcatgatcatgttcagtcacaccaaacttccaagtatcaacgcttacacaaatagttgttttttaacttgagttgagttcttaatacatgcttctttatttcaaagaattctataggcaaaataaccatgaaaatggtattcatattaaaattttagagcaataagagcactcctaacaacttttttactctattcttcaaaatacatcattaaaactttactttctttatttcacatcaaacttttacattataccatacaacaa

SEQ ID NO: 279897 - DNA, 554 bp, Cannabis indica
cactataatactatacttgggttatacttttttttgtttttttttttcaaacttagagacaaatgtattttttatcatctaggtgtttttttttttttttaaactttgaggcagatttgtcttttatcttttatgaagtatgaagacataatcaatatttgttagaatattagtttagtttaaatttaaaagtttttttcaattattttaaagggtaaattgcggcaaaatctccaatagttttactttgcttgcaattaaccccaaaatctaaattttggcggtaaaactcccaaaactacgataccgttagcactttacaatttctattcaaatttgactgttaactgccatgacggagtatacacatggatacagtgtacacctagcacaattttatagtctatgtaaataattatattaaaaaattaaaaaaaaactaaaaagatatatatttttttctattgtatcatgttttttttaaaaaaattattttttcttaaagttttttttctttgtgttttttttcattatctcatttacctctctctctc

SEQ ID NO: 279898 - DNA, 824 bp, Cannabis indica
ggtaaggtcatgtctatcgagttggatgagtcaaagccagtctcttagaatagatggattagagttcaagtggagattgatgtgaacaatctattattttgtggttatttttttaaactggctgatgggggaaaacaagtgggctcaagtcaaatatgaaaaggtaggtaacttttactacttgtgtggtaggttaggtcaccaaagaggggatcgctcactatctttgtcggtcactgtttgggatgctcggggtaactcgttccctctttttggtccctggctcaatgtttcttcgctataccctagctatttttcaggtagggtggctgcttccaagctcagggggaagatcatcaaaactcctttggtcgtgggcagtggatcaaagggaaagaaagctctgtctccgatggcgattgatggtgctcgtacaacaactattaatggcaaacatggcattctcccacgcaactcaagatctggaccattttgatagtgacggagcagtctataggcagagctagaaaggcgtggttacccaaggtggtatcaaggattctataggagattcaaagattgacgcagcagggtcctcctgccgtgcctcctcaagtggttcaggccgtggcagttccagcggtgccagcagaacaacctgttgttggcaaccgtatggagccgttgtatgaaagattccggaagcaagcacctccagtgtttctgggaggtcctgatgtgatgaaggccgagcagtggctttcagtgattgagcgtatcctcaactttatgggagtggttggtaatgaccgggtgacctgcgc

SEQ ID NO: 279899 - DNA, 621 bp, Cannabis indica
ttgtatgcaaaattcaaaaagtgtgaattctggttgtaagaggtatcatttttggggcatattgtcagaaagaatgggattatggttgatccaagcaaaattgagtcagtgaaaaattggtcgaggccaaaatcagtgacagaaatttgaagttttctcggtttagcaaggtattatcgatgtttcgtcgagggattttctaaaatctctatgtccctgaccgagttgactaagaaaaattagcgattggtgtggttagacaaatgtgaagcaagttttcaggagttgaagcaacgtttgataacagcttcggtgttagctttgccatcagatcaagagaaatttgttgtttattgtgatgcatccagacagggtctgggatgtattctgatgcaagctgacagagtcatagcttatatgtaataccatggaattaaggaaatggattagcaaagctctaactagtgaatttagtattattgtagaattatattattatataatttattatatgcgaattaatttgagaaatgacatgttaagaccccgttggtgagccaggggcattttaataattttgacccgagaagggtaaaactgtgaatttaatttatttatgtg

SEQ ID NO: 279900 - DNA, 643 bp, Cannabis indica
aaaagtagaaaagtgaaaatatttttcaaaatcatgttctataaaattgttttacttttaaatttgttaattgagaattaaaatttgaaaaattttgaaaacaaaaaaattctctttcaaaattttcttaaatagattttctttttgatccatattttggactccgacctcaacctagaccttagaactcgaaccccaaccaggaccacgaccttgaccctaactaggactcgcacccaaaccccgagcccccgacctagacctggacccaaaccccagactcggactcccaaccccgatctcggacctgacctagacatggacctcaaacctagacttagactcagacactgaccacgaacccctattgcggaccctacttaaataaaatcaacaaataaaaattaaatttacagaacatacttttattttctgtttttacaattaaaaataaaagtggttatggaacatattttttttaaaacaaattttttttttaaaaaaaattaattttatttttgtcattaaaaatttaaaaccacctaagcttaaaataatttttacaaatcactcataatatttttttaagaatttttttctcatattattttgtgttaattaaaacttattttaattttatttt

SEQ ID NO: 279901 - DNA, 385 bp, Cannabis indica
agaggtcagggatgctttcagtgtgtcatgcccggacactacaagagggattgtccccagctcagatcaaaagcaccaaaggctctggcgagacccactccagctagggtgttcgccattacgcaggctgatgcggaagccagcccttcagtggtgacaaatcagctctcagttaacaactcattttactcagtattgtttaattctggggccacacattcttatgtggcagccagaatctttagtaaattggatagaccgtatgatagttacaaatatgggtttggaaccctattacctggcggagagttagttatctccaaaaggtggattaggtctatgccgatcagaatagacgatagagagttaagtgctaacttgaaag

SEQ ID NO: 279902 - DNA, 456 bp, Cannabis indica
aaagaaaaaggacttgtaataatattttgtaaatgtttttgggatcccaatttctgtaacttttagatcgtaaagtttaaattattacaagttttatttttattccgtttatgattaaagtttaaattctgcgctaatttcattagtaatcctgtttaggggattagggtttcataagtatcttgggtagcgtgcctaattatttagggcgttacaatttggtatcagagcgctaaggttttaaagttcctatagaccagctgaacatgtacattcatcgttagagacaagctcgactcatggtacagtaagtattgagagtacatactttactgtttgtgtgatcatctgtttaccgctttcaattttaggcagtatgcaagcatctagagtatttatgtgttatgtgatgccatactttaaatgctatttgattaatgaatatttatatggggt

SEQ ID NO: 279903 - DNA, 885 bp, Cannabis indica
cgttagttgttagttagtgtgttagttattaactaacttctgttgagctgttaagagctggacatgtcagcatctaacaggctatatattggctcgattcctttggtgaaagggtgtagaaaagacagagagaaaaccagatacagagagaaagttttgagagatcatgcagatgaaacttaagtctagattggctaaattgctctagtgttgagtgttcgagagcctagaaagactaagagtgttcatgatgatcttgtacagaaattggtgtttgtaattgcaagttcatagtggagaaatctccttgggggagagctggagtaggactcaagatttgagatccgaaccaggataattctttgtgtttttcttctgtttttatgttcaagttattctgtttatgtttctggttttgataacttaatatttgttcattatctaacaaattgattgatctgaattagtgttgtttgtttacaacagtggtatcagagcaccaggaaagattcaagatcttttggaattcagatcaagaaataataaaccagaaaagctgctgaaatgggttcatcatcaactaggttcgatctggaaagattcgatggaactggagatttcagtttgtggaaagagaagatgttggccatattaatctatcagaagttggactcagcattggatgatgatcttgatactgatgatgtcaagaagaaggacatggatgatttccaagaagaaggaaactgacactgtcatgaaacaagcaagatcagccatagttatgaacttggcagataatgtgctgagacaagtaattggtgagaagactgctcttggaatttggagcaaattaaatcaactatacatggctagatctactgc

SEQ ID NO: 279904 - DNA, 624 bp, Cannabis indica
atcctgctcctcccaacatcgtgcttactccggtccctggggatgaggtgaggcaagagctcggatagccaagcataactatgccatggacgagtactcccgggggtatgccgaggtggaagcccttaggagggttttgcgggttgaggtagaggcgagtatcaacaacccggagtaccaggatccgtgggaccttaacttggaccccctatcggactggttccgtcgcttccttgggcccaccttggctccctttgccgcggagatgaccggcgagttcgcttctcagcttacccgatgcgcgcctaagcggttcgccacttgtgcctccctgaactctatcttccaggtccaggacctcagccattccctcaccgtggtaagtacttcgcaattttgcttttccctttatttttcttcttgggaattttttttcttacacttgtttattgttcagcttgctgctgaggctggccgcctctccaagaacatcataaaccacggcttcgttctgtctgactttggggacatgaacgacgtcaggaaggtccttcaggaccttactgcggagaggcagatctaccaagaggctgctgagcgccaggaggcggctgccaaggccaa

SEQ ID NO: 279905 - DNA, 542 bp, Cannabis indica
attttgatgctcctctgaccaagcgtgggaggccacatacttcgaagaaaacgaagctcaacgtggaggagcaaacggttcaagaaatttctgggaaaaaaactagtgcctctgccgaagatcgaacagaggttggttttcagtttcattctcgtttccccctttttcaacatttacacttttcccagatttttgcgtttttttgttcattctgctttgtgtaattttagggtttcattttgaacatttcgttttatgttgtttaattttttagttctttattgttggttttgagcaatttattttgttcttttctgggtttggtttttaaatttgattttgttttctttattttcagtgtttgtttgtgctttaggttctgtattttgttttcgtttttagtgtgtacaatcagtcgtatgtagtttcttattagttttttttatagtttaatgttgttatgtttgatgtgtttttcgattttcattaggtctagttgtttgctgttattttttaggtttcaaaacgatttcagatctttg

SEQ ID NO: 279906 - DNA, 737 bp, Cannabis indica
tagtcggtgtctagatctgggactcaaactgggaccagaacccagacaaagaaccaaacccgaacccagacttagagctgggacccaaaattagaacatgaacaagaatcgccgaaccaggaccctagaacaagactaggactgtgaccaagacccgaatccagacctagaacagaacatagaccttgcctaagacccaaactgggactaaaactcgggcccggacacgctcgtgtacccagaccagaactgattcccggacctggacctaaatttgggacacgatcccaaacacagatttggacctagatagggatccagatacgaacctggactcagaccaagacccagactgggatcgaaatgctggacctagatttggaccgagatcctgacccagacctaaacttggacccgcactcgggaccccaacttggacctcgacccgaacctagaccaagatcggggttcagacttggacacaaacccgaacacagactcggacccgaacaaaaacccacacctagaatcagacccaaagctagacccggactcggacccaaactcaaacccagacaaggatcagaatcaaggacttagacccagaattgaatccagactcagatcgggattggaacttaggaatcggacccaacctagacaaagacccacacgcgaacccacacccggagcctgatctggacctagattgaaatcaggacccaaacccaaactca

SEQ ID NO: 279907 - DNA, 582 bp, Cannabis indica
tgaaaatcactcaaccggcagaccgtttgtccaaccggaattccggttctgagaattttcaaaacccatccggaattccggatgcacaaccggaattccggttcctcgcaggcagaactcaaaaattcataactctttcaactcaaatccaaatcacacaaaaccttccagacctgttctaaacatcccatagagcatttctaaagcaacaaaaccgagcttcaaccacagaaactcaattcaccattaaaggtcaaagattgagttctaaaactcaaaacttgactaagcaacataacatgcatccaattcagcccaaaattacctaaacatgctcactaaaacagcagaaaccaaaccctaactcatgcaaccactacagccaccaaaattccaattttctctttgaaaaccttaagcttttgaatagaaaaaccataactttaagcaacctaattatcaagcatcacaagcagcttaaataacctcaattatcatgcttaaacctctgcaaacaactataaaatcacagcaacaataacaacttaaactatgcatgcaaacatcatcatttcatcaaaa

SEQ ID NO: 279908 - DNA, 459 bp, Cannabis indica
agcttagctaaatagagataatgattgaggcctcatttcagtaattatattagtttactgaagtatcatttataagtggctaagtgttttaaggataaaatacattgaagggtagaacgataaatttgtgcctattcagtgtagatcatctatagaggatctttgactattaggattgtaacaatggataatcataacgtatgtatatcatggtacatatagagcgtcttatataattagagtgctattcaattccaaatctatagtggcgcaaggtagaattaataagttagggaatttacttgataaattctagatctacttattgaaagctcggttatataggcccatagtcccctcactagttgagataatattgcttgtagactcagttaattgattttacttaatcaattataattatgaaattagactatgtcttatttatgaattttcact

SEQ ID NO: 279909 - DNA, 822 bp, Cannabis indica
acatggcttatgtaaactttctatcactctactcgatacatatgaatgagtagctcccgaatcaaataacacagtataagcacaaccattaatagataactgacctgtcacaactgacggactagcatcagcatctgcctgagttatagtgaaaagtcgccccgggttctgagcaacattcttcttaggctcttctctcttagcttggggacagtccctgataaagtggcccaccacgccacactggaaacatgccttggctcggcactcaccaggatgatgcttcttacatttagggcactcggggtatgaccggaatgaggacccgcgaccttgacggccacctctgtttccccgaaactttctatttcctcctgaagctccggaagcctcagccttccgcttgtgctcagggttgctactgtcgatccccttactgacattaccaccagcaggagggtttgatgccatggcggcatcctttgcagcctgctctttcatcacttgctgctcggcctcttcagcaattaaggccaagtctaccactctcttatacagagtgtcatgggatgtggtaattttcaagtctcgactgattgtagcattcagtcctcgaacatacttctgttttctggtaaaatcggtaggcaccaaatcaccagcaaatttagataaccggtcaaattccagagtatattcggccacagacatcttcccttgagtcaacttcacaaagtcttcctggtgtgaagtccttacagccacattatagaacttttcctcaaaaagtttcttaaactcatcccatgtcatcacactgac

SEQ ID NO: 279910 - DNA, 754 bp, Cannabis indica
ggttgtccttggtgtttaaaatatagcatttgcatcctaaaactctaaaatagccaatgttgggttttctccctttccaaagcttataaggggttttatttaggggtgggcatctgatccaatccaacctttttttcctcatctgatccaatccaattagtaattggattttaaaaatcatcatctgatccaatccaatccaattagacctcaaaatctaatccaatccaatccaattactaattggatcagatcggttttttaattggatatctaattacacacctaatttttaatattaacttaaatatatgaaaataaatacgtacaaactacataacaccattaatttttaagtttaatactccataaaatatcattgttacaagcataatgtaactaaacgtttgaaataactaaaacaacaatattttcaagtaataaaatataacaaaatatcatgaaaataaatacatagaacaaccaagtgttacaaatttcacaaaaaataataattaatatatattttaatttttaattagttttattatataaatcaatgtaaataattttttaatatatataaatgtaattggattggatcggttttaaattggattttaaagattgacatccaataactgatcaaatccaattagaaatccaactttagaccatccaatccaacttatgattggatatccaatttttgtaattggattggattgggtcagttcggttcaattggattgga

SEQ ID NO: 279911 - DNA, 521 bp, Cannabis indica
tgaatgagaggtagatattttaaaatattatttataattttttgttgcaacaattcattaaattaatgaatcatgatttgttatcttttttattactattattatttataatattaattgtttgtattaattttttaaattagactaatattattattttaattgatgaatatttttgtctcttctctttcctagtgccatattttttaaaccgaaaaaccgcggtgtaaatctggaccacgacaatccgaaccattgtaaaccgtaactggggaaaccgtttttgttggtttggtcaatgtggaccgtttactgtgtaatggttcggttgcggttcgaactaaataattaacggttaaaccggaccggaccgtttataataaataattaattcatatatatatattttatgtatgactatatgtataatttaaaacttttttgtgtgtcaagttttttattgcatgaattttgaatttttatgttatgtttgacttttgagaatgtttttatatcattat

SEQ ID NO: 279912 - DNA, 331 bp, Cannabis indica
tcaggattaagatccatagacctaaaatcaaccattgatattgacttagaaagatataacggtaagtttatgttatcttatctaagatcaatatcggtcccttccaatgtatactccatgcttccaatactggtaaattttgctaatgccctgaaaatgacataacacttatccaaggtgtaagtataccttaccgctaattatcatgtcattctaaatccagtgaactgacaaatcatgagaattaaacttttaaacatataatcatgattatatttcactgtgctgacgacactataatcatgaagacatatatacatatttatatatg

SEQ ID NO: 279913 - DNA, 850 bp, Cannabis indica
ctgtgtcctcctacgttaatttgcttacaagccaacctgttttattaattaatttcaaataaataaataaataaaacaaataacatatgatttatgatactaataaatctaccggcgtttggttaaaaaaaaatgaaaatataataatagaaataagaataggaatgaaatttaaaatgtaaaaaaaaagataataaaaaaataattaaactttttttttgttacattagaatggtcattccttctttttttaaataaaatagtcattccactaaaatggtaaaaagaacattcctgccattccaatactttaaaatgcaaccaaataaaagaatgaaatgaaaattgttgcctttccatttcattacatttcattacctccaaccaaacgccacctaaattccaaattgtattacaattttatattttgtaggtaaaaattaaaatgatttatggttatttttttttttaaaaaaaaatacaaaactatgacaaaatagaagtttagccgaacgaataataaaaaaattagtggtaattcccattacacataatgaatatatataacctataaaattaattataaattaaaaaaacaataaaataaagtaaaaaataaagaaaaattacatggtatactaacttttgtcaattttttaaaaaaagctaagcggtattttttacttttttactgtgtttttttataagtttcatactgtaatatactgtgtcaagttttactggtgttcgactggtgttttattagtgttctactgttgttttgagttatattgctttgtgttttactggttgttttaataaaaacacagttatttttagaaaaaatttc

SEQ ID NO: 279914 - DNA, 599 bp, Cannabis indica
atgtttgaatagaatttaatagaaaagtagtgatagaagtaacagaaatgtaacttaagatatttaatccgtcgaaaaaaaaacatgtgttatttaagtgtataaaccgaaaacgtatggtatttatactgcaaatatcttatatatataataataactctttctaactttaaccatttattattattattattattattattattattattattattattattattattattatcattcttttgtaattctttaatttttttatattttactatttttttagaatctaataaattaaaattttatttttattattttagtgtgttaatttttagagtaagtaaaattataataaatttttcacttttctttcattattttttttggctaattaggatttttgccctgtgaactttgatatgtatcaaatcatgtcccctgaacttttaatgtcgttaaaaatgccccactgaactattgagattgttggatttaaggtacttttttccaattttaagtaaaaagtactaacatgaataaaatacagggacataattagtacatgtcaaagttcggaggggcgatgatttggtagtata

SEQ ID NO: 279915 - DNA, 549 bp, Cannabis indica
attttttttttatcaatctcaacctttgtcacaattactctaataagtgttgtgtcatttgtacccaaacccttcattgtcttgtgtaggacctgttacatgttcatacaagattaggaggagcatgacattagctattacttgatggaacattgacaaaaataaaaaggaatatttttctaataatactacagaatttcattagtgcaagtacattagaaaggcaaagctccaagcgaaaaatggggtagcccccatcacaactacttccacacaaaaaggcacactaagacaataacattcacagaaagggatatgttctgaaacaaaatatacatgtagcaatatcttttagagcttgtaacaaattataattattcatgatgtagtaccattagattcaacttgccatgttaaaatggatgcaaaaccaatctgacaatgattgcacaataccaaaagcccaacaagagccacagtgcccttaaagatgcaagacatttaatgttacattccagaacttgtcactggagaaaaggaaaaataata

SEQ ID NO: 279916 - DNA, 518 bp, Cannabis indica
tcacaacactgataagtgatacgctaaatcacttcccggggacttaaactataaactaaaagtttccctatcgataaaaagcatggcaataccctaaacaacataaaaacgggagaaactagggttcctaaaaatccccaaccggcagaccggttctgcaaccggaattccgattctgggaattcctgaagtccatccagaattccggttcctcgcaggtatcaatcaaaaattcataactccctcaaatcaaatccaattcacaccaaaccttccagacctgttctaaataccccaaagaacatttctaaagcatcaaaaccacccagaaaacacagatactaaacatgccattaaagctccaagctttgagttcaaaactcaaacttggttaaacatcattaacatgccttcaaaccatctcaaatcttccaaaatattcatataataatctcagaaaacaacaataaccatcaacaacaagtgcagcaacagactcttcatttttctttgaaaac

SEQ ID NO: 279917 - DNA, 809 bp, Cannabis indica
acacctatttacaaggcttaacagatgagtaagaacgttccatactagggtacagccactataccacattcctacgtaccttgttgtacgagtgttggtaggatttgtttcgtaccctgagtaccactgagtgatataccgcagataccctgtactttctcgtacttgtgccggtatcactgtaatgtactctttaacaacacacactataccaatgcactctataccataactgtacaagtgttggtagtgaaaaacacatataagcatgcatatacacttaacatatacatacactcgcataatgatatcacacatttatatacagtccttaccttctttccagattcaagtgtgctggccgacctgaacggaaagtctcctgctagatggatgccctaatcacataatgaaactaggtaaatcacatgatcgaaaccctaatccgggaaactcgaacccacaatcctaggttctgttatattctctagggattacactaactcaggaaatagggaaacacccaactacgacactgaaatggacgagaattgagaaaacttagcattcggggctagctggttttacaggtattggtaaaaccggctagccggtttacaccagttcaccccaaaatttccatttcttgctcaaaactccaccaaatgctaccaaaccatccagagtacctaattagggtatacacaatattttccaactagtaattcatagaaataacatacagtttgaatccattgatagaaaatggttatgaaacacttgtgaaagtgtaactgtataatgagtaa

SEQ ID NO: 279918 - DNA, 1002 bp, Cannabis indica
aaattatttaggattgtatgttttagtattttcgcttgtcattcctacttgctaagtgctaataatttctgaatatgattttgtattaaaccttatttgatttctatttattgttatttgtagtatccaacatgacaatgaccaatcccatggtgtcactgttgactaataataagctcaatggagctaactttatcaaatggagagagaacattaacattgctctcattggtgagaatgccctgtttgtgttgactgaagaggctcctgagcagccaggtgagaatgcaaccaaggcagtgaaagaaaagttcgagcgttggcagaatgccaacaacaaagctcgatactttatgctgtctagcatggttgacaccttgaaaacaaggtttgctaacactctcacggctgcagaattcatgaaccagttaactgaactgttcgggatggcatcaattcaagctcgctttgaagcgactaagaatttcatcaatgcacggatgaaacctcatcagagcgtgcgtgatcaccttctccagatgactagttacttccaggaagctgagaatcatggagctgttatagatcagacaactcaagtgagtttgatcttaaacagtttaactccagcctttctgcccttcacttcaaactatgtcatgaacaagttggagcttgactttcacgagttaatcaacaaccttcagacatttgaaaatttgattggaggaccacagaaaggaggagctaaagctcctaattctgggaatgctaatggtgcggctaaggctgaggcaaacattgcctctacttccaaacccaacaacaagaagaagtggaagaatagcaagaagcctgttcaagctgtgaaaacagttaaaagaaaaaggctgctaatcccggagataagccaaaaggaaaatgcttctattgcaatgaaaagggccactggaaaccccaatgccctaagtttctagcaaagaaacaaggtatttctttcta

SEQ ID NO: 279919 - DNA, 747 bp, Cannabis indica
agcattgcataatgcatcattaactcaaacctaattccttatagatttttttcagaaccttagtcttgaaagtcccgtctcagcaaataaaggagtagaaagtagaaacaaaacaataaaaaaaatccaggatacaaagctgtaagctagaagtgcctaaatggcaattttgataaacagtatctacacaacaaaaaaaaacaaaaaaatggattttatagctttgatgggatgtcagtgtgtatatagcggctccaggggagtcagtgtttctagagccattgtaagtggacctacaatgactctcataagaatacatgtaagacttgagatgactcttcatgggagtcatatgaggggtcatctaacatagagcagaacatggaactttagatggctgttcatgggaagacaaaaatttcaaacaactcgaacacacaataaattttcttttaaatatctccgtagcacacaacatttctaaaacatacttcacataaaaacacacaaattgttaacctccgttattaccgcaacacacaattttaatctcactacaggtaaatatttaagatattcaaactcctctaacatgtgcataaacagtcaaaaaagagagagattaatgtacgcacttcttgcagttaacaccagcaattaataagttccaatgtccttgctaatcttcaacacaactacaaaattatataaaattataaaaatgatatgagacaatgtgatatagaa

SEQ ID NO: 279920 - DNA, 485 bp, Cannabis indica
tatttcttcgacgtcctccattggttccacgattctttcggaccctacacgagggtccaactcatcctcttcagccatttctggctcagcggactcccggaccataagtacgggcaggtgggttgcaacattataacattgccttgcttccccctgatttccccttacagtcccgactccggcctcctgggtagggaactttaggcacagatgtcggattgaagtgactgcgccaaagtctactagggccggtcggccgaggatcgcgttgtaggctgtcggacagtccaccaccacgaaggtgcagtatttgaatgtgctctggggagtgtccgggcacagggtgaccgggagcctcacttttcccattgggatgagtgtcgtcccgttaaaccctgtgagctgggatccactaggcgagaggtcacgatctgtcaagcctatcgcggtgaaggcatctttgaagagcaagttcacggaactcc

SEQ ID NO: 279921 - DNA, 586 bp, Cannabis indica
atttgtggcaatcatacagaggcaattcccttgccttaaaaatcatacgacaagggtactactggccaaccttgcggcaagacgctttcgcttttgcaaagaaatgcgacaagtgtcagcgaatagccacatatacccatcaacctccgagtaacctacattccatcacaagtccttggcctttcgcagtatgggggattgacttaataggcgaactacccaaaggaaaaggcggggtcaaatatgcagtagtcgcagtagactattttacaaaatggggcgaagccaaagcactcgcaaccattacagcgactaagttgcgcgagtttgtctacaactccataatttgtcgatttggtataccttacaaactcatctcagacaatggaaagcagttcgattgtaaagagatgcgacaattatgtgacgatctaggaattaagaaagcattctctgcagtcgcttacccacaaagcaacggacagactgaagctgtcaataaaataataaagcacaccatcaaagggaaactcgaagaacataaggggacctggccagacgagctttcacaagttctatggtcata

SEQ ID NO: 279922 - DNA, 551 bp, Cannabis indica
agtatttttataacatatgtgattatttgttattttctgaacttgtgtatgaatttattgaaccaaaaccttacttctgttttattgatgtgttgtagtgccaatatgaataaccctcaccccgatccactcctagtcaatgtcttagccaatgaactctatagtgtgaaaatgcatcctggtagttgcattaactcgcacctattgttgatgaatctgaagttccaaaaggcaaatctacttggaattgaattatcaaaggaacaatgggtacaattcattcttaatagtcttcctccggagtataatggatttgttgtatcttacatgatcaacaattttaactcctccgacatggacaagctcgaagcagaattacgagctcatgaacggaatttgattgcaatgggacctcctggttttgcaaactttaatcagaggaagaggattaagcatgaaggctctaacaaagctgcttcttcaagtacaattatcagcataatcttctatgttcgaattgtaatgaaaagggacatcaagaagaacgatgt

SEQ ID NO: 279923 - DNA, 400 bp, Cannabis indica
tgagcccgaatatccttctttgttgaatctggattcttcacgatcttccacactatgattgaggtactacttgatgtttgtgggcactactctatcacttagggatttcaaaacaatcaaataagaagaagaaagagaggaggcggctaggtatagagagatggctcaagattttctctgaaaggaatgagatgcattgtgttactttctatttatagaataccatagggttagggttgaattacttggcatcaaagtaatgaaaatattaaatgataaaccctatgcatgtggccggccatggcttgtggatataggcctcacttttgcaattttgctgttttatcatttctgtatcccattttctcaaaaaaatgtcaattttcaaattcaaccattt

SEQ ID NO: 279924 - DNA, 401 bp, Cannabis indica
gaactagatatgataaacttattgtaatatcaattcaattcaatatcacctagttgatcttagatcaaatgatctcaatcttgaaatggttaggttttagttcaattgcattatttgtgctctttaatctattagttaaagtcggccaaatggttcttcccgtgacgtataggttaagaacaatgtagttcaattgagtgggaacgctaatcatagatacggaatttatagcttttatctagacatagaagtgaaacgatgaattccttcgagcttggcttaacagagataaatggttgagtactcatttcagtgattatattagttcactgaaatactatttgtatgtagctatgtgttttaaagataaaatacattgaagggtgtaacggtaaattaat

SEQ ID NO: 279925 - DNA, 489 bp, Cannabis indica
ttttgtgatggccttgtttgccgtcccgctcaaccacttgaagcctggctgaagaaaagtaaaaataccccgactgccttgcttgggggtagacttcaggtcgaagaaccaagcgacctcatggggagaaggagcaccccatccctaagaagcgtagaggacgaagagggcaaacaaatacttaatgcccttgagagtgatctgggccgggcagaggccgaagaagtttgccacatcccggaagtacttgtgcaagggaatcaacgccccttgctggccatgagcccccgaacaggcgcacatcccctcactagggtttgaggcgcgattatcgtgggtaggaataaagcagtctagctcgcccaggtatccgtcctggtcgagagtgcggaggcgtgcctccgaaatcttggacagaggactcacccatctggcgcccaaggcaccctacctcctatgaggaaccgcctcagcaagctcctcggtgac

SEQ ID NO: 279926 - DNA, 795 bp, Cannabis indica
gacaggtgtttgccaaagtggatgacctgcagctgcttgttttgtaatgaacctggtctgtcttcaagttttgatccagtgtttgattggcaaagctttgttttccaccacaagcttgttttacattagtgagaaattagtgtcactagacattgtgctggtaataaatttttacacaaaatgggtattttgcaatttttgacattatgttcatctgtttatttttatacttttattaaagtcttaattggtgttttttttttttttggtctaaagaagttgtactgtttacatgggcattagagggattatctatgtcatatgccataaaataaacaaaagaaccgcattatctgctcacttttgaattgaagctaagggaaattgatcaaaagagttatttgcggtataattcccataaatgcttagtttattgcaacttacctcaaattttaaaattttagtggtaaaatcctttaaactcatgttctgttagcacgtaaccatttccatccatttttaggtgttaagtgccaaattggctgttcatgtgtacataaaaattgtccacataaatatagtgtacacatggcacaatattattgacccgcataaataactatttaaaaataaaataaaaatgaattacttaaaataaaaataaaattattaaaaataaacaatttttttttctttttctttttttttatttttagtccttttttttttaactttcacgctttctctctctcccctgtcacttctttcttcttcatcatatacagatcaccacca

SEQ ID NO: 279927 - DNA, 524 bp, Cannabis indica
gaccgaattgaaatttttacctaccatgacaaaaaaatattttgagaaaagatttttctcccggtcaaaaagtccttttatacaattctcgtttgcatctctttccgggaaagttacgctctaggtgggtaggtccatacattatccgcactgtttttccacatggagccattgaaattgaaaatcctaataatggtaatgtattcaaagttaatggacaaaaattgaaaccatttttagaattgaaaaatgtggaagtggatgaaatcctccttgaggatccaatttaccatgatccttgattgctctcatcaattcttggtaatatgtgttttttctttatgttttagattaactttttgttttgattttgttatctttttgttgctcttgacattgctccaagatgaggtatgaccattctaaactctcaactcttttactttcaatttatatttgtattttgatacattgaggacaatgcataaattaagtttggggtggtgagttcctatggttatttc

SEQ ID NO: 279928 - DNA, 1192 bp, Cannabis indica
ttttattttaatattttattatatataaataatattttattattttattaaatataaataaaaagtgacccataaatttctcataaaccaagaattcagttatatagacacaccttatatagaatagatatatatatatataacaatttattaataaatcttgtttatggcgtgagataagccattaaaccaatccaaacacactcacaacatgcacactaagttataaaaaccaaacaaccaaataaaaacacaaaataccaaatgatcaaataaggtaaaataatgaaacatggccaatacttaattttaaggacactggaagccaattggagcatttttgccgcaatagttaagaagtaagttcagcgaaattggaacattaagattgatgcccaaaatattagccttaagggcagtacaaacacacacagctgcttcgagatcaaccaaatctccaataagactgcaacaaggagttttgggtggagtcccaacaacaacgtgtactaactcattcaacaactttgcacacactccaagctttagggtgtccaaaggacacttagccttagagttaagagttgggatagttggtattaatgggatactagtggagctaaccatagtgaagaacaccaaattaagggagagaaggagagcagtgtatgcttgagccctaaaagccattttttctcaaaatatattatgcaaataagtgaagaagatgatttacacttcgatatggatgagaaatattgaaagtacagcttctgtatttatagatgctaattcaagttttaagaaaagaaataatataaagtatatatattaattgatctattattagtgggcatgtgaagatgtaggacatgggaacaatacccaacatgaacatctattcatgttagagcaagaataattaagtgtatgcatctataggattgttaagttggagattttgcgcgccttaacttaatttctcttctaatattatctagtttaactcatgtagtgtatattttgtaaaatatgttttttactttgtgaatctaagtgttgagtgacaaatatgtacgtcaagcccactaaaattaatagatatatatatatactagtaaaaagttacgtgcgaggcacgtatactaaattttatgctaggtattttttattatattaaaaggtaatacac

SEQ ID NO: 279929 - DNA, 697 bp, Cannabis indica
atagttagcgatttttatattatttattaaatcaaaaaaatataagactaaatattaaattatggtaatttggcacttattataatatttgtcactttaaaatatctcttaatatttgttatcatcatgtaaatcgttgctttttataaataatattttttaggcaacaaaataataattgtagtgttttagaatcacgggaaattattgcttgtacaatataattttattatttggtagatttactttttaatatttacataatataatattgattgaaaatctatcaaaataatatttatactgtagaaagaatagaagcattgttttttttagtccaaaatactacaactagatcaaaaataatctgtccctgtcagttgcgctcgggccagccctgaaaatataatgggatttgaacctattaccttagacattatgccatccacttcaaccaactaaactatgaatatttgttatttataatacacttaaattttacttaaataaaagcctaataaatttttttatattttattttgggcccccggaaacgttgtgggtcttaggcacgggcctagcccacctatgcttagagccgacccgtacgttgcgcgtctacaaataacttataattttagtgaaccttcgtcaaaaatgtaattagtatagtcaatctctcgatataccaaataat

SEQ ID NO: 279930 - DNA, 210 bp, Cannabis indica
aactggagtgggttttttcttggatttcttttcaggtggatgatacgtggtgtcagcagaggattttcttttgggttgaacacgttcactggttggggtaggaatagagaccttagatggaggacgaggagggcctacaggtttcgagggagactggtgactcaacgaagaacgagtgactcgtttggacacaggtgaggaaggagatga

SEQ ID NO: 279931 - DNA, 376 bp, Cannabis indica
acatatagagaggaatttcacaacattaagattttagtgattaaggaaatgtaatggtgcagaaaggttgtattgattgcaacctatcagatcctattagggagagaatactacatactacacttgatctggatatcaaggtgttgagattatttgaaatacaccctttgttttatattagtgcaagtaggagtgtgttgcgttttgtgccctaaataaaacccatttcaatataatcagatttactaattaataaagattagaaatcgcattttatgttgcatggttcacatgatttattacatgattatacttaatgtataaattctaaaaagtccaaaaaatatataaatatgtatatatttattcatgatta

SEQ ID NO: 279932 - DNA, 518 bp, Cannabis indica
aacaataataagaggttaaaaattcttttttaaccagaaatctactattgagtgggagccatctgagatgtaataaaatgggaacattaggggaaagtcaagaaagatttatgaaagtgacctatatgttaaatattaaggaactgtacattagtaatcttaatatccacaccaactcattaagaatttgatatggtggttactctgggggtggaggagttattctagaagagtgtaaaaacccatctataataattcaagctccatcatagaagatatatataactttgtaaattcaaaattaccagaaagttatttactgaagaaaattctacactgcattatctcaattccaaattttaaaataggagagatatgtcttctgtttgttcagatgtacttaataagcagtaaggatttcagtatcccttgatgagtaaagcatatagttaaggatgtttcataatgttttaagaacctggttctagaaatttgggtggattcaaatatactacact

SEQ ID NO: 279933 - DNA, 606 bp, Cannabis indica
agaagtcgagaagcttctatagatttccattagaaaaatgaattcagcaacttacaaagtaaattgtttgcactagagtaagtaaattactaggcataccacaagccatagggttagataatctcaaacctataatactaggaacaggaagttttgttaagtccattgaatagacctactaacgaaaatttcctttcttatccttgtaatagaaaacttttggttgttccatatgaatggtcttaaccatagttctcttggcttttcttcttagtttcttattttgacaatccattacttgttcaaacgaacaatgcattttaatcaccggtgtcttccaagtgataagagggtgagttccttgaaaccctcccactacgacaaggtaccgtgaattttgtgtaagaatactaaatggtattgtcctcttcggttgtgtcaagtcaacagaggtagtgggaccatcttatacagagtaagatgattgaacacttttggaatcaagaaaaaatatctcctttatttgctactttgttttcaaacttagtcattttcttagaaaagtagtatttgttaaaacaaacactttcttatgtaatgactatg

SEQ ID NO: 279934 - DNA, 527 bp, Cannabis indica
actcaccccaaacttaatgtgaaacttggctcttgacaagtgagcaattaagttaggatatatgtggaaatgcaaattaggattggcgttagatgtatgattgggttgcacaacaagaataggctaaacggctcaaacttgggtgactagggaaaaattgaattcatagggaaggttagaaaggctcaaacgtccaaagatggcctaaatcatttctaagttataaagctcgctaggatttcgcctcaaggattacactagctaattctagacgcttaaactctctcaaagcgttggctattctaaaaactcaagtatggtgggataacacaagcacacaatagttgaaagcattcctcataggctagcatttagacaaaaataacacttaaaattagcattttcaacacacaaaccaaggcactccacaaatggaggaaaatggatatgtttcatcatcgagcgctaccctaaaccaagctgaaaatacatgcagtatttttctcatttgcaagctaaaacataac

SEQ ID NO: 279935 - DNA, 850 bp, Cannabis indica
ccccccagcctttctagatttttacgagcatatcatccacgtatacttccatatttcgctcgatctgatctttaaacattttgtttaccaatctttggtacgtagccccagtgttttttagaccaaacaacatgactttgtagcagtagaggcccatatctgttcggaaacttgtatgttcttggtctgtggatgcattttgatttgattgtagcctgagtaagcatccatgaagcttaatattttgtgctctgctgttgcatctacaagctaatcgattcttggaagtggaaaacagtctttagggcacgccttgttgagatatgtgaaatcaatacagactcaccatttcttgttcggcttgggcactagtacgggattcgcaacccaagccaggtaaaaagcctcgattatgaagtttttgttgtgcagcttttcaacttcatcctttagggctactgctcgttctttgtcccacagtcttcgtttttttgaactcgccggaagttgggctcgatattcagaacatgtgaaatgatagaaggatcgattccgaccatatccgcatgtgactaggcaaaaacgtctaggtttgctctcataaattttatcaattctaattttaggtcgagcaacaaaccttttttgatctttagctttctggtcgggatatctggattgatttcgatctcttctaattcttctagaggtccaacattgctgctttggtccccaaatcgaggatccacatcttcatccccgccttgggaagttccctacttgggaatgtttttccccttgtctgtgctctagctggaggatattccttcttagccttggccactacaag

SEQ ID NO: 279936 - DNA, 131 bp, Cannabis indica
atagacacatcattagttatctattgttataatcctaatgtgatatagatgatttacactgtaaagggattaatttaccgtaacaccctaactaccgtgttcccaaactgtacgtatcaccctgacctaaa

SEQ ID NO: 279937 - DNA, 847 bp, Cannabis indica
tcaagaatcctgaagtggatttcctagaatcacaatcaccagccatgtctgcatctgtgtacccatcaagcataggttcaccactaccaaagcataagcacaacctggaagtacctcgtagatatctcaatatccatttcactgcttcccaatgatccttaccaggattagagaggaatcggctaacaactccaactgcatgagcaatatctggccttgtacaaaccatagcatacatcaaactgccaactacagatgagtaaggtattgaagccatttcttgtttatccttctcacttgtaggacattgtttggagcttagcttgaaatggcctgcaagtggagaactaactgctttagctttgctcatgttaaatctttcaagaactttttcaacataagcttcttgagataaccaaagtttcccattcttcctgtcacgggaaatcctcattccaagtatctgtttcgccgatcctaagtctttcatagcaaaagacttgctcaactcttcctttagcttctcaatctttctgacatcatggccaacaatcaacatatcatcaacatacaacaagagaataatgaaatcatcatcagaaaacttctttgtaaacacacaatgatcgaaagtagttctggtatatccatggctcgacatgaaggaatcaaacttcttgtaccactgtctaggtgcctgtttgagtccatataagctttttctaagcttgcacataagattttcttttcccttgactttgaaaccctctggctgctccatataaatttcttcttccaagtcaccatgaagaaatgcagttttcacatcaagttgttctacttctaa

SEQ ID NO: 279938 - DNA, 584 bp, Cannabis indica
ctctatatgttccacgatatagctacgctatgagactatccatttggtattatcccaataatcaatgatcctctaatgatatttcagtgaactaatataatcactgaaatgagtactcaaccatttatctctgttaagccaagctcaaaggaaatcatcatttgacttctatatccgaatagaagctataaatttcgtatctatgattagtggtcccaatcaattgatctaccaggttcttaacctatatgacacgagaagaacaatttggtcgactttaacaaacagatttaagaacacaaataatgcaactgaactagaacctaaccatctcaagattgagatcacttgatctaggatcaactaggtgatattgaattgaatagatattacggtaactttatcatatctagttcaagttcaatatcggccccttccaatgcatactccatgcatcaaacccaagcttactttaaccaatgcaaaggacataacacttatccaaggtgcaagtaaactacattgtagattatcctataagttaaaccctatgttctgataaatcataggaatacatttaatca

SEQ ID NO: 279939 - DNA, 521 bp, Cannabis indica
taaaacccatttcaatataattagatttactaattaatataagatcataaattattctatgttgcatggttcacatgatttatttcatgattatatttagtgtatcaattcttttaagtccataacatatataaatatgtatatatttgttcatgattatagtatcgtcagcatagtggaatacaatcatgattatatgttcaaaagtttgattcccaagatttgtcagttcactggatttagactggcatgaaatcggcgataaggtatacttacaccttggataagtgttatgtcctttccaaggtattggcaaagtttaccaatatcggatgtatagagtatacattggaagggaccaatattgatcttagataagatatcataaacttaccgttgtatctttctaagtcaatatcaatggttgatcttaggtctatggatcctaatctgatatagttagtgtaacaccctaactaacataggcgtattacgtgctttttaaacatgctgtgcagctc

SEQ ID NO: 279940 - DNA, 688 bp, Cannabis indica
aactaggaactaaaagtttccctatcgataaaaaacatggcaataccccttaaaacataaaaacgaggaaaaacacgggttctgaaaattccccaaagaacatttccaaggcatcaaaacaacccagaaaccacaaatacaaaatttgccattaaagctcaagctttgagttctaaactcaaacttgagcaaatccctcaaacatgcattcaaacctgcttaattctacttaattaagcctaactaagcctctgaaaacaattaaaaacaataacaacatcacagaaacagattcactatatttcttcaaaaatcacatattttgcttagaaaaatcatggctttaaacaaggtagcaagcatgcattaaaacctagataatccattcattttaaacctaattaagcttctgtaaacaacaattaaacacagcaacaaacagccatacaaactaacatgcaacctaccattttcacctcaaaaacatcaagaacataaagaaaggttgagaacaacttactagcaactagggatcacaaaatctacacaagatgggcttgaatcaccaaggaaaactcctcctccttgctgctcaaagagggccgaaaagagagaggcttgagagagagagagtttgaaaattctattttcctaacttagtatttttttgtaaaaatgaagggaataa

SEQ ID NO: 279941 - DNA, 752 bp, Cannabis indica
gtatgggattttattaatggtctgtaaaaatcaatggcttttggaaaagaattagaataagccattgatttggtatattctttctatgagattgtcccttcctttttgattttccaattatagccctcaacttatgtaacagaggttttttaattaaggttataatagtcattttgtctaagaatctaacgtggttttaaacggcggagcttgtccccacgcgccgattgacccggtcaatacgtccgttaactatatctatatatatttcctttgctcctgccttcacataaacggtgagatagataaagggatttttttaatttatttaattaaagtctaaagtaattcaattttttattaaataatttaagtattaaaaattggggagtatgtgcaaaaaagctgaattctcttttctaaaaaaaattggaagaacaaaagccacttttcaatttggtatttgacctccttcactcataaaaggtcactatgaagtagtaggaattgcaatgaataggaagatgttattattagagattcatctcatgagccatagttgaaagatgaatacaatttagatattttgaccaccaaactgtactagttgtgttagaatgagaaagtgtatgattgaagaaatagaaataagtaagtgtatgctaagatgtatgtggttccatattttatactcactttactaaaagtgagtacattttaattaaaaacaatatgatggtatttttgattaa

SEQ ID NO: 279942 - DNA, 880 bp, Cannabis indica
ttttttattggtatttataataatttagagatagtgttttttttttttaattttacgcctttctttcgtgcaataaattataataattatgtaaacataaaatatcacaaattccaatgtttaaaatagtccaacattaattcaataacaatacataatagtccaacacatcacaatacaaataaactaaaaatttatgttaaacctcggtaggtgcaagtgcttctgttgtgtcccttggcaccgcacttgctacattttcgtgatttgataatcctttcaccattacaagcagttcggttgttcttaattcttccaaccttttgcttcttgggtcgccctactggttgcttctcaacaggcactccaactgtcatgttctttatgtcatcaggcaattcccaatcatcctcgtcaccaactggcataattgttccttcgtatgttctcctccaatattctgttgtgtaatatggcgagcatagtgtgtacacgctaatacttcgctcctgagatgcagcacatgcatgaggacaaggaaacttcatgcactggaacaagccgcaagtgcaactcttttcctgcaagtccactacgccaccggtgagaactgttcttccagggtgaacctgcaacgtgtaaggcccgcatgagtcaacgttcaaaaaccgactttttcaaaatgcaatgccaagtcctcctccatttctggtgctaggggtttcgtccacttgtcagctttttcttttcgtgaagcaaaccacttttggactttggacctcaggaatgctacagcagcagtgatcgggaagcctcttgcatccttagttgtgttgttgaagctctcagcccagttgctcgtcattacattgtaacgtac

SEQ ID NO: 279943 - DNA, 572 bp, Cannabis indica
aaaagaaaaataaagggaaaagcaaacttgtaaaacacctaccacagtgagggagtggcagaggtcctggacctggaagatagagttcagggaggcacaagttgcgaaccgcttgggcgcgcagcgggtaagctgagaagcaaagtcaccagtcatctccgaggcgaaaggagccaaggtaggcccaaggaagcgacggaaccagtccgacagagggtccaaggttaggtcccacggatcctggtactctgggttgttgatggtttcgtgcatctctacccgcagaaccctcctaagggcttccacctcggcaaatccccgagaatattcgtccatggcatagttatgcttggctattcggagctcttgcctccctcatccccaggaactggagtaagcacaatgttgggaggagcaggatgttcttccatgggggagaccccaccgtcgagaccatgggcaggagtgtcagctctccgaggccgcttgggctcatcctgggcaaccatcttgcccttgcgcttgcaaatcagagcaacctcgggctcttcttcaccttcttcagcgtcccc

SEQ ID NO: 279944 - DNA, 682 bp, Cannabis indica
acccgtgagtcacaatgactcatgactcaacaagaaaagctaactaaataaaatcatagaaaatgctagcaaatttcattacaatgtaatatacataccaataggtcatatacattcaaggtgcataaataacttaacgtctatgtgagcacacttattacataatcaagaatatttatagctattcataatcaacaatctctgtgtttcatacagcaccctaaacatacatcattataaatactcaccttcagtgcttcataaagcactctaattcacacattaccataaccacataatctcagtacttcataaagcactctaatcttacatctctatgaacacgcattcttacattccatgagtcactgagactctgcaagaaaagtgactaacttcataagcagtataaggtttgtctagtcacactataacaaaacgtatttaattacaacctatcatataataacaagcttaatcaatttcacaacattataatcacacaatcccagtacttcataaaatatccttaccactcattaaccacaagctacgtatgtcactatcgttgcccgatacagcgaacgataagtaagaaacctattcgcggtttcaggagtaattactcataacggtaatgatcgtttccaatcctcaccactcgttatccacgagctacgta

SEQ ID NO: 279945 - DNA, 793 bp, Cannabis indica
caagagcggtttttgaaattgaaagatagggcattcattgaagatagagggatagacattgtaaacctgagtcaaactgcaaacattcctcctgcatttgcatctattagagatcaaatcttacataggcagtggactaagtttgtggatgtcactgagcgtagtaaccaaactctagctttggaatttttagccaactggcctgaaagagaggatgacaaagtaagagttagggggtagagtgcctgcttccacagctgccattcatgctctttacgagctcccaactttcactgtagagcagcaacccttgaaacagcaatttcgggaaagaagtttgaattatgtggatattgctgagactctagggtatcctggcctgaggttccatgagcttgctggagaaccataccaattgtaccgatgtgaacttaacccagtggccaaggcatggctttactttgttagtgcaaggttgctcccgaacaaacatttttctgatgctcaaatagacaggattaaatgggtttatggcattatgaaaggttataatttgaatgtgggggatattattcgagtgacctttgacataatggttgagggatcttctggtggaggacttgggctggctggaattatcactgatctttgtgagaaacatggggtaccgcagtactcatatgataccaaggcgccgccacaacgcagtattaacttgtccactgttcttcgcttcaaacctcctcatcctcatggtcaaccgccagttcagagaggtcctccggcaagagaa

SEQ ID NO: 279946 - DNA, 118 bp, Cannabis indica
ttttctttcttttcttttcttttttttttttttttttttaacaagaggcaacatgtaataatggaaatgttgctcttgtattcctttttttttttttaacataaagaaaatacttaca

SEQ ID NO: 279947 - DNA, 557 bp, Cannabis indica
tgataactctatggtatagagttattttttatgctttaaaactaaaaatattgtgaggagagtaatgaaatgtgtttagttgcttaattttgagtagttttagtttaatttctagttaggaagctatcatttgagtcttgtaaaaattatggtgttaattgtgtttgtttcaattaaatgttgcttatttgttgtgggaaagaagaattaatttgctaggaaaaaggaagtgatgcaaaggagaagtttgagcaaaagctgaaaactgggcagaaatgctgaagcaatgctatagcattctgggcagtttgggtaatgacgtggaaaaagtctaaaaaacgactttcacttatccacatcagcaaattcgtccaagtcacttaaaatgcaccagctggctgctttggaagaaaggagactaaacctagtgggccaaagtgcaaaaagattgggcttctattttagggtgtgaattttgtaccctaaaaatccaacaacaaaaagagaaaaaaaaaaaaaaaaaggaaagtacaccatcatcttgaccataacgtgca

SEQ ID NO: 279948 - DNA, 684 bp, Cannabis indica
tttttcgaaatagagtatttagtaactacgttttcaaaaaaaaaaaaaaagaataattttgaaaagagtatttatatgatgtagttacattattgctcaatttactatgtacattatgcatcataagtctacagaccgaactcaaaagaagtactattgctgcagtttacgaaaatattaaaataatgataacaataaatccaacagaagcttcattgattgaacacatgtatagagatcctatatatatatatagattcatttgttccaaatatcattaaataaagggataattgcggcaaaagtccccaaaaacttgaggttgatgccgattagtcctcaacctcaaaaattggcggtgaaaatacctaaggtcccaatttttgtttgtccgttggtccctaacttaactgatccgttaaacacaaataaaatgccacgtgtcaatttttaattggtttaaataataatttaattaaaaaaatttaaaataaaataaaaattaaaaaaatattttaaaattataatttattttattttatttgttttttttctttttttcttttttcttcttattcttcttcgtcttcttcctctagccgcactccgaccccctccccacctcgtctttttctttcagccacactctgcccatagctccagcccgcccgccgtcgagatccg

SEQ ID NO: 279949 - DNA, 689 bp, Cannabis indica
aatggatatcaaaatgaaaatacaatttcttttaaaataatgagctttaaatttaagatattcgatctccattgttggtcttatataattattgttttaatgggacctcgagacgcttgatttcttcccccttatggatggttatccattgaacatttaacattgtaagatctcgaaagataagtactttgtaaattttcttttctattaggctcatccctacagtgactacttacacataaatttataaagtataaaacaatggtaaaaagctcataaaataagaatagcattgactcttgtctactgggacaacgttagattcttattttgatcgaataaaaggttgttaaaatggtgtctattttagatgagctgactactctattcaactgatgatatcttttactcttgcctaccgggacactgtatattatctagttgaaaatcttagaaattttttagatgtgtttatttttgtattttcacatgtcttcattacttgctaaatatttatgaattttcaaatatgtgtgtgaatttatattgaacctgcattgtgttttctattactaattatgtagtatcaatttcgaaacttcattgtggtgtaacttggtttcttgttttaataggacaatcccaatagattatcatccgttacacaacatatgtaacaccctaactaa

SEQ ID NO: 279950 - DNA, 641 bp, Cannabis indica
ctgcaactctattaagtttttatttaacgtatgtattattactatactaaaattaaacttaaatatttatttacaattgcgagttaaacttaatagttattgcacaaattacttttttttatttgtagattttaaagggcatatttttttaattaataaaattaaaattaaaataaaataaattaaaaaaggaaaagtatttcctataaaaataaagagaatctttctttttattttctccctaatttgtgtaagcctcactatttctcttttcaaaatttaataaataattatataaaaatcaataacataccattcattttcattccctctaagtaaacatatcataaaagtattaaaatgtcattcttttattaattttttatacatcttaaatgttatttcatttaatttctatttatattctcattcatatatattcattcctcttattcaatgccacttaagggtggaaaagaccaatgatgttatgtttggtaacaagggagagtaggatagacagagaataagagagaaagaggagagtgataattcttttttattgtttggttaaaaattgagtgattggagaatagatactgactaatttataaaactattagtgtattatacttactaat

SEQ ID NO: 279951 - DNA, 762 bp, Cannabis indica
gctctttttgtatccattagtcaaaataccttcaaattatagttcattaaatatacccacttttataagtgggttgcctaattcaccatcactctctacttaagtctaacatataatttgcattaatctgaaggtataattgagacatcatctataaaagtaggtatattttaaaattataaaataaagtaaaatcaaaacatctaaaattaaatgagtatactatctaatttcctcttagtatttctctattaaaagtgtctggcatcttgctcaagggtgcccaagacactcaagcccagaaaaactctttaacaaaaatgcttcaaatttattttgtaaaaatactattttttttatttattatttattacaaaatataactatttttttaaaaaaatatatatatttaatttattttttaagatattacatttaatatttactaaaaaacatatccaattatatttaaaaattactaaattaaaatttgcaccattatatatatatatatatatatatataataaaaacaataaaaaagttcacaataaaaaactacaattaaattttttgactcaaagccctcaattggcttgagacgtgcctgactgttattgatgtaattaagtatagataattttcataaatatgggaattgagggtatagtttacttttgtatggcataaataaataataccatatggttacaggtttctttctttatttatttattttttttttacatttatatgagttttt

SEQ ID NO: 279952 - DNA, 731 bp, Cannabis indica
gggacgggttattagacattgggaatgtcgggaatggccgggaatttagaatttcccaaaaatacccctttagtgttaattatgtggttttagtgtggaggggcaaaatggtctttttgccccaatgactttttgtcttttagtgaatttattaattgaaaaataaatgtttaattgtttattatttggctgaaaagaattctttttacttcattttactcttcaaacctcatttcctacacttagaaaaaattagagaaaagctttcaaaacaaaactctctctttctttcctctcactttcggccaccttggagcagcaaggagttggtcttctcccttgaagttttgcttgtgaattcatctccttttaaggtccatttcaagctaggttagctcttgttatttccttctttaatttgttgaaaaatgatgaaaatggtatgatgcatgcatgaatttgtaatattgttgctgctgtgattttgttgttgttttctgagatgtaagcatgttgattagagtttaattaagcttcttgtaatgcttgattgttagattatttaaagttatgatttttctatgcaaaaatgtgatttttgaagaaaatgttgtgaatctgttgctgtgttgttattaatgtttttaattgttttcagaggcttagttatgcttgtttaagtagattcaagctagtttgattgcatgctagctaggtttgctcaagtttga

SEQ ID NO: 279953 - DNA, 545 bp, Cannabis indica
ttcatcaaaatcaataccttctacctgtgtgtatccttgtgccaccaatcgggccttgtttctcaaaattgtaccgaactcatcacttttatttttaaagatccactttgttccaattatattgataccttttggtgttcgaaccaaaatccaaaccttgttgcaaacaaattggttgagttcctcttgtattgcattgagccattcttcaaaattcatggcttccttcacatttttcgtttcatattgataaacaaaacaaagaaagctaatcaaattaacataccttcttcgggttaccatgctttcttcaagatttccaggaatgacatcttttggatgattcagtttaactctagtgcttggttccttctggatagaatcaccagattcgtcatttgcagcatcagaaatgggttctgctgcatcaggatctgcttttgctgcttctggaggagcatccatgagactatctatcttggcttctgtggaaaactctgaaaaatctttaaaatcatcaacaaccacattagctgattccaaaa

SEQ ID NO: 279954 - DNA, 752 bp, Cannabis indica
acacactcctttctcgctagcatttggctcggaagcgatgctgcctgttgaagtgaacatatcgactcacggaagagagttttataatcaagagaaaaccaggacttttaaaattgccttggatcacttgaggaaaacgaactgagtcgcaaatcaccaacgctgcataccaacaccaagtcacaatatacttcaacaaaaaagtcaagaaaagactattcaatgttggagacttggtgttaagacgagtctttgcaaatacgagagatgcatgaacaggattgttcaagccaaactggaagggtccatatgtcatcgaagtagtagttggagtcggagtctataaattggctcgacttgatggctcgttaataaagaactactagaacgtacaaacatttgtgaccctactattaataaataaatgatgtaacttgcattattgatgtaaactttaagcttcagttatgaataaagagaattatttatattaagtaattacaaagtttcattctttaaaaattacttaaggggcatttatgtataattaaccggaattcatctggaaatacattgtataatgcaaacccgtcatttcaatttttttttttttgaaattcaaaggttctcaactaaacctctttgacgaaagcggagtcaaaccgttataaatccctcaccaaacctttttgacgagagaggagtcgaatcgttataacaccttgatcaaatctttttgacgaagaatggat

SEQ ID NO: 279955 - DNA, 777 bp, Cannabis indica
attattttgaaagggaaaggaaaaatttaaacaaagtaaattggattagctcccccttaatgtgtgcaagaaaaaaaatttaccttttaattttaccttgcatgaatttgtaaactccccctcaatttttacttatgattaaaagattagataccaaaaaaaaatttgaggttatggacaaaaaaaaaaaaataatcaatagattttctcccccttttgattcatcaaaaagggtggcaaggaattcacaaaatatagagaaaaaataaataaaaaaaaaaataaataaagcaacattacccatgcataaaacaataaaaccacaacatccaacaaaataacattcaacaaacaaaaaaaaataccatccaacacaaagtcaagaggcatgaagcctttgcacacaaccaaaaacaaaatgaaaaacaagagtaaatatgcaaaagaaaaaaaaatgcaagaaactagtttggtggagggccaaaacgatccatgtaagccctccattgtgccatctcatcttgaacattttcaaatccttggaccatgtcactcctcatggtgttgatatcattcctcaaagtttgaaattgagtgtcaagagatgtgtgaagttgagcaaaagcctcctcaatattgaattgaggcatgggaggcgcttgaggatgcacttcttcttcatcttcctcttcttcttcttcttcttcttcttcttcactagcactaggaattgcttggccccctccttgagcttgggaatcttgcttggtgtaaatc

SEQ ID NO: 279956 - DNA, 615 bp, Cannabis indica
gcgatcacctcaatcccagaaaacgggaacccttacgaaagcgagggaagaagacagggacaaggcagagcccccataactgcatttcgtttttcctcttttgttttgttttctttcctataaatgaccaccactaggacgggttccaagtccccttcacctgctaaaaaaatttcaaaaagtcctaagaaacctcctttgaagtcttctaaaggtgatcctaaaatgggtttgaaagacattgcgaagaagggaatggctgatgttgctaagccttctggttctaaaaaaagacctcttccagctaaggttgaagctcctaaggcaaaaagaaccaaaacttcaaaatttgttaaggatgtaagttgtctactgttgtttttttttatttttttagtttttttttcttgttgtttggttttcggtttttgttttgtgttttaaatttttttgtccataatgttttaagttccctccaattctgacttcgatgatgaaattcctgatgtggaatcgaagcctaaagttaaacccaaggtttgtatattctttcgctatttttttcttttttttttttaagttaaaatcatcatttttttttatatttttgtttat

SEQ ID NO: 279957 - DNA, 504 bp, Cannabis indica
tgaaattttatgagaataagaattttactattgagaaaattttcaatgtcattgctgataagccatttggggtttataacatattgaaagaaagacaatgggtggatactttgatcagatttgatggctatgtggatcgaattgtgaaggagttttatgcttacatcactgatgagtgcctcaataaggactcttttatgtttggcaaagtctttgtcaggggacactggtattcctttactgtaaaggatgtggctgaagctctcaatctgcctatgggaattgagtcaactgatgtggaatttgatcgtaaaaaggtgttcgggtatctcactggtgataatgatgtggaactctccgacacaatgcatatgtctcaactcacctattaccatgctgctcttatgaggtttgccctatccaattagtttccttgctcaaatccgctaaaatatttcaaatgaacttgccttcttttgtataaagtttctattggtgctaaaa

SEQ ID NO: 279958 - DNA, 648 bp, Cannabis indica
atgatttcgttcgagcttggctgtatagaaataaatgattgatgcctcatttcagtaattatattagtttactgaagtatcagttataggtggctaactgttttaaggatcaaatatatcgaagggtagaacggtaaatttgtccctatccagtgtagatcatctatagaggatctttggctattaggattgtaacaatggataattataacgtatctatattgtggtacatatagagcgttctatataattgagagtgctattcaattccaaatctctagtagcgcaaggcggacttaataagttaggaaatttacttagtaaattctagatatacttattgaaagctcgattatataggcccatggtcccgtcactagttgagatagtactgcttgcagactcagttaattgattttaattaaacaattataattctaaaatgagaccatgtcttatttaagaattttcactaagcaagggcttaattgtgaagaaaagagattttgggggtttatttgttaattaagagactttgcatggaataattaataaataatacaaatggtaattttatttaataattaattataattataaaataaataattttaggcatttataggattgaattggaaaatatggtat

SEQ ID NO: 279959 - DNA, 671 bp, Cannabis indica
ttgcctataaatacttggagtactggcacattacctcatttcatcacccttcgttgttaagcaaacttgagagcgaaaagagagaacttttaggcttcaaagttgctgaagagcttacagacgatttctggcttgcttgaacccagacactcgaatctttgagtaagtttctgattccctttatgcttttcctttccatgcttatgctttgaatgtaacttcgctgtagaaagaacattttaggaaaccctagggtttgaaacttctacgaatcttcttttcgatgtccttgtgttagctttcagccgtaagtcatattttagaactacattgcgtctgttttccattctgctttttccaagcttcatgaacttttttgccctaactcaagaaaaactttctgacttcttgagtttagacttttctttgaacatggtcgttctttaatctgttgggtactcctggttggcatatttgctttgtttttcgtttgatactccgtccaacactcatcttgcgtgttgtcttttgtagatgaacccaggtgagtcttgggagcccaagcatcaaattgaccaggatctgcttcaacttctgcacgaagtccaccctcgtcttcgtgctaattctccttctgattccattcccagtcataggatgatggctcgtac

SEQ ID NO: 279960 - DNA, 615 bp, Cannabis indica
tcccatcttcataaatccacaacgattccctaatacccatcttctttaaatcatggcgcgcattggttgtgtcctttgatttatcattatccaagatggttcctaggagactatcacacacattcttctcaacatgcatgacatcaatgttgtgttttaaaatattcgtgctccaatactccaactcgtagaaaatactttttttcctccaattacaattttctgcaactcttctacgtttcacgcccccaaaattttcatgatgtccgggaatttggggttcgagagcattaacttgtgataatatttcttcacaagtaaatcgtcttggaggaggtcttctttcaactttaccatcaaatcgagtatcccttctcattgcatggttacttggcaagaaccttcgatgaccaacatatgatgtcttcccgatcactcgaatggacgtcgtgtcttcattacaagtagggcaagctttataaccttgaccactccacccagacaagctactacgagcaggaaaatcattcactgtccacaaaagcgcagcacgcatggtgaacatcgagttggtcgaactatctctcgttgctaccccattattccacaactcct

SEQ ID NO: 279961 - DNA, 933 bp, Cannabis indica
aaaaaaagaaagaaaaaaagagttgactgttcaacctatgacccgcgaacccagccaacccgcccatttcacgggcaggtacaagtactacttttgaaacttgaaacccagtaaacctgtcgatgtttagtcctaattcccctctcttggaaacctattttggactaacattttgttggccaaaaaatatttttatgagttttatttaattcagtgtaaactgaatagattggcacatatttttcacgctttttatattaattttcttgccctttgacaagttttacgagttacttttccttttctatttgattcagttgtctctgctagttcatttcagacagtcgttgttgtgttagttgtggtattgctcgcactcagtattgcagcattagtatggggaataggttttaacaactttagttccactcttgattcctctttttaaatataaatttgagctcgttcattgaaacgtttattgatcttataggtattccttgtaaatcttcccacagctcctctcctgcaatgattcttggttgtagaactacaaactgaatattatcattcaaattttaacctatagttgttgatgtgttgaagtagcttaagaaagcttttaaaggctcatcaagctactgttttacactaaatttaagtttaccccaaggttggccctgacttaatttgggtattagaaaaaataaaggaataattacataagacaccattttttataaaatatttacatttttacgttcaaagaatatttttttatatttttacgatttttcaaaaaaataacacgaaatcaacataaaatcaataagaaaacaacataaaagtaacatgaaaataacatcaaaataacaacaaaaaaaaaaaacaaaaaataacatacatataacaaaaaattaacaacaaatgaac

SEQ ID NO: 279962 - DNA, 522 bp, Cannabis indica
tatgtctactcctttagggatactaaattcttcactttttggcaactacttttgtgttagtcaggaagtaacactagtagttaattcattgttggtacaatgccaaaaactgtatagaacttttcataggttgaataagtattattcctgcaactttaacattcagtctcactggtagagtaagagaccctggatcagtttttttacacatttacaaaatcactgctccaccccagagtaatcacaatctcatcagtagactttctagcactaatgcaagtctagaaacctgatttggtgtagtctaagagtattaaataccacccttatcgacaaacatatagttactcttcttgatcttaagattcatttgattgttttccaatgttcctttcttggattaatctgacaccaactcattactcccactcaatagcaagtgtcttgtctaaggcatagtaaagcatatccgagacctctcactgttgatcctaaggaattttttccttggcctttatcttt

SEQ ID NO: 279963 - DNA, 612 bp, Cannabis indica
ggactccagctatttgaatgcttcctttttctatcctttttttatttgttcggccataaggccttttttaagacaaagtgaccgactaagcggtctttaaacttggaatatatttttcatttttcggaccactagctgattgggcagcctttaatcccaggtttgcatgcttttgttatccttaatgaatttcattatttgtttataatcatcgtgcaattgtgtttactttatttttttaccaaatgctttgtataggtataggtgccccccaagtgaccgagcagacttataactcttggtcactttttatttatttttaaaagtgtactttcttgtctgttcggggttttgggttcgaccaaaccttttgtacgcactaaatggtaaattaataacatgctaatggattcgactcaatttgaattttaaaataaacatctttattcatttattgatcgaaaatatgtttgttaccatagtaacttacatcaaagctattatgctgatctgatatgatctttagcttaatcatgaaataaaacaaattgcagaaatttaaaaatcgtactttcaatggtggtcatccgacctgagtacttgaaaatttta

SEQ ID NO: 279964 - DNA, 503 bp, Cannabis indica
tttcattaaaccttttgttccacctcagcttgcaaactttctcttcatgcctggaagcttataaccttctggttgctccatatagattgtctcgtcaagaattctgttaaagaaagttgtcttgacatccatttgctaaatttcataatcaaaagtgacagttatggagagaagtattctgatggatttgaccatattgatttcaccatccaagccataacgagctgggttagtgaaaaccctcccactacgatgaggagttgtgaccttttgaacaggaacatcagtggtagatttctcggttgtattaatttgcattggttcaactgagggagtgggattatcctctacttgagtagaagatgatggaacattagttggagttatttttgaaaacatttcctctaatactactttactttgcggcttgaagttcttaatatagtcttcttcaaggaatgtgatatttgtagaaacaaacactttattatccttgtgactat

SEQ ID NO: 279965 - DNA, 819 bp, Cannabis indica
caaaagtaggcttaactaacaaatcaaagaacacgaataacactcttgagattgaacctaaccatatcaggattaagatcatttgatctaggatcaacaggtgatattgaattgaatagatattacggtaaattttaatatatctaatcaaagttcaatatcggtcccttccgatgtatactccatacatccgatactggtaaactttgccaatgtcctggaaaggacataacacttttccaaggtgtaagaatacctatcgctgattataccatgtcagtctaaatccagtgttctgacaaatcagggaataaactttcgaacatataattaagattatattccactgtgctgacaacactataatcattaacaaattcatatgttctggacttaaatagaattcatacattatatatataatcatgaaataaatcatgtgaaccatgcaacataaaatgttatttctgatctttattaataagtaaatctgattatattgaaatgagttttatttagggcacaaaacccaacagtaagccgatggcaggtcgacaactaagaagtcttgcataacagtggcaaataggggtgcctcgcccaaggttagtgcgagctcgattataccaagactgacaatactatcgctagtaaagccgtaaagattcaccataaaagtgcccaatttagctttttcgagccccatcttcctcaatgtttccttataaagaatattcactgaactcctgttgtctatcaacaccctcttaatccttttattggtgagttgagtggtaatctattggaaattattttacc

SEQ ID NO: 279966 - DNA, 547 bp, Cannabis indica
acgaaatgggccgaagccaaagcactcgcaaccatcacagcaacaaaattgcgcgagtttgtctatacctccataatttgtcgctttggtattccatacaaactcatctcagacaatggaagacagtttgattgtaaagagatgcgacaactatgcgacgatttgggaatcaaaaaggcattctccgcggttgcttacccgcaaagcaatggacagactgaagctgttaacaaaataataaaacacaccattaaagggaaactagaagatcgcaaaggggcttggccagacgagttaccgcaagtcctatggtcttataatacaactcctcgatctacaactggcgaaacacccttctcactttcttacgggtgcgaggccatgttgccagttgaaatcggggcaggttccctacgcagagatgttttcaacatctcgcagaacgacgagaagcagttactctgccttgatcttctggaggaaaaacgtgatcaagcgcacttaaaaaatgcggcttaccagcagcgaactgcaagatactttaact

SEQ ID NO: 279967 - DNA, 881 bp, Cannabis indica
atgtttcctgtacgctgacaacgatcacatgccttcacaaaagtactagcgtctttgaaaagtgttggccaaaagaatccgctctgcaacaccttggcagctgttctagttccactgaagtgtcccccacacggtagagcatgacagtgattgagaatagagtacatctcctcttcaggcacacatcttcttattatctgatctgcacagtgcttgtagaggattggctcttcccagtagtaatgtttcacctcagaaaagaatttctttagttgttgtcgagagaactcaggaggagtgatattagcagccaagaagttaacatagtcagcataccatggtaccattagactttccctcacactaaagagttgttcatcaggaaattgctcatttatttgtacctctttcgtattctgactttcttccagctctagtcttgacaagtgatctgctaccagattttcagtgcccttcttatcttttatctctaagtcaaattcttgaagtagaagtacccaccgaatcagtctcggctttgcatccttcttggtcataaggtacttgatcgctgaatgatctgtgtagacaataaccttattcccaatcaggtagggtcggaacttatcacaagcaaacacaattgccagcatctctttctccgttgtggcataattcagttgagcatcattcagggttctactagcatagtagattgtgtgaaacaccctgtcaaccctttgacccaagaccgctccaattgcatagtcacttgcatcacacatcaattcaaaaggtaactcccaattcggtgaagtaactattggtgctgaaatcagtttctctttaagaacttggaacgcctttaaacagtcatctcc

SEQ ID NO: 279968 - DNA, 530 bp, Cannabis indica
actttataatattttattagttgccgaaaacctcggtcaacagtggtatatacattttgtattatagtatatatattttttatactatggtataccatttagaaaataaaataaaaaaatttggattgtatattaattttgttgtatagcatacatatatttttaatcaaagaatatcaattttttagtttttttttatttcatttgtcatattaagatatgtatttattcaaaaaaaccactatttttttaagttttttctttattttttttgtttgatatacatcagcacataaaaaggatatatttgtagattaaatagatatcccatagtgtaaattaatataccacgagcttaaattttttataagtttcttttttgtttgtcttttatttgtgtttttaatgagataatgtaatgcatataatatatataatgtagtcaaaattatatacacatcaaatttaaactaatattcaatttatttttctttctttccttcacgatatatcatatcacatacaaacga

SEQ ID NO: 279969 - DNA, 181 bp, Cannabis indica
ttccatatctatgattagcgctccaactcaattgtactaccatgttcacaaaatgtacgtatcacccagacgtagattatcatattagttaaatcctgtgcacagataaatctaggaatacatttaatcacatagtcttaattactttctactgtgttgacatcacaataaacaagaatat

SEQ ID NO: 279970 - DNA, 498 bp, Cannabis indica
ctttccttcatttcggttactttccatttcttgccaactttgcttgaatttcctagagagaaaattctcaaaaccagcacgaaatctttgaacacttcgccatttttcccagttcttccttgcttactgctatcagtccttctcgtctttactcgactcacatcaggaccctcagttcaacacttcactgtaagtttcttgcatcctttggtagtgacgtgcttttactcgttctgtttgttcttttctgggttcgcatttgagatttctgagcatgcaagtgtttaagtcctttatgcattatgttacgcgtttactgctttagttgtaggattgccattaacatgcctctgttattattgtgcattttcgttgaagaagaccatacgttcttcattcaatggttgtttagggcatagaatagggtctttttctttctgttccccttattgtgtgaaaccaccttctacaattttactgcacccgacacttgttcag

SEQ ID NO: 279971 - DNA, 775 bp, Cannabis indica
tacctcgaattgatgatctgtttgatcaactaaaggggaagacagtcttctccaagatcgatcttcgctaggctatcatcagctgagaatttgagaggaagatattctgaaaactgcattccgtactcggtatggacattatgtattccttgtgatgtcttttggactcaccaatgccccgacgacattcatggatcttatgaatcgggtgttcaaggattacctggatagatgtatgatcgtgtttatcgatgacatcttggtatattctaaatcaaaagaagagcatgagttgcatcttacaacgattttacaatggttacgggatcacaagctatatgctaaattcaaaatgtgtgaattcttgttatctcgtgtctctttcttggggcacatagtagataaatatgggatcatggtggatccggcaaaaattgaagctgatcgggattggccgacaccaaaatcagctactgaggtcagaagctttctgggattagctgggtattatcgtcggttcgttgagggtttttcaaagattgttgtacccttaacggagctcacccgaaagaacctgaagtttttttggactgatcggtgtgagaaaagtttcctgaagttaaagcagcgcttgattcccgttccagtactaacccttcctttagataaggaaaagtttgtggttttctgtgatgcatcgagacaggatctcggctgtgtgcttatggaagttggaaaggtaatagcctatgcttctcggcagttaaaggagtac

SEQ ID NO: 279972 - DNA, 822 bp, Cannabis indica
cagcaattccagattcagatcattccgccattgatgaacactctcaagctccaagatctgacctgccatggaacattcagaagaaacaagacgaaaagaaacgaacgtaatccccaaatctccgatcaaaaagttcgtcaacaaaatacccagaaatcgtatttatacccagctaaaccaagaaacctgaaatagacagctgttaccatctgaacaattaaaacctaaaatatctttgctgacgtggactaacactaacagtacaaaccctagacaaaacactacgagacccagacgcaactggaatgctactggacataatttgcactatagaaaataatagttctaacaggtttatcaaggctattgggtcgtggggaccaaatcgcatcgtagagagttggtctctatgctttcgcagaaatatagaggggatactcgcatatgtcctgacacatgcgagttggatctaccctgcataatgcgaattacggttatgcgatccgacttaggtcgtactcgcaatatctcgctggttttatcctgggcgaggtttaaacttcgagaagtctctcacggacatttcagctttcattggaaatctgaatacacgtgtcctttaaataggagtctggtctcgagtttctaggtgagagaaatctcactataacacatgcccctagtttcgcgatgtgacaggtgcggtcacagagggaaactattgctcgagagacaggtgaagggttgtcacgaggaggtgaccttttggttgtcccatcgagggtttcgaaaaatgacggctgtaattattaccttttattg

SEQ ID NO: 279973 - DNA, 539 bp, Cannabis indica
gttctgcctcgagccaccggatgccgtggatgattttctcctccagtccatggccgaaccgctacctcccctgctgaaacctgacgcatgaggggtaggagcccggccacataccggagtcctaactgatcccacatacatctaactgtgccctcaactcacagtgctttctccaccatctcagcataggtggtcttgtcgtcagtagtaaccctaaggtcatacttgatcttcacattaagtccatcaagatatttttctttaagtccatcaagcaactagcatgcatgaaacctatttaaatcccttcaattcaagcatagaaaatcaaagaaaacaacctaaaactacagcagcaacaaactccaaatcaacatgcatttactcatcttttcatcaaaaattccaagaaaacaaagaaggacaagttcaagaaccttaccaacaatagaactacacttagaatggttgaaaagtgattgaattgctaagaaaaactcccagccctagcagctcacaccaagccgagagagagagag

SEQ ID NO: 279974 - DNA, 645 bp, Cannabis indica
atagcctatgcctctcgtcaattgaaagattatgggcagtgttatccaactcatgatttagagctcgctgatgtggtttttgctttaaagatatggcgacattatctttacggtgagaagtgcgagatttatactgatcataagagtctcaaatactttttcacccaaaaggatttgaatatgaggcagagaaggtggttggaattggttaaggactacgattgtgaaattctgtatcatcccgggaaagccaatgttgtggccgatgctttaagcagaaaaggtcccgggcaggtttgtaccatggttatgataaccccattaactagcttctgaaatagttagtgcagggattgagttcgtagttgggaaattgcataatttgacactccaatctgatctgttagagagaatcagaagggcacaactagaagatcccgagctagttaaggttcgagacgaagtaatggctggtcggcctagaggctttttagtctcgagtttatgttcctaatgttgataagcttaggaaagaaatactggatgaagctcataccacaccttattcattgcatccgggaaccaccaaaatgtaccaggatttgaaaccctactactggtggtatgggatgaaaagagatgtgg

SEQ ID NO: 279975 - DNA, 585 bp, Cannabis indica
atttttatttttaagtagaaaaatccaaactttcctagagtgatcatccactatagacatgaaataggcattacctccatgtgttagagtcttttcaggaccccataagtcagaatgtacatattctagagggtgtttagttttgtgtatacctgtcttgaattttagtctatggtgttttcccaaaatgcatgattcacaaaagtcaagtttccccaccttgtctctgcctagtaggttttgctcactcattacttgcaatcctttttcactgagatgccctagccttctgtgccataggactgccttcttgtcatcagttgagatggccactgagttgttgcattgagttactggttctccttgtaggtagtacaatccttcatgtttgtaaccctttatgatagtcatagatcccttgcttaatcttattgtacctgcctgaattttactcacaatacccatgtcatctagaacacttatagaaataagatttctagccaaattagggacatacctgacccctgtgagtgatctgattactccatcaaacattttgaagctaagtgttccagagccttcaat

SEQ ID NO: 279976 - DNA, 495 bp, Cannabis indica
atctctttgttgattcttgtattatattgcaatagtgttaattgtaatgtcttgattttcttccattgtaataaaatctctaacaatcaaaagcttatatcttttcaatagaagaggtgataaattaagattgtgagaatataaggataagaaattttatgtgaaaaccattcatgggtgagcatggtggtgtataatgtgatttactattttatatgatagtaatatatatatttatgatatatatgtaagttatatatatgtatatgtgtcatatatatgtgatcatgagtttatatcatataatatatagtgatatataatatgatatttgaatatttataacatgtttgtatgcgtatatatataagatatataatatataacatgtatatgacttatgtgtattatatatatgatgagcataatataatatatatgggtgactattcaatggttacatttttattgtaaccatatggttacacttttttt

SEQ ID NO: 279977 - DNA, 233 bp, Cannabis indica
cgtaatgaatatataatagagcaattataagacacaggaattttatagaggttcaggtattgacttaagaacaagaatgaagattccttttcttatagctcttacaacagtatctttgaatatataattcttacataataatatagtcttagcttagctgcgtatcgactttttatctcttcgtccccttggccagtgaacattactcactatttatagggctgggaaacttg

SEQ ID NO: 279978 - DNA, 983 bp, Cannabis indica
cacgcagaggtcatatatattatctatctattacataattcaaatatgaattgaattataaagtaaatatcttagatattattttaaattttaattgaccatttaaatttaaatttaagatagtatctgataaaagataaattattattccttaaattttggaataaataattaaatatcagtcaaattatctttttatttctaaaataataaaaagattgcaaaactgaatttcatcacaaaaaaagtggtaaaattctaaagtttataaaagataataaaaagatctccaaactcaaatttatcaccaaaaagtggtaaatttctaaatccatacaaaatggcacgaaattccaaatgagctcactaaaattaatcttggaatattaaagaggtcattcacctcaccaaatttcaaagaggtctttacctcacaaaaatctcaaaagtggtaattttacctaaaaattaaaaagtgcactaaaattcaaagccataacaaattaaatggcattccaaagaaaaagaggtcattcacctcataaaaaattaaagtttggaactacgtttgacttgattcctataaaggatacgtaggcaacttagttgctaagactaagtgcagtcgccgataccgcaaaatggtataaaacacaactctcaaaattccataaaaggtcatacacctaggaattttttccaaattttcaaaatagcaaaggattcctgaaagtggtcatctaccggaatccttatatccaaattctaaaataccgcattctgaactacaagtggcttgatccttcacaaagaaggtatgtcggttaattaaatgaactgagttcagctgcaattccaaatttaccccaaatttcccaaatttattttaattatttaatgtcattgtaattggaatcaaagggtatttcctttaaataaaaggattgtaattaagagattattcttataatcttggatgggtc

SEQ ID NO: 279979 - DNA, 807 bp, Cannabis indica
gattttaatgaatagaaaacaggatggggcagttacttcagctgatgctcacgtgctaccagcaagtcacgtgagttatgctgaaggtcaaaaactgatggcttatataaagtcaacaacttcaccaacagcttccattttgtttgagggaacagtgattggagataagaatgcaccagctgttgctgctttttcatcgagaggtcccagcaaaactagtgctggtattctgaaacctgatataataggccctggtgttgatattttggctgcctggccaacctctattgacaattcaagtgcagttgttacgtttaacactgcttctggtacttctatgtcttgccctcatcttagtggagttgctgctttgcttaaaagcgctcaccccgagtggtctccggccgccgttaagtccgccatgatgacaactgcctacggcatcaacactgggggaaaacccatccctgactcaaccgtaagtactacaaaaaaacaaaaatatatactacaagttttttttctttttacatattacatctactataaatataggaataatgcacaacacacaaactactagtaaaaatagatttgtttctttttaatctataatatttttcacacaaatatatatttttctaagaaatatttgcaccaataactattattattaaattatttaagaatttacccttacctattttaatactcacaatttaggtatttctttttgataggtataccaatgtatatttattgtttctctctcctaaactctgcctacatgctagctttttttttttt

SEQ ID NO: 279980 - DNA, 569 bp, Cannabis indica
taacagtaattttatccctatgcaatgtagatcatctatagaggatcattgattattgggattataacaatggataattaatagcgtatctatatcgtggaacatatagagcgttctatgtaactgagagtgcaattccaagttctatggtggatgcaatgaggaattaataagttagtgaatttacttggtaaattctagatctgcttattggaagctcggttatataggcccatggtccccatactagttgagacaaactgcttgtaagactcagttaattgattttaattaatcaattataattctaaaattagactatgtctagtttatgaattttcactaagctagggcttaattgtgaagaaaagagattctagggtttatttgttaattaagagactttattaagtctaattaataaatatattaaatggaaattttatttgataattaattttaattattaaataatagttttggcatttaagtggttgaattggaaaaatggcaaaattgcaatgtgggggtccacatcatatggccagccactactcgctctatttttt

SEQ ID NO: 279981 - DNA, 487 bp, Cannabis indica
agggaattatgtacaaaagaggattctcgatgccattcctcaaatgtgtcactcaagacgaagctgcacgactcttatctgaagttcacgacagattctgtggaaatcatgctgccagacagagcttatctaagaaaattctaaggaaaggttacttctggcctacgatgattgaagattcaaaagcccatgttaagaagtgtgacaaatgccagagattttcaaaaccttgaaggatatactgaagaaaaaacttgaagatgccaaaggaaactggccagaagagcttcctgaagttctatggtcataccgtacaaccgagaaaacggcaaccggacagacaccattcgcaatggcgtacggatatgaagctatgctgcccgtcaaacttgagccattatcccatagaagattgacgtacaatcaaggtccaatcacaaactcctagcagaatcacttgatgaaatcgaagaaaacgagccactgc

SEQ ID NO: 279982 - DNA, 1073 bp, Cannabis indica
aaccctctttggttcaatttctttatttggaggaattgcttgaagttgaacttggattttggtgtgcttttgcttaattcttgcttaaggcttgaggtaactctccttcattgaatttaattgagattcttgctggtttttagttgttgaaaaacatgaaaagtggtgttgttcttggatttgcatgataagaagaattggtgcttgaccttgttgttttttattgtgaatttcaagatattgttgtgaggttattggtgattattggttgagtttattaagtattttctaggtcagaaattatgtgtttattggttgagtttgcatttagaaattataggttggaataggttgaggttcatgtttatgagcttgatgagttgtgaattgaagcatattatgagatgattaaacgatctgaattttagggtaaattgtgggtattgatgcatgttggatgatattactctgcaatccactcttctagagagaattaaagaagcacaaaagcaagattcggaattgataaaaacccgagctagggtttcggctgggaaggctagtgatttctcagtggatggaacgggaatgttgagatttgagaattgagtttgtgtgcccatggatgagaacatcaagaaagagatcatggatgagtctcatacgactccttattcagttcatctagggtcaacaaagatgtatcaagacctgaaagccatgttctggtggccaggcatgaagaatgacattgctgaatatgttgcaaagtgccttacgtgtcagcaagtgaaagctgagcaccagcgacctgcagggttactacaaccactgaatataccagagtggaaatgggaggacattgctatggacttcgtggaaggtatgcctagaaccacgggacaatatgactctgtgtgggtcatagtcgacaagtttacaaagtcggctcactttttacctgtttggacgaatttctccattgaccagtatgctgagttatatgtcagagaaattgttcgtctgcatggtgtcccaaagtccattgtgtcggatacagatcagaagtttac

SEQ ID NO: 279983 - DNA, 75 bp, Cannabis indica
gtgggggcactactctatcactaaggtttcgaaattgagaagaggaaacgagagaggtacagggtcggctataga

SEQ ID NO: 279984 - DNA, 796 bp, Cannabis indica
aataaataaatatttatttattcccccaagccgctagtttcataaagagaattgttaaaagggatttttggtgcttaaaatcttcttcgatgagtcgatgttatactgttattagtgtacataattaagtatcaagtctcatattataacttaagaaaataatttttaagaattaccgttaaccaatcgttaagggccactagtgcctaacatctctcctcgatatcatgttactatttgtgtaattaagtatcgggtctcatataacttaatagcttttaaacaatatcgcaccacttataaaaagtgctagacaccactatagggctggtcttgagttgacataggctataagtaaatttttttttggcccttaccataaagataaatagtatttttaaaaattattaaaaaaatatgtataatttttgtaaaagacaatttttttgatttgggcctttaaaataaatggatcctaggcatgggtctaactcgcctatacccaagaccgtccctagacaccactagtacccatagcaataatccttcaaaaagtccatgtcacatgcttcttatattttacctttcaatttctaaagctaattacataacacaaatattaatgtatgaaaagggtcttatgtaagtcgtcattagtaattaatagcgcacacacatattatatatataaaatttactaagaattcttcgaaaaggcaaatagtgtatatatatatatatatacatgttactcttatatattcttggtctagcttagtgaccttttcgggtcctt

SEQ ID NO: 279985 - DNA, 884 bp, Cannabis indica
cgtcaggagtgtgagctccggcaagggcggccaaaatgtcatccatggaattagctgctacaacaaaaggaaagagtcaagtgttagaatatctgtgaaagctgtaaacgctcaaaaaagcaatcaagctagtcctaccctgactctctaattcggccctaccaaagttctgaatcttaatgctgactgcatcatccccgagatagctgtccgagggccggaacaagctagaagaaagataggccgaagggtccaagggaacgggctccggaggtccagaacccatccgggaccgacctaggaaatctcctaagttggaaaaataataatccttggcgtgatctccccaccgggtcaagggcatcctaaacctaaggagacgttcatcgaaccctacaggcctaaggctggcatattcgctaacagaaggaacgtagtgtactgctaaaggagacttaccgaagcctgaagtactggcgtcaggagcccctgtattcggcacctgaactgaaggctttggcctaggagccctcctctcaaccgggttcccaatgcaaagggacttcccgacaatcgtttggcttctcctttcgaccaggcttcccacgcgaaggggcctcccggaagccgcctgggccttggtataagccttctcctgggccttccagtagagataatcttggtacttcttctccgcggtggcaataagctcatcccagaaggtcttctccgcggcagggaccttcacattcagatagattaccttagaaaggttagagtgctccactgactggtgcggcaggatcagcttggccttccggcagttctccgtcgtgaccaagcccccgacgtcaagatctaccctgtcataagtcgcaaagacc

SEQ ID NO: 279986 - DNA, 324 bp, Cannabis indica
tgagaccatagccttccttttatactattttaccaatagggttagggttgaattattaggaataaaaaattaataaaaatagagtgaaaaagccatctagtggccggccacatagtgggccctacactagtttggattttgtcacttttctcaactattttatctatttttcacaaataccactttttgacaactttcaaaccctataaaatgccaaaactatttattaacaaataaaacaattatcaaataaaattgtcatttataatatttattaattagactccataaagtctcttaattaacaaataaaccccaaaatac

SEQ ID NO: 279987 - DNA, 362 bp, Cannabis indica
taaaataatttccaacaatttttacttctctcagccaggcttcaagtggttgagcgggacggaccacaaggccatcagcaaaatagggaattttgttgatgattacttcatggtgaaggatccgaacatcacccggactcggtttcagcagatttctaacatatcaccatccctcccctcacccttactcttagggatagggctcaaaagcttgctcggtttgccggcggaggatagggtatatcatccagttgacctccgatgcaaatctggtgcagtacgggctttatcctgaggacttttctctaggtccgtggtggggaagaggggaatctgctgctgcccggcctgaacgagctcat

SEQ ID NO: 279988 - DNA, 555 bp, Cannabis indica
aggcctcaatcattcatctttatcaagccaagcttgaaggaaattatcctttcacttctaaatacttatagaagctatagattctgtatccatgataagcgctcccacttaattgtactaccatgtttccaagatgtaaatatctgccagaaccatttgttagcttccacgaacaacttgaagaacataaataatacaactaagctaaacctaaccatatcaggattaagattcatagacttaagatcaaccagtgatatcaacttagaaaaatataacagtaaatttatgatatcttatttaaaataaatatcggtcccttttaatgtatactccatacatctaatactgataaaatttgccaataccctagaaaggacataacacttatccaaggtataagtataccttatcgctgattatcatgtcagtctaaatctagtgaactgacaaatcatgagaattaaacttttgaagatataatcatgattatatgccactgtgttgatgacactataatcatgaataaatatatatatatatatttacatatgt

SEQ ID NO: 279989 - DNA, 621 bp, Cannabis indica
aggtctatgccgatgagaattgacgatagggagttaagtgctgacctaatagaaatgagcttagcagattttgatatcatactgggaatggatttcttatccaaatattcaaccagtattgactgtaagaggaagatggtaatctttcaaccagaaggagaagaaccgtttgtttttgtcggttcggttcagggatctcggatcccggtgatttcagtcttatcagctaaggaattgttgtgtgatggatgtctagggtttctggccgtggtagtagacaccactcggccagactctgttcggctagaagacgtcaaggtggttcaagaatttttagatgtttttcctgaagaacttctaggtttaccacctcagcgggaaattaatttcataattgatttggcacctagagcagaaccggtttccaagactccttacagaatggctccagctgaacttaaggaattaaaaattcagctcgaggggttgctagacatagggtttattcagcctagtgtgtcaccctgtggagctccggtattgtttgctaagaagaagatgggctctgagaatgtgtatcgactatcgggagttgaataagctaacagtcaagaataaata

SEQ ID NO: 279990 - DNA, 329 bp, Cannabis indica
taaatggtggagtactcatttcacttagctgaaatatcatttatacaaattctcaaagatagacttgtctatttgagaatttatcacttattaagggcaaaacagtaaatagagattttgaagggcatatttattaattaggaaactttaattagtttcattattaataattagaattgacatttatgtggttgaataaaggaattggcagtttttgacaaaatgggaaactaggaatgtaggaaaaggaaagttggaaaagtggaaggccttgtttccacattgcctaggccggccactttgcttcccttttcccatctatttttcat

SEQ ID NO: 279991 - DNA, 611 bp, Cannabis indica
ttttgatctaaggacttggattggttcattttgaacccaaaaatcctttccttgagataaatcttgtttgtcaaagatttctgttgaaattgctcttctagctttttccagatctttgatggagtctcttctttatctaccaatcttatgattgcatctgatagattgaagattagaattccagtagcagtttctaggtattcttcttgttgtattttagaagttccttctggccattcaataggttcatctagcacccttagtaatttctgttgagctaggagagacctaattttccttctccaaattctgtaatcccctgtaccatcaaatttatcaatatcaacttttatgttactcatattaataaaattgaaaaagaaacagatagagttttagaatttctcagtttgtgtttctgaattctgagtttaattcagaatcttgatattcttgctgtttgagtgttgttctttttgtcaatctttctttcaagattttcttgccaattccttcctgatattttcccttgaatctttgttgatcttctttagccaaaccaggctctgataccactgtaggatttttaccaaattgccctacaccaacaa

SEQ ID NO: 279992 - DNA, 634 bp, Cannabis indica
tgccaggtgaatggagaatacctagcaagaggcggaagattggttaaatacttagccattgttcgcgaaataatgcagaagttcaaaaatgtagtcgtgtctcgagtaccgcgtgctcaaaatgcccacgcagacgcattggcccgtttggcctcaactagagaagccgaattgctcgatgtgattccggtagacgtattggctcacccaaccataaatcaagaagtaatcatggagatagatgacgttcaggagattacctggatgactcctatcctcgcatatctggaaaaggggctcttacccgatgataaagtagaggcaagaaaattgcgacagcgagcagcccgttatgtaatatatgaccaaaggttgtatcgcagaagttttagtcaaccgcttctcaaatgtatcagtggagaggattgtggttacatacttcgtgaagtacacgaggggatttgtggcaatcataccggaggtaattcccttgcgttaaaaattatgcggcaagggtattactggccaacattgcgacaagatgctctcgcgtttgcaaagaggtgtgacagatgtcagcgaatagccacttacacccaccagcctccgagtaacctccattctatcacaagtc

SEQ ID NO: 279993 - DNA, 652 bp, Cannabis indica
gatattgaataaaatggattacattgaaatggagttttatttagggcatgaaacccaacaaattggtcaatcctgggaagtggaaaatagtcttttagacacgccttatttacattggagaaatcaatacaagttctccaagttctattaggtttcgagatgagaacaggatttgctatccataagggataaaataccttgcgtataaaaccgttaactagcaacttgtcaacttcctgttttagtgccccttgcctctcggaatccaagggcctccttttttgtctcttttctgggtagttgggatcaacatttaagtgatggcagataatcttaggtcaatccctatcatgtctccatgactccaggcgaattcatcttggttcgccttcaaaaagcttattaattgctatttgagttgctcgtctaggttcttcccaatgtacacgcatttggtgggatatcctgggtcgagaataacctcctccaattcttcaattggttttagtaggtttctttcatcttgaactcgaggatcaagatcttcatctttcttctcgttttctcctgccaagatcgtcgtcggttgatgaccagccatcctatgctatagctctatgcgataacaatcgcgagccagcatctggtcgcc

SEQ ID NO: 279994 - DNA, 313 bp, Cannabis indica
aaagtaatcaagattatgtgattaaatgtattcctagatttatcggtaggtatggtttaactgatatgataatctacaacaaagtttacttgcaccttggataagtgctatgtcctttccagggcaatggttaaagtaaagcttgggtttgatggatggagtatgcattggaaagaactgatattgcacttggattagatatgataaatttatcgtaatatctattcaattcaatatcacctagttgatcctagatcgaatgatattaatcctgacatggttaggttcgatctgaagagtgttatttgtgttc

SEQ ID NO: 279995 - DNA, 549 bp, Cannabis indica
tcacttcccagggacttaaactaggaactaaaagtttctctatccacaaaaagcatggcaataccccaaataacataaaaacgagaaaatctagggttcctgaaaattccccaaccggtagaccggtttttcaaccggaattccggttctggaaattcctgaaccccatccagaattctggatgcacaaccggaattccagtttctcgcatgttactttcaaaaaatcatacattgctcaaatcaattccaaaccatacaaaaacttccagacctgttcaaaataccctaaagaacaaatccaaagcactaaaatagcccagaacacacagatactaaaaatgccatgtgagctccaagctttgagtttcaaactcaaacttggctaaagctcacctacaagcatcaaacatgattaaaattacatattcatgcataacaaagctgcaaaaaacaatctctaactcatgcaacaactacaaccaccaatttcgaaaatttctctttgaaacttaaagcttttgaaaagaaaatccataactttaaacaa

SEQ ID NO: 279996 - DNA, 482 bp, Cannabis indica
aaggttttcttgagttagggcaaagaagttcatgaagcttggaaaaagaagaatggaaaacagacgcaatgcagttctaaaatatgccatacgggtgaaagctaacacaaggacatggaaaagaagagtcacagaagtttcaaaccctagggtttcctaaaatgttctttctacagcaaagttacattcaaagcgtaagcatgcaaaggaaaagcataaagggaaccaaaaaattactcaaagattcgaatgtccaggttcaagaaagccagaaatcgtctgtaagctcttcagcaaccttgaagccaaaaagttctctcttttcgctctgaagtttgcttaacaacgaagggtgattaaatgaggtaatgtgacagtactccaagtatttataggcaaaagggcaactgtacgtaaagaaccttagacgcctcgacttcccgccttgaaagcaaatatgggaaatcaaaataatcgagtgc

SEQ ID NO: 279997 - DNA, 851 bp, Cannabis indica
aaccgccagccgtcttggttgtgtacatgctattacacgcccaccatcagcccaacccgcttctttaaggaactgtaattacacaatacaataagaaacacatttgaatatctatatttataatattatttttaaataaaaaaaaggggggggaaaagaataagagagtacaaacctgaggtatctgggtggttttgccgctacccgtttccccgacaataatggtagtagcatgtgtctccaccagataaagaatagcagtacggtacttgtaaaccggaagcctctgcttctgcctctcgatattcgaatacccaaatctatgagcacaaatttaatttatcaaaaatacacaaacaaaaataaaaatggaaggggtagaagaagaaaaagaaagataccctgaagaagaagaagaagaagcaccaaagaaaaggactccaccctcttcgtcgtctagaaggctaggcctctccgtccctggtttccagaactgcgacattgatgttcacgttgaaaagttcaccgagtggtttgggtacaacttcaggtttcggggtgctacactggttttaatttatttatttttttctttttttgaaatcaaagtccttcattttaagaaaaaaaatgcatagggtgagtcttgttgtattgcattccacataacactcactttgtttaacaaaggtgattggctaatacatgagcgactagggctgtccatcaaatcactcaaactatctacaccgcactgtaccgcaaaaaaagtgcagtttaaaattctttacagtacggtcgcggtttgaatttttcctaaatcgcactgtgcggtgcggtttgcgattttg

SEQ ID NO: 279998 - DNA, 510 bp, Cannabis indica
catgctagttgtccttgcttttgtcaattttcttgttcaaaagcttgagttttcaaagtgaaatagtgagaagtgttgctgtgattgttgcatgaattagggtttgttttctgcagctttagtatgcatgtttaggttgttttaatcatggtttgatggttgtaggtgagctttagccaagtttgagtttgaaactcaaagcttggagctcacatggcactttttgtatctgtgcattctgggtggttttgttgctttagaaatgttctataggatgtttagaacaggtctggaagttttgggattgtttggatttgatttggttgatcatgaattttgaattctgcctacgaggaaccggaattccggttgtgcatccaaaattccagatgggttggacaaccggtctgccggttgggtgattttcagaaaccctagatttcctcgtttttatgttatttggggtattgtcatgctttttatcgatagggaaacttttagttcctagtt

SEQ ID NO: 279999 - DNA, 632 bp, Cannabis indica
aaagtactcaggtccgctagaccactttaaagtactaaatgaacattcgcttctaagtgaatggccttttcggcggaccatgcgtaaagctttcagaaacaaaagtactcaggtcggtaagaccactttaaagtacagtttcttatttgttttatgtcatgttaagctaaaagatcatattagatcactagctctgatgtatgttactatggtaacaaatatattttcgatcaataaatgaataaatatagtatttctaattctattgagttgaaaaaatcagcatgatcataatttacctaaagtgagtacaaaaggtttagtcgaacgcaaaacaccgaacagataagcaatatatttgcgaaagacaagtgaccaagagtcataagtctgctcggtcacttgggaggcacctatacctgtacagagcatttggtaaaaataaaacaatcacaattgcacgacaattataaacagagaatgaaattcattaaggatgacaaaagcacgtagtaccgggattaaaagctgcccggtcagcccgttgtccaaaaaatgaaaaataattccaaatttaaagaccgcttagtcggtcatgatgtcttaaaaaaaggccttgaggccacatataa

SEQ ID NO: 280000 - DNA, 545 bp, Cannabis indica
aaaaaaaaaaaaaaaacattatggaatattgttagtttctaggaggaggagctttgggtattgtctttctcgtatattaaatttttaataaagacaactcgatcattctaatatccattctagttactatatacatctttttctcatcacacctcccaaaaattgataaacaaagctgcttgctgctagggcaatgtgtttgtagtttgtctcattacagaagagaatgtgtacggagttcattttcttcatttacacacagtataatcaaatggaaaaaccattaatgttctcattatatattttgggggtgtttctatggtttatccccaaaaaggtacactaacatcactagaaaaataagaattagcggagaacatattatcactgtactcctaataacagagtggcggggaagattctgcagcatatgtcccctcgttctccttgtaaatctatttgcatcttaaaatatttgagatgggaaagaggatcttctttcccagtatacatcttccatgttggcattttgaacttgtggggca

SEQ ID NO: 280001 - DNA, 719 bp, Cannabis indica
caactaactcccaatagttatcgcactaccctggccttttacgcgatgtatatggagtacgttcatagggctccctcggtagaagagttcagctacttctacgatataaaaagcgtaggccttcataacggtttctactgctttagcaaatgggcgacttctgaaattaatggggtagaaggaatggtgtcgaatatgggagactggaaatcaaaatggttctacatcttcaaagtcccagggattagaactgattttaatcgcagacctagtacgtcgcatgttttctaacttagacattttctgaattactttgagatcttatgctaactcgctcttttttgttctcgcagatagaccagctcgacctgcacttgacgcaactcgcagagagacagctgaaattctcgggagccttccggtacaagatcgcgactggcgattattgtgtacgactgccaagctgcgagaacaccagctgattccagagaacgcaagtcttcaaagagagccagtatacaaggaaccatctgagagacaacaagagcggatagacaaacgcctctccaagcaaacttctcgaccagtctcaggtaacatatctcatgttataaactagtgccttgaaatttattcatacttatcttttatttatcctcgcagagatgacttttttgaagtccgcgcccgtccttaaaatcaagccaaagagtggaaca

SEQ ID NO: 280002 - DNA, 810 bp, Cannabis indica
ttatagagacttcaaaaccgttttcatcttttgcccagatttctatcgttctttccaaaatatcctcaatcttagaagtgatcgagagcaatcgcagggacaacttgctaaaactaaaggttagtttcgagtctcactgtatttttttgttttctgtgtttgagaaagaatgttttctgggttttggtattttgagactctttaggaatgtatgtttgtaagggatgaggttacgttttttgggtaaaaaactgggtaatcttatgaaaaatgacctgtaaattggaataaccgcatactgtgtaagaaatatttaaataggcgctgtttcgtactttgaatactcgcgggtattcggatgaacagtttgaatactcgcacactgacagaatttatttacttctgattattggctagatcttttaggattttacatgccgtgagttgaattgcgagagtattaatcgcttttccaaatggtgggtgtgtcacagtattctaatggtcatatacgcggttatatgccccttgagatactgtgatacacccagccatttgcgacatgcgttaatattcaaatgagcgtactccttggctgataggtagtctcggaacggtgggagtaactcagtaatttcagggtcatgcttgagaacgcatgccccttgagtaactgagtttctcccagccgtttctggaggtataccgcttggcccaggatgcgtgacttattcgcatctctactcgcatatggatggggtggtcagcattcgtaaggatgctgaccattctatcaagtgcgactttata

SEQ ID NO: 280003 - DNA, 991 bp, Cannabis indica
agatattcggtagcctcgagtcaggtggtcaattttaataagtcggaggtgtgttttggcaaggtaattccagcagagttgtcgagtgagttggctgagtttttgggtgttagaatagtggataatcatgggaaataccttgggttaccatcttttgtgggaaggaacaagaggcaattgtttgatgtcattaaaaatagagtttggaacaagctgcgaggttggaagagtagtatgttctctatgggtggaaaggaggtattgattaaggcaattgttcaggctattcccacttacacgatgagttgttatcgtcttcctaagagcactatcaatagtatacataaaatggcagctcgattttggtggggttcaaccgaaaaacagaaaaaaacacattggtgtaaatggaagcatttatgtagaccaaaggaggaaggtggactggggtttcgagatctagaacttttcaatcaggcacttttggctaagcaaatttggcgttgtctacgacagcctttgtctttgtgtagtagggtgctcaaggagagttatttccctaggaagggggtttttggaggctaagtgtggttcacatgcttcgtttgtgtggtgaagtttggtttggggaaggaggttattgtgaaagggtcacggtggagaattggggatggtcaacaagttcgaatcttggaagatccatggctaccaaggccacgaagtttcaaaatctatgataagccggagctaccggctcaattgtgtgtggtggacttgactctccctaatggagattgggatgagggtttttattcgggctaattttaatggtgatgatgctaatttaatgtgagtctccctcatgttcgtgatggtgtggaagcaaaactcatgtggcattatagtaaagaatggagaatatacggtgcgtagtggctatcgtatggctgctgaaatcaggaaagaagtggccactcggatgagaaggttc

SEQ ID NO: 280004 - DNA, 498 bp, Cannabis indica
cattaaattcttccaaaaattccaagaaacaaagaaaagaagctagaacaaggtttacctctactagaattactttaaaattgctgaaaatcacttgaatcacaaaggaaaatccacttccttgctgctcaaggagggccgaatagagaggaaaagagagagctttttcacaatttttctaactttttgaaactttgtaaaatgaaaataaagagttttaattactcacatcagccaataaaacataacataacatccattttccacttactaagtccactaaaggacaaaacataaatggggcaaaatgaccattttgcccctcctcacttaaaataacataaagggcactaaagggtatttttgggaaattctaaattctcggccaatcccgacattcccaatgtctaataaaccgtcccacaatactaacatactaagttgtgattttactgagccaaacaccgagttccatgttaccgggcaccggaaatgcaa

SEQ ID NO: 280005 - DNA, 585 bp, Cannabis indica
ctcgaagagacgtcctttcatcctgaaggctattcacctctgcagataaggtttcgatggtctccttaagtcggtcagaagcctcgagatccttagtcaactcggttattttcttctgagcaataaaaagcttcttgttgacttcacccaacaccatccgaacagctccaagttccaccctagcgccattagcatccttcttggccaagtccacctccgccctcatggtgttggacagagtcgcgttcttggaagcagcagacttagcctgggagtatgtgtaagccaacttcagaccagcctgtgcagagaaaaaactttataatctgagctaaataaagacgattaaaggaaactgtcaagaaaagcttaccctggtgaattccttcaagactcctcccatcagcaactccaaagaagagtcgttatcagcaccgtccagtttctcactaaccttaggaaccaaccggttcatgtagtgggcgagcatctccttgcctttcttggcctctagaagcactgacaaaggaggagtaagagcctgcatcacctcggatccacctttggattgctcaggcctgtccg

SEQ ID NO: 280006 - DNA, 613 bp, Cannabis indica
aaacttcgagaagtctctcacggacatttcagctttcattggaaatctgaatacacgtgtcctttaaataggagtttggtctcgagtttctaggtgagagaaatctcactataacatgatctttcgcatgttgagattttacgagtatatcgtcaacatatacttccatggtgtttccaatgagatctgcgaaaatcatgtttaccagcctctgataagtcgcacctgcgtttatcaaaccaaagggcatcacttgtaagtaatgaacgagttgtgttcctggccgggctcatacatcgggatttgattatatcccaagtatgcgtccataaagctcaggagttcgtgacctgcagtggcatcaacaagttggtcaatgctaggaaggggaaagctgtctttgggacaggctttgtttagatctgtaaagtcaacgcatgtgcgccacgagccattaggcttaggcacgagtacggggtttgctaaccagttggggtagaatgactcccgtataaagccacaggctaagaggcggtcgacttcttcttttagcgcttggtacctcgcagggtccattttacggcgcttttgtcggacacctcgcacctcgggg

SEQ ID NO: 280007 - DNA, 693 bp, Cannabis indica
tgatgctctcactcatccacttgatgccttcaaccaaatcaaacctagttttctctgtcagacaactagtagatgagagagttcctttcatggtgatttcaaacctccttcattattcttccaaattcgaaccctatagtgaaagagtgtcatgcccacacatagtaagtcaactactcaatcatagtgagtaagacggtggtaaccaaacccgaaggagtgaaagagatccaagtttagatcttgataatgctctgttacagaaatgaatcaagggctagagatgtgaacggaaggtgtcattatattctgttgcaaccaatgtaaggttttcttaaacccttatgtgtttaatttcatgttttagagaattcatatttatgatgttaatttaacatacttgttagtaaatctagatcctggtaaaatattctcaacaactggcctcagagctatggtaattatttactttcatgtaatatggatttaaaacaatgaatattatttttgtgttgatttggatgtgttcatgttggtttatgttttatttgatgattgaatgtgatttacaaaatttttccatgaaaataattttattttcgttctaaaaatattttatttggattccttgtgaaaagttaagcaattttggtttttatagaactcaattccgataaaaattgaaaaagttat

SEQ ID NO: 280008 - DNA, 1021 bp, Cannabis indica
actaccgcatatttgactccacctttccctttaggtaactcgccgattagatcaatcccccatattgcaaagggccatggacttgtgatagaatggaggttacttggaggttggtgggtatatgtggctattcgctgacacctgtcacacttcttcgcaaacgcgagagcatcttgtcgcaaggttggccagtaatacccttgccgcatgatttttaatgcaagggagttacctccggtatgattgccacaaatcccctcgtgtacctcacgaagtatgtaaccacaatcctctccgctgatacatttgagaagaggttgactaaaactcctgcgatacaacctttggtcatatattacataacgggcggctcgctgtcgcaactttcttgcttctattttatcatcaggcaagagccctttttccagatatgcgaggataggagtcatccaggtaatctcctgaacggtatctatttccatgatcacttcttgatttatagttgggtgagccaatacgtctaccggaatcacatcgagcaattcggcttctctagttgaggccaaacgggccaatgcgtctgcgtgtgaattttgagcacgcggtactcgagacacgactatttttttgaacttctgcattatttcgcagacaatggctaagtatttaaccaatctcccgcctcttgctagatattctccattcacctggcataccacgatttgggagtcgctaaaagcctgaagatactcgactttcatctcgagagcgagtttcaatcctgcgattaaagcttcatactcggcttcattgttagatgcagaaaattcaaaacgtaaagcagcgtgtaccttgaaattattgggactgattaacaagatcccactaccagaaccttcgctatttgaggctccatcgacgtacaatgtccacgtctctctgtttgctatagcaatgtcgcttctgtcttctatgagtgctacctcggtgctggggaattcaagtataaaatctgccaagg

SEQ ID NO: 280009 - DNA, 675 bp, Cannabis indica
catggcgtcaagcttcttcttctcccagaatttagcaatcatctccgtgggtttggggtagaagtcgagctcgatattctggccatttgttgaccaggccatgtaaaagccatcgtcaaagcgcttgatgcaccggctgcaagagacgggagaaaggagctcatctttcttagccttcctcaaggcttggtctttgaagtccttgagctccttcagctccacggccaagttggccctagactccaagtccgcctggtgcacttcctctagggacttcaccttggcgaccatttcatctaaggcttccctagcctcccgaagctcgcgtctggccttggcaacagcctcagcctccgccctcagctcctcctggtgcttggcctgcgcttgggcttccctccgcctggcctcttcctcgaacttggccttggcaagggcctcccgtcgctcagaatcctcttggtacgtccgcctttcaatagatagatcctgcaaggtcttcatgacttcatctatgcccccaaattcggacaagacgaagccatggttgattaagttcttggaaaggcggccggcctctgcagcaagctggaaaaggatgcaagagtgagtaaagtccttaagaaaaataatgaggaaaaaagtaaactacgaaatacttaccacagtcaagga

SEQ ID NO: 280010 - DNA, 598 bp, Cannabis indica
actcaaacttgagcaaatctaaacaacatgcataccaagcagcttaattctacttaaacatgcttaaaatagcttctgaaatcaaataaaaacattaacaacaacacagcaacagattcaatcatttctctttgaaaaccatattttgagctaaaaatccaaacttgagcaaagcaattaacattcattactaacaacctaaataaccacaaattaacatgcttaaatctcagtttcaacaacaagatcacagcagcaacaatatcaaataatcatgcatgcatcacattaaaattcatccaaaatttccaagaacatgaaaaggagctagagcaaggtttaccttaactaggattacttagatcttgctaaaaatcacttgaattcaccaagaaaacccagccctagcagctcccaagcttggccgaaaatgagaggagagaaagagagagttttgcaatttttctattttctaactttgaatgaaaaaaatgaataaaatgaaagctttaaccattaatctatttcagccaaataatcaattaaataacatttattttcaaatagtcaagtcactaaaagacaaaacactaatggg

SEQ ID NO: 280011 - DNA, 1656 bp, Cannabis indica
cgacttgtggctaaagcctgtagtcagagaaagggcattaatttccaagaaactttttcaccagtttccaccaaagattcgctgcgaatcattatggctataattgcccattttgttctagaactcaaacaaatggatgtaatgactgccttcttgaatggtgacctatctgaggatatacatgactcaacctgtaggttttgagaagtctggcgaagaacacatggtttgcaaactcaagaagtagatatatgggcttaaacaagcatcaaggcagtggtatctcaagtttgatatgattgtcagtgggagaacatggtggatcaatgtatatacatgaaggtcagtgggagcagtttctttttcttggtactgtgtgttgatgacatccttcttgcatctaataattctgacctgttggttgagacaaaacaattcttgtttgaccattttgacatgaaagaccttagcaatgcttcttatgtgcttaggattcaaatccttcaagatagggctaatggtattcttcggatagttctttccaatcaaagaacttctccacgctacttagccaatcaagaaattgtctcagaaaacttacattgatcagatcttgaaaagattcaacatatatgttcttctgggaaggcactgatagtgaagagtgacaagttctcaaaagcctaatgtccacaaaatgataaagagagagatgaaatggaagttgttccttatgcgtcactggttggtagccttacgtatgctcaagtatgcacacgccctcatattgctgttgttgttagcgtgttgtgtaggtacttgagtgatcccggacttagccattggaaagtggctaagaaggtcatgcagtatctttagggtaccaaggatcatatgttgacctatcggcgagctgacactctggatatagttgggttcagtgacgccgattgtgtgggatgcgtggacgataataaggtccacttcaggctacattcatatgatggctggaggagctgtatcgtggaaaagtgtcaagcagacactcacagcttcatccacgatagaggcagagtatatggcgtgttatgaggctacttgtcaagcaatatggctgcagaatttcatttcagcactagatgttgtagcctttatcacgaggccgctgaaattatattgtgataattctgcagcagtagctttctctaagaacactagaagtacttctcgctcaaagcatattgacataaagtactattttgttaaagagaaagttacagagtctcttatttccattgaatacacgcctagcactggcatgttagcagacccactaacgaaaggcttacccatatgtgtatttttggagcatgttgcccgaatgggattgttggaagcctagcttgttaagctcagtgggagtttgttatttatgtattgaacatgctagtattttgtacggattgcttatggcttgtgttttgttaagaacatgcattatgatactgaagtcacttctttattgttgttacatatgtatgcttatacatatatgttgttgttcaaggaagtgacaggtacaaaacgagatgaatgcgcataatctcaattttgtcgtacctcatgcatgtttagtttgattgttaatgattgtta

SEQ ID NO: 280012 - DNA, 787 bp, Cannabis indica
gttaggatgagactacacagttgaagagatatttaaatggatttgattggtactacctatatcaacaaggtgtatctttgttttttcggtgacctatatcaacaaggtgtatcttgtatttcgttactccactctttcttgtttttcgaaagaactccacaattaagcgtgcttgacttggggcaatttcaagatgggtgacctcctgggaagtttttcccaagaaccgtgtgagtgaggacaaagcacgctgaaaacactcatgttggtctgtagggttcgtcgccattccatgaagcaaccacagtgacgtactcgtgtataagagtcatgatcttgtgggtgtaaggacccaatggaagcttgaagcgcggatgttacatatatgacccgatccaattagatattaaaataacatccaatctgagccgatcatgattaaatatctaatgtttggcggtagattgtaattggatcgatcgattgttattggattagatcaatttatgtacacacctagctagtagtagtaattagatgtaattaaatggttgtttaggattttttagccccgaattatagcatatgtactattgtgctccctgaattttttagctcgttacaaatggttagtgaactatttacaatattataaattagtttttttgtcaaattttatcacacgtgacaaaaaaaaaatgatgacatgattacttaatcaattgtcacatcagcaccacttatataatttagcactaaaaaataaaaaatatacatttttaaaaaa

SEQ ID NO: 280013 - DNA, 517 bp, Cannabis indica
gaataattattatattggaacaaaacaaaaagttaaaagagattgcaaaatgagaatagaaacataagagcttatatgttttacttgttggcacatagggaagaatggaatttcaggagttcataattgaatacggatttcaaaagcttgtttagaattatatctcataatttaatgtatcacttttttttttggatgactatttaatggatcacttgttagctagatttggattacagtatctgagtgagcgatggtagaattccctcttttgcgtctgccactcttttggctttattcccttctagtaagtaatatcttatttcgatgacaggcacacgggtattaattaattaattattttttttggtttgtattttaaaaaggttaattagcaatttttctccccaaactttgacatgtactaaacaatgctccctgaacttttttgcccgttaaaaattccccctgaactattaagattgttaatttaaggacttttatctaattttagtaa

SEQ ID NO: 280014 - DNA, 611 bp, Cannabis indica
ttatttttggctggtaagaaaaaaaaaaaaatgaaaatgaaatgaaatgaaatgcatgaaaccttatttaaagggaatagcttccaaggcaagaaactaagtttcttcttcttctccccttcgtgtgaaccaagaccagccaacaagaggattgaaagctcaccatttcacttgaattgaagcagcttgtagaacctaagtccaacctagaaacaatcaaggaccgggattgcctagcttattttccactcaagtcggccagtacgcttgagttaagaactaaggtaagaaaagtattaaatactgtataaggttaatattatgattgttgcaatatcaattaagattgaaatcttggtatatgttgttttgatttaaccttaatcgaggttaacgttatgtattggttgtgactcgattatgatcgagggaaataataggaaacgattatcatcgttgagactcgattataatcgagggtaatgatatgaaccgattattatcattgtgactcgattatgatcgagtaaaagatatggccattaccgttatgagtaattactcctgaaactgcggatagatttcttacttatcgtttgctgtatcgggca

SEQ ID NO: 280015 - DNA, 658 bp, Cannabis indica
gacttaaactagaaactagaagtttccctatcgataaaaagcatggcaataccctaaaccacataaaaacgagaaaaactagggttcttgaaaatttcctaaccggcagaccggttgcacatccggaattccggttcctcgcaggaaactttcaaaaattcataactcattccaaacaaccccaaatcataccaaaccttccaaacctgctatttagaccctaaggaacatttctaaagcatcaaaaccgagcttcatgcatataatcaaaaataaccattaaagcatcaagctttgagtttaaaactcaaacttgattaaacatcactatcatgcattcaaaccagctcaaatcttcctaaacatgcatataaaaacttcataaaacaacaacaagcatcaacaatctcaacagcaacaaatttcaaaatttcactttaaaaaactataactttgagtaaaatttccataactttaaacaacaccacaacatgcatcacaagtagctctattctactcaaataatcaagattaaacttctgaaaacaacatcaaaaacacagcagcaactatgaatcaaactaagcatgcaaaccattttcatttcataatttttaaacaaacttaaagaggaaaggattaggagctaacctagctt

SEQ ID NO: 280016 - DNA, 921 bp, Cannabis indica
cacgttagaaaaatcgactaaagctgttattcagctcatttgtgtaattattgagtatataacaccactctccctacatcattctattcgtgatcaagagcctctttatttatcttgttttacattttacaaatttattcaacaccttatctccaaaagagcataagagtagagtatatgagtacgaaacacctcatctcataagagcataatagtacatgagcatgaaacagtactttaaccaagatagcaagatgaaacacttcatgaaatgagcataatagcaagataggaggaaaggaacacttcatatcaaaagactaagagaaaagtaaatgaagaagaacatataataagataggaagaaacaaacatttctaaaacttcatatcagaaaaccaagatagtaatatagatgaaacactttatattggaattaagcaaattaataagacagatcgatgaaagactttatattggaagagcagaatagcaaagatagaaggaaactaaactggacattcatcttagaagactaagttagcaagatagatgaaacactccatcttggaaaaacaaaatatcacaagtgaactactgagtactactaccttacacttagaaaaaaaaacaatcttaatcttacatcaagtttgtcaattacaatattaagagttttttacaccgcatactgaaattttctactttttttttctttttaactggggggtggaattttttataaaaatattgtgtatttttatactgtgttaagttttttctgttgttccactattattttttagttgtttcattgttgcttttagttgtttagttttgtatttcactgttgttttataaaaatgtatctttgaaaaaaaaattatatgacagtatttttgtaaaaagtaacctaaattc

SEQ ID NO: 280017 - DNA, 548 bp, Cannabis indica
taagtttgattttttttttaataatgaagtatacatgtgtaaatagaacttcaaaattattaacaattttattacaattatacattatagataaatattgtctcaatttaattatacatactaataaattcatttattatatggtatgattattagtatatatattggttatataattatcaaatgcaaaatattcacttcaaagaataaagaaaccttattaatttaaaattatatttataattgagagactttgataaaataatcacctccacaaatatttcacataagacaaaatgtcaattagatgacaaacttatttagcattaaccttaagaagtagtatagtgtaatgtggtacttgttttatcaattttttttttttttgtaatttaatatgtgttgaaggctaattatgtaattcaattagaggatgtccaaaaatattttcactttttatgtatgatataaatatatagttttctttttttaaaaaaaaaaaattaaacatcttatatacactaattatacatgtataagcaaacttc

SEQ ID NO: 280018 - DNA, 886 bp, Cannabis indica
atcagctgattcctgagaacgcaagtcttcaaagggagccagtatacaaagaaccatccgagaggcagcaagagcgaatagacaaacgcctttctaagcaaactcctcgaccaatctcaggtaattcatctcttgttataaactaataggtagagtttgacttatacttatctttcatttatcttcgcagatatgacttttttgaagtccgcacctgtcctgaagatcaagccgaagggtggagcaacgacgacttcgcccgttgtcgcccaaaagaggaagagcgatgcgatggctacccttgccacagactcttccaagaagctggccaagaccgcacaggacaaggggaagaaagtcgtaatcgatccacctgttcgagctcgcgacttcctagccatgcaagagaagttcctggccgagatcccttatgaggatcttgttacgcgctctgctgagctggccgcgcagtcgatgactctgttcataaaagctgctgctactccttcgaaggaagccgactcgctgaagaggcaaaatgcccagtttcaggagaacataaaaaggctgaagcaagaagtggctaggaaggagaaggagctcgaagaaatcagcaaggctaaggagcaggcggagcttgaggtcaagaaatcgcaggcgacgatcgaggagatgacccgcgatttggagactgagagagagaatgggaagaagcagtatgatcaggcagtgtctgattatatttataccactctttccaaagttccagacttcgacttctctctcctcggagcagaagccgctgagatggccgaggcttttcgtgccatgtcgcctactcaaacccaaggtgggggagggaaccttcctgatgaggtcgagggtg

SEQ ID NO: 280019 - DNA, 497 bp, Cannabis indica
aaacctaatccaaccatcattaccaactgctacggacctaaaaccaactcaaatgaaccttaaaattctaaccctaaacaaacctaaccctaacagccctcatttcacaaaatcacaagttcaaactaaactttaaagcttcaaaacataagactatagttctagggttacctttgcttgatcctccttgaatcccttgctgcaaacaccaaaatccagcaatgaatcccactatccttggctggttcgaagagagagagggaaaagagagagtgtttttcaatcttttgattttttcttattttctctaatttccttcctaaatgaaataagggtttaatcaattaaaccttggctgaaaaataaagtttctagttgtcacaaggctaggcagccacctaacacaccacttaaccaaatgaccaaattgccctttgacttaaaattagggtatttttaaagccagggttaaaatggtcaaattccataaccccgct

SEQ ID NO: 280020 - DNA, 508 bp, Cannabis indica
attagattaattttcaaaatatattttattttattttattaatgatttttttttttttaaattttgaaattgcattatttaaatgcagataattttgatttttttaaaaaaaaatagattcaagttgaaaattaatttttaattaattttagatcaacttaaatcaaataaatttttcattaatgattaattaaaataaattaactaaaatatattatatcttaattagaaaataaagaaattagttagtgaaaatctagatagttattttctgtttgcttgaagtatttttctagttatatttaattaaatagaaaattaatatttaagttgattttattcatgatacttaaatatttaataattttcttagaaatttaattaaataggaaaattatgtttgtgttgacaattaatttattaattaattttggacaaacataaattagaataattttttccaagatttatttaatttattttaagcaattttgaaaatgtatttatt

SEQ ID NO: 280021 - DNA, 554 bp, Cannabis indica
accaagctgtaataataaaagtcgcatatatatattaaaaacgcgagtacccgtgtactacgaaaatgttaaaggataattatcctcgcgaggatataaatttgtccaaagtaaattgcaaatttgtctgagtacaaagtgcgagtacccctgtaccgcataaaaaactaaactagcaaattcaagaaaaatagtttaaacatagaagagaaaagtcaagcatcgggagcaacaggagcaggttcatctgcgactttgctagcggtctcgttctcgacttcctcagcatccgcaacctcggcctcctcaagaagattccttccaccaccttgagtttgagtaggcgacatggcgcgaaaagcctcggccatctcagcggcttctgctccgaggatagagaagtcaaagtctgggattttagaaagagtggtgtaaatataatcagaaactgcctgatcatactgtttcttcacgttctccttctcgacctccaagtcgcgagccatctcctcgagcttcgcgtgagagttcttggcctcgagctcagcctgctc

SEQ ID NO: 280022 - DNA, 567 bp, Cannabis indica
gggattttagaaagagtggtgtaaatataatcagaaactgcctgatcatactgtttcttcccattctccttctcgacctctaagtcgcgagccatctcctcgatcttcgcctgagagttcttggcctcgagctcagcctgctccttagacttgcgaaggtcttcaagctctttgtcctttctagccgcctcttgtttcagtctcttcatgttctcctggagctgggcattgtgcctcttcagcgagtcagcttccttagaaccagcggcaacagctttcatgaacagagtcatcgactgcgaagccactccacagagcgcggaacaagctcctcagaagggatcttctccgccttggatatgaactcctcacccacgaacttctcctgcatagccagaaaatcgcgggctcggatagttggctcgatcatgactttcttccctttgtcctgcgtggtcttagccagcttcttggaagaatctgcggcaagagtagttacaacatcgctcttcctcttctgggcgataacgggcgatgtcgtcgctgttccactctttggcttgattt

SEQ ID NO: 280023 - DNA, 733 bp, Cannabis indica
attctcaacttattaattccgccttgcgccactatagatttggaattgagttatatagaacactctatatgtaccacgatatagatacgttatgattatccgaaagttagcttccacgaacaactctaagaacataaataatataactaagttgaacctaaccatatcaggattaagatccatagacttaagatcaactattgttattgacttagaaagatataacggtaaatttatgatatcttatccaagataaatatcgctcccttccaatgtatactccatacatccgatactagtaaactttaccaataccctgaaaaggacataatacttatcctaggtgtaaatataccttgtccctgattatcatgccagtctaaatccagttgttgcccctgattttgcccaatatacgtggaccaatcaagcagggacacgtggatcagataacttgtaaatatttgctaaagtctttgaatgccacaaggaagcaccctgggcataagtcccggaggaggcacccggagtacaaggtgctcccggaggctcgcatagcataaagcctctccgcgaagtgtcaggcttctcctgagcaatcaagtcgcatttaacgctgcatgggaggaagcgtgttgggactgcaacacgcaataaagcctgacggcacaacctccaaacagcagcgccacagtaatgatcatttaagtctagcgacgactactctgcgaag

SEQ ID NO: 280024 - DNA, 674 bp, Cannabis indica
gaagcaacaaaccagtgaaagtgttaatgagttcataaccaggtggagaaatctcaatctccaatgtccagaaaggatatcggaacaagcggcggtttcaatgtgtgctaaaaaccttaaccctgaggtggcaacttttgtgggcacaacagaacccaaaactttcaatgagctcgtctcgaaggcctgcaatgttgagatacaaatttctcggcaaaagggtggcaaaccctcaccgagattcgaaaaaaaagccattcaagaagggagaatcaatggaaacttttatcaataccgacaacaacgataaagggaaggcacgggagccacgaaagaaattaactctcaaagaaaggacggaagttaagtattcattcgacgatgatgacgtcgaccaaatttttgatgagttgttaaaagctaaggtaatacgactgcccgagccaaaatgaccaaacgaggtcggtatgacaaaggatccaaattattgtcggtaccacaaaattgtgagtcagccactatcggattgctatatccttaaaaacattatcgaaggcatgattaagagaaaagagattgagattgactcttctcttgggaaagcagcgacaaatacaacttccttaactgagaatgaccaaataccaaacaatcccacacaaagggacataatt

SEQ ID NO: 280025 - DNA, 547 bp, Cannabis indica
tctgtaatctgatccccaagttacagggatttttttgatgactcatgatgcgaaagctgaatttgctaagtgtttgtcattctgcgtggattgcctattgctccgtcttgagcatgcatatgaggtatcctgttcggcctgtatcttgcgagcaaatacccggagttgattccacgtgtcaccatcgtgtgatgccacgtcagagtgcaaaaatggggataacattttccccccaagtctgtacgggacttccgaagttgcgtgtagacttcatccgagctgtctttccgtttgaatgggtgacacgtgttaggcgcgtctgtttgcgactcgatgtgaggctgactgggcgtcccttcgatttttggctaataaatgctctgacgcaattaatatctcgaaatccaattttctctcaccacggttgacggctgcacttgattgcttttgatttcccatattcgcttttgggggaactgaggcgtctgaggttcttttgaaatgattacccctttcgttgtttacctataaatacagtgagcatttg

SEQ ID NO: 280026 - DNA, 654 bp, Cannabis indica
tccggagattttattaaactctaggggtattatttagcttatatgtgaaatatgttaattttgtaatttttgctcggcgacaacggaaaatgcgatggatggctagataatcacatgagtaagtttagaaccctattttatagtggggaatattttagagaaaattaattatcgggattgagcggggttatggattttgaccattttacccctagctttagaaataccctagttttaagtctaagggcattttggtcttttgtttatggatgagtgaggtggctgcccaagtagttgacacctagcactttgtttttcagcaagttttaattaaaggaaaaatcatttcatttgagggaaaaatcaaagaaaaatcaaattgaagagaactctctctttctttctcttttctctttcggctggggcagaaatcaagggggaagggctgttaaatcttggagtttccagcaaaggaagcttggaagattcaggttgaggtaagccctaaagaacccttcttagttttcaagttttaaagttaggttgaattggtgattttgtaatttaggggctgttaaggtttgatgtgtttaggattcgaattctagggttagtttgagttgattgaagttcctagcagctgattttattgct

SEQ ID NO: 280027 - DNA, 515 bp, Cannabis indica
aaaactgaataatcaaaatattatgttagatggcatataaaacatgagatagatatatcatgtgatattaaagttattggcccactgggccacatactcggcccattcctctagggcagctgcctcatttcccctatatatatacttaagttgctctaattattttattctttttggcatatagccgtgtaaagcattatagcaataataaagagtttcctttctgttatggtatcagatgtaaacaaaaaaccctagcctccattttcttcaccttccttcctttcttcttcttcttcatggctccaaggactagaaactccatggccgccgcctctctctccgaacctaccaccgtctccggccacgaactttccaccgccgaaaccatcatcaccgacgtcgaagctccgccgcccctacctccaactgctcctccttcgtcggacacgatcgcagcccctcctcctcgatccgatcctcccacttctggtgcttttggctccggcaacggt

SEQ ID NO: 280028 - DNA, 470 bp, Cannabis indica
agtaaagatttagtttgggggaatttgttaggctatttttagcctaagtttcaggtcacattttatagttgtttttcttctttattattatttttggaatagaattatgcttgttttctttggtttcaggtttctacacttggattgtagaaattggacaaatttcagaaaacagtgatctataaaatagagaaaattttgaaagagaataaagctgaaacttcaagcctaaattcggctatgttatgatcctattttggaaacagttaaaacataaaagttttagatatcttttttatctttccaacgcatcttgaatcagctcatttggagtttagatgagaatgttatgctcattttactaaaacagatcgaagcagaaaattccatctagccgcggcgagatttctatggccgcggctagaaagtctgggcagaaacgtggttttttgatgcacttttggccgcgg

SEQ ID NO: 280029 - DNA, 268 bp, Cannabis indica
aaaaagcttctccacggtggcaaggctgcaaacaaacggacaacacaagcagtcaacaaaatcctaaaggtcacccttgggcctaccggacgacccccagaacaacgaccggtcactcgcctttttcaatggcgtacgttcccgtcccacaggagaacgacttatgatccagctacaaaccaagctttattacaagaagcgctggatcaggttgaagagctccgcgacgagtcgcaaatacgaatggcagcttatacaaaagaaggtg

SEQ ID NO: 280030 - DNA, 656 bp, Cannabis indica
aatcttctgtgggatggtggttcgagctctacaggcagcatagcttcatatccatatgccatggcaaatggagtctatccggttgctgttttctcagtggttcggtacgaccatagaacttcaggaagttctttcggccagtttcctttagcatcctcgagtcttttctttagtgtatccttcagggtcttgttgactgcttcaacttgaccattcgcctgaggatgtgccactgcagagaaacttttgatgataccatggtttccacaaaaatcagtgaaggactggctatcaaactgtttgccattgtctgaaactattttgtacggcaatccaaaccggcagattatgttctacacaaaaaattcttgaactttcttagatgtaattgttgtgagtggttcagcttccgtccacttagtgaagtaatcaaccgctaccactgcgtactgcactcctcccttgcctttgggtaattgtccgatcaggtcaattccccagatggcaaaaggccacggactttgcatctgagttaactcgttgggtggagcttgaggtatctttagaaatctctggcatttgtcacatttcttaacataggactttgaatcttcaatcattgtcggccaaaaataaccttgccttagaattttgtt

SEQ ID NO: 280031 - DNA, 936 bp, Cannabis indica
ttatcacttcttttttttttttttaatttacatttgtagtcctttttcccctccctaagacaatttatgttttttcttaaggggagacaattaaggcccgtccccaagcccttactatttttttagagctttttggctgggtttgaacatttttatatttatgcttaaatacatactttactttgctttttaactttgttaaacttttggcatgttttacatttgtccgcgtggtatgccttactaccccctgagtgacatgaaaattatttttagggcactcagttttacaaacattaatttagaggttgcacatacttgtccggtacaaatttactttacagagcataaacttatatttttcgactattggtaatactttcggaggtgatcagcattccagaccctaggcaccatggttccatccattcttttgagcttgtaagtcccggagctgatttcgtcctcgatttcgtatggtccttcccaattaggtccaactacccccactccgggttcctgagtggctggaaagacctgtcttaggactagatcacgaatagtaaattttctatttttaaccttcgagttgaagtgtttagccaccttcttttgataagctgccattcgtatttgagactcatcccggagttcgtcaatctgatccaacgcttcttgcaataaagccttatttgttgttggatcgtaagtcattctcctgtgggatgggaatagtgtttccaccgggaccattgcctcacaatcgtacgccattgaaaatggcgagtggccggttgtggttcttggggttttccggtaggcccattacactcttggcaattcttcaggccaattgtttttgtaggccagtagctttttcttcagggtgacttttaggattttattgacggcttctgcttgtccatttgtttgtgg

SEQ ID NO: 280032 - DNA, 620 bp, Cannabis indica
gacgaccatgtcacacccataagggacccttgtcatcagtgactcattcaaatgttaaaatcccgcgaaaggctcaaagacagttgtcaacccacgaaaatagcgggatattttcctaaatatcagactccaaccgcctccgaaaatcaaggagacggttgagatggctccgcattggtcgcgtctcctgaagcgagaagcaccgacccccctcccctatataaggggtcacccatgacctgggagggggatccgcaatctgaaacacttagaaaattaaagatttctcattctttgcaatcaagagcctgttcttgactattgcaactcagatcaataaaactcaaggggagtaggctattaccgacatccggggccgaacctctttaaattccggtgtcttttatttacatttattacgaattccggcattattaactgcatttattattgtgattttggtctaaatctcatttattacgactccgcgtcggttggctaaaaatccagtcaacatatatatatttagggtgtcatattattctaataaatatcatatattaataaatcaatatagttttaattatttaaataaaattaaaataaagaattataagaaa

SEQ ID NO: 280033 - DNA, 628 bp, Cannabis indica
gaaacttaggtcatccatcctgagattacctcaggccaaatacgcttaaccgttctttcgtgataggctaccgaaaaacaagatacaccttgttgatataggcggtatcaattaattcatttaagccatcttcaactatgtagttccatacctacacagtctcagaatcattccacttgaccttccccaagcaatgtgagattgtacagcttacccgatatttccccttacagatcacgagactactaactgtgacaatttaaaaaaaatatttttatgaattttttttaaaaaaaagttaaaaagtataaattgttactcctttggtttccaagggtgcctggttacccttacttgattttcttatattttttatctttttttaaattttcccataaaataatatttttgggaaaaaaaaaatcatatttttacacaaaaatataaaaactcataaaatttataatttctaatacaacttcctttctttattattttataattggcataacttttagttctataagagcatctccaataaggttgcctataaattggtcttgtcacatatgcaatgtgatttaattttctaaagacaaattttatgtaaagtgttactcaatatgga

SEQ ID NO: 280034 - DNA, 732 bp, Cannabis indica
gtatagatttggctaaggatgtaatgaaaagatgacttgaaaattttagggttagtcttgagaatagaacgatataattttagggttaatgaaacctatactattctgactcttattaggtttagttttatgaataataataatattaacataataacaataataatatgataaattattaaataaataaatatctaacttttaaatttaaattgtaagctctcaatctcgtaactttagggcttagttttgacctagaaaaattacgaattatgatatagctatttctacaaaatttatagatctttgaattatctttccaacgccactggaatcacctcaatcggagttataaaactccagatatggtcgttttagtaaaacagtttctaaacctgcgaatttctctaaacttacgaattttctcacattaattaaataataatattatttaataccacttatacaattatttaaatcaaataaatatattataaagaaaacttaatggactttcatatcgggctttaattaaacgattacgtacttatgaaaataccataatattttactttcgtagttaatacaactttaactctctttagaaaattggtacaactactctaagcaatagtctctactcactaacaacacaaataaatgagataattatcctcgcaccattaatattccaaaaaaaaaaattaaatactattttaatcttgatattac

SEQ ID NO: 280035 - DNA, 730 bp, Cannabis indica
ttaccataactatacatgtatgattcaaatgtataaactattatctctcaaaccacctctctatcttgtttgccaatattctttggccaaacaagcaacactctatttttcacaatttccactatcctctttacaataatatctatattctagttactttcaaaaaacaatacacttcatttctagcttgccaaagatggtacaccgaagcagaaatgcaagtagaaaagaaaagtttcttgaacttactcacattttctctatcaacctaacacaagccaacacattccagctgagccactttttaacctccattatcaccttcttacttacaacacaatcaaagaacaagtgtgttgcagtttctgttcatattccacacaaaaggcatgagcaatcttacaccaaattgaggcgcttcaacttgtccctacttttaaacggttttggataaccaattaaaaatataaagctacgcctggggagattaaatctacccaaacctccttacttcattgtaatatatcagattttgtccaaatgagagcatacccagctgtatcttatactttactgtcgtgaatttgctgctcattaactagatttttaatcttgtctttcactgcaaccactcctttttcaatagcaactacactgagaaggagtagcattgtgacagtcagtagtcccgtgatctgtaaggggatatgtcgggtaagctgtgcaatcc

SEQ ID NO: 280036 - DNA, 609 bp, Cannabis indica
ttaaatattataataatgagtaattaatactattatttgacttcttaaatatttaattatttaaggggcatttgctaatatttttatttttttaaatttttaatcataaataaaagtaattttttgttttaaaaaatatgtgttctataaccattttgtttttttttttaattttaaaaattgataagaaaaatatcactacaaaaaatcttatttttaatcacaacaaaatttctgactaaaagtaaaaaaattgtaactaattataaatcatcattcttatgttgtgactaaaataggtccatcactaaaagtattagttacaaaaattataatttgttgtgactcagtataagaaatcttacttttattattaacatatttatttttttgtaggagccgtacacagtaaatcttgaagactagaagaacaacatgtaaaaagtttatagttaatttcatgtatttttttagaggagatttatttcatgtaatcatcatactacattattattgatgattatattagtagaatttctaaaatttggtaaattaatttttcaatagtaatattacatttttatgtgataagaatttgatatatttttt

SEQ ID NO: 280037 - DNA, 850 bp, Cannabis indica
tcctcaaccgcaagccaaaaagtggaacaacgacgacatcgcccgtcactactcagaagaggaagagcgacgttataactactcctgccgcggattcctccaagaagctggctaagatcgcgcaagacaaagggaagaaagtcatgatcgagccaactatccgagcccgcgattttctggctatgcaggagaagttcgtgggcgaggagttcatatccaaggcggagaggatcccttctgaagagcttgttccgcgctctgtggagttggcttcgcagtcgatgactctgttcatgaaagccgttgccgctggttctaaggaagctgaactgctgaagaggcaaaatgcccagctccaggagagcataaagaaactaaaacaagacgcggctgataaggacagggagcttgaagaccttcgcaagtctaaggagcaggtcgagctcgaggccaagaactcccagatgaagatcgaggagatgtctcgcgacttggaggtcgagaaggagaatgggaagaaacagtatgaccaggcagtttctgactatatttacaccactctttccaaaattccagattttgacttctcaatcctcggagcagaagccgctgaaatggctgaggcttttcgcgccatgtcgcccacacaaactcaaggcggtggagggaatcttcccgaggaggctgaggctacggatgctgaagaagtcgagaatgaagccgtcagcaaagtcgcggatggatctgctcctgctgctcccaatgcttgacttttcctttaatactcgcttgtgttaaactctatccctttttttttgtttatgcggtacaagggtactcgcaccttgta

SEQ ID NO: 280038 - DNA, 627 bp, Cannabis indica
cgaattacaaatatctcccccttcattgaatatgagctgttggatcctgttctgtgcccgactccccctgggaaggtggcccagtcgacaccaaaggtgttgcagagattactggaggcgagtcagctggaggattcagatcaggttggcctgaactggtgacagggtcaaatgctgaaggctccccctgcacatgtgcattacttccagacgtatcagatgatgcgccagacgaatctcgatgaaactcagggaaagagatgtcaggcagagaatccccaggaaaatggtgcaaaagagtcgacttgatagagcgaaccatttgatacatggaggcctcaaaggcaagctaacgctttttatccttcttataacgtttggcaaaagattgaaactcagaaaacatttgtacctgccagctggaatccgaaagccctttgaacataggagacttgcctttactcacttttgatactgagggagtggttgatgagggcttcctattgaccatagagagaaagatcttactgagaacaggattttgaacttgatagtcatgtgttgtaagaggagggtgagcagccataagaactcgttgaacaaggcttggaaatggtagcttgttac

SEQ ID NO: 280039 - DNA, 576 bp, Cannabis indica
atcgcaacgaaaaccctcaggtaacagtttccagacgtcaaactaaccgtgtacgcagggaacgaagaactgaccctgaagctctggacttgaatcacccgacgtcaagagatcaatctgcaaggtttcctaaccagagcgcacaaatcgacgaggatcctgagcgccgcaatcctcgcagtcgtccatctcgagacaacgacgcagaatcggcctcttcatcctcgcatggccgcactccgagcaggtatacgaggtctggctctgtacagacacagcagggaggacgttatcgtgtacaccgaggtgatctgcgtgatcacctcaacgcagtttttagggcacgctcccgcggcccacataacactgagacgctccatgatccccatacgggcgatcagggtgtcaatacagttaacaacccgcctatcgcgccgatcgcgaccactgggattaatatcccctcgaaccttgccgcagtagttgcgagccccgcagtcgcagcgactccaacccctgcgacaggaggaatcgatcaaagcatgcttctgcaagctttgaagatgctcgagcagc

SEQ ID NO: 280040 - DNA, 563 bp, Cannabis indica
ttctgtaggcttaggcgaaagcggaagccggttttcttgaatgactacacagctgggaagaagaaacaacgacatgggcccgtggtagtagacacactgaaaccggcggacccccggctgttaaaatttttccagaagtggattacttatgctagggacaatggccgtcctagggatgttcacactggcgaagccactagatcctggttcgtgaagttgatggtgctgaacgaatggctcgacgatgatgtaagttatttcttaacagaattactttattgtgtttttcattgtttgtgcgacttacatgcgatttatatgcgatttatactcactttatgtataacctggttatgcgacttttatgcgatttatatgcgatgtgcgtgcgattataaactgatttatgattgtttgcgacttatgtgcgattactgtgcgatttgtgtgcgatttttgaaacaattttggtgatttctttgtgcgatttcctgcgatttgttgtgcgacttttatgcgatttctttcttactgttttcttttggaacacagcaaattgatgc

SEQ ID NO: 280041 - DNA, 575 bp, Cannabis indica
aataatacaataattagtgagctttgagttagacattcaaaaaattggacctaactaaatataaaaattgcatttttataatttgcggtgcggtacggtttgaaccgcatattaacaattcaaaactgcaaactgcactgcaccgcgcagtttaggaaaaattcaaaccgtgaccgcatcgcaaagaatttcaaaccgcattttttttgcggtgcagtgtggtgcgggcggtttgaacggtttgattaacaaccctacacacgagtatgatgttcgaatcatatagatatatgggctatagctataatatataaatggttgttacgaaaattatgctaaactacgcaagtgaagtagaacagaggtcgaaccctctgaaattaattaccactaagatttatgattttatttgattgaaagataatctttcagataataacaaaaacgtaaatattattctggaacttgtgttttacaaaagttattaattgaattttctgttttattaaatgaaaaagaaacctaaaattttctaaaatggtaaaaatagatcttgagctcaatttttaacattt

SEQ ID NO: 280042 - DNA, 598 bp, Cannabis indica
cataccttaacacaaacaacacgatgatccgtaagctcaacatttttcagaaactgtaacctggttaccagaatcaccaccaattccccctgaagacatctgctgatatatcttataacaaagaattagagtaaatcttaataataacaaccattacacaaccaaaaaacaacacaaaatcaacattaccataatctcaactgctttcacaccggactgaacagctgcctcaacatatatttgagtagattcctcattgaaatcaacaaaattcttggtataaaaaaaacacaagaaaaaaaaaatacagaaaaaaatatagttatttttttaatagtgttaaacaactgagaaaaaactacaaaacaactaaaaaacaaaataaaaaacataaaaaataaaataaaaagaccaacaataattgcaaacaccataatctataaacatagccatcaaaataacataagaaatacaaataaatagtctgaatattagttgcaaattaaaacagaaaaaaaaaaactaacataataagaaaggatataacaacaacataaaattacaaatccattacctaaatggacttacaacaaaataa

SEQ ID NO: 280043 - DNA, 600 bp, Cannabis indica
atccatccagagatatttttcctttttactgaaatcgattggcacaattctcgaggccaacctcgccaaccgatcgaactaggcggtatactcagtcacgctcatgttttcctgctgggttatgtgggtgaactctttcctcttggcacttctgacgacctcattatagtattttgcgttgaagtgttcctggaacctttcccaggtcatagtggtgagatcatgaatctgagacaccatatcccacaagactagagcgtcttcttggaactagaaggttgcacacaccaccatgtcattcctggtgacacccataatgttcaatatcctggtgatcaccgttagccactgttccgctttcatgacatctggacctcccagaaaaaccggaggtgcctgcttccggaacctttcatacaggggttccattctattggccgctaccactatctcagcctgagcaacaggggcaggtgccacaggaacttctggcactggcactgcaggagcaccctgctgcctcaatctctgaatctcctgatcttgctcctctattctggcttgcatttcatcaaacatagtctcccaattctgggcttc

SEQ ID NO: 280044 - DNA, 590 bp, Cannabis indica
tctataggcagcatagcttcataaccatacgccattgcgaatggtgtctgtccggtttttgttttctcaattgtgtgatatgaccatagaacttcaggaagctattctggccagtttcctttggcatctccgagttttttcttcagtgtatccttcaaggttttgttgactgcttcaacttgaccattttcttcaggatgtgccaccacggagaaaattttgatgataccatggttcgaacaaaagtcagtaaaggatgggctgtcgaactgcttgccattatctgaaactatcttgtacggcagtccgaaccgacagattatgttcttcacaataaagtcttgaactttctttgatgtaatggttgcgagtggttcggcttctgtccacttggtgaagtaataaaccgcttgttgaaaattattttaccaagatcttagatctactcacaagtatgttgattaacaccctaaatatgaacttctaaaacgattatgaaataaacacatataaactatgagaaaccttacattgggtgcagccgaataatatgactccttccgttcatacatctagcccttgattccttt

SEQ ID NO: 280045 - DNA, 558 bp, Cannabis indica
ccggacctagacccgacttaaataaaatcaaaaaataaaaataaaaatgaactttacagaacacacttttgttttctgtttttaaaattaaaaaacaaaagtagttacataacgcatttttatttttcaaaaataattttttaaaaaacaaaagttttactttcattttgtgattaaaaaattaaaaaaacaaaaatattaccaaacggcacctatgttattatatagtgattttaaaaatgttatgttgatttttgtttgctcaatcgctttttatatagcgctagcctattccacgaccagggccggccctgaaaatatatgggcctaagacaaattaaattttggggccctcaaaaatatataaaaaaaattaaaagaagagtgttatgggatttaaactcatgaccttggactttatgccatccacctcaaccaactaagctataaatatttattgcttataatacacttaaattttacttaaataaaagcctaataattttttttattttttatttcgggcccccggaaagtgtgggccctaggcacgggcct

SEQ ID NO: 280046 - DNA, 504 bp, Cannabis indica
tgttgtcttgacacaaccgaagaggacaacaccatttaaattcttaaatagatagtcatgatacctcgtcgtagtgggagagtttcaaggagctcaccctgttatgacttggaagacacttgtgatgaaaatccattgttagtttaaacaagtaatggattgtcagaataaggaactaagaagtaaagctaagagaactatggttaaaaaccattcatatggagttaccaaaggttttctattacaagggcaagaaaggaaatttttgaaaataagtctatttaatggacttaacaaagcttcctgttcctagtattataggtttgagattatctaaacctatgacttgtggtatgcctagtaatttacttactctaacgcaagcaacttactttagtaagatgctggagcatttttctaatggcaaactatagaagcttctcgacttctagatataaattttattatctaagaaaaagtttcaactattccagaaaagataaa

SEQ ID NO: 280047 - DNA, 666 bp, Cannabis indica
tgatagattttatttaggcctaatttgtattgggcctattcaattaataacagttgttaaaattaaggttaaattcctctcctttgggccttgtgtgagagttagggggccattagtagtgggtacgatatactgaatccagccctccctcacatgaacaatcccaattgtgaaggctcatttgcctgatttgaataactgtaataggttaattaaactagtttaacctaataaaattgattagcaacataattaattttgaaatatttgaaattaatttttcatcagattattttgaaattaattttagaaaaacacacttagtttaatgaaatattttcaagataaactagatgtatttatctgtacttaattgaataaaagaatttataactaattagattcttctagatacttaattatttgaattttcatagaaaatatagttaagttaaaaattagttttttaaactaattttggatcaacttaaattagaatattttcaaattaataattaagtagaatcttctagaaaattagttattcagatattctttaaaatatattttaagtagaaaatttattaattttggatcaacttaaataggaatatttttcaaattaaggtgattagttcaagatacttaatttgatatttgattaaa

SEQ ID NO: 280048 - DNA, 544 bp, Cannabis indica
aattttttttttttttggcttttatcatcttttgttataattaatttcaatctatatatttttacaattaattaaatttaatatttaattatgatatgttagaggattgggtagtttaacaacttaaaaaagaaaatttcaaataatttagaaaatattttactagctaagaagataatacaattctctctcaacgagaaagaaatacaaaaataaaataaaataaatttaacacatgtttaacatcataactaataatattgtttttatttttaaaaaaaaaactattttttgagaataattaggtgcgtccatggacaaacccacattgttctaggtgttatctcccctcaaattcttaaaaaatttgtatatcatatacattatgctaatacacatacacaataacatattatataatatatatatatatatggaagaggtttcaatggttacatttttattgtaaccatcatggttacatttttttaagccattggattactattaaatggttgtgattaatttggaaattaaataaaaa

SEQ ID NO: 280049 - DNA, 760 bp, Cannabis indica
cattgaagatggaaaaaattaatgaggaacaaatgtactcttggattgaatttaaaattaagtttttgttaaaaaaatatacataaattacttaactttctttcaaagataaaaataatgagttcctaatcttatttaattttatttgtgtttacagttattttcacagtatttgaatataatttttttttagatcctttcataagtatacatatatcaatttttcagttaatagttcttttttctttttctttgttttttcctttccttttttcagcataagaaaatagtatttgaatttctgaacttctgattttttttacatcattcataatatttacattatgacttttaaaaaaaaaaaaaaaaaaaatcatttacattcttacataacactttttttcaacaaataaaattatctatgaaataaacctaaaattaaaaaaattaaaaattaaaaaaatatattttaaaccaaaattttattgaattataaaaatttattggtagacttcatacctatctccatagccagaaaaaaatttttaataaatttttagaaaattttaaataattataatatcaaaaataaattatacaaaaaaaataataattatactcacaataaaatataaaaatttatttttgtaaatttttataaatttttttaaaaatatgcaagttatcctaaaatattaggacatgtaaaattataaaaaaaatttaaactaaaaaactacttcaactattcaaaaaaccc

SEQ ID NO: 280050 - DNA, 595 bp, Cannabis indica
attattattattattattattattattattattattattattattattattattattattattattattatcatcttcaaatctttcctaacaataatattaaaagatatgaacaaactcacattaagtgttgcacaatatacttttttttcatttgcaaagtaaaacttcattgaaaaaaaaatctaaacaaaagctaccataaaggaggcagctccccgaaatcaaaacaagcaaaggtatttgaacaatgagaccatttggcgatagagtcaggaagaccattaactgatcttaaaataaaagtaaaattacactgaataaacaattgtttcaacttcaaaatttgatgaaaaactggaatacatctcgcatctaacctgtagaagagctattcaaaatatccaaaagaggtttgcagtccaaaaatagaaaaactttacaccactccttgtctagagcagaagagagagccaagaggatggcattggtttcaaaaaataggggagagatagcaagagatagggcggcccaagcattggacagcttgggccattgcacaaggcctctattttttaaggccaaatttttattt

SEQ ID NO: 280051 - DNA, 418 bp, Cannabis indica
actcactcaatcactcaaggctgaataaaatttaagaagaaaagagaagaagaagtggcggctagggtaaatagaaagaggctcagtttttcatctgacagagttcagtttgaatgtgagccatcactatctatttataggtaaccatctaggtttaggttagatttatttggaaataaaaaaaaagaaaaaataaaataggtaaattaaatgcatagtggccggccatatgtataggataatgggccccacttgcaattttgccattttgttcatttttaaatcaagaatttaccaagtaaatccactaacttattaattccttgttgaatcaacgcatagaacttagaattgcactctcaatcatatagaacgctctatatgttccacgatatagatacgctattaattatccatt

SEQ ID NO: 280052 - DNA, 486 bp, Cannabis indica
ttttcaatcaataaaacgaaaaggcaaactttaattcccgtatgaaaaattaaactttcaatctcaataatcaatagaaacaacatcaaattttaagttctcaaaatctacaaaaataaataaaaacaaatctcataaacacaaactcaaacattagaaccccagcaaaacactaaaacttaaacattaataaaacacaataaatttcgaagccagaacttaacacacacatcaaaataaaaattaaactataaataaggatttatgttactattttttgaattttagtatttattagtaataaatttaatattttaagtatttatgtcacaaattttttaatagtaaaattaaaattttaatataattttatgaagtaattattattaattaaaatacacaatttatttttttaaaatataatttagggtaaataccattttggaccctctgttttgcaaaagttaccaattggaccctgtgttt

SEQ ID NO: 280053 - DNA, 574 bp, Cannabis indica
atttttctcacctagaaactcgagaccagacccccactaaaaggacacgtatgctcagattttccacagaaagctgagatgtccctgagggactcctcgaagttttaaacctcgcttaagatataaccagcgagaggtggcgaacatgaccgaagtctaatcgcatccaagacaagaaagtagatcgcatatatcgaatatatgcgatcatcctccccttgtcctcgtataaaccaggagaacgattctctgtaagtacgagttgatcttaggaaccctacagcctttataaggcgatatagactcgcatgtctaggttctatcagctcaacacacgatgtctagaagaagcgactatctaaaaacgcagacataatgataaccctgcgagacatcggaatatgaacagtcaactcgcaggtacggaagacgcatgcgttgaagaacttagtaactaccattcatttattaatgttaacgttgcttagtttaattattgcaattcaatatgtaaataatggattaacaatgaatgtaatccttgtgtaaccgattggacacctgctttgtatat

SEQ ID NO: 280054 - DNA, 650 bp, Cannabis indica
gggaatctgtttgcgatcgatgatgagtctaggatttagaccagttcccttggatatcagtggttagtggttttccggatgtgtttccagaggatttaccagggttaccacctgatagggagatcgagttttgcattgatttgattcccggagctcaaccagtctctattgcaccttatcgcatggcacctgcagagttggttgaattgaaaaaacaattaggggagttaatggataagggctacatcagacatagtacttctccatggggagctccagtcttgtttgccaagaaagctgatgggactttgcgactttgtgtcgactatagaaagttgaatcagatgacaattaaaaacaaatatcctttaccgaggattgatgaactatttgatcaacttggtggttcaaagttcttttcaaagattgatctgaggtcaggctaccatcaattgaggattagggaagaagatatccctaagactgctttcaggacacggtatggacactttgagtttttggtaatgccatttgggttaacgaatgcacctgctgcatttatggatcttatgaatagagtctttagacctttcttggataagtttgtggtggtatttattgatgatatcttggtgtattctaagacacgt

SEQ ID NO: 280055 - DNA, 1066 bp, Cannabis indica
tacaaagaacacgaatagcctttcaagattgagcctaatcataacaggattaagatcatttgatctaggatcaacttggcgatattgacttgaatagattttacggtaagtttaattaaatctaagtcaaagttcaatatcggtcccttccgatgcatactccatgcatccaacctgagctttactttaaccaatgttctggaaagaacatagtatttctccaaatacaagtaaactcttgttgtagattatcatatcagtaaaaccctgtgtctgataaatctaggaaactttattcacatagtcatgtttactttccaatgtgatgacaacacaataaacatgatcaagtatgtgaaaagggtttaagatgaatttataaatcaattagacaagcaattgataaagtgaaccaaaacatacacaaatgaatgaaaaatacttctgtttctttattgatgttgaatagattacattgaaatggagttttatttagggcataaaacctaacaccaacttgttcaaagcttctcttcaacttattttatgaatagtatgagatcataataagaaaactaaaatctagttgaacactctaagtttttataaatgaagcactcttctcacaacgaaagatataaaaatatgaagcctataaagagaaaaaatcgcttgtatgctctctaggtcctatttataaaacataacaaccctagaaatagccacacaaacaatttcccagctgtacaaaactttcttaaaaaatttcttgatttgaagcatcaaaatcgagcttgttgaaagttattttacgaggatctagatttactgacatgtatgtttgattattaatctataatctaacatcctaaacatgaatttcctaaacaatgaattaaacacgtataaagttctagaaaatcttacattggtggtagtggaatattatggctccttccgttcagatctctaacccttgttcatttctgtcgcagagtattaacaagatctgaaactggatctccttcaggtcttagaattcttcacaatcttccacactatgatt

SEQ ID NO: 280056 - DNA, 584 bp, Cannabis indica
gcagcagcagctccagctttaggcctcttttgaaacacaccatcaaagtattccgagggttggaatgtaggtccagtgattgagggctcaagtgtttcatgtgattgggccacatttttctgagaggataaaaccttaaagattagatttggaaaaacaagcttaaaggttggctttttacctcttcggaatgaaacaatctggttcaaaatgtgggaggccaagtcaattgaagctccagaggtgatgcggtataagaatgaggccacatcttgagacaccacggtcttgttggagtttggaacccaattgctaagagcaaaccgcataagagatgcatgagcaaatgtaagatgggtgattcgaagactctctcctgatttcaattcagatcgtgcacccgtgagttcagagagcatcaattcacgatccatagacatcactgcattggagacattctcgagaagttacaaagcttgagcaatgtccttttcagaaaaagaaaaccaatgtcccctaacatatactctccgaaatagtctagaattctcatcaagaaaatcatcagtgagattagcatagaa

SEQ ID NO: 280057 - DNA, 373 bp, Cannabis indica
cataaaatttcacaaacatcaatcaaccatcatataacacacagatcaacatgaaaccatccaaatcaacacatatcatcattttaattcatatttcatgaaagtaaatcattaacctgtgtgggcactcactcattcaatcaaggttcaaaaatttagagaagaaatgagaagaagagggtggcggctatggtatagaataggaggcttaactttcatctaacagtgttaagtgtgaatgtgagccatcactatctatttataggtaaccacctaggtttaggttagaattatttgacattaaaataatcaaaaaataaatggtaaaatacactaagtgtggcccgccctaggaatggataatgggcccact

SEQ ID NO: 280058 - DNA, 766 bp, Cannabis indica
gaatacccttgcattattacatagttgtaatttacattatttaacaagtgaaaatacacacacacaaaaaaaaaaaatgaatgtcacgaaatagagacaaattagggagatttgtaaaacaacaaattgaaattttagaaaactctcctaaatcgtcttcttccactcgttctcattcaccaccatcacccatacttcctgcacttccaatgatggctcaacaacaggaaatccaaccaagaacgctacaggattatctacatcctacgcgtacggccacaccttcatgcataatgtatcccatgaatatgcccaacttcgatttcaaacctggcatgattcaacttttaccaacctttcatggtatggaaaatgagagtccatatgtgcatattcaggccttcgaagaggtggtggccacattcaacaaccaagctgacatcattaacttggtgagattgaagttctttcctttctcactcaaggataaagccaaaagctggttgtattccttaagccaaggtctattgggacatgggatgaaatgacaaaagtatttttctctaaattttttccaccccataagaccagcagccttaagaggcaaatctctaccttcacccaaaaggaccatgaaacgtttcatcaggtctgggagaggtttaaagatttgatgggccagtgcccacatcatggatacgaaagttggcgtcttgtcagctatttctacgacggtctcacagccgacaaaagacaattcgtacaa

SEQ ID NO: 280059 - DNA, 627 bp, Cannabis indica
tatttatgtctgatatgtccttttctgccacaaaaatgacaagtaggaacaaatctttttacctcagatcttactcattttgtaaaatcctggagattttgtgtcagcagaaatagcttctgcaatgataggttttgaatctgttgcagcagacttcaaatttgcagcatcaggaagattcgttggaacactagattttacaaatttcgtgattccaaaactttccataccatttgatctgatgctagctaaacctctttgacctgcattatgagctttttcaaaaatagaagatgcgggattaagcatttgaatatttttcttaaaattttcaagttccttcttaaagaaagtgattttttcatctttaacacaaaaaccgtctcatattcttttatttttaactcaaaaatttcaacttgatgagacaattttttattcattttaatcaacactctattttaaaagtaacctgaatccacttttcatacatgactttgtatgatttagcaagagactcttcatagattttagaatcatcagaatcagattcttcttgttcagtggtattattcaaacataccaatctggcttttacctgtgaatcacacaacacattagtcataa

SEQ ID NO: 280060 - DNA, 508 bp, Cannabis indica
gttgatttgtatttttgaaattgaaaatttcaatatgatttatattattaataaataactttgataaatatatgctaagaaaaaaaaaaaaagctcaaaaataactcaccaaatggttagaagtattgctatattaatttgctaaacacattgcaaaatttgtttggtatggtttgtttggttggaaacataaaaattgatgattacattaacaaatcgacacaacactatttgataatgataataataataataataataataataataataataataataataataataatacttaaattccgtagtattttttgttattttgtatattgtgaaataattgaaattgggctttgtagtgggtcagaaatttgaaagcccataaaagttgaactgggccggcctggtccaatccatttccaccgattacaatagagatgagaagggttactagggtttcacccttcacttttaaagaggtctctcaaaaccctagtttctcccatta

SEQ ID NO: 280061 - DNA, 492 bp, Cannabis indica
atctgaggctcgagtcaaatatgttcaacaaccaatgatccagatctacctctggtgtcacctaatgctttgcactatcaaagtagagggccatatatattctctccttattcttccaactggccaagtattgaccttcatcccctcgaatcaaatctaatatgccctcatcccactgaaagttagtgtggtcatcacccgcagcttcccaccgaccaataactcctgctgggaaaatacacggcatgatgacacatctatttgggtacacctccggataaaagtgttatcgcctcctcatcaaatgaaatgccgcatccaaatgctaaaaacatgaaaattaaatatgtcagagattaaataaaaagagttagataaagtctttaaaagcaaaagaagtaaaaaagtcttaaaaacttacatcgtccccaagccatgtcctcagagtatgtagctcgaggaaccaagccgaatcatgtctaccggagaagc

SEQ ID NO: 280062 - DNA, 829 bp, Cannabis indica
cacaataaacaggatcaagtatgtgaaaagggtttcagatgaatttatacattatgtacatataatcatgaaataaatcatgtgaaccatgcattaaatgttatttctgatctatattaataagtaaatctgattatattgaaatgagttttatttagggcacaaaacccaacaccttcgtggacctctagcataatctgcctagcttcagggtccaatacacatcttaaataaaggcatgctgagtcctcttcagtagagaattttgtccatcatcacataacggtgaccctgattctgaatctttctggacagtgccctttcttggggcaactcaccttttgttatgtactcaatgatggggaccatccagctgggtcttgccaccgttgtatcgcctctttacttttgatgtcttggcgtttgtccaagcattccacgggtactagccctagtttctcaatctcactgtctgaagctaacttagccagacagtctgtgtgagcgttcttttctctggggattctttctactttatagtccgtgaactcatggagcagttcccgaactatcgttacatacgcggccattctttctccgcccgtctgatactctcctgacatctggttcactactagttgggagtcactgtagacttctactcttttagcccccacggtctttgctaatctcagccccgctatcaaggcttcgtattaggcctcattgtttgaagccgagaagtcgaaccgtagggcttcttggagtcgaagtctgcttggagatatcattgcaacccccgctctggatccattcttgttggaggctc

SEQ ID NO: 280063 - DNA, 599 bp, Cannabis indica
ccccaaacttaattgtaaatacatatatatatatatatatatattttttttcaaggggtggcacaccccaaacttattacatagcatatatataactaaatataatcttgttcctccgctcttgggttgcccaaatgtgattcactaaagccatgacaacccgagacccttcttcctcaagcctcttccaatgtgatggaggtctttgctcgatcaacctcaccactcccaaacttcactccttggcctttcaccaaaaattttcttcttgaaagtgcatcacgtagttctaccaccccatcggggtacactctcaccaccaagaaagatccatcacaccttgaatctagtcgtccatgagtagccttcgttaaagagttagcaaaaatcacttgttgcccaacttcaaacatttgagaccaaaattttctactaaacttctttttctttctcttctttttgggtggttttttagggtcaaatgatgttttgtctttgctttcttgcggctcgtgatccttagcaatttctttaaggggaatcttctttctcaccttcttactatttttgaatttggactcctcaaccatgttaggatc

SEQ ID NO: 280064 - DNA, 885 bp, Cannabis indica
acgatctcacttacctgagtattacttgttaaaacgatacgtatacttgcgtgttggatttatcacaacaagtttttggcgccgttgccggggactgttttagttaatatcaatatagttgaattctattctaatttggtttctttttatttaagtttatagatgttttactgaatgtgtttgacctgcaaggtaaatctcaatgttataccttgtgaattttgtccaacaacataatgagccattctattctgcttgggggagatttaaggagctcggggagagatgttattccaatttctcaagtgggtgttttacgatattcttttataatggacttgatgatgaaacaaaaagttgggtggattatggagcagaggttactggagagcctttgttaaggagaggccatgaagcaataaatctgttgaatgatatggcagattttgattacgattggcattggaatccatcacttcaaggttggagtcaccaataccctccttattgtccaaactcaccccaaccaattgaagaagaggaggatatactatcacttccaaaagagattaatcgcttggcggacatggtaaaagctctatgtgataatttaatggcgcatgattcagagagttttaaggataataactcaaataacgaaagttatgagagttgtttgaatatagtagaagcaccatcagatgaatacatagaagagactgagcctagaattgaagagaaagaatcctttgaagtggttgaaaatttggatacattggatgcttgctcaacaaatgatgaactcaatttggtgaatgaagaaacatccatcctcaatgatgaaattattgaagatcaaatcacagtcaaggatgtggatggtca

SEQ ID NO: 280065 - DNA, 1009 bp, Cannabis indica
ggcgtctccgcgtcgcgaggtggccgatggtaggtccctgatgtggaaggcttgattccagctacctccacgatgttctccaactgatggggacaggtcagagtggagtgaagctcggccgcctcccatccggtcgcccgagacttgtacccctcctgggcaacgggacccagggagacctcctcgacggtagccaggcgcttgccgctcttcttcgatgattttgagccagaagcagacatttttcgattctgtaaaaagagtaagattccagcagttaggccccataccaaaccccaaatcaagaaaaagggaatgggggtcccctaaccgctggaaagaggccccctccggacacctgtcatacaggaaaccctaggaggattccctggacaagagtcgggtgcaataaattcacagaagacggccttacacgctaaagaaaaagaaaaggtagaaaacagaaagaaaaaagtctgtcctgtgccctaagcaaccattatacgaagaacgtatggtcttctacagaaaacaacaacagatgcgtgacaacagtaatcctatcactagagcagtaaactcaaacgattatatgaaggatttaaacacttgcatgcccagaaacttcgaatgcaaacccagaaaagaacaaacagataagtaacagcatgccattcaataataaagcaaagggtgcaaagaacttacgatgaagtgttgaaactgggggtcctgctgtgaatcgaatagagacaagaaggactgatagtaacaaacgaagaggaactggagaaaattgcaaagtgtttaaaggcgttgttttgggtctgagaattttctctctgggaaatttgagcaaagttggcaagaaatgggaagtaaccgaaatgaagaaaaggtggtggcttttataggcaaagctgcatgaggaacaggcgtcatcacctaccaatcaaacggtgggggaagcgcacgattcgaatgctcaaagatcaacggaccagattga

SEQ ID NO: 280066 - DNA, 550 bp, Cannabis indica
gggttcgcgtcatgggtccttgtctggtttgggtccgagtcccaagttccgatcccgatatgagtgtggattcagttgtgggtctaaatccttggttctgattctggtatgagttcgagtttgtgttcgcgttctggactagcttttgggtctgattcgtaggtgtgggtttgagttcgggtccgagtctatatccgggtttatgtccaggtcttgacccgatctgggtctaggttcgggtctaggtccaagttcgagtccaagtttgggtctaggtcaagatctcggtccacatctggtccagcatttcgatcctagtctttgtctttgtcctagtggaggttcgtatcgggatccctatctaggtccaagtttgtgcttgggatcgggtgcatgatttaggttaaggtccgggtctcagttccatcctgggtacacgaccgtgtccctgcccgagttccagtctcaatttaggtctaaggctaggtctgtgttcgattctaggtcttggtccgggtcctggtcacggtcctagtcttgttctagggtc

SEQ ID NO: 280067 - DNA, 628 bp, Cannabis indica
agatctttgcacccgacttttgtccaggaaatccttctaaggctttcttgttgacagatgtccggagggggcctctttccagcggttaggggacccccattcccttttttgatttagggtttggtatggggcctaattgctggaattttaactcttttttcagaatcaaaaatgtctgcatctggctcgaaatcttccaagaaggggggtaagcgtctggctaccctagaggacgtcatgctgggtcccgttgcccaggaggggtacaaacctcgggctacgggatgggaggcggctgagcttcactccactctaacttgccctcaccagttggagaacatcgtggaggtggctggaattaagccctcgacatccgggacgtaccaccggccgccccgagatgcggagacgcccaaccataactacggaggcttcggggcttggagccagacgcacctgatgtccggggccatgcttccccttcaagattattttattaactttcttgtatttgtcggccttgcgccataccaactgattccccaagcttaccgcctgctttcaggcttgtttattttttactccgcccggggatggggctctcccagtccggcggagattttgtatt

SEQ ID NO: 280068 - DNA, 512 bp, Cannabis indica
gtggttgaacaaaggaattggcagtttctgacaaaacaggaaactagcaatgtaggaaaccacaatgcctaagccggccactatgcttccctttcacattgatttttcaatttttaaaatgtcaattaattctaaccatagccctaggtggtggcttcagtttttgtacacacacaatattctgacagaattttctcacacaaaaactctctctaaaccgccaccctctctctctaccttctatgtttcgaaatctatgagtgatagagtagtgcccacacacatcaagtaatacctcaattatagtgaggaaggctatgtagaattcagaaacaacaaaactacattgcgacagaaaggaatcaagggttagagatctgagtgggaggagacatatattccactgcacccaatgtaagatttctgatacttttatatgtttaattttccatcgttttagaagttcatatttaggctgttaaatcaacatacttgtgagtagatctaagttc

SEQ ID NO: 280069 - DNA, 592 bp, Cannabis indica
catacatgatagtaaatagatcctggtaaaattatttccaacacgttgagactcgattataatcgagggtaatgatatgaaccgattattatcgttgtgactcgattatgatcgagtaaaagatacggtcattaccgttatgagatattactcttgaaaccgcggataggtttcttacttatcgtttgctgtatcgggcaacgatagtgacataagtagctcgtggttaacgagtggtaagggtactttataaagtaccagtattgtgtgattacgaagttgtgaaatgacttaagcatgttattatgtgatgatttgtaactggatatatctttgttataatgtgaatgaatggatttttatattgcttaagaaattagtttcttttcttgcagaatcttagtgactcacgaaatgtaagaattcgtgcttatagagatgtaagattggagtgctttatgaagcactgagattatggagttatggtaatgcgtgaattagagtgctttatgaagcactgagattatggaattatggtaatgtgtgaattagagtgttatatgaagcactgaaggtgagtatttataatgat

SEQ ID NO: 280070 - DNA, 669 bp, Cannabis indica
agtaagcccgtacttgtttagtattttaaataattgtgaatgtgaaagcatgttaggaagcatattagattataattatttatgttaagtgcattgccttaaaatccgtaagtgcggtagtaagtatgtaaataggccgttgcctgaccagactgacttactaactgacaggttagtcttataaaatggacacctggtgcaatatggagagtcagagtaaagtggccagggctagtaacggttggagagaatggagtccaagttgtccccgtaaccaaggtgaaagcccttggagggcttccgacgggagtgatggttatccgtcacaggctccgttggatttggagcaaaggtttgcaaaaatggaagctgtgattcaacgacatgaagaagagattcagaggttgaaacagcaaaggtctcctgtagtatctttaccacatatgccaatcatttttgattcggtattaccagcgaagcatggaatggctggtaatcaagtggaaccattgcatggaaagatttggatccaagaaccttcagactttcagggaggttcaaatatgaagaatgcttcttgggctgaaagccctgaggaaattattatgagacctcaggagattatggtagagggtcagaatattacctgcctgaatccagattatggtg

SEQ ID NO: 280071 - DNA, 616 bp, Cannabis indica
gtgccggtcagcctgagtggaaacgcagctcgacgctttacagggccctaaaccataatgttcggaattcaatgagagacacgctaaacactttttggggatttaaaatagaaactaaacttaaccctatcgataaataggatgcctataccctaaattacgtaaaaaccggaaaaactagggctcgggaaaaagcccgaaccggcagaccggtttccaaccggaaccccagttcctgggtaccaaccggtcgaccggttgcaagaggcttctgaaccggtcgaccggttctgagctggggacaaaaattcgatccctttaattcaaatcaagcccaaacttttctataacttccagaacacctgctcataccccaaataacatattccaatcatcaaattataataaacaagtcaaaacatagaatcaccattagagcccaagttggagttcataaactccaattgactcacaacaaggtaaccccccttaaattaatccaaaccagcaacaaaggacataattaacaccagattacaaattagaatgacttaagaacaaacagccactaaaaccattaactcaaccctcacaattcaacctaaacctaagaaaa

SEQ ID NO: 280072 - DNA, 923 bp, Cannabis indica
tcaaatctaatatgctcgtcccactgatagttagcctgctcatcacccgcagcttcccaccgagcaataactcctgctgggaaaatacacggcattatgacacatctatttgggtaggcctcgggataaaagtgttgccgcctcctcatcaaatggaatgccgcatccaaatgctaaaacatgaaaattaaatatgtcagagattaaataaaaaagagttagataaagtctttaaaagcaaaagcagtaaaaaagtcttaaaaacttacatcgttcccaagccaaaacttcggagtatgcagttcgaggaaccaagacgaatggtatcgaccggtgaagcactctctcgggtaattgttcccaatctggccgagtacccaattgtgaaaagtcttgagcagcttccgatcaaccactctaagtgggtccgcattcacgagtgtcgaagtagccctagccttcttcttcatttcagtgtactcagcgaaccacctaggccgccttctcttcctccggttctccatgacttctggagctgtctctaacacctgcacctcagaatcctgagtatccccgatgctggtgatattcgtcttctcaggtgtacagaacatgtcatcatcatccggttggtaatcatttgggagaatgaagtcatcttccggtgtccgagcctcctcttccggttgtggctgtggctgtggctgtggctgtggctgtggctgtgaatctgctgccggccttccaggatcttgcaggagcgtcattatggtcttcaactgatccataatcgctgtttgtcctcttagcagagcggcctgccccctctccacagtctccaaccttgccaaaatggcagggtatactggatcgcgagcctccgaggtgctgggaatggaagctgacgggggaacaggaggatc

SEQ ID NO: 280073 - DNA, 573 bp, Cannabis indica
cttatagctaaagcttcttaaactcgggtgctgtcttagcgagttggattagaaagctggatggtggatggagattgtctacaataaagaagaagctctttcatttgaattaattgtttagtttttcaaacaatttggatttcaagttttgggatcttaattccctgtttggttctcataatattgcaaacaattttttggtttataataaagtatctttttcaaataaattgcaatttatgagttgagcttcagtactttatcttatctattaccaattgttatatttattatgtttgcatgtgtatgtgtttttattattgatacaaattctaaaggtatttaaactccttacagagttattactacataaacactagaaattatttctatgtttatgaataattgttagttcctgttgaccgagattttcggcaactactaaaatatgattataatattgaactgtaagaaagcgagagaaggatttttacgtggttggggcgttaatgagccttagtccacgagtctttgttattgatggatgtatttaatacagattccacaattgag

SEQ ID NO: 280074 - DNA, 116 bp, Cannabis indica
gtttactgaaatatcatttataggaagctaagtgttttaaggagaaaatatattgaggggtgaaacggtaaatttatccctgctcggtgtaaatcatatatagaggatctttgatt

SEQ ID NO: 280075 - DNA, 515 bp, Cannabis indica
taccactagcaggcagattcgatgtcatgacggcatcctttgcggtctgctcatttattacagattattcagcctcctcaacaattaaggctagctctatcactttcttgtacaaagtgtcatatgaagtggtaaccttcaagtcccgactgattgtggcattcagtcctctcttcatccactgcttggccttaattatgtcaatacctcctagaaaagtcggaggttgcagcttcacgaaccgctcaaacaccgagtctcaatgcggcataacaaacccctggttacccaccactggcacaggtgctggtggtaacacttgatcaacaggggcagccggttaccttaatcgtcgcaactcttcttcttgacgaagtatgacacttcgcatttcttgaaacatctgctgccattcagcaggaggattagcattgccaacctccgcattaattccctggattccgcagaggtgggggcagtgcagtgaattggtttggtctacaccaagctctact

SEQ ID NO: 280076 - DNA, 499 bp, Cannabis indica
ctagttcttctttagttgtatttctttaggttttcattgattttaagttatgtttttcctaaacagtggctgttagagtgtgatgtttgtttagtttgaaaattagggttcatttgagctaatctaagtccctagcagttggttttaatgtttgatgttagttctaagcaagcttgagttttgaaactcaagctttgagctttaatggtaatttgagatttatttgtttgttctgtgaattattggttggaaagggttgtttatgcattctataggtatactggagagtttgataaagtttggttgagttttgaggtgttgggggaaagttttgggttcccagcacagaaccagaattccggttttgggggacctgtggcaaccggtcgaccggttggtgacccagaaccggatttccggttgggaaccggtctgcctgtagggggaatttccagaaccctagttttgcccaattttgagatatttagggtattgccat

SEQ ID NO: 280077 - DNA, 697 bp, Cannabis indica
atgtaagcccaaataaaagtctaacatcacaaacttaaactaatatactattaaatgaattgttttccacaatatacagtagcatacaaaaactatatatcacaatcataagcagatataccatagtcaaccaccagcatagtgaaaaaaaaaaaattatacaaaaaacttaatttaatattccacaagttttttttttcttgttctttccttcatgaaataccaatgaacataaaatcaatatacctcagtcaaatataactatacctcatacttaaattaatatttaatagttttttttttctttatatccttcacgatatacatatcacatacaaacgatataccttagaccaatataaatataccataaacttaaactaatatactattaaatgatttttttccacgatatataatagcatataaaaactatattctgcaatcataagcataaatactatagtgaaaaattaatataccaccaatatagtggaaaatatatatatactaaaaacttaatttaatattcccaattttttttttttctttttctttccttcatgatatactaatgaacataaagacaatatttcctagtgaaatataactatacctcaaacttaaactaatattccatattttttaattttcgtctttcgttcattatataccatagcacattaaaataatatac

SEQ ID NO: 280078 - DNA, 895 bp, Cannabis indica
gtggcacatctgtcattaatctggttcttggagttcttaatgaaggcctcgacttgacagataacaagtttttcatcacactgattcccaaagtgcccaacctagcttcaatgaatgattatcgtcctataagtttgtgtaatgtcatttacaaacttatttctaagacaattgtcatcaaattcaaaaaagtgccgccttttgtcatatctgaaacaatcagcattcctctcaaatagattaatcacagacaacatcttaattgcctttgaactcgttcatcatcttcggcacaagacacagggtagaattgggtactcgactctcaagttggacatgagtaaagcatttgacatggttgaatggcagtatctagaggaaatcatgcttaagatgggttttgattatacatggacgtcactaattatgaggtgtataaccactatctctttcttattttctcttaatggtgaggtggttggtcatgtgcaaccatatcggggcttacgtcagggtgatcctctatccccgtacttattcctcatttgtttagagggactctcaagattattgcaatcagaagaacaggctggtatgttgaaaggacttcgattgacacgcaactctcctttcgtgtcacacgtgctcttgccgacgatagcttatgttttgtcaatctatgagcatctgtaatatcgatcaaaaaatctcttgacatatatcataggcatcggggcaagtcctaaatatgaaaaatctgtaatgtctttttcgccaaatacctcactggcagcccaaatttttttgactcaaacgactacaaatgcctattactgagtgtcatcgagtggtacttggggttacgcgtcttactctggactgtgactaagctagg

SEQ ID NO: 280079 - DNA, 515 bp, Cannabis indica
cgttttctctggatttttctgtctgaaactgaaactgtatctgaattctaaaaacctaagcttctatttatagaagggtaaaaggactaatgcgtaattaaacttattacaaattgcatgtgggtaaaaatataaattcaaaaaagttaattcggagtgacacgtggcactgtcggattagctgcctttgatgagtcggtgccacatgtcggctgcagaataaaggagaaaaattgcattttatggctgaaggagacggaccgaacgatgcccattcgcggcgcacgcacggctagggtgaggccgtgtgcctcacgcgcgcgtgaagagggagagagggccaaatggagctgctgctcctgttgcttttgccgagccaatgggcgatcgccacgtggcgctgatgtcggcagggggaagaagaagagggccaatagggcttttgtccttttgtgtttccaaaataccaattttatagctttggcctttatttttgtcatttttttatttctttt

SEQ ID NO: 280080 - DNA, 554 bp, Cannabis indica
acaaaactacacaaaaaatcggaagttaattctatgaaatagcatgaaaaatcgaagaaaacgaagaaaattgcacgttgtacgaatggtatgcacaacatgccacccgcgcgcgcaagtggggcgatctgccgtgattccttggcgctgggaggctgcaagcagccattccgcgcgcgtgggaagggtgatcaccaccctgatttttttcgattttcaaaaattcataactaatttaaataaaatcgaaatcgagttctgtaaaaaagtaaattgcttaaccgtttccaaactatccaataaaaataattgtagaaacagaaaatcaattatttttcccagaatttcacaaacattaatacaacagaacatgataccgtccaaatcacaaacaaatcgttttaagtccaaatttcttgtaagcaaatcaattaccatggctctggtaccagttgttggaattaattttaccaagatcgtagatctactcacaagtatgttgattaacaacctaaatatgaacttctaatgcgataaaaggaaaacacatataa

SEQ ID NO: 280081 - DNA, 250 bp, Cannabis indica
ccactgttcaacttttaaaacatcagggcctcccataaacactggaggggcctgcttcctgaatctctcatataaaggctccatacggttaccagcaacatattgctcagctggcaccgcagggactgtaggaaccgcagtaggcggttgcggggaaactcaacaggagcatcccgttgcctgagtcgtcggatctcttcttcttgttgctcaattctagtttgcatctcagcaaaccttcgctcccaat

SEQ ID NO: 280082 - DNA, 467 bp, Cannabis indica
ttaatttggatcaacttagatttgttttttttttttaaataagttgaagaattctaggaattagttattgagaaattcttaggatattttttttaagttgaaagtttgttaaattttggatcaacttaaaatggaatatttttcaaattaagtggttacaacttaatttgttatttaattaaattttgaaaaataatttaagttgaaaatcttgttattttggaacaaattaaattagatatttttcaagtatttattttattatattttatagtattttcgaaattttatatattttttatataatgattttcgaaaattaaatattgaaattaaattaaagttgaaaattaatttttaattaattttggaccaactttaaattaattaattttcattattaaaatatatggattaaaataaatgattaattaaaaatgcattgttttttaaataatgagctttaa

SEQ ID NO: 280083 - DNA, 575 bp, Cannabis indica
ctgtttgtttttctgggtttctctggatttacagagttgtattctgtaactacgaaaaaactgttttcagtaccagtttcattattctgcatttaattaatcacttaattaaataattaaactgggaatattaaaatacggaatttcatattctatgttatttatttttattgattatattacagaactggttatatttcaattataatcggtgtgagttattagtttttatttttatgatttttttggcggcggcaatttttttggttataactaaatagaatctgttatataacataatgaatgagtatttttttagatagatatggtatgggtataattatttggtgggttggagcatgttgaatggatgtttttgtttgagttattttatttaactggtttttgtgtgtgagtttttatcttagttgctttacggaaccggtttttttgtcttaaatttttaactagttgataaatataaccgatttctttatattatatttgaattattgtgtgttattatttgtgattatttattttgttatggaactagttcttttcatatttatgcc

SEQ ID NO: 280084 - DNA, 525 bp, Cannabis indica
aatttaaaggctaattaggatttttgccccctgaactttgactgtaccaaatcatgtcccttgaacttttaaggttattaaagttcaggggacatgatttagtacatatcaaagttcgaggggcatgatcatttagtagatatcaaagtctaacgagcatagtttaatatataaacaatcactgaaatagtaaaattgaatgaaattagacaaaagtccttaaatccaataatcttaatagttcatggagcatttttaacgaccttaaaaattcaaagagcataatttggtacatgtcaaaatttagtggacgaaagtcctaattagcctaaaaatctcttaactgcatcttgttagacatttatatgtataaactgaaatatatatgtttatgtataaagtgcggaattaataaatcatatatgcactataatttaaggatcgaaatacctccagccattgattcttgagcttcaaacccacataagctttgatctgcaagggaaactggttgatgtgggtaat

SEQ ID NO: 280085 - DNA, 687 bp, Cannabis indica
aactcaagcttgagcaaaccacctaaacaagcatgcaaactagctaaaatcaacctaaactagcataacataacctctgaaaacaaacaacaacctccagcaaatcacagaaacaaatcatggcattttctttcaaaaatcataacttttaacaaagaaactcaaggctttgaacaatctagctactcatgcttcacacaacttatttaatcatcaaaaatcatgctttaatcctcaacaaaacacagcagcaacaacattcaaaattaacatgcattatcatccattttcatcatttttcttgaataaaacacaaaggaaataaaagggatcaaacctacttgaattacacttagaggaggagaaaatcacaagcttgaagaggaaaaatctctgccctagcagcccaacaccaaaccgaaaagagggaggaagagagagctttgagtgatttttttctaatttctttaaaatgactaagtgttgaaatttgagaaaagggaaatataaatcacataaatcatctatttcagccaaataaacatttaattaattattcattttccatttaataaatcatataagacaaaatactaatggggcaaaaagaccattttgcccctccaccataaaatcactaaaatcatactaaaggggtatttttgggacattctaaattcccggcca

SEQ ID NO: 280086 - DNA, 689 bp, Cannabis indica
atttagatagagatatatttaaaaatattgagcatgcctcctcggctcatgacatgtggaaaatgttagaagtaactcatcaaggaactagtgccatgaaagaaactaaaattcaacttttagttactcaatatgaaaatttcaagatgttacaacatgataccattgctaacatgtatactcgtttcacaactattactaatggtttgaactctcttggcaaggtacttacacaaaaggatatggtgaccaaaattttgagaagtctcaccaaagcctaccaaggcaaagtagttgccatccaagaagccaaggacctctcaactctaccattggaagagctcattggttctctcatgaatcatgagattttcatgaatgctcaagaagaagaggaagttgataaaaagaagaagaacacaattgcattcaaatccacttcacatgatgatagtgaagctagtgaggatggtgatagtgatatggaggatataaccctactcacaaagaactttaagaagtttttgaagttcaagaagaatgcaaatagattttacaaagggagtaactcaagggagagctcaagaaaagatgatcaaattatttgctatgaatgcaaaaagcccggtcatatgaaaacggattgtcctttgagaaagaggaatagaagaagggcaatgatggctact

SEQ ID NO: 280087 - DNA, 494 bp, Cannabis indica
tccacgatatagatacgctatgcaacatttaaccatcgttctaatctcaataatcaaagattctctatagataatttacaccgagtagggataaatttaccgtttcactcctcaatgtattttatccttaaaacacttagcttcctgtaaatgatatttcaatgaaaatataattactgaaataagagctcttccatttacctctattaagccaagctcgaaggaaatcatcgtttcacttctatgtcctgaaagaagctatagattccatatctatgtttagccctcccactcaatcacaataccatgttcccaaaatgtacgtctcaccctgaccagaaagtaggcttaactaacaaatcaaagaacatgaatagcactcctgagattgaacctaagcatgacaggattaagatcttttgatctaagatcaactagtgatattgacttagaaagataacaacaaggaaaattataataatcttaaccaagat

SEQ ID NO: 280088 - DNA, 412 bp, Cannabis indica
cactcaacccacgatttctcaactgttttcccctctcagtttcatcttttttcaaatttatttataagatggcaatcactcgttcatcatcatcaccttctccagttctcaaacaaaaatcgaaaatgggcaagaaaactttggctaacaaatccaagggtaaacgcccgatccttgaagagtatgattctgattttgatgctcctctgaccaagcgtgggaggccacattcttcgaagaaaacgaagctcaacgtggaggagcaaacggttccagaaatttctgggaaaaaaactagtgcctctgctgaagatcgaacagaggttggttttcagtttcattctcgtttccccctttttcaacatttacacttttcccagatttttgcgtttttttgttcattctgctttgt

SEQ ID NO: 280089 - DNA, 956 bp, Cannabis indica
tttagcatttggatgcggcattccatttgatgaggaggcgacaacacttttatccagaggtctacccaaatagatgtgtcatcatgccgtgtattttcccagcaggagttattgctcggtgggaagctgcgggtgatgaccaggctaactatcagtgggatgagggcatattagatttgattcgaggggatgaaggtcaattcttggccagttggaagaataaggagagaatatatatggccctctacttcgatagagcaaagcattgggtgacactagaggtagatctggatcattggttgttgaacatatttgactcgagcctcggatcgatttccccgaacgaattgaagagtcacctggcaatgtgggaaaaattactaccaaatttgctgctgcaggctggcctattcgagactcatgacatgatcctcgtgcctcaacttaccgcctcagagagccaggtcagaaatttcacttcaaaagtcatggatcggggcgttgttcgacagacaaagacaaggtaacttaattacaattgatttttttgttatttaacttgaatttaatttgcatacttttatttatttactttttattgtctcatacagcggtgactgcgggatgtacgtgatagagcacatcgagcatagtatgctggagactacgtttgataatgtgcacgatgagaatatgaagaaatttagagagcggtggtgtgtagatttgttttaccagaatttagcatgaacaaatgtgtttttttttttggtatttattaagataacaatgtaactggttttttttattggtatgtttatgtttttttaagagttcatacaaattttacgcctttctttcatgcaacaaattataataattatgtaaacataaaatatcacaaattctaatgtttaaaatagtccaacattaattcaataacaatacataatagt

SEQ ID NO: 280090 - DNA, 780 bp, Cannabis indica
acatacccttctggctgggtcatgtatatttcttcttccaattccccatggagaaaggcagtggtaacatccatctgatctatctccatgtcaaactgagtagctaagcttaggaccactctaatcgttttatacttcaccaccggagagaaaatctcattgaagtcgataccttctttttgtgtgaagcctttagcgactagcctagccttgtaccttataggctcatctttagatcttccttccttgtgcttgaacaaccacttacaagacacaatacttttaccctcgggtcttggtaccacaatccaagtcttattcttcttgagagatcccatctcatcatccatggccttattccactccttagaattctttccattaactgcctcattataagtcttgggttccatatcatccatttccaaatctgttagaagagcataagccaattcttcactccaaatgttgtagctgaatttctgattaggcttcggagtcctcttagatctgtcccttgtcaactgatagtttgtaaggtcctcttcggtgccttcatccctgatctcttgttgagcatcagttcctccccttgaccattgttcatgggctgccggttttggttaggttccacttgaaccattcccggtgtgtctccatattgttccacctgattagaacctgttttaacttctaggtttgtacctgcagggttagtatcttccattcatgcaatagacttttcattaggtaaacaaggaaaaaatattttcttggaat

SEQ ID NO: 280091 - DNA, 485 bp, Cannabis indica
aaataatttccaacactttgttcgtcaaacgcgagatttattgcagcacgcagttcatcctgatcatgatgcagagtgttgttatgaccctgtaagtgtctgagcgcgtcacggagattttacaatttggttgtatctccgatggtcgtctgggtgttggttccaggtggaacagtcgtattatggatgctctggttgggttcggaactgttattcccagtctcttgcacactaggcgcaattccagtaacaggagctgtttcaccattcaccacgcttcctgtctctccaggattaacagcaggcggaacccttgaactccctgggtcctgtaatgccggatccaacgtctgtgaacttgctgggtcagacaggcctctacgagtttgtaccatcgtattggcggttgagtgtcgaataaagagcggtttgtgatcctgctctcaatgaaaacacaaaaatgttgacttcacttttagccaacg

SEQ ID NO: 280092 - DNA, 512 bp, Cannabis indica
gtatttactctttatataataatttttttgatgaaaaaaaaattatacaataatcttaatcttattatttaattaattaccattgttaaaaatgatcaaatcaaagtatctaaccaaatatccacacccctaggctattttttggacttgtgcaaaaaagcaaataataaggccaaatttacaaataatgtatatatgtgggtgtatttatatatgatattacattatataatatattctattatataaatatatgtgtgtggtggtcctattgaatcaaattgcatacaaagctatgtaggccaaataatattgcagaaccccaccaatgtctcttctctctatttaagatcttatcagaagcaatccatcaatcaatattattgcaataagggtatagtgccaaacagacctcttttttcctacacacattttctttctcatttccattcatcttttttccttctctctctttctcttcgttttcttcttcttcttttattttatatata

SEQ ID NO: 280093 - DNA, 573 bp, Cannabis indica
ttttttttttttttgtgttttaagtttttgggtgtgagtgaaaatgttttgaaggtgggatttgattatatatggtggttgatgggagaatagtgctttagaaaatgaaagggtaaaggaggaaagagagaagcaattatgtggagagaaggaagatggaaggaaggagagtactgtgagtgacataattttttaaatgcttccaaaggaaaattccacttaattacatttatgccgacaatgttttgatgacgtttttgtgatgatgtcagagtacacaatttttctattggtaataaatcaaaatccaaattcattcaactcttttgctagcaaaatatggaggggttttgtttgtggatgtgaagtgaaccccacattgggtatatttttattcaatctaatggcttgtgcatatccacttctctacccagttctactagctattcccccatctcaccacttttaattattgcatataaaaaaaagacaaaatgctaaagtaatttgcggcaaaaatccactcaactatcaatttacttgtaaaaaaactatccaacctcatattttggt

SEQ ID NO: 280094 - DNA, 691 bp, Cannabis indica
gggttttgtgccctatataaaattcatttcaatataatcagatttactaattaataaagatcagaaatcgcattttatgttggatagttcacatgatttatctcatgattttgtttaatgtataaattctattaagtccaaaacatatgtatttattcatgattatagtgttgtcagcacaatggaatataatcatgttatatgttcaaaagtttaattccctaatttgtcagttcacaggatttagactggcatgataatcagcgattggtatacttacaccttggataactgttatgtcattccagggcattgacaaagtttactagtatcggatgtatggagcatacattggaagggagcgatattagtcttatataagatatcataaatttaccgttatatctttctaagtcaatatcaatggttgatcttaggtctatggatcttaatcctgacatggttaggttcgatctcaagagtgttatttgtgttctttgatttgttagttaagcctaccttttggtctaggtgatacatacattttgggaacatgatagtacaattgagtggtagcgctaatcatagatatggaatccatagcttctatttggacatagaagtgatatgatgatttcctttgagcttggctgaatagagataaaggattgagatctcatttcagtaatta

SEQ ID NO: 280095 - DNA, 477 bp, Cannabis indica
ataaattgcaaaaaaaaattaaaagaagcccatacctggttcgtcgacggtgtcggggacgatgatgaacggagactggatctcgtgggtctcgtgggtcgagtgggatcgagtggctctcgtgggttgactgggaaggagtgggtctcgtggggtttgggtctcgtgggtcgtcactgttcgtgtggggtcgaatgggttcgtgtgggtcgacatcgactgggttcgtgggtcgactgcgtgtggtggttcgaatggtgcggtggtgagaatgagggttaggttcgaatgggggaacggtggtgagcttgaaaccgagaaaggaagagagagaggaaagttatagagagattgggggaattgaaatgagggaggtattttggaacaaaattgaaagttaagaataattattaaatgtatattttctgtgtataaaataacaccgtgtgcattttttttagcataaaaatgtcaaaa

SEQ ID NO: 280096 - DNA, 546 bp, Cannabis indica
ccaattaccactctaccaaaattacactcctcccatccccttcatgacacaacaaacaaatatcctagaataataaggtgctcaaagggtatatggtggaaaattttctatttggctaagcttacatgtagtaaaaaaaaataaagggatcgattataatcaaagagggtgactagggatagaataatatcatggttggctcaaaaggcttaaacggtccaaagatgacctaaatcatgtccttggtttagtgtcgtctaggatttcgcctcaagagagaactaaaaaaaattataagacttgtgagatcaaaaaatcacatatttacacaaatcacacacaattaaatgatcaaggcatttgtgctcaaaattggacatatctcaatcaaaatgaaactagcacaagaattagtcacaagcttaaacaatatttacatttttcaacaagctatgcacattatcaatcatgtataagaatgtggaaaatcaccaaaccaaagcacatatgcctcaaaaaaaattgactaaacaaaataaaataaaa

SEQ ID NO: 280097 - DNA, 652 bp, Cannabis indica
taatttattaattatttttagtaaatttttaaattaattacaaccgtccaataatgatttaacgatgaaaacctccttcatatatatatatatttgtaatattatgaactttattttttggaaaatgcaatatttaaactttaaatatatattatataaaaattatgtggtagattaccattttatttttattggtataggaacatctctatttttagcacttataaaaattaaattcaaatttattatattattgagtacattttagttataacttacattctactcttttgtgaaaaatttaaaataattttagtgttaaaaatatatatatttaaatattctgttgcgagtgaaatgacttactataactataatatactcttactacaaattttttttacttttagttacaacaaaacttgtgactaaaaagtaaaaaaaaaattgaactaattataaaccatcattcttatgttgtgactaaaaagtctgtggctaaaaagtattagtcacaaaaaattacaatttgttgtgactaaatgtgcttttagtcataatacttgttgtgactaaaactaaaatcagtgacaaacttatagctaaaatattatatttttagtcacaaagaaatttttttttttttttagac

SEQ ID NO: 280098 - DNA, 540 bp, Cannabis indica
tttcatgattatatatatacatacgatacattattttattttctgtatatatatgtatatatatttatatatacattatacattctgaatcaatacattcatatattaatatagattgttctaaagcatgaaaactcattttgaaaaacaaagaaatctccaaaaaaaaaaaaaaaaaaaaaaaaattcggacccgaaatttttggtgattttaaagtctttgttttacgtgttttcgatgcatgaaatctatatgaatggcttaattttttcatttagatcattttggaattgatttcatgaattttggtcgtcggtgtcgtttttcaaggcagttttttcaaaaaaaaaaaggaaaattaaactttccattcttatttaacatatatcttcatatattatatgttatttagtaataaattattatggaaagtttttaacttggtaaattaattacatgctatatttttacattgtaattacaataattgtgatattttaagaatgtgaatatttaattattctacaattaagtgcgca

SEQ ID NO: 280099 - DNA, 592 bp, Cannabis indica
aaaaacatagaaaacaagcataattctgtcataaaacatcgaaaaacgaacataaaagagatccaaaatataggctagaaatagcctaacaaattcccctaaactgaatctttactcgccctcgagtaaagctaaaactcaaacagaaattaaacaatgcattatataactaaaccttccaatgattgaactaccactaccacctgcacaacttcaagcaaatcaataactagaatttcaactcaataactctaagaattaacttggatgcacaattcagaagtaagcaattcatatagacacaaaacacctcttttgacacccatatcacaaccattctacactctccgacattccgctaacccatgttcaataagcttgaatgacatacctttctccactaatgtcaacaattcttgctcggaatcaaaaggtctttttcggttacaatatcatggcttaggtaaaacgggtagatgagaagtcatttaggctatattataccataagcaaaactataccgaacaagcacccacaattatccattctttcatcccaaagaaactagcaagagattacacttttctctttt

SEQ ID NO: 280100 - DNA, 576 bp, Cannabis indica
ttgttgtttttgtgcatttgtgaaattaacccaatttagaatatattcattgatcactactctaggattttgtaataggcttcgagcccatctaattctataattttttataaatcactcttttttgcgtcaattgtacacagacacaacttagtgttagttcataattgacgcaaaagaattgcaacattttacaatcgacgcaaatttgtgatggttcataatattctaattttccgtacttattaattgcatcaattttaagtgttgactaatacaaaaaccctttttgtagtagtgcttcaatcatatgcacacatgtgaaatatatccaaggatttattcatagtgggaatccaacaagagcaaatgagatgagcactcatccttaacttgagggctcgtttggaacgccgtattaggtcgtattgtattgtattgtattatattgaattgtattttatgcaatatttttatgtaaaactatatgtggtattaacttttatggacacctaaatatataatattttagtataaattaaagtttaacatagtattatataaaaatatgatata

SEQ ID NO: 280101 - DNA, 538 bp, Cannabis indica
aaagagagagttagagagagagtggtaatttgaaatggggagggtattgttgggattaatcttaattggaggttatttttttactattttttggctagcatattaaaacaacacatgctatttttaagcatgtattgtcaaatttccctttaagtttgactaatttatatgatatttttttgttttaaggtctttctatggtatttaatatgccatatatatgtaattaagttttcagatctcatatttaatgtttttatttgtttagaaagttttatttgtcactgataccggaaaagtcaccggagtttactgtcgatgtcggaaaagtcgtaggagtagcagttggtgccggaaaagtcgtcggagttgctacgggcactggaaaattcgtcataattggcattgtcgccgaaaaaatcactgaaaaaatactaagaaactagtttcttgatgaaaaaatcggtttcttgatgaagaaactactttttttgtgattttgtcgttgacaatgccaattctgacgctagcagctact

SEQ ID NO: 280102 - DNA, 647 bp, Cannabis indica
aagcaacgaccaggcgagccactctaagcatacatcagcagattcatgacagaagcgaccaaggtgtcgcgggtaaccgaggatggaatgtcatccgcgatactggggggcattgaagtccttggtgaattatcgatcctaacatctggccagttcaacaaagatgaagattgctggataaagaatgagcagtagccttgaaagatgaagttgaaaaactgcacaacaacaacttcatcattgaagctttttacccggcttgggtcgcgaaccccgtactcgtgcctaagcccctaagtcgaacaagaaatggtgagtctgcattgatttcacagacctcaacaaagcatgtcctaaagactattttccacttccaagaatcgaccagctcgtcgatgcaacagccgggtacaaaatgttaagcttcatgcatgcttattcaggctacaatcagatcaaaatgcatctgccaaaccaagaacatacaagttttcgaacaaacatgggtctctactgctacaaagtcatgtcgtttggtcttaaaaacgccgggctacataccaaagattggtcaacaagatgtttaaagaccagatcggtagaaatatggaagtgtacatggatgacatgctcgtcaaatccagaaa

SEQ ID NO: 280103 - DNA, 631 bp, Cannabis indica
taaaaaaaaaaaaaattagatatatgatgttgttacaacacctcttttttgaatgtgaagttagtaggagatgcatcaaagagattaaactatcacactgcaacagtactgcatttgaaggacagcaagtgccagaaatggaagattttgaaagttagtttatctggttgtcattgtttctctagtttatctgtattatggaaaacaagaaatgaagtttttgttagagtaaaatcttaattatttgtgcgcacatatattatagactagcatgtagttcctttttctcttcaaaaagtggtccaatgtttcggtcttgagttttacattgattgatacctgcttactactcccattgtgtaataaatgtctttatcttcatttttttttaatgtaaaccgagagaagagttagggttgtggtcactacaaaaaatcttatttttagtcataataaaacttgtgactaaagataaaaaaagttgtggctaattatagattatcattattgtgttgtgactaaaatgtccgtggctaaaaatattagtcacaaaattacaatttattgtgactaaatttatgtttagtcacaatatttgttgtgactaaagctaaattagtgacaacttgta

SEQ ID NO: 280104 - DNA, 454 bp, Cannabis indica
ggcttggttctccttcttttgtccctttgggaaatttttcttcagatggcctggctgcccgcaattgtagcacaaccctgacttcatcttacactccccaagatgtttcctattgcatgagggtacaaattgggaattctacataggaccttttcaccccattgttgttattttggaccactggctttcccctttttatcacgatcattactgtgatttccctcgtgttttctcttattctcttgatttcctccattgtttcttcgggcttcccacttagcagcattctccttctttatatcattttcgagcaactcagcttcaagagctttttctaacacctcagcagtaaactgtgttggtccccaccatgattttcacatctttttaatcatggggttcatccccttcaagaaccttttgacccaaagggactcggttggtacgatctctt

SEQ ID NO: 280105 - DNA, 461 bp, Cannabis indica
ggatgttacaaatttatttatttatttatttatttttttgcacccaactacttattttgtttttaatatgaatgatcattcacctttttgcatatttattgtaaaacccactgtgtatttccaaacagctttgaatcttttaattaatgcatcaaaattagtattttgtaaaataaggcaaaatattggggcgttacagaattagagacatgtcttctgtttattcagatgcacttaataagcagtaaagaattcagtattcctacatgagtagtgcatatagaaaaatattattccataatgttttatgaaaacaaaggaagtaatggtggagaaagcagttgcttaccacagacttacagttcctataatttgggtttagtcaaatacactacacttgatttggatatcaagacaatggactgattaaaatgcacttcttgttttatgttagtgcaagt

SEQ ID NO: 280106 - DNA, 702 bp, Cannabis indica
agggcacaaaacccaacagttacctccattgttaccgccattagcattctcagccatgatttcttgtgtttcagcagttgttgaaactctttcttgcctcttgtttcttctgtttcttctacaggtcttctcaatttcatgatcaaccggcagtattacactttgtccttgacgtcgcatgcacccccaatgcctgaaataagacaatctaagagaaacagattagcaataagcaagaaaaattaaccaaagtagaatttaatctaattttatgcaatatcaatctttaaacaattccccggcaacggcaccaaaaacttgttgcgaaaattatgaacaatacgcaagtgcacgtaatcaagtagtaaactcacgcaggtgaggtcgaaccacagggaattgaactgaataccactaaattagaattatgattctatttggtagatagttaattttgatagattttgaaataaagaaaaaaaaactagaaaattaaagaaagcaataaaggtgtttaatcaaggatgagaaattagggaaaagaatcctgttgatttaattacccaattgttaatgctaattactattcctctttctttatgtgaatgacagattaaaaaattaacctaactcttttcagatcttttaggtcctaaatcacatgttatctaatcatctctgagatagattaacatataatca

SEQ ID NO: 280107 - DNA, 671 bp, Cannabis indica
gtataaaataaaaaattcacgcgcgtaacaaattctttgctccttaattaaggcgtgtttttttttttttaaaaaaaaaaattcttaaaattttacaagatatcttaaataactacaatatatataatcattacaaaattcagattaatttattttttagttaccgataaagataaaggtatatcattgaatctctttcaatggatgtattgtagaattttagattctgaatttttttaaaaaaaaataataaaaaacaatatatagtgtagtgatcatattacatatttttttcacactaaaataagttagctttcctcgtcaatttcctggaccatcatttctttcactgactactatacatactgactttagaagtggtctaatttggtctttatatttagataagtgttatactatattgtacaagttgtaatgtacaaaactagaaggtaataaagtgtttttttttttctgaaattataaacagcaacacttagttgatgaactttacatagcaataatggatgcactcttaaattacacgcataatatgttattattattaaatggaataaaaggattttttttttcctattgtagagttttaccttttgattttttttttttttttttagttttttggttgttagtaaacttttctctacaac

SEQ ID NO: 280108 - DNA, 363 bp, Cannabis indica
gaatttaccaagtaaatccactaacttattaattcctcattgcatcacccatagaacttggaattgcactctcagttacatagaacgctctatatgttccacgatatagatacgctattaattatccattgttataatcccaataatcaatgatcctctatagatgatctacattgcatagggataaaattaccgttacaccctttcaatgtattttatccttaaaacacttggccacctataaatgatattatagtgaactaatataatcactaaaatgagcgctctatcatttatctctatttagcaagctcgaaggaaatcatcgtttcacttctaaatacatagaagctatagattcca

SEQ ID NO: 280109 - DNA, 642 bp, Cannabis indica
tttacacctagaattagaatatgttacaatattttaaaaaagaaaaagaatgttgtagttaaataatgtgtaatgtgtaggtaaattagaaacttaaatatatttttaaaataatttttgtttaaaagagtgattagttttcaattgctctaatatattgatattgagaaagtcttagtaactatagtctactaattatataaataatttaatttgtgcttgtttatacttaattgtagatatattaagtgattttgtggtgattttttttttttttatttctaagagcttcaagaatattattttaagtagttactagttactattcttacttagttggaaaaatctctagtacttttttattttgtatgctagaactgtagaaaatttaaattatttgaaattgtattaaataatatacaattatcctaaactcaaatagattttagagatttttttatctaaaagagtaatagttttcaaaaggatatattatattggatattgtaaaatttttagttatataactattatctactaactatatgtgaataatttttaattgtgtttgtttaaacttaaatatagatgaattgggtgactttgtggtgattttggttttgatttctaagaagcatcaag

SEQ ID NO: 280110 - DNA, 948 bp, Cannabis indica
cctaccgaagaaaaatatatatgtacaagctttacaaatatcaagcaaccgatgataagttagttgtttattgatattttgagatatttgtgttttgttattttaaataatttttatttttctacgagtaaataaatgcgataccgaccctcgctaatgtgcgccttggaaaggagggatggtgattggatgaagggcatagacaaagagggtgcgtagtgtttccgcagtgcattttagtaaaagtgaagaggtggtggatgtggtgaggagagaacggagaaaaaggccataaggagagagaaaaagtgcaagagggaagagagagaggcgctctggctagattgtctggatagtttggtattgatgggaaaaaggccacgtcactctgagatcttttctcattaaaggaaaaacaaatgtgatccaaataccccatttgtaatttttattttttaaatcatcaataataatattaatatgtattcaaatttatacaaagaaacagaaaaaaaaaatctctttttttcgacaaaagaaaataaaaataaaaatcttttcagtgtagattagaaagagatgtaaacaccaaacgtggcatgccagctggtcaagtaattagaccaatagatttttttctttttttttatggaattgcaccaatagattaggcacacataactttaaaacaaaatagattaggcacatatagaaaagtgattattcaggaaaaaaaaaaaaaaaactttggaaactgaccagaccaaaccaaacatcttctttcatccttattactttcaaacataattatcattatcttacataatagaaatattggcggctaaaccacatgaattttacggtttataacacttaacccaaaaccaaaattttggcggctaaactacctaaactctggttccgttttgctctgcacacctccatcca

SEQ ID NO: 280111 - DNA, 544 bp, Cannabis indica
agcaaacaactaggatgtaatattgattttttacatactgagaaaccatgttacatctgtcctaaagctaagcaaagaaagctcccttttcagaataataatcactttgctaaacatgtttttgatcgaatacattgtgacacatggggaccttaccatattccctctcattccaattacaagtattttcttactcttgttgatgatcattcccgttttacttggatttacctattaaagcaaaaatctgatgtttctcacatcatacctcaatttttatcttatgtgcaaactcaattcaattgtatcttcaaaagtttcagatctgacaatgcacccgaattgaagttcactgatctttttgctaaacatggtatattgcatgaatttagttgtgttgagactcccgaacaaaacgccatcgctgaaagaaaacatcagcatcttactaaatgttgctagagccatttatttcaagcaaatatgcccattactttctggaccgattgcgtactaactgctgcatttctcattaatcgcactc

SEQ ID NO: 280112 - DNA, 1298 bp, Cannabis indica
gttgtctcttgagcatgcttagagaccttaaattcataagtttgtatgggttaagtttgggcagaaattagaggatttgattagtgtaattttctgttgttgagctctgaaatttattgtttgaaattggagttcaagctcttgttaatggaagtttgtttgagatgtagctcaagttaaagctttgatttttatggatttgcaatctgaaattatggggttataatgttggattttgatacttgagcatgtgttttaaactccctttatgatgattaaaaacctattttatggtttgggagttttagttgtgaattggggtgaaaagattggatttttcttgctgaaatcgtgttcttgctgctgtttttctgggttttgaacccagatgccgcggcatggtatttagcatgccgcggcgcgctcatttctttctgggcagatcctttttgcaacttcaaatggccataactttgtgatccggactccgatttgggagttctatataccgttggaaagctctttccgagctctatctgaatatctgaattttaaatgccatgtgaatattttatgaaaatgaaatcaggggttaaccctatttgtgaaatcccggattgtgtgactaggattaccggcacctgatcaggagcacccggggatttggaatctctatcattgcaggacatcaggtaagacagtgattagcacgtagagtatgcgcagtggcgcttatattgtgaatgatatgcatgaaagtttagtaaccgggattagggttattaccctaacatgagcggtttaatagcctagggttattaccctagtgatatatgttgtataaatactatgccatgttggataaatgtatatattgagattatgaattatgcgcttaaggcataattaagctagactcggtaagttggtaccttgagttaattttaatgcggtctagggttattaccctagaatattaagaaagtaagaaagtgttaatatatggtaatattattaatccggtgaaaatatgagttagggctattaccctaagattttatatgatgtggtaaatattgaatgcatgcggttatgttaagcgttatgtgtataagacataactaggttagacctggtatatatcaccaggataaaccaccgaaagaacgtaatgtatggattacgtatatatataagtagggttatgcgagcaagacataaccaggttaggctcgataaccagaaccgaggtaaaccctactaaggccttattgtaaatagacgtgtgagcgcaacac

SEQ ID NO: 280113 - DNA, 542 bp, Cannabis indica
agttgatttttggaactgtattaaacttacctcctcagaaatttaattcgcatattgatgaaagtgaaaggttatgattagttaccagcaattgcctaagtccttctagggatataccctattgataggaaaatttcagaatgatggaatggttgtgtacttagtgtaaaccattactagattcatggatgtcctgatcgtgaacttaagaaagctagaactgttaaactaatgtttgcatgtttgatagctattctaagtgattaggggtggaccatcctatcatcattaagataagaaagtgtttgtttcaacaaatactacttttctaagaatatgattaagtcttaaaacagagtagcaaagtagaaaacataattttttatctagattccaaattgttttatcatcttattcgaaataagatggtcccactgttggaaattattttaccagaatctagatttactaacaagtatgtttgatgaacaccctaatatgaattctaaaacaatgaaaataaacacatataaagttagaaa

SEQ ID NO: 280114 - DNA, 554 bp, Cannabis indica
taattaattccttaattaaactacatgaaatcagcattaagtaataatctactcgtcacataagtcatgtaaatactctcgtttcacatagaacatcgattatcccaattttagcattctcaattctcacttttcagatttcgaattgagatcataaagcatgcacaaggtgatcaatcttaaacatgaaattaaacacaaattaagataatttcacaaacaagaatggaggaatggtaattaaacattaactaggcaaaacattaaacaacaatcatcatcctccctaaatgggaaatttagttcagaaacaaatccataaccattcctaaagcaatattcaacataaataaattaaagaggaataaagaaaagaactgttggtggatgaattctggatcttcacttgaatctctgtgctcttcctgccgctctctgctgtgttttagggttccaaatcgcttcccctgacttccaatcgcagttttctatttataactaaaatttagggttcgatggacgaaattgcccctggtccgtacgggatctcgccg

SEQ ID NO: 280115 - DNA, 956 bp, Cannabis indica
aaacgaggaaaacacgggttctgaaaattccccaaccggtagaccggttctgcaaccggaattccgcttctgggaattactagaccctcatccgaaattccggttgcacaaccggaattccggttcctcgcaggaattttttaaaaattcctaactcgatcaaatcaaacccaattcataccaaaccttccagacctgttctaaataccccaaagaacattttcaaagcactaaaacaacccagaaatcacagataagaaaaacaccattaaagctcaagctttgagttctaaactcaaacttgagcaaatccctctaacatgcattcaaaccaactcaaatctacttaaacatgcataaaatcacctctgaaaactacagtaaacatcacaaaacagcagcaacagatttcaacaattttctttgaaaaccatagttttgagccaaaatttcataacttaataaactcaagaaatcatcagccctaacatgcatgaatcaacattttaaatcaaaaataaacctctgaaatccacatcaaaatacagcagcaaacacaactcaaaaataagcatgcaacatgccattttcatcattttttcaacaaaataaagaagaaaacaggagaagctaacctagcttgaagaatgcttagattggaagagaatttgctttaaaatcaaagaaagaaataagcttcatgcacccacatacccagccgaaatagagagagaacttgagagagttttctttttcaaatttttctaactttgtatttttttgtaaaaatgaagggaatgaaaataaaagccacttatatcattttatttcagccaataattaaacaaataaacatttattttcaaataatcaagtcactaaaagacaaaacactattggggcaaaaagaccattttgcccctccaccttaaaaccacataaatcatactaaaggg

SEQ ID NO: 280116 - DNA, 120 bp, Cannabis indica
actcgacttgcatcaggacccccagtttaacacttcatcgtaagttttttgcatcctttgctctgttattgaatggcatattattacttgttctgtttgttcttttctgggtttgcattc

SEQ ID NO: 280117 - DNA, 457 bp, Cannabis indica
ttaaaacaagtaatggatagtcagaataaggaactaaaaagtaaagccaacacaactatggttaaaaccactcatatggagtaactaaaagttttctattacaaggacaggaaaagatattttgaaaataagtctattcaatggacttaacgaaattcttgatcgtagtattgtaggtttaagattatctaaacctatggcttatggtatgcctaataatttaattactctagtacgagcaacttactttagtaagatgctagagcatttttctaatggaaatctttagaagcttctcgaattcaagacatagattttatttatctaaggaaaagtttcaactatttcaaaaaagataaaggccaaggaaataattccttaggatcaacagtgagaggtctcatatatgctttgcagaccaaacacctgctgttgagtgggagtaatgagtaggtat

SEQ ID NO: 280118 - DNA, 484 bp, Cannabis indica
ggatgttaattcaacatacttgttagtaaatataaatcctggtaaaatattcccaacactagcaacttcaaagaagtagtaactagatacgtggattcagattatgtaggttgtttggacactaggaaatccttgacagacactactacaaaagtggcatttttcttcggttttaaagtgacacataaactatttgtgtcggttagggtaaccgcaaccactgacgcaaatagtcatattttttgcttcagtttagaactgacgccaaatgtatttttgcttcagttatgaacccgaaagcaaaaaaaaaaaagaatttttgcttcggttcataacggaagcaaattatagtgcaccagcgctaattagtttttttgcaaagataagaaactgaaagcaaaaaaaaaaaaaaataacaaaaaaaattagaacaaccacaacaccaccaccaccatttatactagaaatcaattttatacaaatg

SEQ ID NO: 280119 - DNA, 577 bp, Cannabis indica
ctaaaaaaatcaattaatgagaagccagcaagctgaaaagtgtggcaaacaacagctacatataataattggttaattgttttgcctattaagttagtttgatgggtctatgtataaaatgactatactcaattatatttatatatatatataaattatatcaataataaaaaaaaaaaaaactaaagagattatgttttttaaagtcgtaaacaaattatgaattatccataagcctttttttaattagatatatgaaaattagaaaaagaaaagataaagtttgctagttcttgagtagctttcttctttcaactttaattgataaaaataaaatatatacttattaattttttttttgttcattttgtaaaaagttttactttaattaaaatattgcaagcgtgtattgatttttattatggagcttaatgatattattgtttataattacttggcagtctttgctaactttttaattaactttaaaaatagtaaagtggtttaaaataacaatacatacaatataaatatataaatagttatgatgagtaattatatatatatattattatta

SEQ ID NO: 280120 - DNA, 82 bp, Cannabis indica
taaaatacattgaagggtgtaacggtagattaatccctatacaatataaatcatatatagaggatcaattgattacttggga

SEQ ID NO: 280121 - DNA, 974 bp, Cannabis indica
atttaattttaaaaagaaaaataatagaacgtttaaataaaaaaaaaaaaaaaaaagaagtaaaatacattttctctctagttttgttaaatgataaaggaatcctgtatttctaaaatagtacaaataggaccctgaaatattttttcgtacaaaataaaatttaataataatccgatctaaaggtgttatgacaaaatatttacattttttatatctgttcgtgttaggaattgtcttcaagttaagttaataaaaaaaaaaaaaaaattaaagactcaaggtcatttttttaccattttaaaaaatacagggtctattatgtcatttatataaaaaaaaaaagtccaattggtaacttttgtaaaacacagggtcctaaatagtatttaccctaaaaaatcatataacatttatttatgcttattcacaacataataattttatataaataaatataaaaaaaaatattgtataaaaaaaaatatatgtgaaccattattcattttagttaatcacatatataatgaaattaaatttattaattaataaatatattttcttacaaataataatggaaaaaaacaagaaaatatatataaaaaaaaaaaattaaaaaaatactatgggctggcccattaaacatttatacaacccacatataaatatttacaaaaataccacatgctctaaaccttcagccgcacggaacgaacaataaagatgaacatacctcgatcgtttcaaatcagcaaaacaaccaaaatgaaaccaaaacgagggaaatataaccattaatttcggcaaaatcaactggaaaagaagacctgcaatgatctaaagagaaatttacgaaaaaaaaccagaaaaactaggaagaaactgaaattacacaattgttttcggttttattcgatcaaaacaactcttcctaatatcaaaatccaaattcatgaaatgtagatctgtaacaa

SEQ ID NO: 280122 - DNA, 518 bp, Cannabis indica
  modified_base (482)..(482): a, c, t, g, unknown or other
cccaactattccaataattcaaagctcaagtggcaagcgttcaagcaacaaacacaagcaaggaaacgggaagaaaggaaagttcactaataaatccaaacagactccccgagagaatcatcccaaatacactgcattcactattctgactgaagatatagagagtgtatatatggcaactcagccgttgatcccgtacaagaagcccgggcccatgaagaaagataccaacaaaagggacacgacgaagttttgtcggttccacggagactacggccacgacactaacgaatgttacaatctgaaccgggaaattgaatttctaataaagaataacaatctgcatctgaaaaagtacgtcaagaccaaccaaggtcagaacaaccaagatctgctacctccaccagtagatggacacttacaagtcattattggaggcccgcacattgttagagattcgggacaaagctcgagagagatancgccagacagcacagcacgaacaagaagaagtcatc

SEQ ID NO: 280123 - DNA, 585 bp, Cannabis indica
tgagtaccgaggatatcaatttcgaaataaatatttttggcccggtaattgtggaaatttagcgatgtggtcagaaatgtcacgacattaatggaagaattattttgagaatattccggactaggttagaaattttagaatgtcggtttaatagaattagcaaaattacaaaaatgccctaggttattttaaagttatttttcattgggggtaaattagtctttttcttttaggttttagtgtccctttatttttgggctggtaagaaagaaaaaaaatgaaatgaaatgaaatgaaatgcatgaaaccttatttaaagggaatagcttccaaggcaagaaactaagtttcttcttcttctccccttcgtgtgaaccaagaccagccagcaagaggattgaaagctcaccatttcacttgaattgaagcagcttgtagaacctaagtccaacctagaaacaatcaaggtaagttctcaacaatttttggattgaaaatcctagttttgagttagttttgaagtagggttttacttctttgttgtgttgggttttgtgccctaaataaaacccattacaatctgat

SEQ ID NO: 280124 - DNA, 731 bp, Cannabis indica
tctatgaggcttgggagaggttcaaagatctcattagaaaatgtccacatcatgggatcgaaaaggggatgttggttcataatttctacaattggctgattggtaataccagaacaattatagacgttgcagctggtggggcatttatgagaaaaagtgcaaacgagacctatgatctactagaagaaatggccatgaataaccaacaatggccaattgaaagaagctaaacgaagaaagttgttggtatgcatgaggtagacgccatcacaaagttgacagcccaagtggaggccctaacgaagttgatgactgctcaggtgaaacaggctcaagttacttgtgagctatgtgggggccctcacacatatgacacatgcccggtggatgtgaacagtttgccaatggatcaagaaaaagccattgggaactattctcaaaacaataattatgggcacaagcaacaggggttctaccagcagagaaatcagccccaacaaaaccaacaacagccgcaacaacaaagtcctagtggaggctcaaatatccaagctgatttattgctccaattcatgatggagactagagcctccattaaaaccttggaaactcaaatgggacaattgacagctcaaatgggcaaccgtagtcaagggaattcacctagcactagtgaggcaaggggaaaagaaaaatgtcaagcaatttccttgaggagtggaaagagttat

SEQ ID NO: 280125 - DNA, 510 bp, Cannabis indica
ctttgatgcccaagaaaatattcttgatccaagtgtgaaggcatatcctgacgtgcttttcatgtcatctatggatcctgcccagtcactatctgtgtagccaacaagttttgagtcacttgtaactccgtaccatattccgtagaattttgttccttacaagtatatgaggattcgcttggctgctccgtagtgaacttgacttggatcatgcatgaatcttgataggagactagctgcgtacattatgtctggtcttgtagcagttagatatagtaggctgccaattagactttgaaattttgattcatcagctttcggtgagccatcttccttcttgagagctttgttattgtctaatggagttgatacagtcttccaaccatccattttgaatttcttcaatagtttctatgtatacctcttttgtgagatgaagatctcatcttctttttgagttatttcaatcccgagaaagtagtgcatcaatcccaagtcagtcatctcaaa

SEQ ID NO: 280126 - DNA, 538 bp, Cannabis indica
tccaagtcgaggtctgattcctatatttagacaccgactatgggtcaagtccaagcctcgtgtcttgggtcctgggtcccgggtccaaatctagatcctggtccaagtcaaggtctaggtccttagtttgggtcctggttcgggtctcaggtccaggtttgggtctaagtttgggtcttgggtcctgagtcatgggtcaaggtccccgattaaggtcagggtcctaggtcccagtcttggttatcatcctagtccgagtgcaggtcccagtccttgttcggtactagtccttgtctcgggtcttggcgttgtctgggtttgggtaacaatttggttctcaggtctcaggtccgagtattggcccgtatcccagtctcggtcctgagtcccagtcccaatcccagcctaggtcctagccctagtccatgtttaggtctcgatcgttgtcctggtctgggtcccagtccagatctcggtcctggtccaagtctcgggttccagtacgagtccgcgtttgggtttgggtctgggtttgggt

SEQ ID NO: 280127 - DNA, 689 bp, Cannabis indica
tgctatcacttcactactacacactactctacttgagtgctacatttactcatgataaagaaaaataaatagtacctttgtgaggtttaagatcctattgatacaatttaatatctaatcattacggacggctataggtataggcgagctaagctcgcgcttaggacccattcattttaagaatctaaatcaaaaaattacatttttaaatatatatatatatttttttaataatttttaaaaatattatttatcttttagtaagagggttatgaatactaactaactaaatgctcgagaaccacaattttctgaacaaatcaaaatggatttcatttgagaatctccagttaaatagattttctaccggccataaaggtccccccaactgagcatgaagaagaagaaggaggaggaggaggagggggcggcggtagggcaatgagagagagagaacgagaagagaagaagaaaaagagggattggggtttttttattattattattttttaaaattgtattttatttttaattttaagaaaatattaattttattttaaatattaatttttattttaaaatatttattacgtgaccaataaattgtgtccttgtacactgcgtacacgtgaacattccaacttggcacttaacacccaaaaatgaatggaaaaggctaagtgctaaca

SEQ ID NO: 280128 - DNA, 506 bp, Cannabis indica
gtaaaataatttccaataggattatcctattcaccttgtggtaccgaacttttctcggtgtacttagttcatggtcatgatccaacaaaacaaaaatcacttgacatttattttttgaacatatattcgctctaattttagcttggcaatttgtttttgttgtcgaatactttctaaaagtattactactcttacatcttgtctttctattatgtgagtatgctattgcattatattttagctccccatcatcttcttttgtcgaagttcttatacttacttcaaaccccatttgatttccatattttttttatagtactctaacaattcattagttgagtcaaacatcattcacacactccgctctataactttatcatcctattacacataaaatatataagatataaaaacttaaaaatctttcaacatatttaattatattaaaatagaactaaataaaaatataatagaaaatattgttagacttttatttgggcttacat

SEQ ID NO: 280129 - DNA, 500 bp, Cannabis indica
caagaaaactttctgacttcttgagttctaactttcctttagacatagtcgttctttaatctattgagtactcctagttgacatattttcttgtttatcgtttgatattccgtccaacactcatcttgtgtgttgtcttttgtagatgaactcaagtgagtcttgggaactcgggcatcagatcgaccatgatctacttcaacttctgcacgaggatcatcctcgtcttcgttctagtcctccttctagcgaaggacattcttctgacctcgtacccagccataggatgatggctcgtacaaagaaaaccacgcgtctggccgacgctactgatcctcaagtggctcggctcgccactctgcccagcgccaaacaggattagccatcccgatggaggaggaccgtgagggggacgttgaggtccaggaggttgaggacctggacgatgctgttgggttttatgccctaaataaaactctgtttcaatgtaatccagatta

SEQ ID NO: 280130 - DNA, 557 bp, Cannabis indica
ttcaaccaccaaatctagttttcattctctgacaactagtagatgagagacaccttctattgaatttcgaacctccttcattgttcttcataatcaacccatagtgatagagtgtcatgcccacacatagcaagtcaagtactcaatcatagtgtggaaaacggtggtaaccaacccgaaggagagaaagagatccagactcagtcttgataatactctgcgacagaaaggaacaagggttagagatatgagcggaatgagtcatattattctggtgcaattaatgtaacgttttctaaactcttatgtgtttaatttcatcgtattagagaattcatatttagggtgttaatgaaacatacatgttagtatatctagatcatagaaaaataaatcccaaaaactagcctcagagccatggtaatgatttactttcattaaatatggattttaaacgatgaatttgttgatttagatgtgttcatgttggtttatgtgtgatttgatgattgtttgtgaattacaaaatttttctatgaaaataatttatttggatt

SEQ ID NO: 280131 - DNA, 464 bp, Cannabis indica
ggtatcatggataccatttttgaaataattatttcttgggtctagcaactgtggaactagacggagatgtcagaaatgtcacgacaataaaaggtgaattaaattggaattggatttataccagactagattagaaatttaagttgtcggttaggcgggattggttagaaattaccaaaatacccctaagatttgatattaagctcaagggttataagaagggtaaaatggtcatttggtgtgataagttaatgttatgtcttatttgttttggatggctgaaatgaattggcagggttaagatatttatttaagtgttaattacttattctcttaatagaaagtgataagttaaaggaagtcaaaatttaaagaaaagccaagagcatcacttttctcttcctctctctttcggctccaaggaaaacaagaaaggaacttgtgggaatctcagctctcttcat

SEQ ID NO: 280132 - DNA, 583 bp, Cannabis indica
gaacttaaacactcacacacccagaaaacaaacgaagtaaatgtaagcatgttattatctaaagatgcaagaaacttacagtcgattgttgaactgggggtactgagtgtggttgagtgagagttgagaagcactggcgaagtcaaacgctggaaggctgaaagaagtgtttaagtattaaagcagtttgtgctactttgagaaattttctctctaggaaattcaagcagaaatggcaaggaatggaaagtaaccgaaatgaaggaaaggtggtggcttttataggcaaaaacgcatgaggaacaggcgtcatcacctaccaatcgcacggtgggggagacgcacgattcgaattcctgaaaaatcaacggatcagatcgatctaccattaaggcggtggaaacgtttgagtatccgtctgacaccatcaatgcgccgcatcaatcatggggcgtgaaacgaatcgacctctgcaaaagcgaatcgctgcatttaatgccattattagacacacctccacgcgcccccaagtcgtatcagaagaccgaggaggcggctggaaacattcctgcaaaaagcatat

SEQ ID NO: 280133 - DNA, 647 bp, Cannabis indica
cgcattgtaacgagagaggaaactcttcctcctcaagtttccagccctataaatagtgaggaatgttcactgggcaaaggaccgagaaattataagccgaaacgcagtaagctaaggctatctaagaattatatattcagagatactattgtaagagctataagaaaaggaaacttcttccttgttcttaagtcaatacaaataacgaggattaggctattaccgaactgctcggggctgaacctctataaaatttctgtgtcttgttattgctttattatatattctcattacgacatatcgtttatcgcttataaaaaagactcattgtcgttggctaaaagcgaagtcaacattccactttactatttcttcagagtactttgaccaatgctatagttttgcttcgaagaatcttctcttttctatctagaatttgtactggttgttcatcacaagatgttaaatgccaaaatattacatatttcatagtataaaagtacaaagttaattaaattttaaataatattttcatgaaattaaagttatatatttttatattgaaaatattttatttaagattagttttatctttatttataaataataattaatatttatggcataattgagaaaaagaaataaaa

SEQ ID NO: 280134 - DNA, 519 bp, Cannabis indica
aagaagtgtcaaaagtttgaatggtcgaatgagtgcgaggaggcattcaaaaaactaaaagagcacatggacaagcctcctatcctgtcaaaacccgttctcagagaagacctatttctatatttggccgtctccgaacacgcggtcagcgctgccctagtccgggaagaagagaaaactcagcatcctgtgtactatgtcagtaagcgcatgataggagccgaagcgaggtacccaatcattgaaaagctggtcttttgcctcctgatggcatcaaggaaattgaggccatacttctaagcacatccaatcaagatactgaccaaccacccgctccgtcaggtcctccaaaaacctgatgcatccagaaggctcctcaagtgggcaatggaggtaagtcaatttgacttgcactagactgccccgaatttctataaaaggccaagccttggcggacttcattactgaatgcaacgaagccgaggcaaccgcgaatatgccagtaccgacaatccccac

SEQ ID NO: 280135 - DNA, 568 bp, Cannabis indica
ccaggtgttgaagaagcaataggagaggcaccaacaagtggagaggagaaatttgccactgattttcgagcttgggtcttcgatttcttggcagacttcgtcggagcagaagacgaaccagaagctccggttgctggtgcaggcggcgcaggcggggtgaccggagaagcagaagcagagccacgagagggcttcttggacggttgggcattcttagttttggccattttcctttgaaaaccctagaacacaagcactcttacactttgaaaaagttagacctttgagagaaaaaaaatgaaaagagaagagagtggtgatcgtgggtgaatgggtggttgaacatatataacatttcaattttaattacccaataagaaagaaaatggaaaaaggaaagtaacttacttaccttaatcaccacgtggggagaggaaaaaggaaaccaaaaaaggtttttcaaaatttggtcaatgtttccttaaatggaaaaaggaaaccaaaaatccccacaaaatctaagaatttaaaaacccttaccaaaaccgaaattgccaccaaaaaggaa

SEQ ID NO: 280136 - DNA, 602 bp, Cannabis indica
cattcatttgttcttaaatacaaaatcagtctcattagaaggtgagagagtaaaatatgactaaactaataacgacattcctttcccaacggtaccatcctcatccactagcatcaaactgagttcttggaatgggagaaaatagggggtaagcttataaagcccagtaggaaaacaactaatatcaaaggaccctcggtatcaatatgtctcatcaacagtatcaatatgtacaaataaaatagagagaccacaaataatcacaaatcaaacgtcaaatgcatatcacaccgtccactagacccctagctctcaataccaatcatagaaaacgacatccaaaaccgggtagtcgcatctgatatccaccataaataccggggctcagatttaattcactccctgtacagattctaggtctttcacctacaggtgagtgcacacctgatctacctatgatgacacagagactaggtcgtgaaacaacaatatgcaccgaacatgatcaacatggctctcatcaatataaccaaagcaggcaaataataagcataacaaaagaacatattccttttaattttctagaaaattcggcagcataa

SEQ ID NO: 280137 - DNA, 575 bp, Cannabis indica
tttttttttattttttatttttttacatttatatgggttttttttatgccatatttttgtaaaaaaaaaaaaaagaagtagaaatcccatatttgtaaaacaacaataagttttgtcagaaaagtcaccggtaccagaaagtcgtcggaaaagtcgtcggaaaagtcgcaggaaagtcaacatcgctggaaaagtcaacgtcgctgaaaaagttactggaaaagtcaccaaagtaaatatctcatatataactaaaaatataaacggttatatgaataaaaactaataactcaaaccggttataattaaaatataacaggttctgtaacataataaataaatataaataacataaaataactcaaaccagttataattaaaatagaaccagttctataatattgttataatgaataaaaacaaataacacgaaagaactcaaactagttataactaaaatagaaccggttatataacataatgaatacaaataagtaacacgcaataactcaaactgattacaattaaaaacaaagaagaaatcaagttcctaaaacactaaaatataaattaaa

SEQ ID NO: 280138 - DNA, 514 bp, Cannabis indica
tttgggtcccaggtctaggtctgggttttggtttggttctgcgtcttggttctggtcctagtttgagtcctagatctagacaccgactactggtctgttccaggccttgttacccgaatcccgagtaaagatctggatcactatcacgggtctcggtctagttctagttcagctcccaggtcccatttctgagttgggatcgggatcgagacggggtgcagttctaggtcccgaccctggttctatatccttactcttgttccatgtttgggtatgagttgaggtttgggtttgggtctcgagtccaggttttgtttgggatccgcgtccggctcccaatttgggtctaggccttatttggagtctgggtcctggtccggttacggttctcaatctaggtccaatttcagttataattccatgtccaagtcctagttccagtcccggtcaacttccggtgttggttccaatttttggtcacaaggtactagttcgggtccacttttgggtttgg

SEQ ID NO: 280139 - DNA, 581 bp, Cannabis indica
attttaataattaattaaaagtaaatatcggatgcaatatattagtgtttacgaaagcttgataatttaaatatgttcttaagttaacccaaaaataaaataaatattgatgttcaaatagttaaggaaacataacataaatgtgtgtaagataaaaaagaaaattaaaaatcaatctctaaattgttgataattgaagataacatctatctaaaaattgtagataagaaaaataatgatactcatgggtggattttaatcttcctctgcttcgacagagacaatagtgtaatttttgtattttacattttttattctagccggatccgcatataattggattatccatttttcgttgataaattgaatatggtagtgtcgacaaatcccattaatatttgaactgatatttgatgctaattattcgagagtcacaaccctctttccttctttattcgagagtaatatataagtaagttttgattatataattggtttgtataatgtcgttttcttcttgtgattcgcgttcgaaagttatttagtcgagtttcaatatttgagactgaggtagtgtcttc

SEQ ID NO: 280140 - DNA, 635 bp, Cannabis indica
gaaaatgctccctggaaagagcactaattcacacttgttaatgatgaatctgaaattcctgaaagcaaacttgcttggaattgaattatctagagaacaatgggttcagttcacacttaatagtcttcctcctgagtataatggatttgttgtatcttatatgatcaacaattttaactcatccgacatggataagctagaagcagaattgcaggcttatgaacggaacttacctgcaagggggccactcttgcaaacttgagtaagaggaaaaggattaaggatgaagcttctaacaatgctacttcttcaagtacaattgatggtaatacacttcaatgttcaaattgtaatgagaagggacatcaggaagaacgatgtcccagacttctaaacaattcgaatgaaggtaatgcttttgtttttgaatcatctattttagagaatgacaaatccttctagattgttgattctggatctactaatcatgtttgttcttcattgcagctgcttgaaacttgggatgatctaaatccagaggtgttgaagctcaaagttggaaatgacgagttagtatcagtccaagctaaaggaagagcccgcctcaagtttcctaattttagtagaaacttgat

SEQ ID NO: 280141 - DNA, 743 bp, Cannabis indica
aaatgcttaattttgttttggccataacttttgactcgggactccgttttgggagttctttatatcgttggaaagttcgttctgagctttatgtgattttttgaattttaaaatgccatgtaaatattttatgaatgtgaaatcaggggttaaccctatttgtgaaaatttcagattgtgtgactaggattaccggcacttggtcaggaacacccggagatttggaatctctgcttttgcaggacaacaagtaagacagtagtatgcacgtagagttaagcgcagtggcgctcatattgaatgttgagattgtgatcaattaagaaccgggattagggttcttaccctaaaatgagcagttttttggtctagggttattaccctagtagttaaaagatattgaatgttataccataataaatatgttggaataaagaattatgcgtctaaggcatgattaagctagacttagtaaactagtaccttgagttaattttaatgtggtctaggattattaccctagaatattataaaagtaaggaagcaataatgtatggttatgttgtaaattaaatgaaggcataagttagggttattaccctcaataaatgttatttcaggcataccgtaatatgctgtaggaatgagtatttagtatgcaagttagggttattaccctaagattctatatgctttgatatctattgaatgaaatcatatatgtcaagagttatgtgcataag

SEQ ID NO: 280142 - DNA, 639 bp, Cannabis indica
aaactagtttggtctttaatttatatttcagtggtttagaactgttttcttctttgttttaatgtaatcagtttgagttattgcatgttacttgtttgtattcattatgttatataaccggttctattttagttataaccaatttgagttcattcgtgttatttattttttattcattataacactgttgtagaaccggttctattttaattataaatggtttgagttattttatgttatttatatttatttattatgttacagaaccggttatatttcaattataaccggtttgagttattagtttttattcatataaccggttatatttttagttatatatgagatatttactttggtgacttttccagcgacgttgacttttccggggacgttgacttttttgttgattttccggccacaatgactttttcggcaaccgtgattttcccggcgacttttctggtgccgatgactttccggcgactttccggtgtcgacgacttttctggcaaaacttattgttgtttaacaaatatgagatttctacttttttttacaaaaatatgccataaaaaaaatcccatataaatgtaaaaaaaaaaaaaaacccataaccacttagctttatttatttat

SEQ ID NO: 280143 - DNA, 577 bp, Cannabis indica
tactaagaaaacatgattatttaatttactttttgcaataatcccacattatttaaaaagtatagtatcactaacctatgtctatgaccactgttaaatgattatttggaccctatgttttgaaacatgaaatataataatatcataagctcaatattagtgaaaacaattacaataaagatagattagaaatcgggtaacaattgtttataatgagggttaggaagaaaaagttttaagattagaataaaaatatttgattacaattagactcattgtatcgttatattttattttgtaaatattgagaactatggcttcttaataacttttttctctttgtaattaaaatctcgcatgtattaaaaaatacataattattatacttctaaattctaaataaagtattcttacattcattttgatttgtctaaatatacatggttgatttatcacttgatattgcccaattagttataatctttttattattattttaagttttcaaatcaactctatatatttatctaatatatttatatacttatttaataaaaaaaattactttttttttttt

SEQ ID NO: 280144 - DNA, 1003 bp, Cannabis indica
cattagcattcatggatacagactacagtagacgaaagtaaccaagtagtttcccatgatcagttatcgtcaaattctgcagcaattaatttatttaggtttgaaattcacacagctaggagctaaaataagctattaggcatttcgtcaaacactttgtgctctttctgaacctatcaataagagtgaacaccaaaactagtcgttggttttgttcctagtatttgcaggaagataattcttaacataaaaggttatcaacgcgattttctgatcacaataacaaaaaatgtttatttaaaaaataaaattaatgatatattatgtatgtgtccataaagatatataatatatagagattagagagaaatgatacctccaacaaagagcttagaagtaattcctctgcaacagattagaagagcaggaggaagaagggaagagtgggataaaccaagtcttgagccaactactttgttaagagccgcctatttttctattatacatatacatatatatgtataagtggcagagagagtgagagagtagagtggaagagaggtttaaaagctaaccctcgactgagaaagaatgatgccaaattagacaaaatagtactcttaattgaaacttgtttctttttcaaaatatatatgtgtataatagaaaattattattattctttttttttttttttctatttttgagtaagtttcaaatttgtttcatatcaaaatatttttcacagtcaaattgtctcatttaacttgtacttgactttcaggctcaaatttttaacaatcatgatgataatttatatagagaaatttgattttatatacttaaaaaattttaaaaaaaataattattaaaccaaaaatttaaaccctaaaaaaataatacctttttttctaaactaccaaaaataaccccctccacaattctctctctctctctctgcatcatctctctctctctctctatctcacatcccaaccgccca

SEQ ID NO: 280145 - DNA, 737 bp, Cannabis indica
ttcaagagtttgacttagagataaaagataagaagggcactgaaaatctggtagcagatcacctgtcaagactagagctggaagagagtcagaatacgaaagaggtacagataaatgagcaatttcctgatgaacaactctttagtgtgagggaaaacctgatggtaccatggtatgctgattatgtcaatttcttggctgcaaaaataacccctcctgagctttcacgtcaacaattgaagaagttcttttctgaggtgaaacattattattgggaagagccaatcctctacaagcactgcgctgatcagataattagaagatgtgtgcctgaagaggagatgtattctatcctaaatcattgtcatgctttaccatgtggaggacatttcagtgggaccagaactgctgctaaggtgttgcagagtggattcttttggccaacgctatttaaggatgctactacctttgtgaaggcatgtgatcgttgtcaacggacaggtaatatctcaagaagaaacgagatgcctttaacaggaatcttagaagtggaattgtttgatgtgtgggggatagacttcatgggtccttttccttcatcttttagcaatcaatacatcctattggctgtcgactatgtgtctaaatgggttgaagctgcagctacaccacagaatgatggtaaaacagttctccgctttctgcaaaagaacatctttactcggtttggtactcct

SEQ ID NO: 280146 - DNA, 516 bp, Cannabis indica
tgtaccaggacaagcatccaaaaataagacgaatccacttatcagcgaatcccaatcgagcaagcatagcacacaagaaatgccaatccactctatcataagctttacttaaatccaatttcaacgccataaaaccatccttgcccacctgcttccgcttaagataatgtagaatttcgaacgagaccataatattatctgtaattaacctgccaggaataaaagcactttgatgtttggagataacctcagacaataatcccttcattctgttagcaagaaccttagtaataactttgacaatgacattgcagagagaaatagggcgcagctcactcatttgctcagggttcttctttttcgggattagcacaatattcgtattattcatccctaccggcatttgctcggttgcaaagaaatgtttaactgtacggatcacatcactgccaacaatggaccaatatttctgaaaaaaaaaattggattcatcccatcaggaccaggggacttatc

SEQ ID NO: 280147 - DNA, 727 bp, Cannabis indica
ttaaacaaaatcttaataattgcttaagaaattacaattattcataaacattgaatttggaattctaagtgtttatgtggtatcatctctttgcagagatgaatataccatagattttgtatcaataataaaacacaaacacatacaaacattatagacatataaatataattgatattggcatacacaagataaagaaaaactgaagctcaattcataaatgcaattcataactaaaagaggaaactttattaatattctcaaaaaaataaattgtctccataaatatgaaatagggaataaaatcccaaaccaataattgaaatcaaattgttcataaattaaaacaattaattcaaaaattaaaagaagattccgagcttcatcttcaatcttggacaatccccacccttctgtccaaccatccgactcaacttgctaggttagcaatccaagtttaagtagctagagctgaaataagaagaaaacaaacatggttagtagatccagaattaataacccaaggggacaataattctctaaaacacatgagtttatagcaaagatagaaataccttgtttctttgctagaaacttagggcattggggtttccagtggcccttttcattgcaatagaagcattttccttttggctttgccttgggattagcaacctttttctttttaactatttttacagctttaacaggcttcttgctattcttc

SEQ ID NO: 280148 - DNA, 658 bp, Cannabis indica
tttttgaagatccacttggtttcaatgatgattacaaatggtggtcttggaatcattttccagactttgtttcgaacaaactgatgtagctcatcctgcatagtaagaaaccaatcttcatccattagtgcttcttttacagattttggttctaacgaagaaataaaacataaaaattgaattgtattagcatattttcttcttgtaaccatgctctcatccaagtttccaaggatgagatctgaaggatgattctttttaaccctggaggatggttccctctgaattggatcagtgattgaatttgaagaatgctcgaattcttttgttgttgaagtttctgtagcaacagagtcctgcactgcagcctcgacagcagcttctgtagcttcgtcaggttccttttcctcggcagcaggcttttccagcaagtcttcaatctcttcttctcttgaaaacttagacaaatcttttagatcatcaacaacaacattagcagattccataacagtttgggttctcatgttatacacacgatatgccctactattggtggaatatcctaagaaaacaccttcatcacttttagcatcacgatctcttaaaatataacaaacacatccaaaaacatgaaagtgacttacatttggtttcttac

SEQ ID NO: 280149 - DNA, 465 bp, Cannabis indica
aatatacaaataaccgggatccgagacccctgaaccgatccaacataaacaaatggatcttcaccttccggctgaaaagtcaccattttacgcctacaatctatactggccgaatacttggatagaaaatccattcccagtataatatcaaactcagttaatttcaattctataaggtcagtactcaattccctatcttcgatcctaatcggcatagacctaatgcgcctattagagataaccaattccccgctaggcattagggttccaaaccctctttctaaaatatcacaaggcctacccaaaagatcaatcactcttgtagccacatatgaacgtgtagctcccgagtcaaataatactgtaaataacaagttgttgacgggaagctgacctgtcacaacagaaggactggctgcagcatcagcttgggtaatggcaaacacacgagcaggaaccggtttc

SEQ ID NO: 280150 - DNA, 626 bp, Cannabis indica
actttctagtttcggttagacagaacaatgatatccttgatgtttttgaggtacaacccatgttgtgtgattgtatacaggatatattgacctactatatgtttttaagccatgtttggttgtgtaatactgtgaacagtaatgtaaatatttaagttcatctttttcatcacagcaagagcatgagcacatgggatttcatcttgttgaaatctattgtaactgcatgctttttcttatagattgactatccatgaccttgttggttgtaccactttaaacatgttgtcgtttattggtttcacttgcagatttggtaatgataatcaatgtattttatattcacaaaactgaaaacaaaacttcaatgaaacgattttgcaacatgaagtttaatgaattcttacattttctgtcaatgagtccataaagttgttaattaacttcttctcagcaagtatgtgtcaaaattttgtagttttctgtgcatttttcctattgtgtatgtctattgttgtatcaaagctctcaatgactctattagtgtagtgattggtagttctctacctgctaagtttattaagtttagagattcaataatgttagaagtcatagttgtatacttt

SEQ ID NO: 280151 - DNA, 348 bp, Cannabis indica
actcactctatcactcaagggaacgaaaaattgaagaagaaaagagaagatgtggtttcggttttgctataggaaagaggcttaaaattttactgaaggaatgtgatgtatcatcaaatcttttctcttaagccatcactatctatttataggtaaccacctaggtttaggttagaattaattaacattaaaataatagaaaaataaatggtaaattctacaagtgtggccgaccttaggatgttattatgccccactttgcaattttgccattttgtcaattttccatcccattttctcaaaaacgctaattttccaatttaaccacttaaatgccaattccaatta

SEQ ID NO: 280152 - DNA, 852 bp, Cannabis indica
gcaaacaccaatatttatatttagggataactttatttcaattttatctaataaattattttattttatgtcactttttacttatttgaaattaatttttaaatattatttttcaattaattgttatatatagagtaataaataatactaattacttattatatatctcattaattcacaatttcatctgttatctattttattttttattaattactcattatcaatatgtatatatattcatttttgtggatattattatttacttggacaatgccatttttattttatttattatggataataatggaggtaagatgaaagtgagtaagatattataagtagtttttttgtattatttatatttggaaaaaaaaaaaaaaaatattactatttataaactaaataagattacacataggcatcaccgagaagcaaaaaagaattttttggtaggttcaattttataaattacccatttttttttaatttacttgaaattatgatttacaaaataatcatgttttacttattatgtatgatttgatagttttacttacgaaaacacgtgtatattgactatcactaattttaaaaaaatatttataaaaatacgtaatttttaaaaaaataaccaatacaaataatatttttttaataaagcacaatgtcataatttatattttatgaatttttttgaaaattgatttatattatgaatttagtcaaaatatattcaaaaaactacaaaaagatatatgaagtttatctttgtattttgtagcaccaaccgcaattttttcagaaacaaatactgaactgtcatcctatatttatctttgttagagaagg

SEQ ID NO: 280153 - DNA, 533 bp, Cannabis indica
ctaggtccaatttcagttatgattccaagtccaactcctagttccagtcccggtcaaattccagtttttgttccaattttgggtcacagatacgggttcgggtccacttctgggtttgggactggttcaggtccgggtgagggttcgtgtccttgtcaaggcggggtcctaaatccaatcactgacaacgagttttgtccaagccctgggcccagatcctgatcccaatctcaggtcccagtctggttccatttctagtgccgggtcatgagctgggtcctatgttcaagttcgtgtctgggtcgtgtactaggtcccggtcctaattctatttcccatgtccctatcctgatactgggtgcatgtacaagttattaggtgggtttgggtcccggtctaggttcgggttcgagtcctagtcttggttcgggtttaggtctctgtctgggtttgtatctgggttcgggtttgggtttaggtcttggtccttgtcctagtcctagtgcggttctagttccatttgcgattctgag

SEQ ID NO: 280154 - DNA, 569 bp, Cannabis indica
tttgctagctgttgggagattttcttcatagtgctcaactgactctgaccttttctactcaaggcatcagcaactacattggccttaccaggatgataaatgatctcacagtcataatccttcacaaattctagccaacgtctctgtctcatattcaagtccttctgggtaaagaagtatttcagactcttgtgatcagtgtatatcacacatttctcgccatataggtagtgctgccaaatctttagcgtaaataccactgctgcgagttctagatcgtgagtagggtacctctgctcgtactcctttaactggcgagaagcataagctagtacctttccagccttcataagcacacagccgagaccctgtctcgaggcatcacaataaaccacaaacttttccttatctgaaggaagagttagtattggagcggtaatcaagcgttgctttaactccacgaaacttttctcacaccgatcagtccaaaaaaacttctggttcttccgagtcagctccgttaagggtacaacaatctttgaaaaaccctcaacgaaccgacggtaata

SEQ ID NO: 280155 - DNA, 838 bp, Cannabis indica
gggatgggatgctgagggatccaaagttgagcactctcggcaagatctagaaagattaagattgtgttagaattagaatgcatttcctttccaaatatttactgcacaacatactatacctctcccaggcgagcgttgattttcaaaggcaccaaatcatcagctcgcgtctcacctagattaacaattgcagtggcagcacccgcttcgtgagcagctctgtggaagtgaaaatttaaactcaaaacacccaacaaaacctccaattacatggtatgtaattctcaagaaatacatatgccaaaactaacaattactctaaattacactcatcttcaattatatgtaggttagtttcctaccacaccacaagaagtgtttagaaattagtgtgtaattattagataagtgaccctaataattacattctattttaaaataaaagacgtgtttgaatgcaagcagtaattttattttcatatttctcaaaatagatagcaaatcatggataaataacattatataacaattaataatttaacaatagtaatattcgtagttacacagtataactactctttttcataggagcataaaaatcaatccatctatagattaactattaaaaaaatcattatatacacattaaaaatctatctatactaattacgctaaattatactaccttacatggtagcttttaggggtgttcataaaatagccgatccaatccaatctgcacgatccaatccgcaaagtgcggatatccgcacttgtgcggattggattggattggaaaattcaaaatccgaacttgtgcggattggatgttgattga

SEQ ID NO: 280156 - DNA, 478 bp, Cannabis indica
taaaataatttccaacaaaaagtcgactggcaacgacgaaggaaaaggagtatgaaatctatggtgtttgagggtttcttttctctccggaaaacttgaaaaaatttggtgaaacgctgaaagtaaccaaaagaagcgagaaggttggcttttataggccaaagcatatgtgaaacagctgtgatcagctaccatcgaatggctgggaaagcaatcgattcgcattctatagatccaacggttggattgaatcgtcatcaaggcggtagaaacgcttgagtgcccgtctgacacccattaatgcgccgtatcaataaatggacaagaaacgaatcgaagcctgcgaaagtgaataactgcagtaatgatggtcattaaatacaccatcacgcgctcaaagcacgtgccaggaaaccgaggaggcaaccggaggcatctgaacaagccttgttcatttcataattaaacaaggcttggg

SEQ ID NO: 280157 - DNA, 662 bp, Cannabis indica
ctcgagccaaatgttcgagtaccaaggcgctacggcgctgaagtaacccatgccatactcccaggaaaagctcgaacgaccttcaacaaaagggtacctgtacccgaaaccgacacaggtaggtaggtagagaataccgtaggggcgcgagacaactctctctaaggaactcggacaaaatacgccccgtaacttcgggagaaggggtgcctcctcacaaagggggtcgcagtgaccaggcccgggcgactgtttaccaaaaacacaggtctccgcaaagtcgtaagaccatgtatgggggctgacgcctgcccagtgccggaaggtcaaggaagttggtgacctgatgacaggggagccggcgaccgaagccccggtgaacggcggccgtaactataacggtcctaaggtagcgaaattccttgtcgggtaagttccgacccgcacgaaaggcgtaacgatctgggcactgtctcggagagaggctcggtgaaatagacatgtctgtgaagatgcggactacctgcacctggacagaaagaccctatgaagcttcactgttccctgggattggctttgggcttttcctgcgcagcttaggtggaaggcgaagaaggcctccttccggggggcccgagccatcagtgagataccactctgga

SEQ ID NO: 280158 - DNA, 730 bp, Cannabis indica
gtttcgcaggctgttcagactagatggatgccaagcggaacaccaggagtcagggcaactcggtcgggtcaaatcagtgtcaaggagctcagtttcccccaaatgttaggggccgtggtagaggtcccaggcgcagggctcgtggtcggggtgatgttaacacgccacaggctgcccaggctgcccaagccaatcaggaagccaagaattgggaaactaggtttgctgaaatgcaagccagaatagaggagcaagataatgagattcagagattgagacagtaagatgctcctgcagtgcctgtgccagaagttccagtggcacctgcccctgttgtccaagctgagttagtagtagcggggaatagaatggaacccctgtatgaaaggttccggaagcaagcacctccagtttttttgggaggtccggacgtcatgaaagccgagcagtgactaatggtgattacaaagatattgaactttatgggtgtcaccgggaatgacagggtggtgtgtgccacctttcagtttcaagaggacgctttagtctggtgggacatggtgtcccagattcatgatgttaccactatgacctgggaaaggttcaaggagctcttcaacgcgaagtactataatgaggccgttagaagtgccaagaggaaagagttcacccacctgacctagaaggagaatatgagtgtgacagagtacacaactcagtttgatcggtt

SEQ ID NO: 280159 - DNA, 742 bp, Cannabis indica
ggagtgggggtcccctaaccgctggaaagaggcccctccggacacgtgtcacatgggaaaccctagagagattccctgaacaagtgtcgggtgcagtgaaatcgcagaaagtggttttgcaaaaagaagaaagaaaaaaaagaaaaaccattctatgccctaagcaactgttgaacgaagaacacatggctctcttcaacaaagctgtacattataacagaggcatgataatggcgattctacaactaaagcagtaaacataaagcagaacactcaaagaacttaaaacactcacacactcagaactcaaagtacgaacccagaaaacgaacgaagtaaatgaaagcatgttattatctaaggatgcaagaaacttacagtagatcgttgaactgggggtactggatgtggttgagtaaaagttgagaagaactggcgaaggcaaacactggaaaactgaaagaaacgtctaagtgctaagtcagttcgtgctactttgaagaattttctctctgagaaattcgagcaaaaatggcaagaaatggaaagtaaccgaaatgaaggaaaggtggtggcttttataggcaaaaacgcatgaggaacaggcgtcatcacctaccaatcgcacggtgggggagatgcacgattcgaattcccgaaaatcaacggatcagatcaatctgccataaaggcggtggaaacgtttgagtatccgtctgacaccattaatgcgccgcatcaa

SEQ ID NO: 280160 - DNA, 642 bp, Cannabis indica
gaaaagagaacataccttatggattgggcagcacttgaaccttctcccaggattcttcatcgtcctagaggtgcgaatcgcaacttccaatggtggtttacaatcgcaaaaccaccgtcccattgcatcactgtcaccttcgagcttacaacaatggtggaaaagttttgcctcagactatttaggtttgagttatataaaatatttatttatttttgtttttttgtttttgctaagtattttattttgattttaagagggtttaattaatcttagggtattattattagggtttttaatgtatgttgtggcatggttaagtttaagtggtgtgagtgatgtggcatacattttaatgacatggcacgacacctggcacattacaatgcaaaaaacggaaaggtacctacggaagttcctgagtagtgacggaaggtatttatatcgccaaaaatatgacttagatatttatctgctactcggcataaaacttaggtatttttgccgcaaattactctatttctttatttattagttagttagttggctctttattttgtgagtttttcatgtaaatcccaaaggttgtttgtcatttgaattctattggtttgatatgtctatcttgtgatcaatatttgt

SEQ ID NO: 280161 - DNA, 594 bp, Cannabis indica
ttgctcaattttccaacaaatgctaccaaactttccagagtacctaaccaatgcatatacaacatattccagccagtatttcacagaaaaactaagtgtaaacaaatatgccattagagatcaaagctttgaactcaaagctcaaacttgcacaacacctaatccaaccattaataccagctgctaggacctaaaaccaactcaaattaagcttagaattcgaaccctaagcattcccaaccctaacagcccctaaattacaaaaataacatatatcacatataggacaaataacacctctagagtttaataaaatctccggaattgagaaattataactctaatactcatttctaatattggggtccacaaataaataaattcataaataattataaaattaacagaaattagtgctaattgcctttactaatccaaattactaaaacggtcattacacctcaactttagccttgcccttacctacacataaagatagcactgtgagtcgacagactcagtaagaaaagtataacataaacatacaaataacccgggttataacctggtgcccatacaccctatcataaccct

SEQ ID NO: 280162 - DNA, 987 bp, Cannabis indica
ttgaactcctcaaaccgagctttgatttttgcaaaaattactggtgcctctatatgtcacgccgaccagtaaaatgctcgggtgctggaattatgagtctgggagtcaatctagaaaaaacaaaaaacaaataaataaagctgaccaaaaaaattttaaaaacaatgtcgacattatatcgacatcccgtcgacattatgtcgacattatcaaaagcaaacacaattcaattatgtcgacaaaatatcgacatcctgtcgacattcagtcgacaattttaatcgggcaacaatttcacagcatgtcgacaaaatatcgacatcctatcgacattcagtcgacaatacaaacttatacgcaatttcctaaaactgtcgacaacacatcgacatactgtcgacaagttgtcgacaattaagggcaaaaaataaactcaacccttagtcgacatcctatcgacatacacacgaaatcctatcgacatacgaaaacatcaatacaatacaaacagacaccaattctatcgacatcctatcgacatacaaacgatatcctatcgacatacaacaacagcaatacagcacaaacaccaaaaccatcgacatcctatcgatattctatcgacatatcatcgataacccctgtaacaatcacatataccattgaaacaccaacatctacaacctaaagagcacaaaatctacataaattccactaatctcaataacatgcaataattggcatccaaatctatgaaaaatatatttttttttaaaaaaaacacttacctttgaatgcaattcgtggtggtggcgacgggtcctgctcgtggtggtggcgatggcctctgttcggtgtcgacgatcacgggtggtggtggtggcgacgttttgtggtggttcgtggtggtttcgacgggcacgggtcgatttggctactgaccgagagagagagagaaagagaaaatgagggttgggtcggggtcgt

SEQ ID NO: 280163 - DNA, 513 bp, Cannabis indica
taattattgggtttatttgttaacgtaagatcaaactaatcgttaaatttaacagaatattcttttacttttaagtatatctgttaaacttagatagacacttttaatgtgtaatataaagatatatacatgtatataccatatattggccagttcgttactttttaaagtatacatattggccagttcaaaatattgttttaggaagttgtgttgttgttttattctccactttttattgacaaacatttacaaggaaaaaacgaagcaatttcgttatgagcccatccacccaatctccaagttttgtggttggacttttttgtatccattcaattgggcttttattgtcatcatcacttgttgttgtcttttatcaatgaggcagtccgagcttttttttttttttttttatttttttagaataattatataaggtactattttgttttagtaaaatatttactatttttacgtacaaagtaattatttttttttttaactatttttttt

SEQ ID NO: 280164 - DNA, 701 bp, Cannabis indica
aaatctttttctcattctcatcatggctatataaattaacttctacaatttaataaaccaaaaaaacgagaaggaaaaaagatatttttcttttaatatcaaaagaaatattggaaccaatgaaatcgtaactcctgacgttagctcagttctttattttttgttttcttttctcctgtaattaattaattcttctacttttttatttgggaaaaaaaaaaacagagaggagagaattggaaatctgcctgtgccaaattctacttgaaaaaaataaataaaaaataaaagaaaaaagataaggacaccttgtgagagacaatatttatacgagaaatttatgatataaattaacttccaattctaaataaataatttaaatattattatcacaaaaattaatttaagtatttatttataattaaaaagttaattaaaatttttgtctttaaatttttatatgtaataaatcatgcacttaaactttgtggttaaattacttcctgaactattaaaattattgtatttaaagttttttttttctaattttagtaaaaaagtctaacatggatgaaagtacataagcagatttagtacatgtgaaaatttgagggccatgatttagtagatatcaaaatttggagagcatgattgaatatataaacaatcactaaaaatagtaaaattaaacgaaatttaga

SEQ ID NO: 280165 - DNA, 650 bp, Cannabis indica
tatctcaatcacagtgtgtaagattgtgaaaaatcaaccaacatgaaggagattcagcatcaaaggaaggagagaaagagatccaggttcagatcttggtgatgttctgctacagaaaggaatcaagggctagagatctgaacggaatgagtcattatattccgctgcactcaatgtaaggtttcctaaactttatatgtgtttatttcattattttagaattcatattaggatgttaatgaaacatacatggtagtaaatctagatccgggtaaaatatttccaacaattacgataaatctatttctccataattgatagatctttgaattatcttttcaactcactaaaattaccttaaatctgagctctagaactctagatatgatcgttttagtaaaacagtttttaatcttgcgaatttatccacacctacgaatttttaacattaacctacgaatttttaacattaatgttataataatgttatttgatatcacttataccattaattaaaattcactaaataatttataaatccctaataaactttcatattgggctttaattaaacgattacctaccttgtaaaaataccataatattttaatttcgtagttaatacaactttaactctctctagaaaattg

SEQ ID NO: 280166 - DNA, 531 bp, Cannabis indica
gggctttaatagctctagccgcaaagaagaaattgaagatttttcaacttgatgtgaagtcggcattcctaaatggttatcttgaagaagaaatttatgtggaacaacctcaaggtttcgtggcgcaaggacaagaagataaagttcttagattgaaaaaggctttatatggcctaaaacaagctccgcgagcctggtatagcagaattgacagctactttactgagcaaggattcaggaggagcaagagtgaaccaactctttacatcaaaactcaaggtgcgaatgatatactaattgtctctttatacgttgatgatcttatctacataggaaataatgagaagatgataaagaagtttaaagaagatatgatgaaaaattttgagatgaccggcctaggattaatgctctactttctcaggattgaaataactgaaaaagatgatgggatcttcatctcatcaagaagtatacagagacactatggaagaaattcaaaatggagggatgcaagattgtatcaactcc

SEQ ID NO: 280167 - DNA, 514 bp, Cannabis indica
tggaccattcagatattgtatggtattgatagatgacactacaactagagtggtcacatgtttgctttattatctactcgtaatgtaacatttgcaagattgcttgctacaaataatcagattacgagcacgattcccagactatgacaatcaagacaatctgccttgataatgctggtgtaatttacatcacaagtattataatgattattgtatgtcaatagggataaatgtagaacatcctgttgctcatgtacatacacaaaatggtctagcggaatcatttattaagcgtttccagttaatcgcaagaccattacttatgagaacaaacaccaattatagctcggggacatgctattttacatgatgcggcacttgtacgcattagaccaacatcatatcacaaattctccctattacaattgacttttggtctggagccaaatatttcccatctaagaatctttggttgtaccagtatatgttctgattgctccaccacaacgaacaa

SEQ ID NO: 280168 - DNA, 880 bp, Cannabis indica
aaggtcctgaagactggtcgaatatgtacatttgctgcgaggacaggtcgactcatggtatagtaagtgtttatgttatttgctattgccttacctgtttagacaagtatagtgtatgatgagaagaagtagtgtgtgaatagcatatgcatattgatgttgatattgtttgaattctaaatcgttgaaggttttgggttacaggatattggatcatgcaacggcgatctggccgtttaaaccgcgagctggagctcgggttaggtggtggggaagagcatcctccaccccctcaaaactgggaacaactatttgctgccatgcaagagacgattaggcagcaaggggagcagattcgagacctgagagagcaacaggctcgtcctgcacctatactggcacctcaggtagtgccaccgaatgtgggggatcgtatggaaccaatttatgagcggttcaggaaacaaaacccacctgtgtttgagggtggcccagacccactgaaagcagaaagtggatgactatgattgcttctatctttgatttcatgcgggtagaaaataatgatcgggtacgatgtgctatttatatgttacgagatgatgcccggatatggtgggagattgtttcccaaggtcataatctgaatactatgacttgggatgcattcagggcactgttttatgagaaatattataatgaatccattcgtgccgctcaagctgaagagttcgcacgattagttcaaggtagcatgactgtgactgaatatgctaccaagtttgacaggctagccaagtttgcttctgatgaagtggccagtgatgctgcaagaaaagctaagtttatcagaggtcttgaagagtatattgctagagat

SEQ ID NO: 280169 - DNA, 751 bp, Cannabis indica
taagcgggctttacaaataatccatggatggataaagggagaataattgtagcttggcatccttctgtatttacggtcaacattaaattctgctctagtcaaatgatccactgtcaggtgcaatcacagcaacaaattgggaattttttggttaccttcctatatggtttcaatgatgagcataaaagggaagatttatggggtgatttggagaagctagctgctggtattcaggagccctggattgtgctaggagacttcaatgagatcttgtttgctaatgagagagttggtaggaaagcccagagtaatccttccacacgacttcgggactgtatggagacatgtgatatgatggacttaaaatattctggatcttttctttacctggaataataaacaaaagcccgaagatagagttttttcgaagatagatagagccatgattaattcaaaatggagttgtgctttgcctgattcggaagctgtgttccttcctgaattatcgtttgatcacagccctatacttgtgtctatttatcgagagtggaactcggggaagaagccttttcgatattacaatatgtggaaacttgctccagattttaatgcaaaagttagccaaagttggcaaggagacattactggtacaaggatgttcaaaatggtatctaagctcaaacggctgaaaccagtgctcaaattgataaatcaagagggtttctctgatattcaaaaagctgatacgatt

SEQ ID NO: 280170 - DNA, 641 bp, Cannabis indica
aaaagaactttgttgggaagaagccacaaagagggagtgactcaaaagaaagaaaaagcaaagatgatccaccaatttgctttgagtgcaagaagcccggacatatgaagatggattgtccaatgagaaagaagaacaaatacaaaggaagggcaatgttggcggattggctcaatagtgacgaagaggactccgaagaagaaggaaagaatgaagtggcaaacatgtgcatgatggcacttgatgatggggtaagcatttctaaccaaaatgattgtgatagcgaaaatgatgatgataacttagatatgtcatatgatgagttgtctaattcatttaaggaactatttgatgattttggtaaattgcttgttaaaaaccaaacccttagagagaagaccaacatgcttttaaaagaaattgagattttgaaaataaatgaaaaagaacttatagctaaatctcaatgtgctacatgtgcttcacataagaaagaaattgttgaattaaaagcccatgtgagaagcctaaaaaatgacatatatactttcactagaggtaaagaaggctatgatctcatggtaggaagccaatcatgtggtttttcaaaaagtggtattggttatgatcctagtagaaaa

SEQ ID NO: 280171 - DNA, 1039 bp, Cannabis indica
tgtatgtggctatcttttcagacttaattgaatcctgtattgagatctttatggatgatttctcggtctttggctcctccttcgatcattgcttagaaaatttagaaaaggtgctaattagatgcgagaagtctaacttggtgctaaactgggagaagtgccactttatggtaacagaaggaattgttctgggacacaaaatttcaaaagcaggaattgaggtggacaaggctaaagtttcaacaatagagaatttgccacctccagtttctgtgaaaggagtaaggagtttcttaggacatgctggtttctaccgacgatttattaaggacttctcaaagatctccaaaccattgtccagtttacttgttaatggcgttccatttgagtttggagaagattgcttaaaggcattccaggttctaaaggaaaaattgatttcagcaccaatagtcacttcaccaaattgggagttgcctttcgagttgatgtgcgatgcaagtgattatgcaatcggagcggtcttgggtcaaagagttgacagggtgtttcacacaatctactatgctagcagaaccctgaatgatgctcaattaaattatgccactacagagaaagagatgctggcaattgtgtttgcttgtgataagttccgaccctacctaattgggaataaggttattgtctatacagatcactcagcgatcaaataccttatgaccaagaaggatgcaaagccaagattgattcggtgggtacttctacttcaagagtttgacttagagataaaagacaaaaagggcactgaaaatctggtagcagatcacctgtcaagactagagctggaagagagtcagaatacgaaagaggtacagataaatgagcaatttcctgatgaacaactctttagtgtgagggaaaacctgatggtaccgtggtatgctgattatgtcaacttcttggctgcaaaaataactcctcctgagctttcacgtcaacaattgaagaagttcttttctgaggtgaaacattattattg

SEQ ID NO: 280172 - DNA, 911 bp, Cannabis indica
tatgataatcttatttagtttgagaaaatacaaaaaaagaatgactatggaacttaaatagtgtgtaattagtacaaaaaaaacttaaaaagttatgtataattaaaaaaaaagttaaaattataatgaaagtgattaaggatatgtacatattaagagtgtctctaatagagagctaaaaatgtcatgtatatagattttgggtaaaagtttacaatttactgttacacggaattttttacaaaaatactgtctttttataaaacgaccgtaaaacgacaaaacaaaataattaaaataacaatagaacaactaaaaaacaatcgtaaaactatagtgaaaatttaatacaatacacagtgtaaaacttacctacaattaaaaaaaaaaaactcaaaatttcagtactcctgtgattatgaaagtgaaaataataaaaactttgcttaattggagggcgcctacaattacagagaattactaataattctaattttaaacataatttgtttgatattatttttcagtattttatattagggtgctagtacgttgttactagccaaaggataatacctttggctagttattcttagaaattttgttatttttttacttttttagtattgctgagagctagagttatgaagtgtgtgttaatttctaaatttgtatattatttttttgaagattgtcattctaatataagtgtattctttgcttttggtgttgcaattttttttcagtttcgctttgctctgaagacaactagttaataacgggaaggtatttcttcaatgtgatgtggtgctatttgaagacgttatagctttattgtctaaatttctgggggcagttttgtcccatgtggctcgggatgagaattctgcagcgcatggtttggcaaagca

SEQ ID NO: 280173 - DNA, 797 bp, Cannabis indica
aaagggtacattgaatttgtcaaagatttctatgctaacttatctgatgattttcttgatgagaattctagactttttcgaaaagtgtatgttagaggacattggttttccttctctgaaaaagacatttctcaagccttgcaactgccagagaatgtcccaaatgccataatgtctatggatcgccaattgatgctcactgaactcactggtgcacgggctgaactgaaatcgggggagagtcttcgcattacacatctaacatttgctcatgcatctctcatgcgatttgctcttagcaattgggttccaaactcaaacaagactgtggtgtctcaagatgtggcctcattcctctaccgtatcacctcaggagcatctattgacttggcctcccacattttgaaccaaattgtctcatttcgaagaggtaaaaagccaacttttaagcttgtgtttccaaatttaatctttaaggttttgtcctctcagaaaaatgtggcccaatctcatgaaactcttgagccttcattgactggaacaacattccaaccctcagagtattttgatggagtttttcaaaagaggcctaaagctggtgctgctgctgctgcaagctcgagttctgcttctgcagaaatccaggaggtcaagaatgaggttcagctggtgaacaatcgtcttgctgccatggaggaagttcaacaagagatgtcaaagcagctgtccaccttggtcaagctttacagagactaagtttttttttccttgcttttgttggacatattactatattt

SEQ ID NO: 280174 - DNA, 356 bp, Cannabis indica
ctcgaacccagaccaggatcaaagccaaggacttagaccaagaactgaatccagactaagattgggattggaacttggtactcggacccaacctagaccaagacccaggacgcaaacccacacccgaagcctgatttgtacctagactcaaatccggacctgaacccaaactcacaccaggactcgaactccgacccgaacttaaacccaaactcgaactcaggatcgcaaatagaactagaatcgaactaggaataggaccatgaccaagacctaaaccaaaagctgaacccaaatcaaaacccaaacagagacctaaacccgaaccaagactaggacacgatcccgaacaaaga

SEQ ID NO: 280175 - DNA, 907 bp, Cannabis indica
cacctaaattcagaatcaaggaagattagtataatgtcatgcctatgttattacatgtttggcatacatgttagtattgcctgttagaatacattgatagcagtaatactatacttagaattgtactgattactaatatatgtatgttggctgaaatactgatcgatgatgtcacatcaataagactagagtatgactagcatattgagtataggttgacattatggtcgatagtattgtcttatgaacgttttagactcagtaccgtgtgggacacggggatagggttatgatcgggtgtatgggcgcctagatataactcggggtatatctatattttatgttatgcttttcttactgagtctgtccactcaaagtgctatttccatgtgtaggtaagggcaaggctaaagctgaggagtcgtgagagcgagcaggtgaagattgtacatgtcatggcggttagacctagagcatatgatctttgggacatcagggctttttgctgtatagtcgctaggtgacaaaacttttgtatatgaatagcaaacttttgtaatgtattttgtaaacgggatcccgagattttataaatgtattactttatgtttctagttaaataagcaaattttaattcatcacatttttcgctaatctcgttgattagcaacgaaatgcacaataaaataaaaaattacgttaacatgcctaaattagttagggtgtaacaaatgatgtaaaccatgcaacataaaagcgatttctgatcttttattaataattagtaaaatctgattatattgaaatgagtttttatttatttagggtcacaaaaacccaacaaaccccgaaccaagatcacgttatctggagaagatttgtagcaggtggtgttgtgtgacttcat

SEQ ID NO: 280176 - DNA, 553 bp, Cannabis indica
atagtcttttaattaaataactttttttaaaagttgggttggagcagctttagctttttagtattcttcaaaaagctgttttcttataacttaccaaacacatttttatggggtttattgaaaaatacttcttttatttatcaatcaaccaaatctacctctacttttatatttaattgaaacatacatttttttatatgtattgtacctaaaataccctgacataagagagtcacatggagagtatattgagatgatagggggtaaaatcggtaaggtatttaaaaaaagagataaaaacgatagactttaaaaaagagggttaaaataaaagatgacaatataaaaaaggtatagagtgtaatttcctccatttttatcacaattttttttctcaaaaagtaacttttaatttttccaaaaactgtgaccattgagcccatagtctataatgtaagcaaaagcaagaccatcactagttttatgacccgccaaaaaaaaaatatgagtttagagtgacatgacacgacataaatacaaatataaaaaaaaa

SEQ ID NO: 280177 - DNA, 629 bp, Cannabis indica
ttgctctggccacctttgaactggtttggattcaatctctgttcattgagctcagcataccaattcttcagtgtccaatcttgtggtgtgataatttgggagctgattctttggcttccaatccaatatttcatgcaagaaccaagcatattgacatagatctttattttgttcgagataaagttctttccaaccaactggatgtaagatatctggactctatgaatcaaatagctgatatatttacttgtatcttcattccacttcctcaaagacaagttagcacgtggtctagaccagtacaacttgaggggatgatagagtaacagaaatagactgttacaaaaattagttattacagttgttatttgttagtttactaaagtaacaaacttataatagtacttgtttatttataaatacaagcttggccaatcagtttttgattgagcaaaatgagagagagagagagagatggagaagatcagtttgctaataattaatgtcattaagttaagtccatggccaattaaaaaggaatctttacaaaaaaatactggattttatacaaaagtttacaattttactgtcacacgattttttttagaaaaatactatctttttataaa

SEQ ID NO: 280178 - DNA, 50 bp, Cannabis indica
aatgacgtgtctatatcatggaacatatagagcgttctatatgactgaga

SEQ ID NO: 280179 - DNA, 234 bp, Cannabis indica
gagagagttcatttcctccttcatttctttcaaccaagccttgcagtttcggtctttgagtgcttcttcataagattgcttgcacatataggcataggcaatactctcatcccacacattgtaactgtacttctggttcggtttagggactcttttagctctatctcttgtaagctgatattctgtgaggtcttcctgattcccgtcttcttcatcttgaacttcatgttccac

SEQ ID NO: 280180 - DNA, 579 bp, Cannabis indica
acttttttccctatttataagcaaattagtgaagagttgtaatcattttgaaatttaaatgcctcgatttcctcccaaaagtaaacgttgggaaatcaagtaatcaagtacctgaggaagagcaaccatcaaagcatgcaaatcgttggagtattttgaggtacaaatcaatcaacatttatgagccgaatatcgaagagaccattggtcagaatcacatcagatcaccaacaggcgcattgaacacgtgccatccgttcaaacacgaattcaaactatgtgaactctacgcgcgacttcggaagtcccatggagacttgggggcaaatgttatcccattttttgcactatgacgtgggaatatgtgctagtgacacgtgtctgttattctttatgcttggctggaggactgtaccgaacagacttcgagtagtacatttgcacgcacaaagtcttcctgactgagcagggcgagggcagatgaatcgagcaaagagtgatctgagccgtgcatcaagacttcactactttaggtttgatatcgtgaagctcaagcacacaagcaatccctacaatcat

SEQ ID NO: 280181 - DNA, 579 bp, Cannabis indica
gacttagtctttcgaatcatataatcacaatcacattccactgtgttgacatcactgcaattgtaaatgactatatgttctggacttaacaaattttgtacatatattaaaccataaacatgaaaactacatgttaacacaaatcacttctaatctcttattgataacaaatcagattagattgtaatgggttttatttagggcataaaatctcaacaattttcactaatagtccaaataaaattacttgttactaaaaagtgatatttaaatacaaattgttattaatttaattttactcacaatatattattaataaattatgatttttgagactaataactttaattacggattttttaaaaataagagcatcaacaataggaggaatttttagtgttgcttaagtgaacccattattagctcttacccaaataattttttttgggattatttcacaaatacacaaaaacaataaaataaattacaaaaatatggtttctcggaattttaaatatttttacgattttttttattttatttatagaaaatacgatctttttatattgtactcttgtt

SEQ ID NO: 280182 - DNA, 133 bp, Cannabis indica
aataaaagaacacaaataacactcttgagatcgaacctaaccatgtcaggattgagatcttttgatctaagatcaatcattgatattgacttagaaaaatacaacggtaagattataatgtctttaccaagat

SEQ ID NO: 280183 - DNA, 1083 bp, Cannabis indica
atatatatgaacaggaaactctttaggtgatagtatcattttttgctttcacttataaaaatataaatacaaatatatataatgttagtaacttatattagtatttttaaaattgaatttttggttttttaatcaaaattagagaaatcttttaaaagtgtgttggtaaaatttcaaaaaaatagaagctaagtgaagggggtttttcctatcaaaaataaagaataaaaaattaaggtggcgtttggttggaggtaatgaaatggaatggaatggaaagaaaacaatttttatttcattcctttggttgcatgcattttaaagtattggaatattattccaataaaatggtgtcggtggaatgactattctattttaaaatggaaggaaagaccattctaatataagatttgaaaaaaaaattaataatttttttatgcattttaaattttattccatattcttattctaattcttatttctactttcattcctatatttttattcctcacaaccaaacgtcatctaagtatatactaattaaaacttaaaagagcttaaccgtaaatttttttaaaaaaaatataaatatacaattagattggatatatagaccttagtactaaatgcgttagggcaaacttacacctaccttagtactaaataatttgacaattaaatataagaattggttaaaatgtctactttttaaatacagtttagtgtaggagatgacttgtaaatgtgaaagttgacaatccctatcttgattgtgtagtatgtctctttttctactaactaattaatatgtattgtttctattcaaaagactttgacaaagtcatgtgtttttgtcctttctttgataggtaagaatatcatgttgaggtcctaaaatacatgattatttactaagttctcacattttagaaagtagagtaatataaataaattattttattagtcattttatccaattaattagttataatatttttttaaaaataaattcatataacttataatctataataatatatatcattatttatatgtttatataaaagttaaatatatatatat

SEQ ID NO: 280184 - DNA, 578 bp, Cannabis indica
tttagccaatgacaatgagtcttgtttagtaagcgaaaagtgatttatagcaatcaatatatagtaaagcaaatataaagacacaagaattttatagaggttcaaccccaagcagttcggtaatagcgtaatccttgttatttgtattgacttaagaacaaggagaaaggttcattttcttatagctcttacaacagtatctctgaatatgaattcttagataatatctttagggtaaagtctcgactaaactgtttgcgaccttttgccaagtgaacatgcatcactatttataggactgtgaacttggagaggaagtgtttcccttctcgttcccatggatataaacagaaaagatcgtgggataaatgcggaatacaaagatcgtgggataaatgcagaatacactgatcgtggggatcgtgggtatgccatatccctgtaatctgatcctcaagttatagggatttcgttgatgactcataatgcgaaagctgaattcgctaagtgttggttgccttgcgcggattgctgattgctttgctctgggcatgccagcgaggcatcctgttcggact

SEQ ID NO: 280185 - DNA, 922 bp, Cannabis indica
atattattgagctaaaaaatttcaaagtattcttacacaagtgtttttgccctagctgaagaaccctaaatatttgctcttgatagcataaatgatttttcaaccctttgcatgaaggtataatgttctatttgtaggttagaataaggtatagggcaacttttagagttgtcaaccatcatagtatcttttttaagaaattgtaacaaatcttacgtggatgagagagaaaataatattttaagatgatgtgtttattttgacaactataaatatttctccccttaaaaatggtaaactatttttaaaaaggtgactaaaaaatcttcacatcaatccaaaaaatataatatcttattttatctcttctatactattttttatactcctactattaaaaattctctactaacataacaccttattatatttatggtttcacgtgttattatttattttattataatattatactatttatttatctttaattttttttttaaaaaatagcatcaatgacattattaaattgtttaaatttaattttataaaactaaaaatataatattatactatttatttattttatttatattttttttttttctttacaaaaaaaaaaaaatataaactaaaaaatacatatacacaaatttgtagcacaatttattaagaaaaatgtcacttgtaaggttattatagtactttgctctcactccacagcaaagtttcgtacttttccatcacacttgttagaatttttttatggggagtgatatttgcactccttaaacttataaatacaccccattattaaaaaaaatataaacttaaataattttttaaaattaatcttaatatttttttaaaattttttcttcacattattttatgttaatttcaatacttattttgatttcat

SEQ ID NO: 280186 - DNA, 579 bp, Cannabis indica
gaaaaggacatccaaccctagagtccctactgctaccgagggggttcctcccaagaagcaaaggaaagtcatcgcccataaaaagaaatcactggtcgagcctatcgatctcgaggttttggacaaggagatccaagagcaagttcctcctccagttgttcccaatgccaatgcccctcatcttgagacgacccccactactgcctctctgtattaggccatcgagagcgtgtcggtcgcagctggagaagctggctctgaatttgcccaggcatatggggtcgcttgtcggtgcaaactttaaactctcctgcttccagattcgggttttctcaatcttaggagcccaaaggagatgcttacaaggaccttggactatcacttcatggtatgtcagctttgttactataattatattatctttttatacctcttttatactcatctgtttgccattctccaggcttcttttacttcttttgcttccaatcgactactctctgagcgactcgagtatttggagggcgaaactcacaaactagtatcccaatgcaaggttgtgtgcgagcaacgagacaa

SEQ ID NO: 280187 - DNA, 546 bp, Cannabis indica
ggccccagcagatccatctaccccactatcagttgcatcacccccattacaagaggaggaggtcttccctgacgggtacgatccttatgagggagctccagcgactcccatcgatacatgtattatccatgtacatgacaaggagtcccagggtaaaattttggcgatagaggcacaacctgcaggggttaagagtcggaagaggaagagaaatcctcttgtatggttccgtgactacacggagatgaagaagaaacagaggccttcttcgacgtttgatcccctggcgccaccagatgagcaattgttggatactttccgaaagtggtgttgtggactcattccgaaccaccgacttcgagatttgagaagtggtgattacggtccatcattcttttggaagctgctgataccacaggaatggcttacagatgacgtaagtaaagtattttataattttactttactttacaactaatgtgcaattaatatattttgttgtctaactgatttctctaacctttatatgcagcatatagatgcagc

SEQ ID NO: 280188 - DNA, 537 bp, Cannabis indica
ttgggggagagtttattagcggcattgggacagtgccggcggcgaacagtactccgactccaccgccgccgcttgcggtttctggttcgtttaaggaagggaagagttcgtcttcgcggaggagaggttcaatgatgaggccgagtcttgactcggatgagtttatgaacttgttgcacggttcggatccggttaaggttgagcttaatcggcttgagaatgaagttagaggtacgaatgcggttcgatctagtggtttttgtggagattcggagcttgttttgctttggtttttttttagtgtgtatttttttattttttattttttctggtttgttttttttttctttacagataaggatcgtgagttggaaaaagctcatgcggagatcaagggtctcaggttttctgaaagacttagggaaaaggcagttgaagaggttatctgttactattcagtcttctttttcaataatgcattattactaaataaagctttctgggtattgacatgtttagtatttttttttttttttt

SEQ ID NO: 280189 - DNA, 263 bp, Cannabis indica
tattagactctcccctacggtgactacttagagataaatttacaaagtataaaacaatagtggaagctcataaaataagaataatcttgactctcacctactggaacaatgttagattccctaccgggacattgttggattcttattttaatcgaaattatcctaattttttctcttagcttattcatttcaaattttcttacatactatatcattggatgaatgctttataaatctatttgcttatgatgtcactctaattt

SEQ ID NO: 280190 - DNA, 836 bp, Cannabis indica
aattataagtctcctccaatatttatctttttacttttttttttcctttttgtttacttcttctttttctgacattattatcttcttcatttattattattttttttattattctttttctctaaatttattatttctcttagttttttttatttttcctctaacatttagatatctctcttacattttagtatgtgttaaaagaaacttttttgttccttttttatattttgtaacaaaaagtaataaaatttaaaatttaataaactttaacatatcaagtaacatcataacttaacttaaagtcttttattattttgtatttaaaagttaaaatatagtatactaataataaatttatttaataaaaagaatttaatatgttaataaaaaaacttataaagttaccaaatagtatctaaaacataatagaattagttacaatatgaaaattattatatatattaattttaaagttgtctgatcaaaataagcaaccaaatgtgtatgagaaaaaaattatcttgaattaatttttttctaataaaaagtaactaattgatatattatttacatcaaaagcaaccaaaaggttgctttttttaaaatttgtcaaaacactaaaatttctggaagcgagatttttttatttttttctaattttcggtaattattttatatttcggtatttatgctgacgtggcaatcggtatttgtgcaaataattttcttaaaggtatttttataataaaatcaatttaggtataatattgaaaagaccctaaatataaaatgcatatattgataaaactaaataataaaattgcatcaaattt

SEQ ID NO: 280191 - DNA, 1460 bp, Cannabis indica
acccggtgtgcacccagcggttcgctgcttgtgcatccttgaactccatcttccaagtccaggatctcagccactccctcaccgtggtaagtatttcgtagtttacttttttcctcattattttctcttaaggatttttactcatacttgtatccttttccagcttgctgccgaggccggccgcctttccaagaacttaattaatcatggcttcgtcctgtccgactttgggggcatggacgaagttatgaagatccttcaggatttgactgctgaaaggcggctttaccaggaggatgccgagcgccgggaggcccttgccaaggccagtgaggaagaggccaggcggagggaggcacaagcggaggcgatgatccgggaggaggcccttcggagggataggctggaggccaggcaccaggaggagctgagggcggagggcgaagctgctgctaaggccaggcgtgagcttcgggaggctagggaagccttggatgaaatggctgccaaggtgaagtccttagaggaagttcaccaggcagacttggagtctagggccaacctggccgtggagctgaaggagctcaaggacttcaaagaccaagccttgaagaaggcaaagaaagatgagctcctttctcccacttcctgcagccggtgcgtcaagcgtttcgacgatggcgtctacatggcctggtctacaaatgaccagaatatcaagcttaacttctatcccaaacccgcggagatgattgcaaaattccgggagaagaagaagaagcttgatgccatgctggaggcgcgcattggtcctcgccttcctcctcgtattgactaggccgctctgagttccacccattacaaccaagatttcacttctttcttttttttttatttacagctaattatcttgtacttaagacaatttctatttacatagctgtttttattaaaggggagacaatatttaaggcctgtccccgggccctttgtatatatttttgacctgcccttagggctaggatttttatatatttatatatgatctttttagatgcacatatctccttttttggacctgccctttgggtcaggatgtttatacatatgctctttatttttcttttttgtgcatacttctttttgttttttgacctgccctttggttcaggatattttatttagctttttgacctgcccttttgggtcagcatattttagttagcctgttttttgtctgtccgtgtggtataccttagtacccccctgagtggcatagaaactttgtttttaaggcactcagttttgtttaacaagcggaggctgtatacatttagacggtacaaactcttgaaacaaagtctaagttacattttttgctattggtaatattttctgaggtgatcggcgttccaggcccttggcacaatggttctgtccatcctttttaacttgtaagt

SEQ ID NO: 280192 - DNA, 189 bp, Cannabis indica
aattagcctaaataaaaatcagaaaagaataataaaacaaaacgtgcattgcacgtaggttgcctctagtataattataatgtgactcagggaaatttacacccactactgatttttcccattttattacatttatactgtgccacgctggaaacaacatttgtactgttttttttttttttttggcag

SEQ ID NO: 280193 - DNA, 574 bp, Cannabis indica
tcatttaatcatataaataatatatatatatatatgttacctcataaaataaaccatcttcataacatcacactgcgtaatcatgcaagtcgatacttttatctgataatcttgtattacattgcctaatcaagcaagttccatagcttggaatccatatatcgcataactacatcacctaatcaggctagcctgtaccaaaaacctccacccatacatcatataattgcatcacctaatcaggtgagcccgtgtcacaatctagcaccaatatatcgcatcgtctaatcagacgagcccgtacctatgcccggtacttatcatatatcactgacgcccgtacttacgcccagtatgtcactaggaaaatcgtatcacctaatcagatgagtgctacctacgctcgatactcatcatatatcactggcgctcgtacttacgccaagtacgccgcaaggaaaatcgcatcacctaatcaggtgagcccatacatcacatgcataatatcatcacattatcgatactcaaccaatcaatcttattattatatgacaatattaactatatctaaata

SEQ ID NO: 280194 - DNA, 713 bp, Cannabis indica
caattatcatggctctgatacaagttgttggaattattttaccaagatctagatttactaacaagtatgttgttaatatcctaaatatgaacttctaaaacgatatgaaataaacacatataaagtatcaggaaacttacagtggttgcagcggttgcagcggaatataatgtatccttccactcagatctctaacccttgtatcctttctgtagcagagtatcactaagatctgagtccgaatctccttctcttgaaactggattcttcacagcgttacacactaggattgagtaccacttgatgtgtgtgggcactcactctttcactataggcttcggtttagaagagaggaagagagagagaggtttcaactagggtagtgagaagaggcttaaaatttttattgaaacaacttatggctaggttagatttaaatagcattaaaataatagaaaaataaatggtaaattataatagtgtggtcggtcatggattgttattgggccccactttgcaattttgccattttctcatttttttcatcttattttctcaaaaatgctaattttccaatttaaccacttaaatgccaagactaatcatttaattactaaaaattaattattaaataacattttcatttaatatatatattaattagacttaacaaagtcccttaattaacaaattaaccctagaaactctttctt

SEQ ID NO: 280195 - DNA, 658 bp, Cannabis indica
agtcgagtactcgccattctaggttgaatagtcgcgcttgtctttacacataaaattcttcttgttattaataatacaatataatttggtgttgcgaaattcactcgacaacatttggcgtcgtctgtgggaaatcggctaagatttcattcattttaaagaagaatatcatcatggctggaaatcataccaacggaggagctaacaacgggtccatcaacattgggatgatgaacgtaccattatctagaactggagtgccacctgtggacgtcattaacggcggagtagggagaagcaatatcagacctctcaacctattcccagaaacaactgaccctcaagtcggggacacatccacgccaccagcaactatgaattttccccctgttaatccggcagtggtatccgagggaatgatccagctcaccactgatcaatatgctgcgattcaggatcaactacgcgcgctacaggccgaagtagatggacaaaaccgagcccgacgccctcctcgagttcctgctattcgcaccgataaccctcaagtaacgacttctagacgtcatactaaccgtgtacgcagggaacgaagaaccaaccttgaaggtttggacctgaaccatccaacatcaaggggtcaatccgcaaggtatcc

SEQ ID NO: 280196 - DNA, 748 bp, Cannabis indica
tcgatttcatcaagtgattctgcaaggagtatgtgattggtaccttgatcgtacgtcaatcttctatgggaaggtggctcgagtttgacgggtaacgtagcttcataaccgtacgccattgcaaatggtgtattaccggttgctattttttccgttgtacgacatgaccatagaatttcagggagctcttctggccagtttctttttgcatctttgagtttcttctttagtgtatcctccaaggttttgttgactgcttcaacttgaccatttgcttgaggatgtgccattgcggagaaacttttgatgataccatggttcgcacagaaatcagtgaaggattgattgtcgaactgtttgccattgtctgagactattttgtacggtagtcgaaccggcatatgatgttcttcacaataaagtcttgaactttctttgatgtaatggttgcgagtggtttggcttcagtcaacttagtaaaatagtcaactgctaccactgcgtactgcactctgcctttacctttaggtaattgcccgattaagtcaattccccaaatggcgaagggccactgactttgcatttgtgttagctcgttgggcggagctcttggaatctttgaaaatctctggcatttgttgcacttcataacataggctctcgaatcttccatcatcgttggccagaagtaaccttgccttagaattttcttggataagctctgtccagcgacgtgatttccacaaaa

SEQ ID NO: 280197 - DNA, 554 bp, Cannabis indica
agttaggtagtttcgatttttagaatttttttgtgttcattgtttgtttatttttgggcattttcattatgtgttatttttattttaatttttcattcaagtttcatttgtagactttattattagtatccctctttagcccatatttatgatttttattttttaggttgtttttcaaattggttttaatgtttgttattttatcattttgttttttgcccaaatcatgtgttatttttggttttgttggtttgatttgtttcggttttttgtgaaactggtttttatgtttattatcatgattgataagttctttgtgtctaatattttttttgtactttgattctttatcaaatggaaagtaaatcagaatccaaagtttcctttgtacttctatcaaggctaaaggtcgaccaagaaaatcttcacggcaagctaaagtatgttttatgtttttaataaaattggtttttaatcttaagttttattttgatttctttttattgattctcatgaaacctggttttaattttttttattaggatgcttctgtt

SEQ ID NO: 280198 - DNA, 442 bp, Cannabis indica
atcatgatctttcttttaagctctacgtcattggctacacacactcttcccttatacctcagcatgctgtctgtaccttcagagaaatcctctgcctccttctctggcaagcctgctctcttcttctgtaagaactcatcaagaatctgtgcatctttaagttcttgtagcagcgttgagacaatggttaggttggctagttttggagtaatgatctctataccacttctttggagttcttgttgtagtggcctttctatttttgccagtattgccaagctggcataactgcgtctacttagcgcgtctgctactacgttggccttccccgggtggtagtggatttcacaatcatagtccttaacaagctcaagccatcgcctctgcctcatgttgagttccttttgcgtaaagaagtacttaaggctcttgtggtcggtat

SEQ ID NO: 280199 - DNA, 595 bp, Cannabis indica
ttgcatgcttagtttaggttgatgttgttgctgtgatgttgtggttatttcagaagtttattcttgttattttgagtagattagagctagtttgatgcatgatagtagctttgtttcaagcttggaagtttttactcaaaatatagttttcaaagaaaaaaatgaagaatctgttgctgttgcttttgttgatgcttgctgttggtttctgcagtttctatatgcttgattatgtaattttattcaaggtttgatgcatgatagtgttgtttaatcaagtttgagtttggaactcaaagcttgatgctttaatggtgattttggattgtttgcatgaagctcggttttgatgctttagaaatgttccttagggtctaaatagcaggtctggaaggtttggggtgaattggatttgatttaagtgagttatgattttttggttgaatcctgcgaggaaccggaattccggttgtgcatccggaattccggatgagggttcaggatttcccagaaccggaattccggttgtgcaaccggtctgtcggttgggaaattttcaggaaccctagattttctcatttttatgttatttggg

SEQ ID NO: 280200 - DNA, 249 bp, Cannabis indica
gctctatatgtaccacagtatagatacgttatgattatccattgttacaatcctaatagtcaaagatcctctatagatgatctacactgaataaggacaaatttaccattctaccgttcaatgtattttattcttaaaacacttagctacctataattgatatttcagtacactaacataattactgaaatgaaatctcaatcatttatttctatcgagccaagctaaaaggaaatcatcatttcactt

SEQ ID NO: 280201 - DNA, 534 bp, Cannabis indica
ggaaaaagaatttttcaatttcgttgcataaaactcatttttggtacggttctagttttcttggcaattttcgaaaaacttaccgtaaatcgtcatttttcattatttttcagattttcttgtttgagcaattttgttttatcatattaaaggtattagaattggtttggggtcatttgggtcaaaattggattttttagcccactttttaaaaaattttttttgctggtcctgtaccaaccggaattccggttgtaccatccggaattccggatggcacaggatcagcaaagggggcatttttgtcattttcatgcgattttttccctttttaaaccctaccaccgaattttttctcccccattcagttttttcaaccctaaaacagcagccaccatctccttctctctaaaattctctctttcaaagcctcactctcatcttccaataattaaaaaaaaaaaaaaagtgtgttcttcaatggcttcctcatcaagagctcccaagaaaatggctagtgcaattcaacaaagg

SEQ ID NO: 280202 - DNA, 478 bp, Cannabis indica
tgcttgtccatcttctgtgtatctaccataatactcacctcctctatctgatctcactatcttaatttgcttgttgcattgtttctctacttcagctttaaatatcttaaagacatctaatgcttcacttttattatgaagtaagtagatatacatgtagcgtgagtaatcatctatgaatgagatgaagtatttctgaccatgtgactccatatctggactacatatatcagtatgtatgatttctaatatttcagaactcctatggacaccagttttgacagacttggaggtttgctttcccttaatgcaatccacacaagtatcaaagtcagtaaaatctaaggtattgagtaccccatcttttaccaaccttttaattctatcaatggagatatgtcccaatctccggtgccacaatgtacaggaatcctctttcataacacatcttttagtgccagcgtgaacatgcataaca

SEQ ID NO: 280203 - DNA, 613 bp, Cannabis indica
atggtgcggagtatgcttagtagcaactctaaccttcctaaatccttgtggactgaagcattaaagacatccgtgtacatattaaaccgagttccaacaaaggcagtctcaaaaactccttttgaattatggaaaggttggaaaccaagtttgaatcatgtacgcatttggggatgtccatctgaagtcagaatatataatccacaagagaagaaattggacccaaggaccataagcggattctttatagggtacgctgaaaagtctaaaggttacaagttttattgtccatctcatagcacaagaattgtggaatcaaggaatgcaaaatttcttgagaatgccttgatcagtgggagtgatcaatcaaaggacttaggtcctgagaaagatccttcagaaccttccacttcaaaagcaagattgataatggttaacactcctgtagttcaaacgaatgttgaacaaccattaccaatcactgaagatccacaagttggtaatgataatccagtagatcaaaatgttcaagagttgcctgcaactgttgaacaacctgctgaacctgctgctgctccccaagagcctgttggtgaagtcttaagaagatcta

SEQ ID NO: 280204 - DNA, 526 bp, Cannabis indica
tttagggttagttaaaaacaaccttaaatatctcaatcaaaatttaaaattctaaaaaaatgaaactaatttaaatattaaggtttaattaaattattttatcaaattcaattaaatatctaataagataaatgatttgaaaataaccaaatagatattttcaaaaacattttctaatcttataatttaataaaattaaaataataaaataaaccaattttaaaatagatatggttaggcaattattattttaagaataaaataataaataaataataattatcctaattatatgtcaaaatatctcaaattaagcattatccaaatttctacaaaaatatctaggttatttaaatttttaaaaatacaatttataaatttctaataagtaaaatgatataaaatagcatacatataatttttctaacttataatttataaacaattaaatatttaacaaaaaaaccaatttttgaatttgaaaaatattatggttagaatgtctataaaaatatctaggttaatt

SEQ ID NO: 280205 - DNA, 652 bp, Cannabis indica
ctagtttgggatattaccatattaagttgcactagatagggttgtgcttgtaaaccttagtcccggttgtgatttagcgagtcacttatgcgtgttattatcgatgtgatttaggagcctataatttgccgagcagttgttccactcaggttggccggcacacctgaattctgaattgaggtaagattagtataatgttatgcatatgtttatacatgtttagcgttcatgtcatttgccgtcagaataacatatcagggtatcggtgaggagtacatagagttgcaccaagataccaacagatatatgttaggcaaatctattgccatcagattagcatatcacggccacagtgaggtgtacatagagttgcactgagatgccaacagatatatgctaggctatcagatagtatgagttatctgctaccacatcagtacgactagagtactaagtataggctggattcgcagttagtcatactttgtcgagaacgttcctgactcagttagggttatggttgggtgtatgggcgcctgattataatctgggatattgatatgttttatgttatgcttttcttactgagtttgtcgactcacagtgctatctttatgtgtacgtaagggcaaggctaaagctgaggagtcgt

SEQ ID NO: 280206 - DNA, 987 bp, Cannabis indica
catcagaaacataaggcatgaaaatcaagaagctcaaaaacgagacaaattaaaatgcaaggtgactgcccggacaagacttagaagtccatcatcacctgacatcgatcttatctcagacataacagctttcccttttccgaacacgggaggggatggctgaacaggtgaaatgggctccctgatgcgaatcgcatgttcaacaggcctaggcgtggccgggagtttcttcttcctcttcaaaggagtcaccggctcttcctcggcctcatcttcaggattcaagggctcctgagcatgctgcttggcccttgcacctcccttcaacttagcttcacgcttaagttgaatgagttcgttctcctaatgagctcgttcagtccagacagcaccagatttcctcttcttccccgccacgaacttaggagtaaagtcctctagatagagcccgtacctcacaaagttatcctcggaggtcaactggataatattccggtcttccaccggcagccgggcaagtttctgagctttatccctaacagcaagagtgaggagaggacggtgatatgtcaaaatctgatggaaccgagtccgggtaatgctcgcatccttcaccatgaagtactcataagcaaaaggccctatcttgctgatggccttgccattcatgccggtcaactacttgaagcttggttgagagaaatagaagtacccctacctgccttgcttgggggtggacttcaaatcaaagaaccaggaaacttcgtgaggagaaggagtaccccaacccctgggaagcgtagaggacgaagagggcagataaatacttaatgcccttaggagtgaactgggtcaggcagagactgaagaagtccgccacatccttgaagtatttatgcaagggcatcagcgctccttgctgaccatgggcacccaaccaggcgcacatccccttgttagggtttgtggcacaattgttgtgagcgg

SEQ ID NO: 280207 - DNA, 696 bp, Cannabis indica
tatcaaaggagggcaatgtccaagtttggcctgagatgttgaagtttgttaacgatctcgaattcttcttcaagtatccgtggggcgagcgcgcttttcgtaagctgatggagacattaggaaagaatatgcaacattacaaggataatgttgacaagaagaaggggaagaagattgctcaggaggcaaagtacactgttagtggctatgtacctgcctttcagtactgggcatacgaagcaattgagaagttggggaagaagtatgcccactgcaacgggaccaagttccccagaatgttgagctggaaaacaccggagggccagcggaaacaagatgtgaaggcaaccgacattgcactgttgttcaacagtcgggtatgtttctttactgttctgtattttttttcctaaagagatatggttgaatttattgaaaatgaacattcgcgacattgttcgcgatatgttcgcgacattatgcgatgtcgcgaaagaacttgctgtcttgcttatcgcgacatatgtcgcgacatgttatcgacatgtcgcgacaatgtgctgctttttgcgattatcataattttcgacttcttttcacagtttttaattattctgtgttttctttttgtttcagttggtggtgaagaagtgcttgtttccccggcccagtgaagaggcatacttcaagagtatt

SEQ ID NO: 280208 - DNA, 633 bp, Cannabis indica
tagttcattttattttaattaatcattaaaatgaaaaaaatcattgatttaattttgtacaaaattaattaaaataaataattaattttcaactttaatctatttttcataaaaaaaatcaaaattttctgcatttaaataaaaaatgcaattttacgaaaaaaatgattaataaattaaaaataaaatatattttgaaaattattcaaatttaagttgttttgaaataaaaaatttccaacttaaaataattttctatttaattaaatattatgaaaataataatatttaagtatcaagaatgaaatcaacttaaatatttaattttcaatttaattaaatgtattaaatacaagaattaaataatcaagtataaaagaaacttaattattaattctaatttaatactaggaaaatattctttatttaagttgatccaaaattaattaataaataattaattttcaacttaaaatattttcctaattaaatattagaaaatataactagtactagaaattactatctagaatatatttcaattaactaagtgttttctaaaattaactttaaaatattaatgaaaaataaatttcatatattttaaaagttaattatgttgctaattcaatt

SEQ ID NO: 280209 - DNA, 678 bp, Cannabis indica
cccaagtgaccgagcagacttattactcttggtcacttgttttttgcaagtatacttttttatctgtttggggttttgggttcgaccaaaccttttatatgcactggatggtaaattaacaacatgttattaatttcgactcaatttgaattttgaaataaacatcttaattcatttattgatcgaaaatgtgtttattaccatagtaacttacatatgagctctttaatctaatccgatcttttagcttaacatgaaataaaacaaattgcagaaattagaaattgtactttagatgatggtcatcggacctgagtactttcaattttgtccgaacctttgggtgtagtccgcccagcaggccattcacttaaaagtaaatattctttcaatacttaatatggtcatatgaccttgtacttctattggtagtattttcttaaatgttccccattccaatactgtggtactagaacaagttacattttttcatcatacttacccaacttgtatgctcctgattcgagaacttcgaccacctgatatggtccttcccagttaggtctgagtacacctgaggtgctgtctttggtgtttcgaaatactcttcttaggaccatatcacccacaaagaatttctaagccttcacttgtttattgaaatatcgagctactttt

SEQ ID NO: 280210 - DNA, 255 bp, Cannabis indica
ctgcaaaattgcaaaaagtgaggtccaaatccactatgcatggccggccacttttgtaggcaatttaaactgatatttttattattttaatgccaaataattcaaacctaaccctagtggaatgctataaatagatagtgaaggcttcaggaaaattacacttctgattcagagaaaaacctgagccttctctctccctatctggccgaccactccctctctctttcttccctcttaaatttcgaaattcttagt

SEQ ID NO: 280211 - DNA, 482 bp, Cannabis indica
aataaggcgtggtgtgagcttcatcaagtatctctttcttaagctcatcaacattaggaacacaaacttgagctttgtataacaacattccactgttcgagactgaaaagcctctaggccgaccagctattacttcgtctcgaaccttaactaactcgggatcttccagttctgcctttctgattctctccaatagatcagattggagtatcaaattatgcaatttcccgaccacaaactcaatccctgcactaaccatttccgaggctagttgaggggctataataaccgtagtacaaacctgcccgggaccttttctgcttaaagcattggccacaacattggctttcccgggatgatacaaaatttcacagtcgtagtccttagcaaattccaaccaccttcccagaccctgtctggacgcatcacaataaacaacaaatttctcttgatctgatggcaaagctgttggaaattatttt

SEQ ID NO: 280212 - DNA, 768 bp, Cannabis indica
ctaaagcaaaatgatatatacttctcagttacaagctaacacaacatagcacaaacatgaccacataacattactaacatgactttaactacacaatgttactacacaaacaactaaagacaacaataaaaacaaacgatttaaacagaagcacacataacaacatcacataactaacatcatttaaactaaacaaacacaactatcacacatatttacagtaaagcaaatagattaaggaaagaataaaactttctcacgggtcggactcttcaccgacagagcccctctcttcaccatcaatcggatgccaaggtgcaagaatttgatctggaaaatctggatatcccgggataactttacgcacgttggtctacagcgcacgcttcacccacatgtctcttttcctttcatactcccagtttatagatatatattttttttttgaacccaatactcccagttgttgtagcattgcttcagcaattcattcttttatgcatcactgtttcaaaatgctgaggcaatgctataactcctaggacctgctgctttagacaataaatcctgcttttcagcctattgcaacaactccattttctgccttgcacctgcaataagatcaccacaccacaacaaaatcattaataactgtaagaaattgaaagttatatatataattatttaagtatgtatataattatatatgggtgcactcttaatggatattacccatgaatgggtaatattagaaaattttgagttttt

SEQ ID NO: 280213 - DNA, 527 bp, Cannabis indica
ttgcctatggtgggaaagaggtggctgcttcaacttctggccaagcttctgaccaggttgctgatgcttctcctgctcgaacaacagatcctcctgctccagttggctcagaagaaccgaaccaagagcctgggactccagctgtttgaacacttctctttttatctcctgtttatatatatatatatatattatatggcctcaaggcctttaagacatcatgaccggccaagcggtctttaaacttggaattatttttcattttttggacaacgggctgaccgggcagcttttaatcccggtactatatgctcttgttatccttaatgaatttcattctctgtttataattgcagtgcaattgtgattgttttatgtttaccaaatgctttgtacaggtataggtgccccccaagtgaccgagcagacgtatgactcttggtcacttgtcttttgcaaatatatttcttttctgttcggtgttttgggttcgactggaccttttgtacgcactttaggtaaattat

SEQ ID NO: 280214 - DNA, 561 bp, Cannabis indica
ccaaacaagatattaagaattcatatgtaattaccacctcatatccaaacacaccttgcattttaaaatatagtgtaattactaaactgtgtaattaatactctagtaattaccctacctagtaattacatagtacttccaaacacacccaatgtaaaattttaccaaaaattgttgtttacgttaatttttttttttaaaaaattaagttataattttttttaagtgtacaaaaaaaaaaaaagtctattaccctcttactatagttgactcctatatatatttattcttttatttatttataaataaattttggctctttgacagctcaaattaaagtggtttcactaataccacaatcttatctatgccccgccaaaagctcccagcaaatattttgtttatacatatatatttttatttttataaaagaaaaaaacaaaatcatttcaataccaaaaaaaaaatcaaaatcaaaatcttccattctttctttctcttcaagttttagtctttttggccccccaaaacagagttgttagactagcagagagagtagaa

SEQ ID NO: 280215 - DNA, 518 bp, Cannabis indica
ctattttacacgcgtataaaataaaatagtcacgcgtgcaacacactgtttgaacgtaattttcggcgtgttaaacttttccgaatttcttaaaattttgcaaaatgtctaatttacatgatcattagaaaaaatttgactaaaaaattatttcagatactaaaacagatagatatgtatcggcgtatcacttttaagagggtacattatagaatttcccaatgttatttatatactattataactcaaaatgacatgtgaaagaaagacattgtatggattattgaaaccattatcacaaaaactaaaaaagtttgtataactgccagttatgaacaatagaaagatactctcttcactttggctattcaatttagtgaatttataatgtctgtcttttattacaatttcttaattagtttttgtactcaaacacatatgtagaattcttttttcaaaaaaaaaaaaaaaattatagcggtgttcgttacaattacaatatcatccctgtaaatttt

SEQ ID NO: 280216 - DNA, 627 bp, Cannabis indica
cttcagcgcggtcaataaaatcactcattgagtctaccagcccgttcttccttatatccttccaaagttcaccgaggacttcaatgccccccaatatcgcggacaactttccatcttcagttacccgtgaaactttggtcgcctccgtcatgaatctgctgatgtatgctcggagaggttcacgtggtctttgcttgacttcgaccaggtctcccagatgcaacagaagttggcgagaggaggagaattgtgcatggaattccaaagagaaggctttccatgataccattgctgggcggcttccgaaagggtagtaggaaagattcggcaacacacatcccctcatatcccctgcaaatccatttgcatctcgaaatacttgaggtgggaaagaggatcttctcttcctgtgtacattttccatgttgtcattttaaacttgtggggcaacgccagaagattgatctcgggagagaaaggagttccacgtgctcggtccagctcgagatcattgtttctctgtccagccatgccttggaacatatttttcagtttggactatcctgctcagcattctagtcgatttgaatcacaccagtatctttttgagcggggatttgagcacgg

SEQ ID NO: 280217 - DNA, 546 bp, Cannabis indica
ccacgcgcgcgcggatggcccattccctcggccagacgtgtgttaggacaagttttgtccgagcaacacgcgcatggggtgtctgaaaccccattctgcgtgcggaaatcatgctggacacacccaaccccgaggtttctcggctgtgacaccctgtggcgcgtgtggattagtatgcaactgcatacgatccgtacaacccacaattttttcgtttttcttcattttttctatacttttttctatggaattaacttccgattttttgttgtagttttgtatttagatatttactatcctatttcaattctaattatcataattaaattaattgaattttttaaaattaatttatgatattagtgtgatttgaacttgaaaatatgtaaatatctaattttttttttgcttaattatctatcttatttttaattttgattattttttatcttatttttaaatttaaggtcagatattaatttttttttaattactctatttttttaaattatttgaccttatttaaatttaaaataagataattat

SEQ ID NO: 280218 - DNA, 448 bp, Cannabis indica
gagcgcgtgagggtgtatttaatgatcaccattactgcagcgattcactttttgtaggcgtcgattcgtttcttgtccattgattgatacagcgcattaatgggtgtcagacggacactcatgcgtttccaccgcctcgatgacgatccaatccaaccgttggatcttgggaattcgaattgtgcgccttcccagtcgttttatggtagctgatcacagctgtttcacatgtgctttggcctataaaagccgcccttctcatttcatttggttactttcagaatttcaccaaactttctcaagttctccagagagaaacggaaaccttcaaacaccatagatttgttacttcttttccttcgtcgctgccaatcaactctttaccgtcgatcaacaccaacgcccaattctcaagctttatgtaagttcttcgcatcttgtactttag

SEQ ID NO: 280219 - DNA, 522 bp, Cannabis indica
gtacttttcctatcatctaagctcccagcccaatcagagtcactgtatccaacaatggacatgttggtatctctggaataccacaagccaaactctgaagttccagataggtatttaaaaatacgcttaactagcaaacagatgagactgtttgggattagcttgatatcgagcacacaagcctacactaaagcaaatatcaggtctactggctgtcaagtaaagaagactacctatcatccctctatatagggtgggatcaacagactcaccagactcgtctctgctaagtttggtagtagtacttaaaggagtaggggcatgtttagtgtgatctaagccaaacttctcaagcatttttctaacatatttggattgtgagataaaaataccctaatcagtttgcttaatttgtaaacctagaaagaaactcagatcccctataagactcatttcaaattcactagtcatgagatcaacaaatttgacaacttccttttcacaagtagacccaaaaatgat

SEQ ID NO: 280220 - DNA, 580 bp, Cannabis indica
tgttctcatttctaaaaacaattttttgaaaacaaaaaacagaaaacaataccaaacatgctctaagcgtctttaaaattggcatcaaatattgtagaattcctcaaaaaaaaaaaattactcaaatttcccgggtaaaaaagatcttggtgctacattgattgttcatgaaaagctcgtatatgtaacatgttcaaaggttaagttttagtcccagaaaaggctagatgatgtgtctactgaaccaatttttacaccaaggaagttttagcatcacataagcaggtttgtttatatttatatacaattatacaataatgtgaattcttggacaataaacattagtaaatttattggggaatatattgataacaaagttaatatttgtgaatttggtacttgacttataacaacatattaagtcatatacaatagatacaattgaaatcgaaaccttaattttattaacggttaatttctttaaattgtttctcctttcactggttttattattttctagttttaacctattcttaatttttatttaaccaaatagaagtaaaagtttaattttaacgta

SEQ ID NO: 280221 - DNA, 507 bp, Cannabis indica
tgtttgaagctgagaagtcaaaccgtagggctgcctggagtcgcagtccggtcgaggatatcattgccacccctgctccggatccattttcattggaggctccgtccacaaatactctccatgtggggaccgatggtgttggcgcatttgcagttgcctctgcttcattacattcggtaatgaagtctgccaaggcttggccttttatggagattcggggaatgtagtgtaagtcgaactgacttaactccattgcccacttgaggagccttccggatgcttctggtttttggaggacttgccggagcgggtggttggtcagtaccttgatcggatgtgcttggaaatatggccttaattttcttgaggccatcaggaggcagaaaaccagtttctcgatgatggggtaccttgtctccgctcctatcatgcgcttgctaacatagtacacgggatgttgagttttctcttcttcccggactagggcagcgctgaccgcgtgctcgg

SEQ ID NO: 280222 - DNA, 527 bp, Cannabis indica
aaatgatgtaattgagtattgtaacaatttctaacagctagaaacttatttcattgattccataacaccgtttggaaagcaaaaaatacttctgtttcgaatattgttggatcagctacaattgcacttgatcaatggaagaaagctcaagacaaaaactctctatcatcgttatgcataaataacaaagttgatggagttgagcgttggactaaacccgaaactaacacaatcaagttaaacgttgatgcagcgatttttgaaagagaagaacaatatggctttggtatcgtggcccgtgaccactgtggcaactgcttggaggctcgggcaggctgctttggtggaatttattctgctgcagtagttgaggccttgggaatcaaagaggcgcttagttggatcaaaaccaaaaattgggtccatgttgtggttgaaacggatagtcttgtcactgtccaagcaatccgaagctctcaaatcatggggtcgacttttggtttaattattcaggactgtcgttctgc

SEQ ID NO: 280223 - DNA, 436 bp, Cannabis indica
gccaatttcagacctgcgattaaagcctcatactcggcttcattgttagatgcagagaattcaaaacgtaaagcagcgtgtaccttgaaattattgggactgattaacaagatcccgctgccagaaccttcattatttgaggctccatcgacatacaatgtccatacttctttgcttgccacggcaatgtcatttccaccctctacaactgccacctcggtgcttgggaattcaagtataaaatctgccaaggcttgccccttgatcgcagttctcggtttatacttgatgtcgaactgacttaactccatcgcccactttaacaatctccccgatgcttctggtttcgccaaaacctgtcttaaggggaagtttgtcaaaacttcaatgctgtgagcctggaaataaggtcgcaattttcttgaggatattatca

SEQ ID NO: 280224 - DNA, 540 bp, Cannabis indica
tgatttactttcatgaaatataaattaaaacgatgatgtgtgttgatttggatggtttcatgttggtttatgtgttatgtgatgaatttatgtgttgtacaaaatttttccatgaaaaatattttttctgtttctgaaaatattttatttggattccttgtgaaaaattaagcaattttcttttttacggaactcgattctgataaaaattgaaaaagttgtgaattttggaaattatggatgcatggctgtcgagtgggtgcatcgagtgcaccagtcacttggacaaggctcacattcgcgcgcgtggcaggaaaaattccttgtctgaagctcaaacatgccagaccgtgtagctcgcccgtgggaaccctgctggcgtcgaggattctcgtccagcccctctagcgtcgcgcgcctaagccccatctgcagcctatgaaggctgcgcttgcagcttactggcagcattcacccaaatttgcgatttttgtgggatttttccaatttttaaaccccaaatttaaaataaaatattat

SEQ ID NO: 280225 - DNA, 452 bp, Cannabis indica
ttttaaataaacacctcgtcaagaaagagattattctaagataatctaacctttatcaaatatgctcacagcatgtttctaatattccattgatcttcttaggttacccacctttcaagaataaaacattatactattttcgctttaacctccatggttctcaataaccctttctttttccttattatcatagccaaagatatcaaccttggaatttcacaagattagattatttctttgtatgaattctgtattctcatttatagtataaattgtctacactggtagacaacatattaactctgtatttccaaccgttactactcggtcaaaatcataagatcccatagtacataattcataattatgtctttctactccttctatgagatctcctaagctgatcgactaacttaacttagtaacaagttaagtattcatttctgatagat

SEQ ID NO: 280226 - DNA, 591 bp, Cannabis indica
gccggcaccaccccggtgtcccaaggtttcacggtcatcctttgtctttgttccgcaggttgtcggtgcccacaaacgctcattccgatcattgtagattttagcatctacaatttggcgcccaccgtggggccctgacaaactgactgtgagcaaggcgatctatcattaccacacttcaaatggcagaagaaggagagtttgttgcccaggaacaacccaatgtcaatgaacagcttgccacgataatggcccagatgcgcgagatggctgagcgaactagagttctggaacgagaaaatgcaacctttaaggaggagaacgcagcatttaggagtgaaaatgccacaataaaatcacaaatggagtcactgaaggctaccatgacgactcccagtgttgctcaaagtcggttccgagttccaattgcaccaatggcatcactagactcaactcctataagaatagagacccaagtctctgatcaacaaacactcagagggacatcgactccaacgttaggaagtcattctgtcgtaggaggttctcaacctcaacaatctgaacatactgatatgcaaacagatggga

SEQ ID NO: 280227 - DNA, 533 bp, Cannabis indica
aattcatcattgttgagcaagcatccaatgtatccaaattttcaaccacttcaaaggattctttctcttcaattctaggctcagtctcttctatgtattcatctgatggtgcttctactatattcaaacaactctcataactttcgttatttgagttattatccttaaaactctctgaatcctgcgccattaaattatcacatagagcttttaccatgtccgccaatcgattaatctcttttggaagtgatagtatatcctcctcttcttcaattggttggggtgagtttggacaataaggagggtattgatgactccaaccttgaagtgatggattccaatgccaatcataatcaaaatctgccatatcattcaacagatttattgcttcatggcctctccttaacaaaggctctccagtaacctctgctccataatccacccaactttttgtttcatcatcaagtccattataaaagagccacgtaaaacatccacttgagaaagtgggataacatctctctccaagctct

SEQ ID NO: 280228 - DNA, 884 bp, Cannabis indica
tcaaagttcttcgtgcaagaaatggcctccctaaaatgattggaacttccctatcttcctcatagtcaagaataatgaaatcggccggaaaaatgaacttatccacttgtaccaacacatcttcaattttcccttccggatgagccatggaacgatccgctaattgcaaagtgacggtggttggccttgcttctccaattcccaacttcctaaaaatagacataggcatgagattaatactagctcccaagtcacaaagagctcttccaacatctcgaccccctatagaaataggaattgtaaagctgcccggatctttcaatttgggtggaattttacttttcaacatagcactacatccctccgtcaaagcgaccgtttcaaactcgccaagcctccttttctttgtcaaaatatccttcaaaaacttcacataagttggcatttgctccaaagcttccactaaaggtatattgatgtggagctgctttagaacatcaagaaatctccggaattgaccatcgtcttgttgcttcttgaaccgttgaggaaatggtagaggtggcttttgcaaagacttttctgcagcagaatgctgactggatgctgtaactactgggggaatttcagcagctgaagttgctggttttttcttcatttccccctctttttggattgaagagggctctttactgcctgttgcagccacatttgactcaattatttttccacttctcaaggttaccgctttgcaatgttctttgccatctcttcttgggttttcggtgtcactaggcaaagtgccttgtggtctattcttcaaatcattggccaattgccccaattgaacttcaagattccgaagagatgctgcttggctttga

SEQ ID NO: 280229 - DNA, 731 bp, Cannabis indica
gatgaattttgatttgattgtagcctgaataagcgtccatgaagcttaatatttcatgccctgttgttgtatccacgagttgatcgatccttggaagtagaaaacagtctttggggcatgctttgttgaggtctatgaaattaatacaaactcgccatttcttgttcggcttgggcaccaatacgggatttgcaacccaagctgggtagaaagcttcaattataaaattgttgttgtgtagcttttctacttcttcctttagggctaatgcttgctctttgtccagtagccttcgcttttgttgtactggccagaaatcgagatcaatattcagaacgtgtacaatgatagaaggatcaattccgaccatatccgcatgttaccaggcaaaaacgtctaggtttgctctcagaaattttattaatacttatttcacttcgagcaacaaacccttctggtcaggatatctggatcgatctcgatctcttctaattcttctacaggtccaacattactgcttgggtccccaagtcgaggatccacttcttcatccccgccttgggaagttccctacttggaaatgttttttcccttgtatgtgctttgcctagaggatacttccttcttagccttggccactacaagcttataacattcccgagcagtctgctggtttcctctcagacaccctaccccattctttgttgcaaacttcaggcacgagtggaata

SEQ ID NO: 280230 - DNA, 616 bp, Cannabis indica
accccaaaccttccagacctgttctaaataccccaaagaacaaaaccaaagcaacaaaacagcccagaatacacagatactaaaaatgccatgtgagctccaagctttgagttcaaaactcaaacttggctaaagctcacctacaagcatcaaaactagaaataaactacataatcatgcatagaaaagctgcagaaaacattctctaactcatgcaacaagcacagcaaccaattttaaaatttctctttgaaaactttagcttttgaatagaaattctataactttaaacaacaccaccaacaagcaacacaagtagctctaatctactcaacatagcatgctttaaacctcagaaacaacaacaaaatcacagcaacaacatcaacacaaaactagcatgcaacactcatctttttcatcaaaatttcaagaaactaaaagagcaagatgaagaaactttaccaacaattaaagatcgcaaaatcttgctaaaatgagcttgattcaccaagaaaaatcccacttccttgctgctcaaggagggccgaatagagagggaaagagagagagagcttttcttttctaattttttctaacttttgaaatcttgaat

SEQ ID NO: 280231 - DNA, 419 bp, Cannabis indica
ttacttgattaattttaaataataatattagaatctgaatactaaatttccaccacttttcacctttaggctaataattcctaaaaatatgaaccaaccatagctaaaagctattatcgtttaaacttaatcctctttaaaccttatttcacttgaaaatatttttaaaatatcactttaaaattttctttacatcataccttaacctaaataacccttatatcccaactagtaaaatgtgtctagtgcataacttgtttactttgcaattttattgtgccaacattttgttatactttcaatacaagaagtcgtgaaaattttaaacaaactaccctaaataattaggggccagccatataataggcgctatagccttgtaaggcgccaaagccataaaaatggtgcaaatatagaac

SEQ ID NO: 280232 - DNA, 574 bp, Cannabis indica
caactttctcttccacacaaaggttatcattaaagtctcctagcactagctaaggagatgaaattcctttagccagagccttcaaatccttccaaagaatctctctactagcttcatcattgaaagcatatacaaatgtgacaaaaaacttttccttccgtactcttgattccacttcgagatgcatatcaatttgcttgtacataagaaaatgttaactgaaaaacattaaaagattccaacttataatgattctcccccgttgatgtcacatgtttttttatggagaggcaccaacccaaaaacatagcaacatacatagctcctagcttaaaatgactttatatttgtttcagagagacctactactaacccaatatgcaatgagatattaatttattaacctccatttacttattcactttatttactcataattctatccatgagttgtaggagctcccccgagtggcggacctatgatttaaagtgagagggggcgtaaatatttttggtaaatgagggtggcaaaaaagtaaatttaaaaagaaaaaaaaatgcatttaataggatt

SEQ ID NO: 280233 - DNA, 580 bp, Cannabis indica
gtgttcgaggaagggcctgttggagtggagccaggaattgatgcagcaggagggggaactgccaacggaggaggagattccttcgaagattcagatgaagaagaccaggtgcgaagaggtcttaccgatttgcgagcaacttgcttgggtggacgttttggcttctcggtttgagattcacgctggggaagcgatgaatctccaggctttgcaacagcaggaggatgaactgaagcagcagggggagcattggaaggagttgcaacggtttcttccaattttttagtgtgccctagattcttggttctcaccattttggatctgaaagagaagatgaacagaaacaacacaagaaacaagaaaaagggttcgggtaggtggtgagttaaatgacaaagattggtttatataaacttggaagcaagacaagaaaaggaaaccaattttgaaaatttaaatggtaaccgccagcccatgaacacataaaaggaaaccgcccactcctcaactcctttccccttttttttaaaaaaaaaaaaaaataaaggaaactagaattgccaataatatttccaaaaat

SEQ ID NO: 280234 - DNA, 668 bp, Cannabis indica
gatgaaaattctctatttacctgttgttgttgaggttgactaaagagttgtagattcgagaacagcctaggcgtatgcgaggataagctctgagcgtgtagaccgtggtttggcggagaaaatcctccatgatttccacgaacagattcaagcttcggattggaggaacgtaaagggttaagggcaccgcagagaacgccaccgcgaaaaacagctgcaacatttttggtttttcttttttttttttcttgtttggtgtaaaaacgaagaatgaaagctcaccacgaaaatcagaggaattgaaaagaaaaatctggtattttctgtctggttctcgagaaaatgagagagatcgaagataagaaaaaacgacaagaaaaagagcttatggtatgttccctttatgtacaaactaatttggtgacataaagaattaactgtcatccaaataaatatattaagtttttttttttttgtggatgtaataatacttaattttaagttattattcaggtttttattttttttattggtttatttaaattattttttaaaaaaaataaaaaatttgatgactcgcaccaattaaaaattgacacataacaatttacttaatacttacaaaagtttcaaaaatataattaattattattactgccaaaaattaa

SEQ ID NO: 280235 - DNA, 354 bp, Cannabis indica
atcgatttagagagatgatgatttgcttgttgtatacaacaacgtatttgagagatatgatgatcgattctccaattttcagatctgtcgaggtctccgtcaatggtgtttcttcattcaagtttggtttggtttctttccgtttgaatcaggttaaccacgcgcagggatgaccgagaaaagtggagttgtgggcgcgtctccttcatcgccggtggttccaaaataatccaagctaataacggtaagcgtgatgacgtgtcacggcatacaaatggattgttttcatataacgttgtttctgtaatattaatgtatataatgtatatatataaaaatttcccaaaaatataa

SEQ ID NO: 280236 - DNA, 798 bp, Cannabis indica
atgaccgagaaaagtggagttgtgggcgcgtctccttcatcgccggtggttaccaaaattattgaagctaatcacggtaagcttgatgacgtgtcacggcatacacatggattgttttcatttaacgttttttctgtaatattaatgtatataatgtgtatatataaaaatttccccaaaaaaataatatatcatatataattaagaatatatcataaatatataataaaatattttgtcatattttttatttaataaataattaaaatagtaaaataaaaatacttgaataatataaaattgtttatcttaaacactaatttaatataaatattaattttttaaaatatttatataaattttttagtaatttaaaaataatatataattttattgtcatatttttttcttagaatcaatttaagtaactattatttaattaataatattctaaattttaaaaacttatgtataataattcaaaattatacattttcactaattttaatgaataagtttttgataaaaaaatgtataaataaatgtgtgataattatttcctttaaattcttattaaatttaaaatatattaataaaatttagtggccatctatttttcttcatcttcaaatctaacaatctaacaatttctcatatgtgtctttcttttacttttctttcttaatttttattattaacttactgcactttttttgttagtgcagtttttaaatagaagaaattttttggtgaagatgatcatgacttctgttaatgcattggaaaataggtatcgtt

SEQ ID NO: 280237 - DNA, 655 bp, Cannabis indica
acctaagtgttctatacaaatctgtccactttgtaccctttcttttacaacaaggaacttgatgtcaatgtgttttgacttcgtcgagctcctattgttgttggaatacaatacagctgatttattgtcacaatacaacttaagtggtctttcaattccatccacaatgcgcagcccagtgacaaagttcctcagccatataccatggttggatgcctcataacatgcaacaaattctgctgccatggtggatgaagctatgagtgtttgttttgcactcctccatgatatagctccaccacctaacagatatatgtagcccgaagtagatctcctactatcttggcatcccgcaaagtcagagtcagagtatccaatgatctcaaagtgatctgacctcctatatgtgagcatgtactctcttgttctcttcaaatatctcataacctttttggctgctttccagtgatcaattcctggattgcttaagtatctgcctaacactccaacaatgtacgctatatccggacgcgtacaaacttgagcatacattagactcccaacagccgaagcgtagggaatcttttgcatttcttgaatttcaaggcttcctttagggcattgtttaagacaaaatttgtctcctttaacgaca

SEQ ID NO: 280238 - DNA, 818 bp, Cannabis indica
tgtgatgccatgctttaaatgctatttgagtaatgaatatttatatggggtaaatagatgagttagggtttaaggcaataagtgcgtaagtgtggtattggtgcttaactcgctagggttgttgattatagggggtactagtaatggaccctccgtaatcatctagaccacagggcgagcaagtagagcctggggctgcccaaaccaatccaccggcaccgcctccacctccgcagaatccgggggataatgtggggtgggtaatgctaatcctcctactgactggcagcagatgtttcaagaaatgcgaagtgtcatactttgccaagaaaaagagttgcaacgattaaggcaaccgactgcccctgttgatcaagtgttaccaccagcattagtgccagtggtgggtaaccaggggtttgttatgccgcatagagactcggtatttgagcggttcgtgaagctgtagcctccgacttttctgggaggtattgatataataaaggtcgagcagtggatgagcactattacccgtatcctcgatattatgggggtgacgggaactgaaagagtgaattatgcagccttcatgttacaagatcatgcccacgtctggtgggatatcgtgggtcaaacctgggatgtcagtgtaatgacctagaaagaatttaaaagtttgtttgaagaaaagttttacaatatcgctgtgaaaacttcacacatggaggattttgtgaagcttactcagagaaaggtgtcagtggccaaatacaccctagagtttgatcgactgtttaagtttgctggtgatctagtgc

SEQ ID NO: 280239 - DNA, 982 bp, Cannabis indica
atatagttttaattttttgggggcctccagaattgtagggcctggggcctacgccccagccgccccaccctctaaccggccctgatcatttaccatatttaagtacagtatttttttaaaagaaaaataggaatttatttatttattttaattattttgtttatagatatatattattagtttattattaatgataatatatttatatatgctttttaaaagtagttacaagtaatacttaaaataattttttaaaaaaaaaagaaaaagaaataatattattgttaattatgatttttctatacatttattattattatctaaatttttttaaaatatattaaaaaaatatatgtactatatacttttattaccatattatcattatatttattatataattaaaataaaaataaagataaaaatgaaatttaaattacatatgttgttaaaatatttttttagattttattatgtttaaaaaaaacataaattcaagtatatcacaatatattatattcataaattatataataaattattaaaatattttatttcttgtaaatttttgaaaagctactgaaactaatttcatttaacacaacaattaatataatactctatatcaattgataatatcatatatggtagtgtaattcacttatatacagaaattatacttatatacaaaaattatatatgtcacactataatttttttttcaaaattgtatatctaaccattcacttctatccttaaaaaaaacactcacttctattaaccctgtaaaaaaaaaaaatctagaaaaatatagaaataaatcaaaattttttcccaagttcataacagaaaaagtcccacaaagtgccaataatatttcagcataatctaaacaatcacataaaaattgatacttcttgttctcgagatatatttttgttatcaattgcaaactcgttattcaacgtgactcctaaaaaaa

SEQ ID NO: 280240 - DNA, 526 bp, Cannabis indica
tatttattaattaagatactttatatgtctaaattaataaatatattaaatggcaatattatttaataattattttcaagttattaaataattagaattggcatttaaatggttaaattggaaaattggcatttttgagaaaatgggaatgaaaaataacaaaatgggaaagttgcaaagtgaggcccaatttccttatttggccgcccactatgcataggcttttaccattttatttttcattattttaatgccatacaattctaacctaaacgtagagggcattctataaatagaaagtgttggcttcaggaaactcatgactttgcacattgtttctttcaaaaaagcctagccgcccctctctctattttcctctctctaatttcaaaattcccttgagtgatagagtagtgcccacacacatcaagtgttacctcaatcatagtatgtaagactgtggaaaatcagcatcaaagaaggagagataaagatccaaattcggatcttgataatgctctgctac

SEQ ID NO: 280241 - DNA, 756 bp, Cannabis indica
gacattttcccttgttctcagtagttgtgctttttattggagtatatgaatttttattttgaccattacgatgccaaacattgcttcgaccgtgatcgcgaccacgaccacgtctattacttcgattatgatcacgactacgactatgattatgattgtcagcaattgtagcattcacttcagggaatggagcagacccagttgggcgagattcatgatttttcatcaaaagttcattattctgctcagctactagaagacatgaaatcaattctgaatattttttaaaatttcgctctctatattgctgctgcaggagcacattagaggcatgaaaagtagtatatgttttttctaacatttcatagtcagtaactttttctccacacaacattaatttagaagtgatattaaacattgcagagttataatcacttactgatttaaaatcttgcaacctcaggtgcaaccaatcattcttagcctttggcaatatgacagttttttgatggtcatatctttctttcaaattttgccaaagcacaagaggatcttttacggttaaatattcagattttaacccctcatggagatgatggcgaaggaaaatcatagccttggccttattttgttttgtttcagtattttgatctttgatggtgtctccaagacccatagcatctaaatggatttcagcatcaagaatccatgacaaatagttttttccagaaatatcaagtgccacaaaatcaagtt

SEQ ID NO: 280242 - DNA, 933 bp, Cannabis indica
ttttgttggatgcgattttaccaaatgtgtgtttagtattgaaattttttccctcttttatctaccacatcatagcgatgtacaaagttcactttctcatcattctatttggcatgcttgaaaaagatatatatatttattttaaactttcattggcttgcttatgaatgtttatggtctctgtttttgttttgtttctcactatatatcaatagtgcggcagaagtagttgtcaaagcagtgggtcacttcttggtatgtattttagaaactataaaattgttcttttttttttttgttttttttttttgttttttgaaataagcgtgatatcattgcattacttaaagatagacctcatggtcattacataaaaggttctccggtaaaacagagaccggaatagttccaaacatttgatgagaaaaggcccatctagccacattgtgagcagcaaaattacaagttcgattaataaaggaaaaattacaactaataaaggatggagaagacttagaacaaaaggagacatagtgatcaagagcccaacgagactcaatcacattgatagcattgatcactaccctcgagtcattctccactatcacaaactgggaaccgatatccaaggcaaccgacacagccaagcaacacgcctcagcttctccacaaagagcatcagagaagtccacccgcgccgtctggactctaatcacgctaccaagatgattcctagcaactactgcaatacacatattgtcaaaacccactcttacatcacaattcagcttgatccaatcctgggggggaggggaccaagcttccttgagatgcggagcaggactagggaataacgaagcatgcagatcaacataagaagtactaatatcatcaacacattttttcatatcaactgggcagttattatggact

SEQ ID NO: 280243 - DNA, 505 bp, Cannabis indica
ggacctgggcgagctggactactacattcccacccacactaatcgtgccacaaaccctgacacggggatgtgcgcctggtcgagggcccatggccagcaaggggcggtgatgcccttgcacaagtacttcaaggatgtggcggacttctttggtctctgctcggcccaaataacccctaaaggcattaagtatttgtctgccctcttcgtcctctacgcttcccaaggatggggtgctccttctccccatgaggtttcctggttctttgatctgaagtctacccccaaacaaggcaggtcgaggtacttctatttctctcagccaggcttcaagtggttgaccggcacggatgccaaggccatcagcaaaatagggcatttcgccgatgagtacttcatggtgaaggatccgagcattacccggactcgattttagcagattccgacatatcaccaccctcccctcactcttgctcttagaaatagagcttagaaacttgcccgg

SEQ ID NO: 280244 - DNA, 663 bp, Cannabis indica
gttctggtcctagtctgagtcccatatctagacaccgaccactggtctgttgcagaccccattacccgaatcccgagtcaagatctggatcactgtcacgggtctcggtcttgttctggttcagttcccaggtcccatttctgagtttgggttcgggatcgagactggggtgcggttctaggtccagaccctgtttctgtgtccatagtcttgttccatgtttgggtctaggttcatgttcgtgttcgggtctcgtgtccaggtttaggttgggatccgagtccgactcccaattcgagtcttggtgttatttggagtccgggtcctggtccagttacggttctggatctaggtctaatttaatttatgattccaagtccaggtcgtagttccattcccggtcaacttccggtttttgatccaattttgggtcaatggctacgggttcgggtccactttttggtttgggactgggttcaggtccgggcgtgggtttgggtccttatcagggttcgggtccagggatgggtcccaaatccatacaccgactacgggtttaggccaagcccttggtctagatccgaatcccaatctcgggtccagtctgggtccatttcttgtgccgtgtcatgagctgggtcctaggttcaagttcgggtctgg

SEQ ID NO: 280245 - DNA, 320 bp, Cannabis indica
aattttgatttgtaatttttcattattataatatggaacttgttcgatatttattcgaatttatttttcgaattaaataataattgaaaattaattaaagttgattttttatttaaaccaactttaatttgtaatttttcattattataatatcgaataaaatgattatacaaaatacatatttttttaaaataatgagcttttaatcaagagacattcgatctccattgttggttttacatcacgtttgttttagtgagtaatcctccctaatggaggaacgttcattagcaatttcgcaccgtttaatctcgaaagat

SEQ ID NO: 280246 - DNA, 607 bp, Cannabis indica
gatacacatgtacaataactgggaattaccccaccaaaaattctataaatacctcctcaaagctcattaaatggggttggaaaatcttgggttgcataagtgcaagaagagtaaatactcaccaagaacattctctgtatttaatacattcataaatacacagactcgtggactaaggctcattaacgccccaaccacgtaaaaatccttctcttaatttcttacagttctctaatcttataatattttattggttgccgaaaacctcggtcaacattttggtgctttcattgagagctgaagaaagcttctgcaaatacactttacattacaaaaatggtggagactagaagcactcgtcaacctcgccctctagaggatgctcaagatccaaatgaggaagacgtagcctcaagagcagctgagggctccgaggaagaagaaggaattcctgatgatgactatgagggaaacctcgatgagtatgcctacgatgaaggtagctactcagaactggtgcttctaaggcaaaaagctatcgatcacgaagctgagatcgaagcccaaaaagcacaaaaccaaaaaatgcaagaggtaatgctagcca

SEQ ID NO: 280247 - DNA, 447 bp, Cannabis indica
cttcgaggaactggataggaaccaagttcgccttgtcacttacattactacttgtcaattgagctaacgcgtcactgcaattgtgttttcttcccttggaatttgtctgagaccgtagcttttgaattgtgcgagcagatcatgtattttgctcaggtatgctatcatcttttctccctaagcctcgtattctccagatacatgatttaccaccatctatgaatcactgcagacttcaatgtgttcggctttcatctcccgggctaggtttaggccagcaatcagagcttcatactcggcttcgttattagatgctttgaccccaaactttactccaccgtgtaggtgttgcccccaggcgttgttgggttttatgccctaaataaaactcatttcaatataatcagatttacttataaatatagatcagaaataacatttaatgtt

SEQ ID NO: 280248 - DNA, 506 bp, Cannabis indica
atgctaatagtaggcaaggataaacacaaaatcagtgagttaaagtgtcaactcaaaggtgaatttgagatgaaggatatgggagaagccaaagaaaattcttggaatcgaaatcaggagaaagagacctggtttcatcatgctaacacaacagggatacctgaagaaagtcctattgaagttcaacatgaatgaagccaaacctgtgatgacaccattggctcaacactttaagctcactaaggagcaggctccccaaactgaagaagaaagaagaaacatggatggcataccatatgctaactgtgtaggctgcttgatgtatgccatggtatgcacaaggcctgacttggcctatgccatgagcatagtaagtcgatttgttgctgaccctggaaacctgcactgggatgcagtaaatgggttatgaggtatgttaaaggatctctgaacatgggtttgatctacaaaactacagagaaaagtgaatgtgaggttgaaggatt

SEQ ID NO: 280249 - DNA, 606 bp, Cannabis indica
ggatgtaatttgttcaaaagaaaaataagcataaatttgtctaagtacaagttgcgagtacccttgtacctcataaaaaagtctagcaaaagtaaatattaaagtgaaaattaagcttaggagcagcaggggcagttggggtagtagatccatctgcaactttgctggcagcctcgtccacgacttcctcggtgtccgcagcatcagcatcctcgggaaacagatttcctccaccgccttgagtctgcgtgggcgacatggctcaaaaagcctcagccatctcagccgcttccgccccaaggatcgagaagtcgaagtccggaatcttggaaagagttgtataaatatagtcagagaccgcctggtcgtactgcttctttccattctccctctcaaccgccaagtcgcgacacatctcctcgatcttcatctgagagttcttggcttcaagctcgacttgctccttagacttgcgaagttcctcgagctctttgtccttggtagtcgcatcctgctttagcttcttgatgtcctcctgaagctgaacattctgcctcttcacaagttccacttccttggatctagtgacaaatgccctcgaaaacg

SEQ ID NO: 280250 - DNA, 407 bp, Cannabis indica
tgatttggtttgttacttttgaatccatctggttcttccatgtagatttgttcttcaagtttgccatgtaagaatgctgtcttcacatccatttggtccatttctaggttaaacttggctactttggtcatcattatccttattgatgtctgtctaaccacaggagagaatatgtcattgaaatcaataccctctctttgattgaatccctttgcaactaacctagctttaaatctgacttcttcacctggtagaccttccttttctctgaaaatccacttgcagcctatcaatttctgtcctggtggtcttgttacagttttccaggtcttgttcttgagtagagagttcatttcttcattgattgcagcaagccatttccttttatttcttgagttaatagcttc

SEQ ID NO: 280251 - DNA, 295 bp, Cannabis indica
agagagagaggaaaagagctttgaaaatttctaattttttttctaagtttggaaaatgaaaataaatgcacataaaccttttttatttcagccaacattaacttaataaatcacataattccaccatttaaagtccactaaaggacaaactaacaatggggcaaaatgaccaatttgcccctccatgctaaaataacaaaaataacattgaaggggtattttgggaaaatttaaattcccggccaatcccgatattcccaatgtctactaaactgtcccaatctactaacatact

SEQ ID NO: 280252 - DNA, 415 bp, Cannabis indica
atatatatttcaaaaaaaaaaaaaaaacaagaagataatttttttcatttaatcattatatggcaatgaagggatataggctttggcaaagggcctttagaattacattattaccaattttttgttgttgcaatttaatccatttaattatacactttaaatacctacctacactcaaaattttatttaatttgccatatattttgtgcttgtttcttcccaatatatatgtacccattataatttatgtatttctgccaaaaaaaatatgtatgtgcatgatattaagactattaataatggtgtacgttttcgtagtactctttcttaattgaattaagttgaagaaaattttgtttaatatgagtttatatcaataaatggatccgtaatttcactacaaaaaactgtcatt

SEQ ID NO: 280253 - DNA, 696 bp, Cannabis indica
caacgaaatacaacagatcaaatcaatatccctctgaacaaataaattgtgaagaacttcctcatcccactcaagagaacccattttttgtggataaattaattttaagcatataataccaaatttctcattagtcaatctaatatgatttatttcatttcatgtaaatttttttacctctcgcttatattgagttatcgccttttcgtgtcaacttatcattttatatatattaactacttattccacactacatactgattgacaaaaaatgaacaaattaaataattaatttataacaatatatgtatatatataatacattaaataattttttttgatattaagtaatactatcaagtcttgaataagatatatgttcaaaaaaagtcttgaataagatatgttatatttttgtaactatcttttatttattttattttagatttatctttatgtttaatacatactaaaagaattaaaaaatttagaaacaaaagtaggttacaatatattatggaaataaaagttttttgaacgtagctagctagtctctcaccaaacaaattataaacgaaatgttttttggaacaaactctgtgactgtgagaaaaaacaaaaggaaatccgaaggatatatatatatatatatagaggtctcacaaaaagtcacaactcacataacaagataaaaag

SEQ ID NO: 280254 - DNA, 587 bp, Cannabis indica
attaattaaaataattaattatttttggtatgtaattacacagtgtaattacacccaattctcatggggaggtatgagaattggagagagtaattgaggcctcccaattacctctaattacacagttactatgtaattacgtggccacacaaacacgtcaaactgtgtaattacctccaattacatccaattccaattcccaggtggctttccaaacgcgccctaagagttcatacaaattttacgcctttctttcatgcaacaaattataataattatgtaaacataaaatatcacaaattctaatgtttaaaatagtccaacattaattcaataacaatacataatagtccaacacatcacgatacaataaactaaaataacatatttaacctcggtagttgcaagtgcttctgctgtgccccttggcaccgcacttgctaaaatttcgtgatttgataatcctttcaccattacaagcagttcggttgttcttaattcttccaaccttttgcttcttgggtcgccctactggttacttctcaacaggcactccaactgtcatgttcttgatgtcatcaggcaat

SEQ ID NO: 280255 - DNA, 392 bp, Cannabis indica
gcaaattcaaaatgaataagctaagaggaataagtaaaggataatttcgatttaaaataagaatccaacgatgtcccgattagcgagagtcaaagttattcttacttttataaacttcttcattgtttcatattgtaaatactagtctaaggtgtcatatattgatgaacaactagatgttgcatttacaaatatttatctatcaagatctaacactattatgtatgtctaatggatgacaaatccattaaggatttgtcccattaaaaacaacaagccaagttagaccaacaatgaagattcgaaatttatactataactaataaaagaaataacttggttcaatataaattcacacataattcagaatgcaaataggaatgacaagcgaa

SEQ ID NO: 280256 - DNA, 566 bp, Cannabis indica
gttggacatccaatccaatccaaaattttttcttaatccgaactaatctaattagtaattagatttagaaaattatcatccgatctaatccatttagagctcaaaattcaatccaattagtaattggattggatcagtttttttaattaaatatttaattacacactcaatttttaacattaattacaaaacataaagaaaaatacctaaaaactatatataaagtttcatttaagtttaatactacataaatatatcatcctcacaagtttaatgcaacaaaaaatttgaaataattaaaataacgataccaactaataaaatagaacaaaatattatgaaaataaatgaacaaaacaactaattattacaaatttaaagtgatgactccaatgtattaattaaattttgattatacaatcaaaaattaacgattatcatgactgatgtgcagccatttctctaaaccacctagcttttgctgatgacgtattgctgttttgcaatggggatctcaagagtgtttattatttgctacagggtctcaagttattctctgaaacatc

SEQ ID NO: 280257 - DNA, 753 bp, Cannabis indica
ggagtgatagttaatattattaaaaattaaattttgttctaatttgatttttctttctaatttaagtactaactctgttgtctcaagatcttattctgctttcaggttcaatagtttatgagaagtcaaggaccaattgccagattacctgttgaccctgagatagaaaagacctgtagaagaaacagaaggaggagaaaattggaaagagcggcactagagattgaacaagaagaagtcatggctgacaacgccaataatggtaacaatggacacaacggaggaggtgtagaagaccaggctaatggacataacaacaatgaccgtagcctgagggactacttacttcctaacttgacaggggcccgatcctgcataaggccacctgctgttgacgcaaacaactttgaaatcaagccagccatactgcagatggtccaatcttcagtccagtttgggggactgccgtcagaagacccaaacatgcacctcgccaacttcgaagaactgtgccagacattcaagatgaacggagttagcgatgacgccatcagactaaggctgttcccattctcactaagggaacgagccaaaagttggtttatttctttaccaactcattctatcaacacttgggaggaattggccctgaaattcctatccaagttctttcctcctgcaaagattgccaagttgagagctgatatcaataacttcacccagcaggacagtgaatctctttatgaagcatgg

SEQ ID NO: 280258 - DNA, 546 bp, Cannabis indica
gtgtaagtatacttcatcgttgattatcacatcagtgtaaatccagtgcactgatgaatcagggacattgtcttttgaagcatataatcacaatcacattccactatgttgacatcactgtaactgtgaatgactatatgttctggacttaacaggttttgtatatattaaatcataaatatgaaaaatacatgtaaacataaatggcttctaatctttttttgataacaaatcagattagattgaaatgggttttatttagggcataaaatcccaacaaacttccacttgcactaacataaaacaagtagtgcatttcaatcaatcaattgtgttgatatccggatcaagtgtagtatatttgactcaacccaaattactggaactgtaagcctatggtaagctactgctttttccacaattacttcctttgtgttcataaaacattatgcaacactatttactatatgcattactcatctaggaatactgaattcttcagcgcttattaagtgcatctgaatagacagaagacatatctctcat

SEQ ID NO: 280259 - DNA, 518 bp, Cannabis indica
tatataaaaaaaggcctatttttaaattttgccccaggcctcttctcaccttgagacggccctggccgcacactgataattcctcgacatcctccattggttccacaattttttcggtccccacccaggggtccaactcatcttcatcagccatttctagctcaacggtttcccggaccatcagtacgggcaggtgggtcgcagcattgtaacattgccttgcttccccctggtttcctctcaccattccgatcccagcttcctaggtagggaactttaggcacaggtgccgaatggacgtgactgcgccaaaatctaccaaggccggtcggccgaggatcgcgttgtaagcggtcggacagtccaccaccacaaaagtgcagtatttgaatgtgctctagggggtgtccggacacaaggtgactggaagtcttacttttcccattgtgataagcgtcgttccattgaacactgtgagttgggacccgctgggtgagaggtctcggtccgtcaagcct

SEQ ID NO: 280260 - DNA, 318 bp, Cannabis indica
aagatacaaatgccatagataaaaaaaaatcttggaccaccactactaaataaactctaagtttgatttgcccatacaagtaggagatttttaagattgagtattttatcaattcgggatagaatttcgggcttataatcaaatacgtcattcaatttcttaagaaaaaaaatatagaatgacaggaaatgatttatagaccattcatccaatgatatgttattaagctaatttgaaatgaataagctaaaaggaattaggataatttcgttttttaaataagaatccaacgatgcttcgattagcgagagtcaaagt

SEQ ID NO: 280261 - DNA, 782 bp, Cannabis indica
tgtggcacaatacagaaacaaaaacaaaaacttagaaaatgtaattaactctaatcaacttgacagtaaaacaccgaataaaatttaaattacacaacgttaatctcaatcaaacttgcgtagtacattctgaaataactaaacagtggtatacctcatcaactacttcttcctcattggccacagcctccatgtacttcatgacgtatacaccgcaatctcggtcattgtcttgttgaggaagcccgcgatctttcctgtcaattctgaaatccacgaaagtcacattcttcgacctattctcctcaaacaaaaggtccaacgtcgacaactgcaaacgtatacaattagttagattcaatgaagaatgagttcacatcaaacaatgaaactttgcaagtttaccatttctttcgtagcgtccacacgatacttctcatgcattgcggtgtgtagggagtccagaaatgagacaaccttggacttcatattaacttcggcaccaaaccaatgtggtgcaccttctagagtcaacaccggcacaaacatctacaattgaatagaggaacaataaagtcaaaaataaattgaaattacagaccatatagatattcgacactacaatgaccaatatgcatcgctaacatatctcagttttcaaaattacaattaagaacgaccatgtgtatatgatgaagtaccttgacgcatttttggaagttgtcttcgtaaaacagttttgaccattcccggtctttcgcaatcctcttcacattaaacga

SEQ ID NO: 280262 - DNA, 336 bp, Cannabis indica
attatcaagatctgaatctcgatctctttctctccttccttagatgttgattctccttcttgttgtttggactctccacagtcttacacactatgattgagatactacttgatgtgtttgggcactactctatcactcaaggaaatttcgaaattgaagagaggaaaagagagagagaggggcggctatggctttctctgaaagaaacaatgtgcaagtcatagtttcctgaagccaacactttctatttatagaatgccaactaggtttaggttagaattgtatggcattaaaataatgaaaaaaattaaatggtaaaaggcttgcatagtggcc

SEQ ID NO: 280263 - DNA, 676 bp, Cannabis indica
aagtgattgatttaaaaactccctatgaaaaattgcatggcactacacctaaactgaatcacttgaaaatatttggctgcactgcatatgcacaccagaaacttgacaaattggaacctagggcaattaaatgtttctttcttggatatcctaagggtgttaaaggatatagactatgtcatgttgaaaatggaaaacctaagattatcatatctagggatgtagtctttaatgagcatgatttcatgcacttgatagccaaggaaggcaaaggttctgatgttgcaggtactaacagggatgaccttgctgagttggagatcaacactgacaagattgaagtctccattgatttaccccacacaccagaagcaaggacatctcttgaggtggaaacacagggtgcagacacaactgaggctggtacagatacagctgaggtggaaaccagtcaagatgatcaaccagatttgaccaactatcaattggctagagacaggtcaaggagagaaattagacctcccagtaggtatgctgaagctgatttgatagcctatgccctggctgtgatacaatctgagagtgaacctgaaccaactacctatgaagaagcaattgcatgcaaatcaaagaagaaatggcttgctgcaatgggagaagagatgcattccttgaa

SEQ ID NO: 280264 - DNA, 555 bp, Cannabis indica
cctttagtgttatttatgttattttagtgtgagggggcaaaatggtcattttgcaccattattgttttgtccttttgtggacttagtatgtggaaaataagtgtttattatgttaagtgttgtctgaaatataagggaattaagtttaattctttttgtttattcaaaatttcaaagttagaaaaaaaaatcaaagtttaaaggaaagtctctttctctcaaaccctctctctattttcggccccctttgagcagcaaggagccttggtttttctctgagattcaagcttttgttggtgttttaatcaagctaggttagctccttatcttcttctctttaagtttgttgaaatttatgaaaatatgagtgttgcatgtttgatttttgatgttgttgctgctgttagttgttgttgttgtttttgtgtttaaaatgcttgaattgaatagattagaggggttgtaatgcatgcttgttacccttgtttaagtttttgaaattttagtacacaagctatggttttcaaagaaattcttgattttcgttgttgtggt

SEQ ID NO: 280265 - DNA, 428 bp, Cannabis indica
atctgaacggaaggagacatttaattccgtgcacccaatgtaaggtttctaatactttatatgtgtttatttcgtaattcgttttagaagttcatatttagggtgttaatcaacatacttgtgagtagatctaagatcctggtacaataatttccaacattaggtttctctatgtcttcatggtatagaatactgaaagatagtgagttggattcaagttattaaagtccaaacttccatcccggagttctcaaagtcaacctgggttacttgttatgactcgagactactcaactctaagatgtcatctttctttccacgtgttaaacattgatgtttatgttatcaaggctacttttgatgtaaacatttgcgccccaagtcaactttacacttgtgtgaggttgacttaatgacgtgaactaagt

SEQ ID NO: 280266 - DNA, 747 bp, Cannabis indica
agattaaataaatgattaattaaaaatacattattttaaataatgagctttaatcaagagatattcgatctccattgttggtcttacaatagttaaatgttttcaatataacctcgagacgctagacttcgtcccccttatggatggttattcgttgaaagcatttaacaccgtaagatctcatatgataagtgttttgtaagtttttcgtgtctattagactctcccctacggtgactacatagagataaatttacagaacatgaaacaatggtggaagctcataaaatgagaataaccttgactcttgcctaccgggacaacgttggattctcactttgatcgaataaaaggttgctaaaatggtgtctaccattttagatgagctgactactctattcaactaatgttatctttgactctcgcctaccaggacactatatttcattatgttggaaaccttggaaaataattaatatgtttagattttagtatttttgcaaacatatttgctttatttgttattttttgaacttgtgtatgaatttattgaaccaataatttattttgtttattgatatttgtagtgccaaaaatgtacaacccacactgcaatcctcatctagaatatgcctttaggaatgaacttcaaagtgtgaagaggactcctggtcagagtatcacttcacacttgctcatgatgaacgtgaaattaatttaattattttatctgaagagtagagagtt

SEQ ID NO: 280267 - DNA, 478 bp, Cannabis indica
caagaatagcagtcatctcctcaacggtccactgctccttttaagcattgtagcttgatctgatcgaatcaaaattgagaaggaatggttacatcacaaaccacaccatgtaatcctcaccaagatccaatcccatgcccttgagcttttggtaacaacccatgagcttgtcaatgtgagctctaatgtcacccgtatcagcgtaattagtgcgatggaacaaagttaagcactcatttttctcattctttgagaacttcttatacttttccttaatagcagcaagaaaatcttttgcattttcagtttgaggaatactatcacgaatggactcatccatgtgatacctcataagcatcaaacaacaacgattggaatactcccaattttcataggatttcttatccttttcagtggcatcatcagcaggtttaggaggcgcatccattctcaaggccaaatccactctcataagagt

SEQ ID NO: 280268 - DNA, 597 bp, Cannabis indica
gaactcgtggagcagttcccagactatcgttacatatgcggccattctttcgccgcgcgtttgatactctcctgatatatggttcacgaccagttgggagttgctgtagacctctactctcttggcccccacagcctttgctaatctcagccctgctatcaaggcttcatactcgacttcgttgtttgaagctgagaagtcgaactgtagggctgcttggagtcgaagtccactcagggacatcattgcaacccctgctccggatccattttcgttggaggctccatccacaaagactttccatgttgggatcgacggtaccggtacgttcgcggttgcctcggcttcattacatttggtgatgaaatcttccaatgcttgtccctttatggagaatcggggtatgtagcgtaagtcgaattgacttaactccattgcccatttgaggagccttccggacgcttctggcttttgcatgactttccggaatgggtgattggtcaacaccttgattgggtatgcttggaaataaggcctcagctttcttgaggccattaggaggcaaaaaacaagcttttcgatgacagggtatcgcgc

SEQ ID NO: 280269 - DNA, 561 bp, Cannabis indica
agtcaaattcagtcaaatggcgaaaaactgggacaaacttggaaaaaaattggaaaattcggctccagacgcgtcagtagtcgcgacctccagagagccaggtcgcgaccctttttcctggtcgcgactctggtcgcgacttcgagaattggcagaaactcggtttttcgagttttgcctgtagtcgcgaccagcttaaatgctagtcgcgacttggtacggaaatcgcagatttgacctaattttgatttttctctcaattggaggcacacttctcatccctatataaggaatacgacactgaaggtcaaagcaagcagaaatagacctaaatagtggatgcaagtggagaggaagctatcttgaagacccggagcgatatcaccttctagtttctttcttttacccttaatttcttctttatgtttgtttttgtttctgaattaatcatggatgtttttagagttattatgaactaaatttcccaataagggaggatgatgaatgttgtttaagtttatgcctagttaataaataattgccattccttcatcttatgtg

SEQ ID NO: 280270 - DNA, 502 bp, Cannabis indica
gtctctattatcttgatggaaaaactgtcacaccagctcatgctgctgctgttgacaaatgtaattcagaatccaagttatggcatgctagattgggacacattggtgaacaaggtttagttgaattatctaaacaagggctattacataactatactcatgctaacctacctttctgtgagatatgtgtacagggaaagcaacatagaatcaaattctcaactagcaactacagagcaaaatctgtccttgaatacattcatgctgatctgtggggagccagcaaggttaaaactcaaggaggtaaacaatattttctgtccattgttgatgactttagtagaaaagtctgggtattttgctaagaaataaaaatgactgccttgaagaatttaaaattggaaaactcttgttgaaaatcaaacaaattcaaaaataaaagtgttgaggactgacaatggtttagaatttgtaaatgatgagtttaatgaattgtgtttaa

SEQ ID NO: 280271 - DNA, 635 bp, Cannabis indica
attaatggtgaaaaattcttacatttattacttattcttgccaggtaataataattgatatatacaggtaatagtaggagaaaaaaaaatctactaaaaaaataatagtagaaaagaaagaaaaaaaaataaatttttaatgtttttttttttcttatttgaaaatttaatttatttataaatatttatttatgtatgctaattaaattgtgtcgtgtgtataccataaatacatgaacagtctaccatggcatcatggtagttaacagcaaaaaatggataaaaatatcaaactgctaagagaactcgaatttgtcgccaaaacataaattttgagagttaattagtagcaaggtagaacttctaaaaaccagttctctttcacctaattggttcttcttctctaccaccttggctttgtctttcctccaagcttgttgcaaggtgacggaacacattgttataataaacccgatcactttgtggcatctatgttaaaaataaaattgtctcaaaaatttactaacaaatgaatcaaatactttacaaaaatctatgttttatataattttgttcttttaaacaatcttttctttaaaaaaaaaaaagaaaataataataacctgattcaccac

SEQ ID NO: 280272 - DNA, 1124 bp, Cannabis indica
atctaggggagaggaaatctgaaaaccatacttgaatggaagattgtacaaatacgtccaacccgatatcttccagtcagcccgttccccgctagccgaagcgtacaaactaatgtgtataggaatattataacgacgacgaatttttggcaagtcattcaaggttattactgacctaggattaacacccaaaagtatatcgcccaactcactatcactcctagggcgatcagtgtctactccaaccccaaacgcatagcgatagacatccgtatcctcacacccgtcatccaacacataacctaccaccccagtaggattattcgaaggatcatcagacaaactggtcgtcttattagacgaagtggcacaactaccatgattgctgatagacgtagcaaaaaacccacctagaacaaagatactggactaagagcgagttcaccaaaaacataatcatatagaaagcaaaataccggctagacagaacaaaaagatatgtatatgtacaactaccatgattgctgatagacatagcaaaaaacccacctagaacaaagatactggactaagagcgagttcaccgaaaacataatcatatagaaagcaaaataccggctagacagaacaaaaagatatgtatatgtacatatatcagctcaaggtggccaaaaataactagacataaaaatggacgccataataatgctcaccaactggacatacgtgttctaaatagaccaccagttatggtcctctaattaactaaaggaagacaatattctagctagccagaaaatcattattcaaatcacacttactactttgcaaagacaaacagtaaaattgtagatttttactacccacgaagatcaaacacaaacacaaacatacaacaagtaaaatatatttactcatctacatcacaaaaataaatatgaatgttgtataccaaaatggtacgttttacatttatcaactcgcaagcgtacgaatctttattgtagtacggagattgtgaagaacgaggtcgaacccatgggaattgcgtgagatcgaagaaaatacttatttaatctaagttattacaactctaacctagtttcgaaaatggtgaggttttt

SEQ ID NO: 280273 - DNA, 432 bp, Cannabis indica
gaggagaacatccactgcatccggtggctcggggcaaaacaagaggttccgggggaaccagagtagaggcagccgtcagggtggtgctgagacccggttttcgtacccagagtgccctagttgtaaaaggcaccatctgggtgagtgcagaggtcagggatgctttcagtgtggcatgcccggacactacaagagggattgtccccagctcagatcagaggcacctagggctccggcgagacccactccagctagggtgttcgccatcactcaggctgatgcagaagccagcccctcagttgtaacaggtcagctttcggttaataactcatattactcagtgctgtttgattctggggccacacattcttatgtggcagccagaatctttagtaagttgggtagaccgtttgatagttatgaatcagggtt

SEQ ID NO: 280274 - DNA, 661 bp, Cannabis indica
tgttcttttgttatgcttattatttgccttcttttgttatacttatgagagccatgttgatcatgttcggtccatattgttactcacgacctagtctctgtgtcatcataggtagatcagatgtgcactcccctgtaggtgaaagacctagaatctgtaaatggagtgaattaaattttgagccccggtattatggtgaatatcagatgcgactacccgatttcggatgttgttttctatgattggtattgagagctaggggtctagtggacggtgtgatatgcatttgagatttgatactgctgatgagatattttatttttacgaagctaaccatgcatgaattttattaaaccaagggtcctttgatattagtttttttcctactgggctttataagctcaccccctattttctcccattccacgaactcagtttgatgctagtggatgaggatggtaccgttgggaaaggaagtcgttattagtttagtcttatttcactctttcatcttctaatgagactgattttgtatttaagctgaaatggatggtctggatgacttaaattagctatgtactagttagaaatgaggaatgatggatgctaggtattattttggtattttattgacttatttaatctatctatttggtgatta

SEQ ID NO: 280275 - DNA, 835 bp, Cannabis indica
ttagtagtttgggacggattattagacattgggaatgtcgggaatggccgggaatttagaatttcccaaaaatacccctttagtatgatttatgtgattttaagtatggaggggcaaaatggtctttttgccccaatgatattttgtcttttagtgattttattatttgaaaataaatgattatttatttgttatttggctgaaatagattaatgtttaaagatttcttttcattcatttttcattcaaacttagaaaatagaaaaaattgcaaaactctctctttctttcctctcactttcggccacctaggagcagcaaggaattggtcttctcccttgaagttttgattgtgaattcatctccttttaaggtcgatttcaagctaggctagctcttgttatttccttctttaatttgttgaaaaaaatgatgaaaatgatatgatgcatgcatgaatttgtaatgttgttgctgttgtgattttgttgttgttttctgagatgtaagcatgttgattagagtttaattaagcttcttgtaatgcttgattgttagattatttaaaattatgatttttctatgcaaaaatgtgatttttgaagaaaatgttgtgaatctgttgctgggttgttgcttgatgttttagttgttttcagaggttgtaatatgcttgttttagtagatttaatcaggtttgattgcatgttagggggggtttgctcaagtttgagtttagaactcaaagcttgagctttaatggtgtttttcatatctgtgatttctgggttgttttagtgctttgaaaatactctttggggtgtttagagcaggt

SEQ ID NO: 280276 - DNA, 606 bp, Cannabis indica
cctagctttagaaataccctagttttaagtctaaagggcattttagtcttttggttaagggtgagtgaggtggctgcccaagtagttgacacctagcacattattttttcagcaaagagttaattggggaaaaccattttcatttgagaaaattagaagaaaaatcaaatcctctagaactctctctttcttgctttcggctgggacaaaccaagggctaggaccagaattttcttctcttttctttggaattaaggaaggattcaaggcaatttcaagtgaggtaaaaccctagacctttgattgttgttttttttaagctttttatttaggttgaatatgtgaaattgtaaattaggggctgttaaggtttgaagtgcctagggttcgaattttagggtttagttgagttgattctaagtcctagctgctggttttaaggggtgttgatggttttatgcaattttaagtttagaattcaaagctttgagctttaatggcataatttgatttgttggtttgttctgtgaattattggttggaaatggttgtttatacattgtataggtgtactggagagtttggtaaggtttgggattgaattga

SEQ ID NO: 280277 - DNA, 231 bp, Cannabis indica
atattgatttattctaagacagaggaggaacatgaggagcacttacgcttgaccttgcagcgactaagagaacatcaattgtatgccaagtacaaaaaatgtgagttctggttgtccgaggttgcattcttgggccacattgtcactaacggaggaataaaagtagatcctgccaaggttgctgcagtgaaagaatggcctagaccaaagaccacctaagagattcgaagc

SEQ ID NO: 280278 - DNA, 622 bp, Cannabis indica
aaatacccctttagtatgatttatgtggttttaaggtggaggggcaaaatggtctttttgccccattagtgttttgtcttatgtgactttattatttgaagattaaatatttattttaaggattagttggctgaaatagttatatgctaggtgtcctttgtttattttcattttacaacaaaaaaatactaagtgaagaaaagaaagaaattttcaaaaacactccctttctctctcaatttcggccaagcattggagcagcaaggagctggttttctccattgattttttacttgttaattcatctcctcttaaggtccattgcaagctaggttagttcttgttcctccttctttaatttctttaaaaaaaaatgtgtaaaaagtgatggttgcatgtgaattgttgtgatacttgctgctgtgatttgttgttgttttctaaggtttagtcttgctattttaagtagtttagagttagtgtatgcatgatggttacttggaatcaagttttggagtttttagttcaagagcatgaattttgaatatatatgttgaatctgtaaattacttgctgtagttgattgttttcattttcagaggcttagttatgcataattatg

SEQ ID NO: 280279 - DNA, 798 bp, Cannabis indica
cacacagagtcaaatgtcttggttctaggcatacctaccacaaagtccatagcaatgtcttcccatttccagtctggtatcttcaatggttgcagcaaccttgcaggtccctggtgctcagctttcactttctgacacataaggcactttgcaacatattcagcgatgtcattctttatgcctgcccccagaacatggctttcaggtcttggtacatctttgtcgaccctggatgaactgaataaggagtcgtgtgagactcatccatgatctctttcttgatgttttcattcataggcacacaaactcgacttccaaatctcaacattcccgtttcatctactgagaaatcactagccttcccagccaaaaccctagctcgggtttttatcaactctgaatcttgcttttgtgcttctttaattctctctaaaagagtggattgtagggtaatattagccaattgccccacaaccaactcaatctgagctcgagtcatttcatttgctaactgtcgggagatttgcttcatagtactcaactgactctgaccttttctactcaaagcgtcagcaaccacattggctttaccaggatgataaaggatctcacaatcataatccttcaccaattctagccaacgtctttgtctcatattcaagtccttctgggtgaagaagtatttcagacttttatgatcagtgtatatctcacatttctcgccataaaggtaatgccgccaaatctttagcgcaaataccactgctgcgagttctaaatcgtgagtagggtacctct

SEQ ID NO: 280280 - DNA, 777 bp, Cannabis indica
gcaaagcttgagcaatatcctttcagaaaaagagaaccaatgacccctaacataaactcttcgataaagtctagaattctcatcaaggaaatcatcagtgagattagcataaaaatccttaacaatgtttgcaatgtatccaatgaaaccagtaagagtattttcccattgatgaaattgaataaactttacaataccataaacacgatgagcatgcaagtcatagttcctctcactttcaaacttacggtttgcatataaattccagtcacgttcattgtcacgataataaaatcgaggacagccagaaagagaggaagggacattaccagatgaaggatcttccatgggctgcttgcctttggcagcagcagaggcctttgctgcagaagcagattttggtcgaggaagctctggctcgagttctgtgtcctcactgtccttctcagagtgaagagacactgatttgtctgaagaaacttccattggatcctcttcttctgaactggaacttgatgaggccgagggtggattagtcttgagtttcttcttggctggagggactgtcttctcacgagattgagaggctcgaagttccttctcagcagaggcttgctgggctcgagttcgagtagaagggcctgttggagtggagccaggcattgatgcagcaggaggtggaactgccaatggaggaggagattcctttgaagattcagacgaggaagtccaggtgcgaatgggtcttaccgatttgcgagcaacttgcttgggtgg

SEQ ID NO: 280281 - DNA, 646 bp, Cannabis indica
tctacccgacctgagtactttgtttctgaagcctttgcgcgtagtccgcctaagaggccattgacttagaagcgaatgttcaatagtactttaatgtggtctacccgacctgagtactttgaagtggtctatccgacctgagtactttgaagtggtctacccgacctgagtactctattggtagtattttcttaaatgttctccattccagtatcgtggtactagaatgagttgcattttttcgtcatacttacccagtttgtatgcttcggagtcgagaacttcgaccacctggtatggtccttcccagttgggtcctagtacacctgacgtgctgtctttggtgtttaggaatacccttcttaggaccctctctcccactaagaatttccgagccttcacttgtttgttgaaatatcgagctactttttgttgatgagctaccgactttaagtttgcagttgctcctttttcttcaatttcatcaagtgattctggaaggagtatgtgattggtaccttgatcgtacgtcaaccttctgtgggacggtggctcgagttcgacgggtagcatagcttcataaccgtacgccattgaaaatggtgtctgaccggttgctattttttctgttgtacggtatgaccat

SEQ ID NO: 280282 - DNA, 554 bp, Cannabis indica
atttatttattcgatttattaacaacatgaaaaaaaaaattaacatgataattttgctagtgtataatttatatattcattaaaagagttaccacacaactaaaaataaagaatggaataattatgcacatattgtgtaaattgtttgtattttccacactcttatagactacccataatgaattgtgccattcaaatatcatattttgagatatggcaacaaaatttttacagaaaaaagtaaaaacttgctatcttaacatacctggtttataacttatccttttatgtatcatatattttgaataaataagaaaaatggtactaataaaataaaaagaaagaactgaattaaataaaaactcaactgaaaaaaaaagagagagatatatgtattcttttttttttgtagaaaataagagatatatgtatctggtatacattatattataaaataatctcattttgtatgtaaataatagaattaaaaacatgatgtattgtgagatcttgatgagagaggagagaacaaaaacataagaggtgtttgagag

SEQ ID NO: 280283 - DNA, 577 bp, Cannabis indica
tagtttactgaagtatcatttataggttgctaaggcttttaaagataaaatacattgaagggtagaacggtaaatttgtccctattcagtgtagatcatctatagaggcatttgactattaggattgtaacaatggataatcataacatatctatatcgtggtacatataaagcgttctatataattggtagtgctattcaattctaaatgtatagtggcgtaaggcaaaattaataagttagagaatttacttggtgaattctaaatctacttattcaaagctcggttatataggcccatggtcccctcactagttaagataatactgcctgcagactcagttaattggttttaattaatcaattataattttaaaattaaactatttcttatttaagaattttcactaagcaagggcttaattatgaagaaaagaggttttgggtcaatttgttaattaagagactttgcatggtctaattaataaattacataaatgacaatgttatttgataattaattattattaaataaatagtttttgcatttataggattgaattggaaaatatggtat

SEQ ID NO: 280284 - DNA, 397 bp, Cannabis indica
ctattaccgaactgctcggggctaaacttttataaaattcctgtgtcttattattgctttatcatatatctgttactacatatcgtttatcgcttataaaatagactcattgtcgttggctaaaagcgaagtcaacagttggaattgagtttaacgttggttccttctcacgaacaatatctataataatcttatttttcccccaaactcaacatcctcaaaattattaaagtttctcatctgaaaattgaaccatagtgtgggatcacaaaatttgtagctttgtttttaattactagagtatatagtaaagtatagttccttactattttggagtccatattccttttatgaggcttataagacctcatcttaatcgaacatccacaaataaaat

SEQ ID NO: 280285 - DNA, 450 bp, Cannabis indica
cactataaataaactgacttgaccgtcggagtgccttcggccggcaccaccccggtgtcccaaggtttcacggtcatcctttgtctttgttccgcaggttgtcggtgcccacaaacgctcattccgatcattgtagattttagcgtctacaatttggcgcccaccgtggggccctgacaaactgactgtgagcaaggcgatctatcattaccacacttcaaatggcagaagaaggagagtttgttgcccaggaacaacccaatgtcaatgaacagcttgccacaataatggcccagatgcgcgagatggctaagcgaactggagttctgaagcgagaaaatgcaacctttaaggaggagaactcatcatttaggagtgaaaatgccacaataaaatcacaaatggagtcactgaaggctaccatgacgactcccagtgttgctcaaagtc

SEQ ID NO: 280286 - DNA, 609 bp, Cannabis indica
tttttacggaactcgattctgattaaaaacgagaaagatatgaggttttgaaatttttgatgcactgagtctcgagcatggagcaccatgcgcgcaggcacttagacaaggagggtcatgcacccgtgtcccctgtctgaatccttggtcagcccctcgtttagacaactggtgcacacctaggaccttgcatgtgaccgagtgtaacaccctaactaacctaggcgtgttaacgtgattttaaacttgctctgcagctcgttgctaatcaacgaggttaataaaaacgcgattaattaaaatttgcttttttcattaaaatttataatattacatacaaaatatttcatgatcccgtttacaaaatactttacaaaagtttgctattcatttacaaaatatttgtcgcccagcgactaaccacaaaagccctgatgtcccgagaatcgtacactccaggcctaaccgatccgacatgtacaatcttcatctgctcgccctcacggttcctcggccttagccttgcccttacctacacataaacatagcactgtgagtcgacagacttagtaagaaaagcataaatcatataacatacatatatctcgg

SEQ ID NO: 280287 - DNA, 678 bp, Cannabis indica
ttctcggttccttgccaagtccagcagacatagccttgggatgcacgtggatgccagccgcctccatggctttttgcatggccagcattacctcttgcatcttttggttttgtgctttttgggctgcgatctcagcttcatgatcgacagccttttgtcttagaagcaccaactctgagtagctaccgtcatcgtaggcgtactcatcgaggtttccctcgtaatcatcatcaggaattccttcttcttcctcggagccctcagctgctcttgaggctacgtcttcctcattcgggtcttgagcatcttctagagggcgaggttgacgagtgcttcgagtctccaccattgttgtaatatgttgtgtgtttacagaagctttcttcagctctcaatgaaagcaccaaaatgttgaccgaggttttcggcaaccaataaaataataaaagattaaagagctgtaagaaattaagagaaggatttttacgtggttggggcgttaatgagccttagtccacgagtctgtatatttatgagtgtatttaatacagagaatgttcttggtgagtatttactcttcttgcacttatgcaacccaaaattctcgaccccattaatgagctttgagggggtatttatagtgtttttggtggggtgattcccagaatcatagtacat

SEQ ID NO: 280288 - DNA, 557 bp, Cannabis indica
ttcagaactagaagataacatcttcatcaaagttttaggaaattaaattacctttccaatgataccaaaatctttgaaattggaattatattcaaagagatattacaattttaccaaaacagttttgcaagaacaagattctagaaacgaatcacatgatattgaaacaaaactaactttttgacatagtatgacttcgaattaacaaaaagtttcttcataaaacttatgggaaattgaataagctttaaaaccacatatagatcattaaaaatggatgagaattgagagagttattgtattttaagtgaaagtattttttctggaaatataaagaaaacaaattacaaccatagcagaaagatgataattttcgacttagaagaacaccgaattggttattcatttcttgataaaaattttagatcatcgaataagctttccaacgatacaaaaatctctaaaaacggatcaatatcaagagagatatcatcactttactgaaacttgttttttcttctaaaaacgaaaaatataataggtccgaaccttagata

SEQ ID NO: 280289 - DNA, 509 bp, Cannabis indica
atacgaaggaatagtctaatcttgtaaaattccaaggttgatatttttggctatgatgttaagaattaaagaaggttattgagaaccatggaagttaaagcgaaaatagtataatgctttattcttgaaaggtgggtaacctgtgaagatcaatagaatattagaagtatactgtgagcatatttgataaaggttagaatatcttagaataatatcttcccttatgaggtgtttatttaaaaagtgataattaaatgtaccactggttaggtaccttaataagtgtggtacaagagaaatattatatacatgttcactggattaaataggctagatagcctattagctagccttaacttctgcgtcgtccggagtatataatgtgtttcatgtctccatgttgagaaaatatgaatcagactcgacccatgttcttagttgtgacgatgttaaacttcagacaaatttattatatgaggaaaatatcttgtccagggtttggactagaa

SEQ ID NO: 280290 - DNA, 771 bp, Cannabis indica
ttaggattttctttgatagctctgtccggctgcatgatttccacaaaatctgtcgtgaacttcatatagaagccgtgcaacttcattttgtgtgacgcatctgagtaatggcattgagaatcctcttctgtacatgatcccttctacgatgatgtaccgtgctgcctttcttctcattttctgaacttcatttcggtaatctgggagttccccagagttgagataggctgctattggagtcatccagttcagagatgtgtcgatcatttcaatttcttccgtgccggtgatgctaggctcttcaagaaactggatcgagaccaggttcgccttgtcacttatattagtgctccccaatggggctaacgcatctgctgttgtattttctactcttggaatttgcctaaggctgtagcttttgaattgtgcgagcagataatgtattttgctcagatatgttatcattttttctccccgagcctcgtattcgccagatacatgatttaccactagctgtgagtcactacaaatctcgatgtgctcgaccttcatctcctttgctagtttgagtttagcgattagggattcatattcggcctcgttattggaggctttgaatctgaatttgaccgctgcatggaggtgttgcccccaggtgtgacaagggcaattcctgcgccggatagctgatctgtggccgacccatccacatgcagcttctaggtcggcttgttttcagtgttgctcagttgtggtgttgactcgagatcg

SEQ ID NO: 280291 - DNA, 476 bp, Cannabis indica
gggcataaaacccaacacaagcatgtatcatgcatgctccttgtgaatccatgttgtgtaatgaagctattgaatcttttattccattgtcttggagcttgttttaacccatacaaggatttcttcaagagacacacatgatcatttttgcctttttctttgtaaccttcgggttgttccatgtagatagtctcttctaagtctccatgaaagaatgcagtggttacatccatttgctccaattctaaatcaaactgagtaaccaaggccaacattatccttattgtcttgtatttcacaactggtgcaaagatttcattaaaatcaattccttctttttgactaaaaccttttgccacgagtctagccttaaaccttggcatttcatcatctctaaaacctggtttgtgcttgaaaatccacttgcaactgatcaccctttttccttttggtcttggaaccactatccaagtctt

SEQ ID NO: 280292 - DNA, 597 bp, Cannabis indica
aattaattattaatatgtaataaaagatattagttattatactattacttcaaacaaaggaaagttctagcggtgcttctactttctaatcataaacctcaattttggcttctttaaccagctgccacacacaagttacttactctgaatttataaccatttacaattttttaacactcaaaaagttaccgagtttgttttctatagctctacttattaaggtagaaaaatatttttagattgactccattccgtttattaaatgaattattttcaagttgacacattaacttaaaaatgacacaataatgacctactacaaagtatacacttatattcattctatttattgagaatcaaaacttcaatcttcttcactagattagccagacacacataatatttggacataaacacaggacacaatattataactcaaactcagaaacacttagtcgaaacttgaatgaataatgccactcttttaagttttaagactgtatatgactaggcattttggttattgtattatcattcctgctacatagttgatcatttttagatttttgatgtgaaatttcgtattgtgagcttttt

SEQ ID NO: 280293 - DNA, 732 bp, Cannabis indica
aactggacaagcctccttggatgcattctccttataaaataagcaacaattatacaaacagacatcgatataatcataacccaagcctaatttcttcaatctcttttttgcctcgtagtaagttgatggaatattattttccttcggaaacgcaaactttaaaagcttcaataattcttcaaagatgttattaggaatttttcccctaacttttaaatgcaatagctttgctaaaaagttgagagacgaaatccaatcacaaccgggatacaattcagcttcaatttcctcaaataagtcatcaaactgagggtttgtggttggttgttcatcttctccttgtacatcctctgttgttgggggaaagaagtcttctagaataggaatcatttcatcctctgattcaacatcggcaactgctacatcatcgacaacatcctcaggctcgccgtgataaatccacttatcatatccttgcatgaaacctcgatcaaatacgtgtgctctaaccctatctattttttcaaacctactatttatacatctcacacaaggacatcgaattcttccatcacaatccttatgttctgatgccattgctaaaaaggcttgtagaccattccaaaattcatggcaaccacgatttctgattttggtccaagacttatcaattgtcgccatctacaatttaggcgacaaataaagtgttacaaatttgaatgatttgttaag

SEQ ID NO: 280294 - DNA, 846 bp, Cannabis indica
attaagttaattttattttctaattgtttgttttagttaaactttttttttaaaaaaaaaaagaattaaaaaatcaatgactaggtccaaattggaatactcatgaccaaaataaaaaaaccatagcaatttattattgaaatccccaattaataaatgacaaagttttcatttaagattcaatatccaccaaacaatgcatatagtcatttcaataaataataataaaatgtacataccaattttatacacacatgcatggtattctcataagtattacaatttacaatacaaaaaattggataatcttataataaaaaacatacttaattttcccaatctatttggatatgtatcaacataaatggtatgtacataaatttgaagatttttttttttttacataaattgctttccaataaaatcaattttttttaataaaaaaaatctgattttccttatatgatatacgaagataacacttttcatttttggctccataaattgtatgtatacactacaacctatatatacacatatatactatacaaatttacacacaaaaatctcaatttcactaaaataaaaaacccaattacaccatgggagacctttctccaaatcaacaaccccacatactcattgtcccaacaccaggaatgggacatcttttcccactcatagctttctcaaaacgacttgtcgtacaaacacaacatagccataaccttcattgttccaaacgacgggtcgtcttccattgaacttcaaaagaagctcttcaatcccttccacacccaatttcctcccaatttcttccacctgtcaacatggacgacctcacag

SEQ ID NO: 280295 - DNA, 537 bp, Cannabis indica
atctggcttttgcagtatttgtcgtagtagttggtcggtgtacacccgaacaggatgagcttgaaagtaaggtcttagctttcttgttgctaggatgaggcagtaggcgagcttttctatcaacggatatcggccttcggcctcgatgagtcttttactaatgtaatagactggatgctgcacgccgtcttcttctctgattagtacggcgcttatggcatgcttcgttattgctaggtatatccccagttcctcaccgtccagaggtttagaaaggacgggaggttttgcgagctgtgcctttaggtcttgaaaagctctttcacattcttctgtccattcgaactttttgtttcctcgcaggatgttgaagaatgggacacatttatccgttgattttgacacgaatctgctaagtgcggcgattcgaccagttaggctttgtacctctttggtttttgttggcgagctcatatccaagagggcttggattttttccagattggcttcaattcctcgagcattgacgatgaagcc

SEQ ID NO: 280296 - DNA, 647 bp, Cannabis indica
tcgatggcgcccttcagtgtttttattattttttctttttcctccggatctaggttcttccctagccggagtactttggtggagtcgaggtcgcacactgatacttcctcgacgtcctccattggttccacaattctttcggaccccacacgggggtccaactcatcctcttcagccacttctggctcagctgactcccggaccattagcacgggcaggtgggttgcgacattgtaacattgtcttgcttccccctggtttcccctcacagttccgattccggcctcccgggtagggaactttaggcacaggtgccgaatcgatgtgactgcgccaaagtctaccaaggccggtcggccgaggatcgcgttgtaggctgtcggacagtccaccactacgaaagtgcagtatttgaatgtgctctgggggtgtccgggcacaaggtgactgggagccttacttttcccattgggataagtgtcgtcccgttaaaccctgtgagctgggacccactgggtgagaggtcccggtccgtcaagcctatcgcggtgaaggcttctttgaagagtaggttcacggaacttccattgtcaattaagactctggccaccactttattcgcgatgggggtctctatgaccaatggg

SEQ ID NO: 280297 - DNA, 649 bp, Cannabis indica
caaaagttatgaccaaaacaaaaacccgaaaaaatacaataagctgccaaaaatggccgcggctactgggtttaaaaacccaggaaaccctgtttccagccacgaaaatgcatccaaaaataccaattttcatgctataacaacccacaatcataccaaactttcacctagcataaaccaagtaattagggaggaattacacctaattcacttccaacaacaccaaaaaccagcaactaaaaatcatcaatttcagcaagctttaactagagcaaaaatcccaaatcaagagcttgcataaccataaaaaaaatatcagcatctttacacaaatttattctcaatataacccaagcaaatgccttaaatcctcatccatgcataaaaattcagattataacaacaatcacataaacacaattatcaacaattcaacatgaactaatcaacatcaagagtttagagcttaaatctaacaaaattacttacaatattcagcaagaaaatgtcaacatagatttcaaattctcacattcaaatctccatctaagcttccaaacattcaaagcttagctactaacaaaatattcaaactagaatttcaccaactcatatcaattcatacccatgcatttcaagaacacctact

SEQ ID NO: 280298 - DNA, 526 bp, Cannabis indica
ttggttcttgacttgaatgaagggattctgtttctgtataattctttgaggactgcgaaaatgaatgctgcagctaggaatgccatgaaggcttattctgtgttgctgcctttgtttttcgatttacttggtttctggaagaataggtcacatgctcctgcttcaggttctgaccctacagctcccttaagaatcgtggagattagtggtctgccgtctcagcagaaaaagtgagtgtttcttttaagtttattttatgttgttttttagtttctaaactgtttatttttcttctgtttttatagtgattgcggagcatatgttgctgcatttgccgagttctttatccacggaaaggatgtccctgcggactttgatatcgaagtttatcgtacccggcttgctgcacttttcttctcatatggcaaaggaaaattgatgaaagcattgatagcgaggatgagaagcaaagcaagtcttctaaggcatctaaattgaaaaaataggatcttttattttggtgact

SEQ ID NO: 280299 - DNA, 769 bp, Cannabis indica
atttgcaatggcatacaactcatctgatacttctgcaggattatctgctcgaagttgattgatctatcattaagaaaaataatttaatcattgatgctagattaattcacagtatttcaataacaaaataagtagaaagcaatactcactcgagacttgaaccaactaggaaactcattctcttgaattgtctcattgacccctaagttgtagcttgttcctttgctcactacatgaaaaatggggaaaatgttagataatgtcgtcactaaagagaactaaattgaatatgaaaaaagtaatcttacgtgatgtacttctccacttcattacaattgttcagaatgtaccactctgccttcaatttatcttgcattggtaaagcaaacaatggtcctctgaccaattggtcgcccaacatgcttaaagacagagaattccctttcaagcttatttgggaggacatcactatttcgatcttcacgattaaatcgagtttctactacccgaaagtacaattgaaaaagaaggttaaaggcttcgttaactgcataagcttcagaaataaatccttccggtcgagaacgatttttgacatattgtttgtacacagacatggctcgttcaattggacatccacctgaagtgcattggtccccacatcgcttcttaggtaatgcatcaccaagtgaacattatgtcaaaaaatgctggtgggaaaatggttccaatttgcaagaatgtctagaatactttttgcatgatctgc

SEQ ID NO: 280300 - DNA, 600 bp, Cannabis indica
ccccattagtattttgtcttttaatgagttttttattgaaaataagtgttaattgatattaaatgttggctgaaatgaggttatatgttatgtgggttttagttcattttatcaaaaaattactaagtttaaaaaattagaaaatcggaaaagctttctctctcttttctctctctcttttcggctggttgcttggggttcaagggctggatttttcttcaattttcaagctagattcatcataattttgtgaactcttgattgtggtaggtgtttcttaatttttcctcctttattttcttgattaaaatgttgaaaatagttgatgcatgcatgttgtggaatgttgttgctgctgtagtttagggttgttttctttgattttctatgtttgaattgattggaattatgtaggttttatgcatgctagttacttggttcaagtttatgagattttgttcaaaagctttgattttgaaaatatatgtggaatctgttattacttgctgtagttagttgttttctttttcagaggcttagttatgcttgtttaagtagattcaagctagtttgaatgcatgttaggtggttttgctcaag

SEQ ID NO: 280301 - DNA, 577 bp, Cannabis indica
tgttcaagcgatgacacatgacctgcggagatattccgaccatatctgaatgtttccaagcaaaaacatcaagattttgtttcaaaaaggtcgttagttgttctcgctgctgaaaattcaacttagaacaaatttttaaaactttgctattatctacaggatctataggtacctcaatggtgtcttccgcggcttgggctgcggcggtatgatcaaggattcttggatccaaatctggttcgtccacgtgtggtacctcctcgattctgaggacctcctggcgagggggtggtgcctccaataggtagataacatttactgaccttttctccgcgagcttgactgctgtgttgtagcattctcgcgaatctgcctggactcctcgcacagaacctactccagcgggagtagggaacttcattgtgagatgatagatcgaggttatgatcttcatctccttcaagattggtcgaccaatcacggcattatatgctgaatactggtcgattactgcgaagtcagccattgatttggctgttactggggcggttcccaaggtgattgggagtttgatcat

SEQ ID NO: 280302 - DNA, 780 bp, Cannabis indica
ttttcggtcctctcgatcctgagggccaagactccctttttggagtttgcccctctgcggacctttccctttcgggaaatcagagcggacctttcgcggatcctgcacctttttctttctcccaggggtagaggtagggtttttcttttggttcccttcagcgggataccttatagggctaggttccctagacttctgctgttgggtactaggcgaggattcctctggttccttgccaagtccagcagtcattgccttgggatgcacgtggatgccagccgcctccatggctttttgcatggccagcattacctcttgcattttttggttttgtgctttttgggctgcgatctcaacttcatgatcgacagccttttgtcttagaagcaccaactctaagtaactaccttcatcgtaggcatactcatcgaggtttccctcgtaatcgtcatcaggaattccttcttcttccttggagccctcagctattcttgaggctacgccttcctcattcggatattgagcatcttctagagggcgatgttgacgagtgcttctagtttccaccattgttgtgatgtaaagtatatttgcagaagctttcttcagctctcaatgaaagcactaacatgttgaccgaggttttcggcaaccaataaaataatataagattagagaactgtaagaaattaagagaaggatctttacgtggttgggcgttaatgagccttagtccacgagtctgtgtatttatgagtgtattaaatacagagaatgttc

SEQ ID NO: 280303 - DNA, 550 bp, Cannabis indica
tgcttgagccttggagtaagctttctcctgagcctttcggtagagatattcctggtacttcttctcggcagtggcgatgatctcgtcgcggaagatcttctccgcggcaggcaccctcacattgggacagataacccttgaaaggttagagtcctccactgattggtgcggcaggatgagcttggccttccggcaattctccgtcgtaaccaggccccgacgtcgaggtccgcccggtcataagtggcaaaagcctgggctctctgaagaaagacctgagtgggcacggtctactcataagggggaatcctaacccactccgtgaggagctccggatgttccaccgctcggaacccggaggagaagaaaaaacgatggcgatactccttaacatgagtttgcctattataagggaccaccccatcattggcagggtgggcccggaatccataaaaactgtctttaagtgtcccttctgggcgaaacaagttcataaaaatcaatatctccgccgggctaggagagccccatccctgggcggagtaaaaaa

SEQ ID NO: 280304 - DNA, 620 bp, Cannabis indica
ttaatagaaaaactcgcctactgcctcattctagcaacaaggaagttgaggccttatttccaagctcatcctgttcgggtgtataccgaccaaccactacgccaaatactgcaaaaaccagatgcttctggacggctactcaagtgggcggtagagttgggccagtacgaaatcactttccaaccccgaacagcaatcaaaggccaagccttggcagactttgtggtagaatgcacaggcaaaaaagaaagcataccagaaagcaaccccgagccggtacaaatacctcagccaagtcacaatgaggacaaaccgacctggaaactacatgtcgatgggtcagctaaaaatcaactatctggtgcaggaattgcccttgtcacgccagggggcaacacctgcacgctgcagtcaagttcggattcaaagcatctaacaacgaagccgagtacgaagctctaatcgctgggctaagactagcccacgagatgaaggccgaacacatcgaaatctacagtgattcacagctggtggtaaatcatgtatccggagaatatgaagctcggggagaaaagatgatagcatatttgggcaaaatacatgatctgctcgcacaattc

SEQ ID NO: 280305 - DNA, 715 bp, Cannabis indica
aagacaatatcttgattttaaaatatataagactattttgtttctataatttttcttaaatttaatttcattcttgaaattattttcaccaaaatttgacaccaaatatgtcaaaattttcacatatgcacatagccaaacttgatttagaatttgaattcaaaatcaaataaattaatcaacaatgtctcaacacattttgattaaatttgtggctcacccccacatttctagcataaagtgtatataaaatatcacttttgtgtgtatttctcttgaaatgactctttaaggtcactttgaaaataccatttgacatttttagttttctcaacaaaactaaaatatcaaactcacatcaccacttacaaaataatgtgattatttttacccataattttaaggttatctcctcattgagattagcccaaaattataccaaagttaacaaaattctcatcaattttgttcacaactttgattatttaagattcaaaattgcttctccaattttgttatcttttcacaatttttgaatccaccatgattcactttgatttgagtctaaaattgctcttccaatttatgactcattttataagtttagatccacttttgatccatttgttcttgctatgacaagacaattctcataagtgtaactctcatagttcactttcttatctcataaaatgagataattatcacttataat

SEQ ID NO: 280306 - DNA, 475 bp, Cannabis indica
tcctcgcaggcagaacttcaaaatttcataactcatacaaatccaacccaaatcacctcaaaccttccagacctattccatataacccaaataacatttctaaagcattaaatccacccagaatgtacagaaatgaaaagtgccattaaagcccaagctttgagttccaaaactcaaacttggttaaaatcaacaaacatgcatccagatcagattaaacctacttaatcatgcatataaaagcttctgaaaacacaagaattcatcctcaacaaacacagcaacaaaacacacaatttcatgttgaaaaccaaacttttgcatagaaaaactttagctttactcaacctaactatcatgcttcacaaacagctcaaatctccttaatataaacacagcaacaaccaccaccccaaaactagcatgcaacctaccatttctcttcaaaaactttcaagaaacataagagaaagat

SEQ ID NO: 280307 - DNA, 765 bp, Cannabis indica
ttctagtttgcaaacagatttactgctacaattcatgactgaaactagatcttcaattaaagacctgcagactcagatgggccaactagcaactcaggtagcaacccgtcctcaagggaatttgcctagcacaactgaagtcaatcccaaagaaaactacaaagcaattaccctgagaagcggtaagaaatatgatgggcctgaattgccacaaccagctgatggagataaggagattaaagctcaaccagtgccaaccccaacaccaacagtagagaaggctactgatagcccagcacaaccacaacagtctccaccaattagcattgatcaccatgtgaaaataccctatcctcagagactcagaaagtcaagtctagacaagcagttcaccaaattcctagaggttttcaaaagactacacattaacattccctttgctgaagctttagagcagatgccaagttatgtgaagttcatgaaggagattttgtcaaagaagagaaagatggaggactatgagacagtggccctaactgaagagtgcagcgccattctacagaagaaactccctcccaaactcagagatccagggagtttcactattccttgtactattgggagaattgaaggaataaatgcactatgtgacttgggagccagcattaacttgatgcctctgtcagtgtttaaaagattgcagttgggagaagcaaagccaaccacagtaactctccaattggcggatcgatcactagctcatcc

SEQ ID NO: 280308 - DNA, 625 bp, Cannabis indica
tattaattattaattattgtttattattgttttattttttattgttttattaattattaattattgttttatcttttattgttttattaattatgaattattgttttagtataaattattaattattttttttaatttttattgttttattgattattgtttaattattaattatgaattattgttttattttttattgttttattaattattggttatggttttattattaattattaattactgttttttttttcagggaactgcacatctaataattccagtgtcggaccattacacaggccgtgtcacatggcgcgggggtagttactactacccgaagattaaggctaaatttgaagaattcaacctatgggacagggtgagggaatcccctttcaaacagtttttcgagagagagcccattcaattttcaggagcattttttcatcagttgatgcttcacaaaataaaatatctgacaagccggacaaggtgcatttctatgtgggaaggaagagatgtagatttggcagggtggagttcggcttggtcaccgggttaaacttgttgcccggccctactgaggaagacatcaaagaaaaaggaagttctgaccggttga

SEQ ID NO: 280309 - DNA, 609 bp, Cannabis indica
tgggactcagactaggaccagaacccagacgaagagcaaaactggaacccagactgagacctggtacccaaaataagaacctgaacaagaattgccgaaccaggaacctagaacaagattaggaccgtgagaaggacccggacccagacctagaaccaaacatagacctagctttacacccaaactgagactggaacccgggcccggacacggtcgtgtacccagactggaactgagacccggacctggacctaaatctgggacccgatcccaaacatagacttggacctagatagggatccggatacaaacttggactcggaccaagtccgagacatggatcaaaatgctggacctagatttggaccgggatcctgacccagacccaaacttggacccacactcgggaccccaacttggacctggacctgaacctagacccaaataggggtccagacccggaaacaaacccggacacagtctcggacccgaactcaaacccacaactagaatcagacccaaagctagactcggacccggaccggaactcgaaccaaggacttagaccaagaactgaatctagactcagatcgggattggaacttggga

SEQ ID NO: 280310 - DNA, 585 bp, Cannabis indica
agagagagagagagtccataatagagagaaaatttttcttgtaatctctgtaacagtgtgagaggattcttgtaattctgtaaacaaatatcaataaagatataattattgctttatcatatatttgttattataaatcatttatcgcttatcaaatagactcgttatcgttggctaaaagcgaggtcaacacactggatttagacttacatgataatcggcgataatgtatacttacaccttggataagtattatgtcctttccagggcattgtcaaagtataccagtatcagatgtatagagtatacattggaagggaccgatattgatcttggataagatatcataaacttaccattatatctttctcagccaatatcaatggttgatcttaggtcaatgaatcttaatcctgatatggttaagttcagtttagttgtattatttatgttcttcaagttgttcgtggatgctaaccaatggttctggcagatatttacatcttgggaacatggtagtttaattgagtgggagcactaatcatagatatggaatctatagtttctataagtatttagaagtga

SEQ ID NO: 280311 - DNA, 302 bp, Cannabis indica
atatacacaaaatctattaagtccagaacatatagtcattcgcaattacagtgatgtcaacacagtaaaatgtaattgtggttatatgtttcgaaagacaaagtccctgtttcatcagtgcattggatttacactgatgtgataaacagcgatgaagtgtacttacactttgtataagtgttatgttcttaccagaacattggcatagtatactagtctcggatgtatgaagtatacaatggactggaccgatattgatcttagttaagatattataatgcttaccgttatatctttccaag

SEQ ID NO: 280312 - DNA, 551 bp, Cannabis indica
tctaggtcccgcatttcgatcccactctgggtcttggtcccagtcctggttcatatatggatccctatctaggtccaagtctttgtttgggattgggtcctagatttagtccaagtccgggtctcagtttcgacctgggtacacgaccgtctctgggcccgtgttcctgtcttagtttgggttcaggctaggtctatgttcgattctaggtttaggtccgggtcctggtcacggtcctactcttaatttagggccgtggttcgacgattcttgttcaagttctaattttgggtcccaagtctaggtttttgttcgggtttggttctttgtctaggttctggtcctagtctgagtcccagatctacacaccgactgctggtctgttccaggccccgttactcgaatcccgagtcgagatctggatcactgtcacggctctcggtctggttctggttcaggtcccaggtcccatttctgagtttgggttcggtatcgagactggggtgcggtttacgtctcgaccttggttctgtgtccctagtctggttcca

SEQ ID NO: 280313 - DNA, 730 bp, Cannabis indica
gataattcactaagtctttttaatcaagaggatcggcaagaaacatacctctcggagaaggtatgagggatccacgtactcccgggggcaaagctatagcaaagcacctctgggagtgtcaaacctcatctgaacagtcacctcgcatttaatgctgcatgggagaaggcgtattgaaactgccataagtattaagtctgactaccccccttctgcagctattacgctatgatcaataagcctagtgacaactactttatgaggaatcacatcagtcgagaggggataatggattacatccacctaacccctaaaatacctagggtatagaccatgcatttcctatgttacactggtttggaatgtgtgcccctattgaaaaaatacagaaagacatgtagctcggttctagggatcaccccacaaaaacactataaataccccccaaacacattaaggcaggggtcgagaattctgggtttcatatgaaccaaagagagaaaagttaccaagaacattctctgtaataaatactctcataaatacaaaagactcgtggactaagactcattaatgccccaaccacgtaaaaatctcgtgcactaatcttcctacaacttttttttatataatattaagttggttgccgaaaacctcggccaacagattctttttcattttattttattttttggcttgtgcatattgttttgatttctttttaggattt

SEQ ID NO: 280314 - DNA, 500 bp, Cannabis indica
ttaattttacttctccttttttttttatatatgcggtacaggggtactcgcgcttttgtacttagacaaatttccttttattttggacaaatttatatcctcgcggggataattatcctttaacattttcgcagtacatgggtactcgcgttttatatatatatatatttgcgactttaattacagcttggtgtaataagtagaaatatttacaaggctgataaaattttgaaaatttaacaatcaatttcattcatataatcaatagtacattcgggcatatatacccccctatacttaggattttttcctttgcatgaaaaatatctaagtataagtacaagagtgaacatagtcgaataatgcgagtactattgataataaaatttcaaactctcgccattccatgctcgtggaatcgcagttccatcgagtgttgcgagtcgatacgtggcatcaccaattttttctgcgatgaggtatggtccttcccaacttat

SEQ ID NO: 280315 - DNA, 586 bp, Cannabis indica
aaaaaaattagaaaattgctttgttcttgaacctctctctctctcttgctttcggctgagacaaaccaagggagtttgttgttgattgttggatttcagcaaggatttcaaaggagataatcaatctaaggtaagttccaatgaatccctcttagttttcaagtttttaagttaggttgaaatggtgttttggggtaataggagctgttaaggtttgaattgcttagggttcgaattctggggttaggttgagttaatttaagtccctagcttctgcttttgatgcttgatattggttctaagcaagcttgagttttgaaactcaagctttgagctttaatggcataattggatttattggtttgttctgtgaattactacttggattctattgtttatacattgtataggtatactggagagtttggtaaggtttggggttgaattgaattaagggggatgatttttgtgttcccagtacagaacccgtcgaccagttctgggggaccagtggcaaccggtcgaccggttggtgacccagaactggattgccggttgggaaccggtctgcctgttgggggaaatt

SEQ ID NO: 280316 - DNA, 597 bp, Cannabis indica
tttctttgttaattttgtcattagaatcataactataatgatctatcagtatctctttttatttaatttgactgattttgtaattagtaggtttcaatctctctttttaaaatttgaattccaattattgaaattgttgtccatgaagttcaggatgagtattagatgtatttgctggacttcttcgataacttataatctgaaagaaatcattgtatttgtatttatagtgcacgaaaactgtttgatgaaatgcctcatagagattttgaagcaaataaaagaacagttgaggaagcaacaagaaagtgtagaaatggttttgagctttgtggtgtttattaatttgtttgattcatatcttccaatattctgctatggaagtagctgaactgataaataaactttctctacaaaagcaaggttttgaattatggatgttgtagaatcaatatgaggtaatgtttctcaccaattcaatcaaggtattaatgagtataaattgcagtcatttatgcaggggattggatttatattttggatcattggattctatagaagaagcttcaaatacaaggaatgactacacaaacttaa

SEQ ID NO: 280317 - DNA, 561 bp, Cannabis indica
cccgagtccaggtttgggttgggatccgagttcggctcccaattcaggtctaggtcggatttggaatccgggtccaggtctggttacggttctagatctacgtcaaatttcagttatgattccaactccaaatcctagttccagtcctgattaacttccggttttgtttccaattttgggtaacatgttacgggttcgggtccacatttggttttggaattgggttcaagtccgggtcgttgtgagggttcgagtccttgtctgggtctcaaatccagacaccgactacgggttttgtcccagcccttgatctagatccggatcccaatctcgggtcccagtctggttccatttctggtgccaggtcacgagctgggtcctaggtccaagttcgcgtctaggtcggttactaggtcccgatcctagttcggtttcctaggtccctatccttatatgggtccaggtcccaattaatgtgtgggtttgggtccccggtctatgttcgggttcgagtcctagtctgggttcgggtttaggtctctgtctgggttttgatctggg

SEQ ID NO: 280318 - DNA, 711 bp, Cannabis indica
tgagtgatatcgtcaacctcctattacaatctcttagtcagtcctacgtaccctaaaacacagtaccatttttttttcattatttgttttttattacggtgttcattataactacagcatcatctctgtaaattttttacaaaatttaaacagtttacattatcaaaaatatgcttaaagttttttgagtatgtgtggtaaactggaatatgaggaactctgtttttcagtagtgtaaactattcgaatattttcaaaatttataaaaataatattgtaactatagcaaatactactataaataaaaattgaaaaaaaaaatattttagtatgtgatttgggcatgaaagttgacactgagattttaataaatgaaacctagcaaacccaagatttttttttggcaagacaaggaggcaaaaataaatttaaaaagaaaaaaaaatacttttagtgagatttgaatccttaacctttatcttatatgttaaattaataatatgtctataaatattatcgcttattataaatatacgttgtaactaactaaaatacatacattttttttcttaattattttttcagtaaacaactgtcttgcttcacttctatgtggatctgtccctgaccatggacataaatgaaagtccacgagcacttattgcattttgattacatttattaaaaaatgtcactagagtataggagtcc

SEQ ID NO: 280319 - DNA, 761 bp, Cannabis indica
aaaaaccaaatataaccattctaacacagtttatagtctgtaccaaaccccagataatttactttgaattttctgagcaacctaagtatttttcataattaatttaataaataacacaaataattcatgaaaaatacaaaatcgatcaaaaatctaatctatcaattttctaacattttataatccatattaagccatataaaattattctagaattttctgggaagcctagctatttttcataattaatttataaaataaatcaattaattcataataaataaaataattgcaagaaaattctaaaacttcatagcagacctagaaatacctaagtaagatcaaaaatccaagaaaatccaaaaaataaacctcagaaggtgttgatcggagcttcgccggagttacgccggcgagcccttcttctccggcgacggcgagcctccaacttcttatacaattgcttttcacgcattattttgattggaaaagcttcctacagtgcttagaacctcaagccgaccataaatcaccaaataatacggtccaacatcgttgtcttcttcgttgccggtgtacctttaaaaatggagtccaacaatggcaattttcgttcagggctttaaagcttcgattctccacgtcaaaacagattcttggggtcctataagcttaaacacaatgttctttaaacccagaaacggttcaagtacgtttaaattcgatattgctcaagaacatgcttgaatgtgcatgaaaat

SEQ ID NO: 280320 - DNA, 588 bp, Cannabis indica
cgcctaagatagttagggtgttacagaggacatgaagcttccatgcaattttccatatcttaatctcaaactcactagtattagtgatctctgaatggtgcagcaaccgatatgcctccctcacagtatagaacccataaagatccttatgccaataccaagtgtcaataggaatctcttgatcaatgtgggttcgaatgataatctctttatctcagtcattgaatatatccgaaaccacctctaaatcccaagcccgttctcctaccaccatgagattattaaccgtccacgtctccataccattagctctagaagtagcccatggttgagaatcatccgcaagccacgggtcaaattgaacactaatattcgtacatggaccaaccccccgacgagctccctccttaatcaaagcttgcgtttcaaaaatactcttccatatgaaactaggattcggcccaagagaagcactcaaaaaagaaccctgaggataatatcgggccttatatacccgactaacaagagaatgagcatttgtaactaacctccaagcttgttttcccaacatggctaagttgaaatccc

SEQ ID NO: 280321 - DNA, 597 bp, Cannabis indica
cggtttcctggcctgcccagaaaatcggttaaccggttctgcagaaccggtaaaccggttttccctgcagaaaaaccccaaacttcgaaacttcaccaatttgaccccaatttccaccataccttacagaacacctaaatagggtatacacaatatattccaacaagaaaatcccagaaaaactcattgaatccaaacatgccattaaagatcaaagcttaagtttcaaagcacaaacttatgcaattccatcacaactcaacaaaaccaatatccagtacttagaatcaacttaaaatcaacctagaaatgagattacacaaactttaaaccctaacagcccctatctttcaaaattacataatcaaaccaattaaaactagagaaacacataacttagagagtgtctagggtttaccttgcttaaagaacccttggatcttggctgaattccagaaaaatgaggaagaaaaagtgattcctccttggtttattgctggttcaaagagagagaagggaaagagaggtattatttgatttttttttggcttttccatagttttctcaaaatgattaaggattttctaagttaatcct

SEQ ID NO: 280322 - DNA, 685 bp, Cannabis indica
atccggcatggaagcatcatccgaacttttcatggggaggtcaaggggcaagttcaagtggagcacaaggacaaggaaagcaatcattcccaccgggtttttctcaacaaccaagacctcaacaacctcaccaacctcaaggctctcaaactagttctttggagagcttaatgagagattatatggccaagaatgacgctgtaattcaaagccaagcagcatctcttcggaatcttgaagttcaattggggcaattggccaatgatttgaagaatagaccacaaggcactttgcctagtgacaccgaaaacccaagaagagatggcaaagaacattgcaaagcggtaaccttgagaagtggaaaaataattgagtcaaatgtggctgcaacaggcagtaaagagccctcttcaatccaaaaagagggggaaatgaagaaaaaaccagcaacttcagctgctgaaattcccccagtagttacagcatccagtcagcattctactgcagaaaagtctttgcaaaagccaccgctaccatttcctcaacggttcaagaagcaacaagacgatggtcaattccggagatttcttgatgttctaaagcagctccacatcaatatacctttagtggaagctttggagcaaatgccaacttatgtgaagtttttgaaggatattttgacaaa

SEQ ID NO: 280323 - DNA, 475 bp, Cannabis indica
ataattgttccaaatatgatattaatgagatttatatgcatagatgagaaaatttattgatacttgacctatatgaactatccttgttgaaaacttaaaattataggtcaaaatgtggatttttggtgaactttggacttgtttttaaacaagtgaacatgtgaatttttgcatatttgattttcttatgtgtctatatgcttgaatatgtgaaattgaatgtatttagtatgcctataggtttgccttgattgaaatttgcatgaaacaaatttttggtacctcacttgttgaatttttagatttttaggcctaaaagagtgtttttcgccaaactctctcatttttcaacatttttcgattccgtaagtttgtacacctcacattttattttataaaactgctggaaaaagaatttttcaatttcgttgcataaaactcatttttggtacggttctagttttcttggcaattt

SEQ ID NO: 280324 - DNA, 551 bp, Cannabis indica
ttctgggttttgaacccaggtgccgcggcatggtatttagcatgctgcggcgcgctcatttctttctgggcagatccttttgcaaacttcaaatagccataactttgtgatccggactccgatttgggagttttatataccgttggaaagctctttttgagctctattttaatatctgaattttaaatgccatgtgaatattttatgaatatgaaatcaggggttaaccctatttgtgaacttccaaatttgtatgactaggattatcggcaactgatcaggagcacccggggattcagaatctttattattgcaggacaacatgtaagatagtagcatgtagagtatgcgcagtggtgcttatattgaaaatgatatgtatgattgtttagtaactaggattagggttatcaccctaataagaacggtctaatagcctagggttattaccctagtgatatatgtgtgtaaatgccatgccatgttaaatgtaatgagattcaaggattatgcgcttaaggcataatcaggttggactcagtaaccataac

SEQ ID NO: 280325 - DNA, 593 bp, Cannabis indica
tgatattgaagatgaaaaagacatatttttgatagaaaaatccatgaactttatagcacaaatgggaaatcaacatacaaacataaacactatctagttacattttgcttcatcatcatcttaataatcttgaaaaaagattagaagctcataactagataaaaattacaaaagataaacatacttgacatgctcttcaaagtgtaaaaatggtagaaagaaaatggtaaaaatgaagagtgtggaatggagaagtgttttgggttgaagaggtgtttagggagggtgaagagatgtgttttgaaatggtcttccaacaccatatttataggcaaaattagagaattaaattaatcaaaataaaataaataaaatgattaatttaattagtgttgggaagagaatggataaatagagtatgtgtaagagtattggaaaaaataaatgtttgtttggatggaaaaatagtgaaaagatagggtaaaaataaaataggaatgtttatttaggtgaaataaattgggaagataaaatagatatttaggtgtaaagtgtgggagaaaattatggattttttggattttatgtgtaat

SEQ ID NO: 280326 - DNA, 583 bp, Cannabis indica
attttgggcaccaggtccaggccccgttacccgaatcccgagtcaagatctggatcattgtcacgggtgtcggtctggttctggttcaggtcccaggtcccgtttctaagtttgggttcaagatcgacactggggtgcggttctaggtcccgaccctggttctgtgtccctagtctggttccatgtttgggtctgagttcaggttcgggtcccgagtccaggtttgggtggggatccgggtccggctcccaattcgggtctaggtcggatttggagttcgggtccttgtcctgttactgctctagatctaggtccaatttcagttttgattccaagtccaagtgctagttccagtcccggtcaacttccagttttggttccaattttcggtcacagggtacgggttcttgtccacttttgggtttgggatattctttaggtccgggtcctcgtcagggttcgtgtccagggctgggtcctaaatccagaaactaactacgggttttgtccaagccctgggtccagatccggatcccaatctcgggtcctagtgtggttccatttctggtgccgggtcacgagc

SEQ ID NO: 280327 - DNA, 767 bp, Cannabis indica
atatcttaacggtcttcagtggacaacctggtggctttgataccaaactgtaacgcccgcattttatatttactaaactcgaaagttaaccttaacatattatatctttataactatatgaatcgggatcccgagtatcaaaatacaacttaaaagtatttttctaatatgtacatataatatttttttcttaaaaaaaacttgcgagcatgcaacttcaaaatacagactcaaaataataaaagaccgaaaccctccaggttgcactgccgcgatatgtacaatcactgtcgagcttcatttcactgttcctccagcttttcttttcctttacctacacacggtagcaaactgatgagtcgacagactcagtaagatatgcaaaacatatatataaataattagatgccagctttgtgattaagccaccctgagctcattaattaagctcagcaaatgaataagaacgttcttaagggaagtacgactactgtaccaaatgcactaaagtaccaaccctgtactcgtgttggtagagccataattgtactcccgggatttactaagtgttgtaccatatgcacgccgtacctctagtacttgtgttggtaacaccgtaaccctagctactagtacataacattacactaacactctaataaatcgcaatcatattagtgctagtagtgcaaacatctaaaataagtatattttcatatatatattcttatgctatcttacctcgttccgtgctcaagtgtgccggt

SEQ ID NO: 280328 - DNA, 605 bp, Cannabis indica
ggtggatcacctctttatatacaaagcaggtttccaatcggttacataaggatcacattcattgttaatccattatttacatattgaattgcaataattaaacccaagcaacgttaacattaataaatgaacgacagttactaagtctatcaacgtctgcgtttatacacgtgtcctttatctaggagtctctcatggacaattcagctttcattggaaggctgaatacacgtgtcctttaaataggagtctggtctcgagtttctaggtgagagaaatctcactataagacagcggaataatatgactcgttccgttcagatctctagcccttgattcctttctttagcagagcatcaccaagatctgaacctggatcttcttttctccttctttgatgcagaaaatccatagtcttacatactatgattgagataccacttgatgtgtgtgggcactactcattactcaaagattcgaaatttagagagaagaaaagagagagaggcgtgtgaggcattttctgagagaaacaaagtgatcaaagatatgtgtgtctatttcctcaagccaacacttgctatttatagaaaaccctctaggtt

SEQ ID NO: 280329 - DNA, 588 bp, Cannabis indica
aagacaaaagcattaccttcgtttgaattgtttagaagcctgggacatcgttcttcctgatgtcccttctcattacaattcgaacatagaagaatatgactatcaattgtacttgaagaagcagctttgttagaagcttcatgcttaatccttttcctctgattaaagtttgcaaaaccaggaggtggcattgcaatcagattccgttcatgagctcgtaattctgcttcgagcttatccatgtcggaagagttaaaattgttgatcatgtaagatacaacaaatccattatactctggaggaagactattaagtatgaattgaacccattgttcctttgataattcaattccaagtagatttgccttttggaacttcagattcatcatcaataggtgcgagtttatgcaactaccagggtgcattttcacactatagagttcatttgctaagacattgactaggagtgggtcggggtgtgggttattcatattggcactacaaatatcaataaacagaagtaaggttttggttcaataaattcatacacaagttcagaaaatagcacatatgtttataaaaatacca

SEQ ID NO: 280330 - DNA, 514 bp, Cannabis indica
tacttgagtaaaagaagatggaacattaggagttatatttgaaagcatatttcttctaacacttactttactttgtggcttgaagttctttaatatagtcatcttcaaggaaagtagtgtttgtagaaacaaacactttattatccttttgactataaatagtccacccctagtctctttagattttttgacaaacaagcaaacctcaagttcgcgcttctagtttgccatctaggtatacgaccatttcatagttctacgggtgtcttaaggactgatttagaatgaacaatatttaaaatgtcattagccatctgaatagcatatccctagaaggacggtgacaaggttgaatagctcagcatagacctaaccatttctaaaaagtgtgcgatttctcctttctaaaactccattttgctgtgaagtgccagttgcagtatactgtgatttaattttcaaagttcaattaaatgatctttgaaactgcatatccatatactcaccaccccta

SEQ ID NO: 280331 - DNA, 439 bp, Cannabis indica
cctttgttctgatcctggtctgggttcgagtttgggtccgggttcgggttcagctttgggtctgattctcggtgtgcgtttgagttcgggtccgagtttgtgtccggtttgtgtgcaggtctgcaccccaatctgggtcttagttcaggtccttgtccaagtttaggtcccgagtgcgggtccaagtttgggtctcggtcaagatcacggtccagcatttctatcctagtcttggtcttggtccgagtcaaggttcgtatccggttccctatctaggtccaagtctgtgtttgggatagggtcccagatttaggtccaggtccaagtctcagttccggtcttggtacacgaccgtgtccgggcccgagttccaatttcagtttgggtctgaggctaggtctgtgttcggtcttattctagggtcctggttcggcgattc

SEQ ID NO: 280332 - DNA, 546 bp, Cannabis indica
attgaaaaagcactgtagcgtgccttagcattagggcgttacaattttggtatcagagccgccaggtttgtctaccgaagcttgctaagacatgtacaatcttcatcagagaaagctcggttcacggttcagtaagcccgtacttgtttagtattttaaataattgtgaatgtgaaagcatgttaggaagcatattagattataattatttatgttaagtgcattgccttaaaatccgtaagtgcggtagtaagtatgtaaataggccgttgcctgaccaggctgacttactaactgacaggttagtcttatagaatggacacctggtgcaatatggagagtcagagtaaagtggccagggctagtaacggttggagagaatggagtccaagttgtccccgtaaccaaggtgaaagcccttggagggcttccgacgggagtgatagttatctgtcacaggtgttaggctatttttagcctaagtttaaggtcacattttatagttgtttttcttctttattattatttttggaatagaattacgct

SEQ ID NO: 280333 - DNA, 509 bp, Cannabis indica
cccaggaaattgctgataccagaccagttgatacagcatcgggtcagcaacctgacagtcagcaatccgcaccagtatgttctaatcctaaaccaccccttccatttcctcaaagatttcggaaacagcagcaagatgggcaattcaagaagtttttagatgtgttgaagcagctccatatcaatattcccttggtggaagcattggagcaaatgccaaattatgtcaagttcttaaaagacattttgacaaagaaaaggaggttcggggagtttgaaactgtagctctcaccgaaggatgcagcgccatgttgaaaagtaagattccaccgaagttgaaagatccgagtagttttacaatcccttgttctatagggggacgagatgttggaagtgttgggttttatgccctaaataaaactccatttcaatgtaatccagattattcaacatcaataaagtaacagaagtatttttaattcatttgtgtatgttttggttcactttat

SEQ ID NO: 280334 - DNA, 549 bp, Cannabis indica
catccctcgcccctccatagcatttgggctcaggtgctcttggtcggccatactccatacctccgtgcccctagtatttgcacgctctgctgctatcatggtaagatttagcttagttgacattcatgctaaccctaatgactgtgacagacacattacaatcctctatcgtatcactgagggagtcttgtaatgcagcctacccattttgtagcacaatgatagcagcctgcatgtctgttgttgcttgttctaatgccctgatgggatcttccatatgaggcgcacctgatgttccggtagcagcatctctcctctcgatcgcagctaccctagccaacaagttagcatagtcttaagccaacgtggcaacttgttgttgtgtcgttgttggccctgagttctgattgctagaggttagatccctgaccctctcgtcaaggccatctaattcccctatgcgcttctcaagctcttgaattctttgggccacctatttggacactcccaagtaggtggaacgtgcggcacttgctggcacactgagct

SEQ ID NO: 280335 - DNA, 88 bp, Cannabis indica
acttttcattcagaaaaactagagccttctctctctatacctggccgcccactctctctctctctcttcttcctcaagatttcgaaat

SEQ ID NO: 280336 - DNA, 657 bp, Cannabis indica
cctagtacccgacccagacccgaacttgaacctaggacccagctcgtgacccgacaccagaaatggaaccagacggggacccgagattgggattcggatctggacccaaggcatggacaaaacccgtagtcggtgtctggatttgggacctagccctggacctgaaccctgacaaagacccgaacccacacccggacctgaacccagtcccaaacccaaaagtggacccgaccccataccctgtgacctaaaattggaaccaaaacgggaagttgaccgagacctgaactaggacttggacttggcatcataactgaaattggacctagatatagaaccgtaactggacaaggacccggactccaaatcagacctagacacgaatttggagccagacccggatcccaaccaaaacctggactcgggactcgaacatgaacctgaactccgacccaaacatgaaactagactagggacacagaaccagggtcaggacctagactgcaccccagtctcgatcccgaacccaatctcagaaatgggacttgagacctaaacaggaaccagaccgagacccgtgacagtgatcaagatctgacccagacccaaacttggacccccactcgggacccgaacttggacctggacccgaaccta

SEQ ID NO: 280337 - DNA, 695 bp, Cannabis indica
agagcctagagccggaggaaaaaaaaaataataaagacactgaggagcgccacagatgtcttcacgtggtgccaagaagacatgaccggcataagcccccacgtcataacccacgtccttaatgtcaacccagacatgccaccagttcaacagaaacgacgtcccctcgactcagtgaaggctgaagccttagaaaaagaggtggacaaactactaacgagtggcatgattcgggatgtgtattacccagaatggctagccaatccggtactggtgccaaagcccaacgggacatggcgggtttgtatagactttaccgatctaaacaaagcctgcccaaaagattgtttccccttgccaaggatcgaccagatggtggacgccacctccggattcaagctattgtccttcatggacgcgtacgccggttacaaccagattaagatgcacatcgcagatcaagagtgcactagcttcaggaccgataagggggtatactgctacttagtcatgcctttcggactgaagaatgctggtgcaacttaccaaaggatggtgaaccggatgttcaagggcctcctggggcgaaatatggaggtatacgtggacgacatgctggtcaagtcaaaggcgtgcactagccacgcggatgacctagaagaatgcttcgaagtggtccggagatacggaatgaa

SEQ ID NO: 280338 - DNA, 554 bp, Cannabis indica
aataaaaaaaaaaatataatatctgatcttataaaataatctaaaatttcaaaattaaccattaaggctcatttgtgagaaattaaaatttttaaaattcaaagcctactaatatctaaaactaattttaattaattaaaaaaataataaaaattagttttattctgacaattagatttttaattgaaaattcagattctacacaaaattctaccagaaatttgcttttatttcaatgaaaaacgatctttgaatcaaaagatatgaagaaaacaagtttgaggcacaggggtatgcattgcatacccctgcgcgcgcggaaagcaggagacagccgagggacgaggctgcgtgtagcctctgtggctgagaaacctgggcgcatgcagcctcttcagacagaggcattttcgagtgatctcggccatttctgtctgaatgggcgtgcgtgtccgagcggctccaaggctcgtgcgcgcgtgtgtgtgcattcaaatcctaatattttcgttcaaattaaaaaaatcatatctaattcataaaaaatccaaatt

SEQ ID NO: 280339 - DNA, 640 bp, Cannabis indica
agggttgttttgttgctttaaaaatgttctttgtggtttatatagtaggtttggagagtttggtttgaattggggttgattttgtcgagttatgaaattttgacccattcctgcactgaaccggaattccggttcagggaggcctgtaggaactggaattccggttggcttccaggaatttttcccagaaccgaaattccgattggggaaccggtctacctattgggacaaatttgggaactctagtttttcaaatttttgtgttattttgggtattgccatgctatttatcgatagggaaactttaagtttcaagtttaagtccccgggaagtgatttagcgtgtcacttatcagtgttgtgattattgtgatttaggatcctgtaattcgctgagcagattgttcaactcaggttgactggcacacctgaattcgaaattgaggtaagattagcataatagtatgcatatgtatttacatgtttagcgtgcatgttaggaagcctgttagattacatcagatatgtatgttggcttcgtactattcgacagtatcacatcggtatggctagagtatgactaacgtaccgagtataggctgatattatggtcgatagtaccgtactatttgacagtatc

SEQ ID NO: 280340 - DNA, 335 bp, Cannabis indica
aaaatcgaaattgagttctgtaaagaaggaacttgctttagttttttccaaactatccaataaaaataattccagaaacgaaaaattcaatttattttttcataaaatttccacaagcatcaatcaatcatcatataacacacagatcaacatgaaaccatccaaatcaacacataacatcgtttttccttcttgttgattggattctacacaatcttccacactatgattgagataccacttgatgtgtgtgggcactcactcattcactcaaggttcgaaattgaagaggaaaagagaaggaaaggggcggctatagagatagaataggaggc

SEQ ID NO: 280341 - DNA, 503 bp, Cannabis indica
gacccaaagaacatttctaaggcaccaaaaccacccagattgcaccaaagcaaaaagtgccattaaagctcaagctttgagttctaaactcaaacttgagtaaaatcacctaacatgcattcaaaccaacttaaatcctcttaaacaagcatattataacctctgaaaacaactaaaaacatcaacaacatcacagcaacagattatacaatttctttcaaaaatcatatatttagcttagaaaaatcataactttaaacaagatagcaagcatgcattaaaacctagataatccattcattttaaacctaattaagcttctgtaaacaacataaaaacatagcaacaacagccacaaattcatgcatgcatcataccattttcatcttaaaaacttcaagaaacattaaggaaggatgaagaaggcttactagcaaatagagatcacaaaatctgctcaaaatgagcttgaatcaccaaggaaaattccacttccttgctgc

SEQ ID NO: 280342 - DNA, 689 bp, Cannabis indica
agaaaaagttctttctctctcaaaatatgtttttgtcatggtaaaatttcattcggtccttatactttttcgaatagtcatatgcatcatgcctaagctcttctaactcattcaattgaagctttcttttctcacccgctttgtctaaggaaaagtttagttgcttaatagcccaataggctctatgttctaactcaacgggtaagtggcatgccttcccataaacaagtctatagggagacattccaatgggcgttttgtatgcagtacgatatgcccataatgcatcaatgagtcttagggaccaatctttcctagtggggttgacagttttctctaagatgtgcttaatctccctatttgatatttcaacttggccactagtttgtgggtgataaggtgtagtgactttatgtgtaatgccatattgtttcattaaatgttcaaaaggcctattacaaaagtgtgtaccattatcactaatgatggcacgtggtgaaccaaatcgtgagaaaatattttctttcaaaaacttaagcacaactttatggtcattagtgtgacatgcaatagcttctacccatttagacacataatcaacaccaacaagaatgtataaattaccaaaagaattaggaaatggacccataaaatcaatgccccaaacatcaaatatttcaacaataaga

SEQ ID NO: 280343 - DNA, 530 bp, Cannabis indica
ttactcatatcaagtttaatagccatgaatccctccttccctactctcttcctcttcaaatagtgcataatctcaaaagcaaccataatattatcagaaatcaagcgacccggaagaaaagcactttgatgacttgagatcaccacaggcaaaacttccttaaatcggttggctaacactttcgaaataattttataaagcacattacaaagagatatagggcgcaaatcagtcatagactccggatgttttttcttaggaataagcacaatattagtatgatttaactctcttggaaaagaaccaacaacaaagaaattcttaacaagagtgataatatcattacttacagtgctccaacatttttggtaaaaacccggcgtcatgccatcaggacccggagatttatctggatgcatttgaaagagagctcgacgaatctcctcatcagaaatcggttctaacaaccggttgttatggtcattagtaaccgccgaaggtacacactgaagcacctcgtggcccgagac

SEQ ID NO: 280344 - DNA, 647 bp, Cannabis indica
atcatccattgaatagagtagtgagctcatctaaaatgacaaacattccagcaaccttttatttgatctagatgagaatccagcgttgtcctgtttaggcgagagtcaaggccattctatcttctgagcttccaccattgtttcatacttttgtaagtcttactaatagtcgccaccattagggtgatcaatactaggaataaaacacttacaaataatacttatctttcgagattctacggtgttaaattgctaatgaacgttcatccattagggatgattactcactaaaacaagacctatgtagaaccaacaatggagatcaaatatccttataataaagctcattattaaagtgtattttcatctaatatttattttaatctatttattttaaatatatatttatttaattaaaattaccaatttaggaagttctaaatataaattttaatttattatttatagaattatacttagatagatctgaaaataaataaaattatttcccattttcgtaataattctctataaatatttcaaaaattattcaatttaagttgatccaatattaattaaaaatatattttcaactcaaaattaattttctataatatatatagcgaaattcgaaaatccaatgtatt

SEQ ID NO: 280345 - DNA, 608 bp, Cannabis indica
tgacgtactcgtgtataagagccattcattccgtgggtgtaaggacctaatgaaggcttgaagcggggacgttacaagacctgtaagaaccagtcgattggttggtccacatgaaaccccacagaaccaaaattctggttggggaaccggtctatcggttggggcatttttgggaaccttggtttttcttgtttttgtgatatttagggtattgccatgtttaaagaccacttagctttaatttgaaaattagcagataattagggtttaattataaaacttacatattagttttgaattattaatttatgatgaattatttaaattcagaatgcattttatatgtcatatatggaattttataattttgcatgttttgtgcccggcaacattggaacgcggtgtttggctattagaatcacatcttagtatttttagtatagcgggacagtataattagatattgggaatgtcgggagtagtcgaaactttagaagtgaccaaaatacccctaagtgacattttatgacttttagtatgggaagggcaaaatggtctttttgctcgtttgtattttgtcttttgtgggtttatgttaaggttataat

SEQ ID NO: 280346 - DNA, 574 bp, Cannabis indica
cctcggcttcattgcattcggtgatgaagtctgccaaggcttggccttttatggagatgcgggggatgtagtgtaagtcgaattgacttaactccattgcccatttgaggagccttccggacgcttctggcttttgtaggacttgccggagtgggtggttggtcagcaccttaattgggtgtgcttggaaatacggccttaactttcttgaggccattaggaggcaaaaaactagtttttcgatgatggggtaccgcgtctccgcccctatcatgcgcttgctgacgtagtacacgggatgctgagttttctcttcttcccggacaaggcagcgctgaccgcgtgctcggagacggccaaatataggaacaggtcctccccgaggacgggttttgacaagattggaggcttagccatgtgttctttcaattttttgaatgcctcctcgcactcgtccgaacattcaaatttttggcacttcttcaatatgttgaagaaggggatgcacttatctgtggaccgggagataaaacggctcaaggcagcaaccttttcggttaggctctgcacgtct

SEQ ID NO: 280347 - DNA, 637 bp, Cannabis indica
aaacaagaataaaaaaaaaaaagtaaacaaaccttgtccaacccataggtagataaaacatcagcatttgttgcctctaatttatttaaagacttatcctaaaaacaaaaaataaaaataattaaacatgacaaaatgattcaaaatataaaataaactaaataaaaaaaagtatacagtaaacaaaaaatgacaaacctttttaatgcttccctcataggcatcaatcttttcatttataatctccaaagcagacacagtgatactatcctcagtgccttgactatcaaacaactttcccttactagaaacaccttcaacatcatttacacttgcatctacatcaactgctctgccctcaacattatctttattactcccatctgcaacatcttttgcttcttcagtattctttccctcaacattgtctttatttgtcccatctgaaccaatagctttaacagcatcaccaccccccaaaccctgtaaatatacaaaacaaacataaagaacatttgacagagacaaaaaccaacatagtaacaaatcatctaaataatgaaaaaactaaaaaataaataaacttgcctggtcatcaccaccatcatcttcatcctccttagattttttaactaac

SEQ ID NO: 280348 - DNA, 523 bp, Cannabis indica
attgttttattaatagtatatttatatatatatatatatttatagaaaacatgacatcatgatacatacatgtcgatttaatgatgatgagatcttaattatatatcttcattttgaaacagctttgattatatatgaaggaaaacatactaaattaattagggtataactatatctatgtaagtactattcaaaaagcatatatattatatattcgtctttggtttgatatttaatcaaatataattttaatatatactaaattatatgtatttttaaaaaatttgtgattaataatatcatttatactaaaaaattatatataatttcaattttaggtagcaatattaaaattatgagatccttatataaaatattattttttttaaaaaagttatatttttatgtttaaaattttttatatatataatttcacggttttctataaaaataatcagaaaactacataaaaataacaaaaaataatatcatataaatagcatcaaaataataataataataa

SEQ ID NO: 280349 - DNA, 740 bp, Cannabis indica
ctaatccaaacaacctcaaaccttccagacctgttctataggacccaaataacatttctaaggcaacaaactcacccagattgcacagaaacaaaaagtgccattaaagcctcaagctttgagttctaaactcaaacttgatcaaacactactaacatgcattcaaaccagtccaaacctacttaaacatgcataaaataatctctgaaaactactacaaacatcaacaaaatcacagcaacagattttgaccaattctctttgaaaaccatagttttgagctaaaaattccaagcttgaaacaaagcaaatatcatgcattactagcagcttaaataacttcaaattatcatgctttaactacagaattaatcatcaaaaaccagcagcaagaacaacttaaaactaagcatgcaacctaccaaatctcttcaaaaattcaagaaaacatacaagaaaggtgtagaaaacataccaacaactatgaacacttaaacttgctaaggagggcttgaaatccaagaggaaaatcctcttttcttgctgctcaaagggggccgaaagagagaggaaaagagagagagttttgagaaattttcatttttttctaagttttgaaaagaaaaagaaatttaaggcacttaacatattttacttcagccaaaaagaataattaaataacatatatttttcaatatattaagtcacaaaagacaaactaacaatggggcaaaatgacc

SEQ ID NO: 280350 - DNA, 422 bp, Cannabis indica
gaccacatcctttgtacaaagatagctcccggagggattcgagcaaaagatgcgagtaccacaacgacattggtcatagcaccaatgaatgcaagaatctcaaggacgagattgaaaacctgacccgattgggccacctctatgagtggatcaagaatacgctgcctcacctcactccgggccaggcgacaggggttgtgccccaaggaacaccgggggtgcagcaggagcattagctccaactgctcccgcgggcgatgcccagcacatccccggtctgcagcccagacccaacgagagggtagccatgatctccggaggtccccatattggaggaactactcgcaaggagctaaagcgatacgcgggggccgtgaaacacaatgaggtttgggaggtcactcaactcccagctcaaaggc

SEQ ID NO: 280351 - DNA, 651 bp, Cannabis indica
ctcggtcaggctgtccgaagacgtgtgggaaatgacgactgtccctaggcgcgcgcgcatgagtgcgcaacatgctgagatattttcatctaaattcaaaatatcataactagttcataaaaaatccaaattaggttctgtaaaagcctaaatttattaatttttcgtgtactttctattaaaatattttcaaatcgaaaaaaaaaaaattacaacatatacagcgatttccaaactatcatcaaataagcacataaaaacatcatgaaacaatccaaatcaacacaaaatatcgttttaattcatatttcatgaaagtaaatcattaccatggctctgaggccagttggtggaatatgttttacaaggatctaaatttactaccatgtatgttatttaacatactaaatatgaatatctaaaacaatacaaataaacacatataaagtttcagaaaaccttatattgggtgcaacagaatattaatggctccttccactcagatctctaacccttgtatcctgtctgtagcagagtatcaccaagatctgagctcgtatgtccttctcttgattctggattcttcacagccttacacactatgattgagataccaaaagtaggtagacaaacattaggcattcttgaatg

SEQ ID NO: 280352 - DNA, 850 bp, Cannabis indica
ataagttacacactcctaagttagatggtaagaagtatgaatagtgtatgcaaagactttagagagaagtctgttttagaaatgagtcaggagaggacgatgccatcatatagaaaggagtgtagtgtgctgaatagaatccaaaaataagaagatagaaagagacatgataaaattgcttgaggtaatagcttatgaaggtatcttaaacactaagagataaacagagcattaacaaataaaagattaccgaaggaaagttgtaaactttaaactcaaggtcatctacttggtggaggagacaatagagtaaaatgtgcatagtttcgacagtgacattttcaaaggagaaagactaagaaggtctaggcacgactaacaatttgggtacaacatgaaggagaggacaactacttggaacaggtcacaattgcacaactaatacattgtgaatacaaatttatggtgggtggtacaacaaacagctatagagaggagatcacaaattcaaaagaggaagaagagaaattaactttcacgagtgacatacttagattctacatacccatcgacacaccaatataagggtagtgcatagcttgaggagaaaacgttagggaagaatccctaatattagagacatgggaaaagtgagacacatataaggccaaagtgacgtatcttaaagaatttcatggcatgacaagggtcatacgagtctttgagaagtgttgggattagaaaatgctcatgaaacgtaaatagattcaaggcacatcgtaagcaaacaaaactacaatccactcacaattttctttatggacaatagcataagtatgttggagtgtca

SEQ ID NO: 280353 - DNA, 574 bp, Cannabis indica
tgagagcatccaaattttttttgtggaatgagggcattccatggatgagagcatccaaatttttttggaggaatgagggcattccatggatgagagcatccataaatttaatggaatgagggcattccataaatttaattttagtggaataagagtattccatggatgaaagcatccaaatttttagtggaatgaggacatcccatggatgagggcattccataaatgaatagagaaacaacaaaaaaaatcagaacgagagaggagcaaaataaacatcaaaagaaaaagaaataggaatgagatcattccctgaacacttacccaagctttttgattgttggtagaaaagtatcgtagttttttttttctgtgtttcttttctctccttcttagattttttttaaaagtatcgtatcctttttttttcaaagtgtcgatccttttctgttctcaacttctcctatttatagaccctattttttccaattaaaacttattattttttttatcctgtaacgtaaggatgagtaaaatagggagtgggagttgagatcctatttctctctatttg

SEQ ID NO: 280354 - DNA, 817 bp, Cannabis indica
cccctactaattttcatttgtccggcttcaatttttcttacaattccttggtcatctagaacacttagtgaaattaggttcctggctaggttaggaacatatctaacttcacttagggtcctgaccatgccatcatacatcttgaaactaatagaaccagatccttgtatgtcacaggtttggttgtttccaagtataactctaccaccattagatttcctgaaatcaaacataaaattcttattattagtcatgtggaaagtgcaaccagagtcaaggatccattcatctttgatggatggtccaacttggtacacttcaccactttcatatccatcagtcaaattagcatcatgcatatcaggtttgttcttagagtttgagtgtttagaatctccctgtccatgtggtttttgtatgttatttctttttaagaaataacaatctcttttaaaatgcccaggtttgccacgattgtaacaaccattagtttcatcagcatttctagtgttagaattagatctacctctttgttgtcctcctggtttgcttgaatttctgccttgacttctgcctctgttattccaaggttttcttggacctggtctgcccctactcaaattgacttcaccatttgagtttccacctttctctgttctcatctctaagtctttagattttagggcagagatcacctcctttagggttattgatgtccttccatacttaatagcagtcttaacttccctataggattcaggtaaagagtttaggataattatagcctggttttcatcacttagagcctcattttccc

SEQ ID NO: 280355 - DNA, 554 bp, Cannabis indica
gtcttctctgtacccttgaaggtcatcatgtaaagaacaaatgggcctttggaaaaatataatgtgcaaaataagagtgtactcaaacaccagaaaagagaaatctaaacgtgttgcacagaaactcaaggcgaaaaattcctagaaacttcgaacattaaacccagaaaagcagatgaacagtaaagcatgccatgaacacaaacagtaaagtgagggatgcgaaaaacttacataaagttttagaactgggagttgttgttgtatcgacgatgaaatgttgactgacacgtaacgaatgaagatttggtaagaaacctatagagtttgaggttctggtttgagggttttctttctctctggaaaattcgaagaaatttgggtgaaaaggctgaaagtaaccaaatgaaggaagtatggtggcttttataggcaaaggtgcatgtggaacaaggcaatcacctaccgaatcgaacgactggggaggcgcacgattcgaattcccaagatccaacggctagattggtcgtcatcaaggcggtggaaacgcttga

SEQ ID NO: 280356 - DNA, 885 bp, Cannabis indica
tcaaataacatgcagtgatcaaagcctctccccagtagattttacctaaaccagaactaatcaacaagcacctaaccttgttcaacaaggttctattcatcctctcagcaacaccattttgctgaggggtgtgcttaacagttctatgcctaacaattccaaattcagaacataacaagccaaattcagtattaatgaactctaaaccattatctgtcctaagcactttcaatttcctttcatactgattttccacttcaattttccattctctgaatttctcaagacattcatttttggttttaagtaaataaacccatacatgcctactgaaatcatctacaatggacaagaaatagtgtttacctgagtgagttccaaccttgtgagaaccccataaatcagcatgaacatattctagtggtcttttagaacaatggtggccagccatgaatttcaatctgtgatgctttcccaacacacatgcttcacagaaaggtaatgagttcggtttgaaattgcctaagagcccttgcttggtcagttctttgatcccttgctcactcatgtgacccatccttttatgccacagttccatctcagtttcttggtgttgcacaacactagcttcacaagccattactgtatctccttgcagaatgtacaaaccattcttcttttcacctttcatgatagtaagagacccctttgcaattctcatatgaccattgttagacttgtaactgtagccttcatcctcaagagtaccaagtgatatcaagttccttctaagttctggtatatgccttacttcatgtagcattcgaacagtaccatcaaagtgcctaatagcaacctttccaatgccaattaccctacaagaat

SEQ ID NO: 280357 - DNA, 403 bp, Cannabis indica
aacaatgagatctcatgcttggatatttttcaataaagaagtatttgattgtctttatcttattaaattgttttatacggactatcctatgtgacatctcgggaaatcagggtgttacacttataggtttttattattcattttttcattattttaatggcaaataattctaacttaaacctaggtgggtacctataaataggtagtgatggcttcaggaaaagatgacacatctcattccttcagagaaaaatttctagccgccactttctctcttcttttcttctctaaatttcgaaatcctttagtgaatgagtgggtgcccacacacatcaagtggtatctcaatcatagtgtgtaaggctgtggaaaatcaaccaacaagaaggagattcagcatcaa

SEQ ID NO: 280358 - DNA, 476 bp, Cannabis indica
tctctcaattttttttatcctctctattgaaccaaatcaattgttttaatcttaagagcttcggggtcagcaatcaaccgatcatcgttccgtgtcttcgaaatcttcaggtaaaattcgtagttgtttttattttcgttttcagagaaataggctttcataaaactatcatatctctctccccataggtccgttttcagtgatctaggtaccgttttaaagataatttaatgatctatattttttatgaagaaactctttcctaattctgagtatttcgatgtcaaaaaattcatgttttacactgactgtcgatttacagttttttaaaatttctttccgatattgccttagtaaaagtgtgatatctctctcgatatctattattttacagcgattcttgtactgttagaaagataattcaataatttatattttctttgaagaaacctttccctagttcggagttcttacca

SEQ ID NO: 280359 - DNA, 761 bp, Cannabis indica
attagttttttgatggaagaaatggaagtacaaatttgatggatgagctgcgccattgtttatggctttggtgccttttaaggttttcgcgcatgatttatggctggcccctaattatttagggtaattggttaaaattacaagatatcatgaattgtaaaaatattataaaatttaatagctaacaattatggtatataattatgagattattgccttattagtttattatagataacataatattaattttgggtatataaattataaatatgagtttattatagataacataatattaattttggtatataaattataaatgtgggattttgtaataaattggaggtagggacattaattgtgaattgagaatactttgttttattttattttttatttttgggaagatattgaaataaatgggaagtaaatgctaatgaagtattgagattattgccttattagttgtataggaagatactaatatgaatagtttttataataatttgaatggtataataattaggaggttatctatttaaataataaataaggaagcattatgtcataataccgaattggattaattaatattaatttaatattattaattaaatgtatgatgaagtggtattaggaaaatggtacttttgaatgtgaaaagtgcaatcttaagttttaaggatattaatacaattttagtttaatttaggttgaataaagattatagataccatgttttacgctataaataaaat

SEQ ID NO: 280360 - DNA, 854 bp, Cannabis indica
ggagaggtatgcccaaacagtgcaacacgagcaagaagaagttatcctggtcgtggaagaaaggatacccaaagttccacgagcaagagagccgaccataacctttaacgatgaagacgctgtcaagattagattttcacacaacgatccgctggtcgtggaagtccaggtagccaataaaatggtagccagaaccatgatcgacaatggagcttcttccaacatcttgttcgagactgcttacgaaaagatgggactccaactcaaggatctaactccatgcctccagcctgtctatggtttcttcggtcaaggagttgcacctctaggacaaatccggctacccctcactgttggacaagctccgacgagcataactatcatggcacagttcctaatattggatgttccttcagcttttaacgtaatgcttggccgaccagccctgtatgacttaaaggctgtcacatcaatatttcactcatgcctgaagttccaaacaaagaatgcagtagggtgtcgaagaggaaaccagcagtctgcacaggaatgttataaccttgcactggccaaggctaagaaggaagtatcctccagccagagcacagacaagggaaaaaacattcccaagtagggaacttcccaaggcgaggatgaagatgtggatcctcgacttggggacccaagcagcaatgttggacctgtagaagaattagaagagatcgagatcgatccagctatcccgaccagaaagctaaaaatcagaaagggtttgttgctcaaagtaaaatcagaattgataaaatttctgagagcaaacctagatgtttttgcctagtcacatgcggatatgg

SEQ ID NO: 280361 - DNA, 578 bp, Cannabis indica
tttgaacttccttggttcttgttggccatttcatatccaggagggcttgaatcatttctggattggcttcaattcctcgagcattaacgataaaacctaaaaacttacccgagctgactccaaaggagcacttaaggggattgagtttcatgttgtatttcctgaggaccttgaagcatttgtccaagtcatctatatgcccccagccttcctggatttaacgagcatgtcatccatgtgaattccatgttccatccggtctggtctttgaacatcttgtttaccaatccttggtatgtagctccggcatttttgagaccaaatggcatgaccttataacagtagagacccatatctgttcggaaacttgtatgttcttggtccagtggatgcatcttgatttgattgtaccccgaataggcgtccatgaagcttaaaatttcgtgccctgctgtttcgtcgacaagtggatctattcttggaagtggaaaacagtcttttgggcacgccttgttgaggttggtgaaatcaatacatactcgccatttctttttcggcttgggtaccaatatgggatt

SEQ ID NO: 280362 - DNA, 502 bp, Cannabis indica
gctcggattcttttgttgttgagatttctatagcaacatattcctgtactgtagcctcgactactgcttctgtagcttcgtcaggttccttttccttggcagcaggcttttcaagcgggtcttcaatatgttcttctgtagaaaactcagacaaatcttttaggtcatcaacaacaacattaccagattctataacagtttgggttctcatgtgatacacacaatatgccctactatttgtgtaatatcctaagaaaacaccttcatcacttttagcatcaaatttaaaaatgtaatcacgatctcttaaaatataacaaacacatccaaacacatgaaagtgacttacatttggtttcttacctttccagatttcatatggtgttttgtgagtacctgggtaagaatactctgttgatggtatagcaagcagtgttcatagcttcggcccaaagacgccttgtaagcttcttgctattcaacattactctagccatttctg

SEQ ID NO: 280363 - DNA, 732 bp, Cannabis indica
tttattagatgaagggcgtaggacgcctttctccttcccaaagaaggctagaagcgatagtgtaagggttcccaaagcaagccctaactcattccgaagagaacatggtgactggatgtttctccagggctaccgaccaacaagggtcacctcaactgctaagcttacctcctacacgggccctgtaactcgatcgagagctcgtgccatgcaggaatcagtgaatccctcttttcaaaaagttcaggaagaagggtgtacatctgaacactctttagaagacactccccttattgaacacagtgagggggtgtctgctgatctcattactcagttcgaagcactaaccattggcaatgataaaaatatgccggtgttagtaactgggacaatcagtaatgaagagaagattcaggaactgcaaaggttattggctgagagggacgaagaagtagcccgactctcaacagaattatctcatcaagttaatatgagacaaaaggagagtgagattgggcaacaatcctcgtcctcagtgccgcctgtaggcaacacacaaccgccaccacaaggtgtgcaaccaccactagctggtgtccaacctcagcaggacttaaaggctcttatcatggagggtattcgggaatatcaggctgcaacaatgcctattcttagatatcataagccatattcagcttactatgatcaaattccatttccaccaaactacat

SEQ ID NO: 280364 - DNA, 771 bp, Cannabis indica
tattattatattgtaataaaaacaaataaatatattagattattaaatatgtataacagtatttgatatatcgtatcattgaaaattaatataccgtaataaaactataaggtattttgtgtgatagcaatatattagtccaaagattgacctattgtttgacacagttttgttgtcaatgtttgattgctacaccaagagtaccgcttacagttaatattactgttcaaagacttgatattaatgtatgtttggtatcttgagatgtgattaaccaatttttgaatttattatttgattatgcatattaatgtgagcttgttttatttgttctatattcagctagttcatcttcctcaatatctgctaatattaattctattcctatgcttaatgagaccaatttcaaggattagaaaaagaacttacttatagttctgggatgtatggatttagaccatgcactaaagaatgaacaacctgcacctgtaacgtcctaatctatagggacgccacgtgtgtgattttataaactagtttattactaatagaataattaattattaaaagctgtgataatattaaaaacttgactaaaataaaacattaaaaacagacattataacggcataaaaagcgtgttccggggatccctgttataaaaagttttgctaaagaaatatatacgacaaccatttaaacacaaaatcaaaatacaataaatacagccagcctaaaacaactcctggcaactcggcacgcaggccagtg

SEQ ID NO: 280365 - DNA, 234 bp, Cannabis indica
tgattatatgcttacttgagtagaattaaataggttaggatgcatgttaggtggttttgctcaagcttgagtttggaactcaaagcttgagctcaaatggtgaattttgtgtatgtggtttctgggtaggtttgatgccttggaattgttatttggggcatatagaacaggtctggaaagttgggttcgaattggtcaagttaggagatttttagtttgctgcctgcgaggaac

SEQ ID NO: 280366 - DNA, 437 bp, Cannabis indica
gataaatgatcaccctggcgcaacccccttcgtgcaacaatagggcccaactcctttcccccatgagagatcgtgtacgagacagtgcccacacaatgcataatcaaattaatccatctaccatcaaagcccattctttcaagcatagctcgaagatatccccattcaagtcggtcgtaagcgttgcttatgtcaagcttaagtgccataacaccattacggcctcttctcttcctcttcaaataatgcattatctcataagaaatcataatattatccgatattaaacgaccttggagaaaacacttttagtctccgatataattgaaggcataacaactttgagccgattagcaatgacctttgaaacaatcttataaagaacgttacaaagggcaataggtcttaagtctcccatgtccattggttgtttcttc

SEQ ID NO: 280367 - DNA, 549 bp, Cannabis indica
ctaattagcataaggcaattacgtgtacatatataaataataatgtcaaatatatatgcttttaattataacttggaaacaaattagagggcagaaaaaacttttttggaacttggacacgaaatttattatattataacttttttacttgaattatttgacttcacgaacttgtaatgataatattaatatacctatgtataaatagtatgtgattatgtaattttatattaagatcgctttgatgaatttgggacaatgtgtgtatcacgcaaataattgggatgtatgtacaagtagtcttttttttttttttttttatttttcagaacgaggacattctttgaatgaagtcatctatttttttttttggcaaaataagggtattgtttgaatgagagcatttatttttttggttcacgacatttcttagatgagaacatccatttttgacggaataagagcattctttaaatgaaggcatctatttttttgaccgaatgagagcattccttaaatgaaagcatctatttttatttatggaatgag

SEQ ID NO: 280368 - DNA, 790 bp, Cannabis indica
actcgtgaccggggattggacgggtggtcgttggttgtctgggaggcattcatcatcgggtcattctctgtttctcccaggggaatgacgctctgtgtttgctggcctacagtctggtaggctcttcgtatcagcacagtagcttgccagctacgatcttcgatctctgcatggtgagcccttaatgcctccatctctttgtctctccattcaacgaacatacgcctctgttcatcaaacgcgagatttactgcgacacgcggttcctcctgatcatgatgcaaagtattgctatgaccctgcatgagtccgagcgcagcacgaagattttgcaattcgattgcgtctccgatggtcgtttgggcgttgatgcctggtggaatagtcgtgttatgaacgccctggctgtgtgcggaactgttattcccagtctcttgcacaccagtcgtagttttagtaacaggagttgtcccaccattcaccgtgtttcccgtctatccaggattgacagcgggcagaacccttgaactccctgggtcctgcaatgtcggatccaacatctctgagttttttgggtcagacaagcctctacgattttgcaccatcgtgtcgaatgtcgaaaagagcgatctgcgattctcctctcaatgaaagcaccaaaatgttgacttcgcttttagccaacgacaatgagtctttttgataagcgataaacgatatgtcataatgagaatatatataagaaatcaataataagacagaggaagtttatagaggttcagccccgagc

SEQ ID NO: 280369 - DNA, 416 bp, Cannabis indica
attaaatcaatgatgaaatctatctcacgctgaggtggtaatccaggcaattcctctggaaacacatccaggaattccttaaccacattaacctcttctggcccaagtaacacaagtttattggaatccactacaaggttcctcattctccggttcaaaagttaccatttttcgtttacaatcaatactagcagaatatttggacaaaaagtccataccaagtatgatgtcgaactgacccaatggtaactccacaagatcgacactcaattctctatcttcaatttaattaacactgatctaacccattttcttgaaataattaattccccattaggtcaacagggttccaaaccccgtactcaaaaactatcaccaggtctatcaagttgatcaagaactcttgatgacacata

SEQ ID NO: 280370 - DNA, 493 bp, Cannabis indica
ttaacaacatgcatacacaagaacacatcaactatacatgctattaaaccataaaattcagcaaggaaaaccaattagaaactcaattaaaaactgtagagactacctgaagactaagcaagaataatccccacaatcaagctccaaaaattagctccaattcacacatattttcttcaaattcaacttgaaataacaagagggttagggagagagaaggggtcggctaagaggaaagcaaaaccagaaaattgcatttcatttcatcaaaaatcaattttaatcaaacataataattaggggtgaaatgaccaaaatgcccttagggcttaaatacccacatacaccctcacaagggtaaaatagtcattcaatactcaattaatttcaaataaatttcagattatcatttatcaaataaaatgccaaataatcaatccaatttacatttcatgcccgaacccagttcggcccgaaattctcggttgtgact

SEQ ID NO: 280371 - DNA, 663 bp, Cannabis indica
ccatcccgtgacagttctggttgggatgagttcattcttttcattcttcaccaccgtcatccctcctttctttggaacaacttggactggactcacccatttactgtctgaaataggatacgctaccccggcatctaaccactttaagacttcttttctgacaacctccttcattggtggatttaatcttcgttgtgcatcaatggtaggcttcactccttcctccattaagattctatgcattacagttgaagggctgatccctttaatatctgctaaagtccatccaatggcttttgtatgcttccttagaacccgtaatagcttgtctgtctctacagaagatagggaagatgccacaataacaggaagtgtcttattttctcccaaatattcatacctgagatgctctggtaggacttttaactctagttgaggaggcttttcagtagatggggtaggctttgttggtatgactcctaactcttcatagtattttctattcagcggtccataagagtcgagccacttgccgtcttgttccaccacctccccttgtaccaaagtcagattaagagggtcttcaatatgcgtctttgtctccaccaactggtccaccacatcaattccaaaacaattgtcactagccgtagggtaggtcat

SEQ ID NO: 280372 - DNA, 720 bp, Cannabis indica
ttgctaaaatcaaaaagtaaccttgccacctaagggctattttggtcaaatataaaaccataaatattcttgacattcttagtgtctatctaagttgcctctttatttctaaaatactaaactataagaaagagtgactctatctgccaaaaagtcgcattccactattaccgggcataaaataacaaaaaacacgaaatttcttatataacattaatagcacacctaaaattcaaacatatctctataaattcataaatcataattaaaaatctaattctgaattaaaccctaattatctgctaattctcaaaacaaaaattaagcggtcattacaattatccccccgttaaaaggattttgtccttgaaatctaacctgaacaactctggatattgagccctcatttcagactccaactcctaggtggcttcctccaccttacttttcctccagagtaccttgaccaaagctatggtcttgttccgaaggaccttatcttttctgtctaaaatcagtactggttcctcttcacgagtgggatctgcgacgtatttccataacatgaaaacatgaaatatgttacgaactgctgatagtgttggaggcaaggctagacgataagctactagtccaaccttttaaagaatctcaaaaggccctgtaaacctagggcataactttccctttttccagaaacgtttaatccccttcatcgga

SEQ ID NO: 280373 - DNA, 418 bp, Cannabis indica
gttagaaaggaaaaaaagagatctaaaacttttatgttttgactttatccaaaatttgattaaatatagtcgaatttaggcttgaaggtttagctttttttctctttaaaaatttcctctattttatagatcactgttttccgaaatttgtccaatttatacattccaagtgtagaaacctgaaatcaaagaaaacaagcgtaattctattccaaaaataacaataaagaagaaaaacaactataaaatgtgacccgaaacttaggctaaaaatagcctaacagttaggtttgaattatttggcattaaaataatgaaaatatcagaggtaaaaccctacaaaagtggccggccctagaaatatggatttgggcctcactttttgcaattttgcagttttatcttttttgcatctgat

SEQ ID NO: 280374 - DNA, 560 bp, Cannabis indica
gacaatgtccacaacagtgataaattaatttaaggcattcaggcaacaaagttaaaccatacccaaagatagtgcacttcttcaatgtctatgtacatacgtgccttgtccatatatattcactagcaaaaagttacgtgtagttttatgattttatattttatttaaaaataatacaataaataattaaaaaaaatattattaattattgtttaaaattattattattattatgatgtatattcaaataatataattaataatactaataattaaaaaatacgaattttaaacattattatagtttttaagattttatctacataagttcaacgtctggtagggttccactgtacgcgtctgctaggttcaaggagggcgccgtctcctagggttccaggaggccgccgtcttctatggttccaggagatcttcgtcttctgctcgttggtgttcgttcgacagccgcgttcgtctgattgtcttgtcttgtgacatggtgtgattctattattttctgagttgttttgtgcttgtttcgtttctttggtttggacaag

SEQ ID NO: 280375 - DNA, 935 bp, Cannabis indica
ctgtcacgatggatctcaatctccaaaactaaagatgcctctccaagatctttcatatcaaaattggtagacagaaaacttttggtctcatttagtaatgacaaatcactgctggcaagtaaaatatcatctacataaagaacaagaaaaaatatgatgactcccactgatcttcatataaatacactagtcaaacttgttctcgatgaaacccaacagtgtcacaaccttatcaaacttcaagtaccactggtgagatgcctgtttgagaccataaatggatcatttcaatttgcaaaacaaattgtcatttccattttcctcgaagccttcaggttgagacataaaaacttgctcactcaattctccattcagaacaatagttttaacatccatttgatgcaactctaaatcaaaatgcgcaactaaggccataataattctgaatgaatctttagtggaaacaggtgagaaagtttcagtgtaatcaataccttctctttgagtaaagcctttagccactaaacgcgctttaaacctttcaatctgtccctttttatcccttttagcctttaaaatccacttacaacctattggtttaaaaccatcaggtaataaaactagctcccatacaccatttttcttcatggagtcgatctcatcatccgtagctgctaaccattttgaagattgtggactattaagtgcttcactaaaagtgacaggatccacaaaatgatcaatatcatattctccttctccaagataaacaaaattatcatgacactttgttgacttcttttgtctctgagatcttcttagaggaggtacttctggaataacttctctttgttgatcatcatgttttgaattaaaacatctccacaactggaatttcttctgtaaactggatctcattacaatagagcttcatc

SEQ ID NO: 280376 - DNA, 841 bp, Cannabis indica
aagattagtaaataactaaacacaaattactaagggtcctattgttgacaaaaaatatctactgccatcttccttctgtagaatgccattttatcatctcataaggctttcaaagctaagaccagccatgtcgaactcaatgaacttaattacatacaccacacaatctcccctgttataagaaatttttgaaatcaataatacatatatgtttgcaataaatatcgaataagaaagcatgtatgaatagacttataaatatacttacgttgtattttatggaacatcaagtaatcgttcttctccattagattcagcttgttcttctccatccaattatgtttcttcttgtccacttgattctgatatttcttctccatttgtttctgattgttcttcgaaacttttcattgactgatttaaataaaaagaggtaatatatattaatcgagtacaaacataatagtcaagctttacccataagcggttgagctcaactcaagacagttgagctttatactaacattacaagaatttggagactacatctcgaccatgaatggtcgctctactccatatagtcgagctctacactaacatttcaagacttttgagactacattggtcgagctctactaaaagtagttgagatttatactaacattttaattataatctcaaccatttatgttcgagctctactaacaccaatcaagctatataatatatcaaatagactttagaaatctcaaacatatttggtgaagttctacccatttaccgcatcatttgattgagttgttgttgtacatgtgagaggagttggttcgttcaaaatcaa

SEQ ID NO: 280377 - DNA, 503 bp, Cannabis indica
ggatccgggtccgactaccaattgtctaggtctcatttggagtccgggtaattgtcatgttacggttctggatctatgtcaaacttcagttatgtttccaagtccaagtcctagttctagtcttggtcaacttccggttttggttccaattttgggtcacagggtaagggttcgcgtacacttttgggtttgggacttggttcaggtctggctgtgggtttgcgtccttgtcaggattcgggtccaaggctgggtcccaaatccaaacaccgactgcggattttgtgcaagccctgggtccagatccagatcccaatctcgagttgcagtttggtcccatttctggtgccgggtcaagagctgggtcctaggttcaagttcacgtctgggttgttggagttattttaccaggatcttagatctactcacaagtatgtttattaacaccctaaatatgagctttctaaaacgatgaaataaacacgtataaagtttaagatacc

SEQ ID NO: 280378 - DNA, 519 bp, Cannabis indica
ttcatcaaatccataaaagttgcaggaacattggtgagtccaaaagacataaccagaaattcataatgtccatacgtagtgcggaaagctgtctttgggatatcctcctctcggattctcaactgatgattgcccgattggagatcaatctttgaaaagatagttggcccctgaagttgatcaaaaagatcgtcgatcctaggtaaaggatatttattcttgattgttagtttattctgttcccggtagtcaatgcacatccgcaaagacccatgtttcttcttaacaaataatactggagctccccaaggtgacacactgggtcgagaaaacccaatgtcaagcaacccctggagttgaattttcaattctttaagttctgctggagccatcctaacgagccttggaaaccggttttgctctaggtgcgaagtcaataacaaaatcaatttctctctgaggtggtaaactaggaagttcgttgggaaaaaacatctagaaattcccaaaccaccttga

SEQ ID NO: 280379 - DNA, 685 bp, Cannabis indica
acttccagacatagatttcatttatctaaggaaaagcaacaactattccacaaaagataaagccatgaaggaatcaacagtgagaggtctcagatatgctttagtatgccttagaccagacacctgctgttgagtgggagtaatgagtaggtatcatattaattcaggaaaagaacattggaagacaatcaagtaaatcttaagatcaagaaaaggaactatatgttagtcgataagggagtatttaatacccttagactacacaaaatcagatttctagacttgccttagtgctagaaagtctgctgatgagatggtgattactgtgggggtggactagtgattttggaaaagtgtaaaacctatctgaagtctctaagtctaccagagagagactgaatgttaaagttgcagtaaagatacttattcagtctaaggaaagttttattcctttttttgcattagttccaacatttgattaacgactagtgttacttcctgactaaaacaaaagtagttgccaaaaagtatagaatccagtatcccaagagagtagacatatagagaggaatttcacattatcaaagtttttgtgattaaggagaggtaatggtggaggaaaggttgggtttaatacaacctgtcagatcctattacgaagagtatactactactacacttgatt

SEQ ID NO: 280380 - DNA, 567 bp, Cannabis indica
tataatattttgattgattaaataaatgttacaagtgtgtcacacattttaatctagtgggaaattgttatattattttataatataataagtatagattaaaatgtggtaatatatatatatatatttgataaatggtaatatatactattatgtgaataatatatattaagtgtttggtaaataaattgtgtaatatataatttatttaacctatagttgtaatctacactttgtaatatggagaggaattacaagattaattaattttgtaacttcttttggttgatcatattttgtgtaacaaaagagatgttacacaattgatgatggaattcagatgttataaaatatagttgttacaaactatattaatactcatttatataagagaaatgagtgttgtgtatttttaattctaagtgatcacctatacattataaaaagaggtctttagtgctcatttgagagagagaagaagttttctatcaagaaagcactttgctagaaaaccctaagacttgataatttccaaagccatttcctagagagttcccttagtgctta

SEQ ID NO: 280381 - DNA, 954 bp, Cannabis indica
tgacagcttgcatctcatatgcccgctgctgcagatctgtcgagtgtgaaagctgataacgcctcaaccaagattgacacacaaagacagaagaagaattagaaatgctgatacaacaatgaggtacaatgtaaaaaacacattagctctatatttcccgaatccatggttgaaacaaagacaggtgcgagcaaggtaacatctcaagagcataataacttactatgcgctcctattttcttcaaagttaagacttctattaaactaaaaagacattacacacccaacttttattgattgacaacaacataaattatgcttacgaaaacaaaaaaaaaaaataagagatatagatgtaaacaccattaaatacgagtagctatatgagcagtcctcaaattcaccggtgaagcccaaaaagaagctagacaacataacaatcacaaaaagttacaactggtagaactcactcctgaaaagactgccaaagagaggagggtgtccaagtagttataaaccaccaactaatcccacacttaggtgaattcgtttgcacttaatttgggaatgaattttaaccctattaactccatttgttatattttttttcccaaaactcttattacctcttaactcctcttaccgattcagacataaatttgtgtcataattttttagacaatatacatatatagctctaaattatcaaaagaaaatcaaatcaatgctctctttctttttttttaaaaaaaaagtcctaccttccccttttatttataaataatattacaaaaccttcccacataatattatatagggtgattctacaatgcacccctttaaaagggatgtattgatgcacccttaacttgtttcgacattcagaataattttttagtctaattttttttcatattcatgtgcattatatctatttaagatatcctacaaaat

SEQ ID NO: 280382 - DNA, 572 bp, Cannabis indica
gactattaggattgtaacaatggataattataacgtatctatatcgtggtacatatagagcgttctatatagctgagagtgcaattccaagttctatagtggttttagggaatttacttggtaaattctagatctgcttattggaaggtcggttatactacttgtagactcacttaattaattttaattaatcaattataattctaaaattagactatgtattatttaagaattttcactaagcaatgtacataaatgataattttatttaataattaattataattattaaataaataattttggcatttataaggttgaattgaaaaatatggtattattgaaaagaagaataagtggttgaaataaagtggtaaaattgtaactagagattggtccacttattgtgtacggccaagaggtatttttgctctcttctcatacacttgaacttttgtcaacttaactattcaaccaaacctagatgagagagttccttctgtagagattcaaacctccttcattgttcttcaccattcgaaccttgagtgatgagtgtcatgcccacacat

SEQ ID NO: 280383 - DNA, 548 bp, Cannabis indica
acttttcaatttcaagaagacgctcacgtctggtgggacatggtgtccatgattcatgatgtgacaactatgacctgggaaaagttccaaacactgttcaatgctatgtattacaacaaagcagtcagaagtgctaaaagaaaagaattcacccaattgactcagaaagaaaacatgagtgttactgaatacacaattcaatttgaccgtttggcgagattggcctcgggaattttgccaaccgatttcagcaagaaagagaagtatctggatgggttaaatgtgaagatcagacacgacttgatgatcactattgacgacagtaccacccttgttgaaatggtggataaggcactgcgagctgagggcgcagtagagtgcactttagagtctcgggggactccagttgttggcagggctcctacccctcctggatcaggctttagtaggggaggtagtggctcggccactgatcagaaaagaaaggcatctaatgcaaccagtggctcaggtcacaacaagaggttctgggggaactagggtcgagg

SEQ ID NO: 280384 - DNA, 1250 bp, Cannabis indica
acaaacttgcatttctcattccacaatggaagcggagtttatagctctagctgccactgggaaagaggccgaatggttaagagatctcttaattgagattccaattattaaagaggatgtatctacaatatcgatacattgtgatagccaagcaacattggctagagcatatagtggagtatataatgggaagtctagacatattagtctaagacatggatatgtaagtgagttgattcaaagaggagtcatctcaatatcctatgtgagatcaagtgaaaacttggcggatccgtttacgaagccactaactagagatttagtggaaaagacttctaaagggatgggactaaaactccctaaaccggttcacaattgagggtaacctatcttaatactagtaactttactagtgttaggttcaataggtaagaacaaatcaatgtgtgaacaaatgtgataagtactatatgtcccatcctataaagttgtgaagtacttagtgagttaccaatttgagggttagacttttaaaagtctttaatagaattcagtttggaaaacaagtattttggtaacaaatactgtaagaattctacctatattgacctaagggtggtgccgccctaaatgagaaatagggagtatattttctcaacaaggtcaatgaatggaatgtgcacaaggccattaacagtgcaaagcgagacatgaggtcttgggtgaacctagcaaaggtgtgtgtgtcattaccgttttattataaagaaaagttggttcaatgctttgtcaaccaaattttcaataaaatttgtgatgattacactatggttaagttcaagttgaaaaacacttaactttatgcacttaagcaaggactctatagagagtgttgatttattcaatcaaagtgggggatatatgagatattgattaaataaagtgttacaatgaggtatcacaaattttaatctagtgggggaatgttatattatttattatataatataatgtttaagattaaaattgtgatatgttatatatattattacatataatataattgggaattatatgcatgtaataatcacaatattatgtgattgggagttacatatagttgtaacatataagaggtggagttaatattttgtaacttccacatgatcactaattaagtgtgtaaagagtggttacacaacttaatttttgaaattcaaaaactataattcaaatatagttgttgggga

SEQ ID NO: 280385 - DNA, 251 bp, Cannabis indica
ataacaatggataaataatgacgtgtctatatcgtggaacatatagagtgttctataaactgagagtgcaattctaagttctatgcctaggtggttacctataaatagatagtgatggctctcattcacacttaactttgtcagatgaaaaactgagcctctatcttttctctataggccgaacctcttccctcttcttttctttctctaaatttcgaattccttgagtgaatgagtgagtgcccaacaca

SEQ ID NO: 280386 - DNA, 944 bp, Cannabis indica
aggaaaatagaacttatccactttaattaaaacatcttttataatacctctaggaattttcacagaacgatcagctaattgaagtgttatagaagttggttttaattctcctagaccaagttgcttataaacagaataaggcaataaattcacactagctcctaaatcaagtaaagctttgttaataaaatgatcaccaatgatgcatgaaattgttggacaaccaggatctttatatttcacaaggcttttatattgaattatggagctaacttgttcagttaaaaatgccttttttggaacattagtgtttcttttaacagtgcaaaggtctttcaagaatttggagtaggcaggaatttgtttaatggcatctaagaatgggatgttgatacttacttgtttgaacacttctaagatgtcactatattggttgccttttttgagtgggagtaatctttgtggaaaaggagcttttggaatggaaggaagaatttgatcattatcttttgacaagtcatttgtgttggaactttgaggttggctttggtctttttcaacttgaggtgtgtaatcgggtttggcaatttgttttccggacctaagagttgaaatagacttggcttcttctttatgacttggaactcctacttcatattggcctttaggatttgggacgggttggctaggaaatcttcctttttctctctcagttacggcattggcaagttgacccaattgtgtctcaagtttggcaatggattgagattgattttgcatgatttgttgggtggattgcatgaattgttgtaaagtgtcttctaaggaaggctttctttgtggagggtaaggttgacttggttgggcatgattcggatttggcatgttgaattggtttccttggttcatttgtggttggttttgtctccatgaaaaattgggat

SEQ ID NO: 280387 - DNA, 611 bp, Cannabis indica
gctaaagctcacctacaagcataaaaacttggtttaaactacataatcatgcatataaaaactgcagaaaatgaactcaagcacaaataatctctacataaactaatttcacattttcactttgaaaaaccatagttttggagctaaaatttaaaactttgaacaacacaacaaacatgcatcacaagtagctctattctactcaattaaacatgaataaacttctgtaaacaacatcaataattaacagcagcaacacaaccaaatcaagcatgcaaatcatcattttcttccaaaaattccaagaaacatagaagatagttacaaaaccttaccaaccacttgaatcacacttagaattgttgaaaatgtttgaacaagcaagaaaattcccagccctagcagccccaatccaaaccgaaagagagagagagagagagagtaatttttgatattttaataaaaatgaggaaaaagagagtttttcttaattaatcatattacttcagccacataacacttagaaaatcagatttaaaaattaaatattaaaccttcactaaagacaaaactcaaaaggcaaaaagaccattttgccctcctacataaaa

SEQ ID NO: 280388 - DNA, 856 bp, Cannabis indica
tttttttttttggttaaaaaaaagttaactaatatttgattttgtgcctataatttgttaccatctaataaacacaggtgaaaaacttggattagatgcaagcaaaaggatgataatgaatgatgaaggagcagagattgattcgattgaagtaattagagataatgacaagctttttcattgttgattatttataattgaagttcgatcaacaatgtttttactccttatataatttgataatcaaataaacatgtttggatcaagagccaaattgtctacttcaaatgttgaaatatatgtgtaccagatactaattcagttagattttgtgttacttctatagaagagtgattttcattactaataaaagctctttgtacagtttataaaagaaattacggtaaaataaatgaaaccaaatgagaggattcggtcaaagaaatcgatttcatatgatatggaagaattatattacattgctttctttcttaacaaatgctacaattttttttagtgtaactcatcatctatcaacaatacatgcttcatttcaaacataataataaaaataaataaataataataagtaaaataattcaatgactaatccaaaaaatggcactggaaagaatgcataaaatgagtaatttctctctgcgagatgatttttgtctaagcgtaaatttttatttatatacgtaattaagaaaatattcttatagataacgacaaataaattaaacatcctataaatgcacatgcttaccaatatatagaaataaaatcctacccaattgaaaaaaatgaaaacctagaattttcaggcaaccaccatttggccaaacatataaat

SEQ ID NO: 280389 - DNA, 521 bp, Cannabis indica
tggtttttctgataaaagtgctgcatctcaaatgtggtattttgataggggttgctctagacatatgataggtgacaaggactttttgattaacattcggcctatgcagtgtggggaagttacttttggcaatggcttagctagaaaagtcgttggtatgggaactctcaattttgaagggttacccagagtgaaaaatgtgatgttagttgatggactaagggctaacttactcagtattagtcaaatttgtgaccaagggtattctgtctcatttgacagtgatcattgctatgtacttaatgatataatcaatgtattttgcaaggattttgctccaatgataattgttataccctaactcctgtgtttacttgttattcagccatcaacaacaccatagatttgtggcatgccaaacttggacatattaattataaaaattcgaaaaaaaattgtcaaatgtaggtattgttcgaggtctacacaagcttggtaaagaaagtgttggtaagtgtgaa

SEQ ID NO: 280390 - DNA, 495 bp, Cannabis indica
aagatctatagattcatcactagactccattgaatcatcatcttcctcagagttagtagaggatgctttcttcttcttcttcttctaaatcaagttcatcaacatcaatatcatcattttcttcttcaataatggtccactatacgaattatccgagctcatggtccatcttcctatcaggtatatattttttctctacaatataatatgtgaccgattgagccaagttcttttattgttctcttctgggtattttacatattttgattttggtgtattaaatgtttttttttatatgtgcagaagaggattgtctaagtattatcaagggaaatctcagtctttcacatctttagcaaatgctgtaaatgttgaagatcttcccaaaaaggtttcaccttacagaagaaaaatgatgatgaagtcatgcaagagctatggagggggattagatagcaaattacactatcccaagggtctcatatcaaagaaatc

SEQ ID NO: 280391 - DNA, 498 bp, Cannabis indica
aaagaaaaaacaaaaaccacatggacagggagattctaaatactctaactctaaacctaaatctgatatgcatgatgctaatgttactgatggatatgaaagtggtgaagtgtaccaagttggaccatccatcaaagatgaatggatccttgactctggttgcactttccacatgactaacaataaaacttttatgtttgatttcaggaaatcaaatgggggcagagttatacttggaaacaatcaaacatgtgacatacaaggttctggatctatcagttttaagatgcatgatggaatggtcagaacactaagtgaagttagatatgttcctaatctagccaggaacctaatttcactaagtgttctagatgaccaaggaattgttagcaaaattgaatctggccaaatgaaaataagtaaaggggctctaactatcatgaaaggacacaaagatggaggcttatactacttaaaaggcacaccagttgtaccttg

SEQ ID NO: 280392 - DNA, 491 bp, Cannabis indica
tacatgtcacttgagaacacattatacaatacaaaataataaacacaaggagtagggtagaagaccttatgcaaacttctctttaatcattcccactctttagttaaatgttattacgtataaaaatcttacttctctacttgattttctactgtaaggctacagtgtcattctttcaatttcatagatgttactcactcatcgatagacacttgttccatgacacttggaaataaacatgtaagctcttaaaaaagtcttctatatataaatattttaatgatccatttcgaccacttttttgtctaacattcacttcttgatatcctttatccatgtattcattgcacttgtcacgccttcccattttcctaggtaactgctgttggtttcttttgtagtcactttcttgtatcactctattgtattttcttcgctaatctctcctatggtgcttggtcctccattactcctttcaatcaagttgactt

SEQ ID NO: 280393 - DNA, 596 bp, Cannabis indica
aaatgtatttttagtcacaatacttgttgtaattaaaaattagtgataacttgttttgtttagactaaaaataatatttagtcacaaaatatgtaggaattttcttggtgaaattccaagtttaacctacaccaactcaagtttacagttagaaacgacagggacaaatttgtcccagaaaaattcaatttaaaacccaatcaacgacaaagaaaccttggtcgtttctttcctgcacgacaacgaagcttgtcgttttcactcacacgacaaatcgtttaaaccaaacgatttgtcgttctggattgaacaaaactaagttcaatcagagctaaccctagctcatttgcaccttcgaacattcgagagtttctcaaactctctctctctctctgccttctctctggttctcaaaccctagaaccagagattcttctcgatctattgatcgatcttacccagaaaccttcccaaaaacaccacacaacacacacatacaaatatcaagcatagatcattaggttagggttagaaaattaacaccagagattatagaggttcgccctaaatcaggggtacgtcctctttgagctcgc

SEQ ID NO: 280394 - DNA, 806 bp, Cannabis indica
catctgtttaccgctttccattttagacagtatgtaagcatctagagtatgtatgtgttatgtgatgccatgcaataaatgctatttgtttatgtaaatatgtatgaggtaaatagatgagttagggtttaaggcaataagtgcgtaagtgtggtctcggtgcttaactcgctggggttgttgattacaggggtactagtaatggaccctccacaatcacccagaccatagggcgagcaagtagagcccggggctacccaaaccgatccatcagtaccacctccacctccccaaaatccgggggataatgcgggggctgttaatgctaatcatcctgctgactggcagtagatgtttcatgaaatgcaaaagtgtcatacttcgtcaagaggaagagttgcaacgtttaaggcaacaagctgcccaagttaatcaagggttaccaccagctcctatgctagtggtgggtaaccaagggtacattatgccgcaccgggactctgtgttcgagcggtttgtgaagctgcaacctctggcttttctgggaggtattgatattattaaggccgatcagtggatgagcactgttacccgtatccttgataatatgggggtgacgggaactgaaagggtgaattgtgcggccttcatgtttcaggaccatgcccgcgtctggtgggacatagtgggtcagacccgagatgtcagtgtgatgacatgggaagagttcaagaaactttttgaggaaaaattttataatgttgctgtaaggactttacatcaagaagattttgtgaagttgactc

SEQ ID NO: 280395 - DNA, 728 bp, Cannabis indica
aaatcgattgccatctcataagggagaagatcaccaacggcactatcaaaacaaaccatgttcctactaagtccaactaggtgatattttcactaaacctttgttccccactcaatttcatcacattgtatccaagatgagtgtccaaaatttatacactccatcttgaagggggctattagaattattggttaagtcggttaattagtggttaagtcggttaattactttattactgtgcctgtatatatatatgtctcatttcttctcccagttgtaatacagtattcatttttcatcaatagaaacaattttctctgtttccactaatacatataaatgtgaagatgcatggtagaactatatatattattatatattgtatttatatgcaagctatgtaattgcagtaaccaatcaagagagatctctcgtaagtacagtaacgtcataataataaaatagattaatttgtaacatcttaattaaattaattacgaattgtaaagttacgacgtgaaattggatgggggtaggaactgtaggataacaaaattacacactagatgttagcatgatctagagtactgcctaaatgtatcccaaataaataggtattaattattgggaaatttacatggtatactaatttttgctattttcttacaaaaatactgccaggcggtattttttactttttttactgtatttttttataagtttcatac

SEQ ID NO: 280396 - DNA, 604 bp, Cannabis indica
aacattgtttttaaggcactcagttttattcataactttagaggttgcatacacttttcggtacaaattctcttaacaaagcctaagtttacatcttttgactattggtaatactttcggagatgatcagcgttccaggccctaggcaccatggttccgtccaatctttttagcttataggtcccggagccgatctcatcctcaatttcatatggcccttcccaatttggcccaagtacccccactccgggttcttgagtggctgggaagactcttcttaagaccatatcaccaatagtgaattttctacttttaaccttagagttaaagtacttagtcaccttcttttgataagccgccattcgtatttgagactcatcccggagttcctcaatttgatccaacgcttcttgtaataaagccttgtttgttgttggatcgtaagttgttctcctgtgggatgggaataacgtttctaccgggaccattgcttcacaaccgtacgccattgaaaatggcgagtggccggtcgtggttcttggggttgtccggtaggcccataacactcttggcaattcttcgggccaattgtttttgcaggcca

SEQ ID NO: 280397 - DNA, 562 bp, Cannabis indica
aggaacatttctaaagcataaaaaccgagcttcatgcaaacaaaccaaaatcaccattaaagcatcaagctttgagttccaaactcaaacttgattaaacaacactaacatgcattcaaataagtccaaacctacttaaacatgcataatataacctctaaaaactacaacaaacatcaacaaaacaacagcaacagatttcaacaatttttctttgaaaaccatagttttgagccaaaatttcatatcttaataaaatcaagaaatcaccaaccctatcatgcttgaatcaacattttaaatcataaataaacctctgaaatcaacatcaaaacacagcagcaagaacaactcaaactaagcatgcaaaccattcttttcatcaaaattcaagaaactaaaagagcaagatacaatgatcttaccaagcacttgaagaacacttagattgaatgaaaaagagcttaaaaatcaaaagaatcccagccctagcacaccacaccagccgagagagagagagagaggagagagctttgtaatttttctaagtttggaaattttg

SEQ ID NO: 280398 - DNA, 684 bp, Cannabis indica
atttattttaccaagatcttagatctactcacaagtatgttgatttacaacctaaatatgaacttctaaaacgataaataaaacacataaaaagttaagaaaccttacagtgatggcagcggaataatgtgtctccttccactcagatctctaactcttgattcgtgtctgtcgtagagtataatcaagatctgagcccgaatgtccttcacatggatgtgatccttcacagtcttccaatcgatgatagaggtactgtttgctgtgtgtgggcacttctctctcacaaaggatttcgaattttctctcccttttctctcttgatttcttgtgtgaatgaagcatataagaggaagtggggagggttgctatatataggaaaagggaagctaacctttccaaaataaacagtttcctcttttacagagtaattgattaactgccttatttggtgtgatcaaccactttcctattataaatagctgctaggtttaggttagtaattattttggcattataaaatgaaaataataattgggaaacacagaatagtggccggccataggtgtgacttgggcctcacttgcttttacagtttccacaattttatttctattttcccaaaaatgccatttttccaataatgccaaaactaattatttaataattaaaatagattattaa

SEQ ID NO: 280399 - DNA, 557 bp, Cannabis indica
catatttgattacttgttattttttgaacttgttgtatgaatttattgaaccaaaagcttacttctgtttattgatatttgtagtgccaaaaatgtataacccacatcccaacactcatctagaaattgcatttaggaatgaacttgaaggtgtgaataagaatcctggtcagagtaatacttcacacttgctcatgatgaacatgaaattccacaaagcaactaagcttggaattgttcaatctgaaaagcaaatagttcataactccgaaaatcctactacttcaagctcagttgagaagattagagaaagtgattccacttcctcagattatacttcacaacagattgaactagcaataacgacaattcaaaaatgattaagcagtgatgctttagtttttgaatcatgtattttagagaatgataaatccatctggattcttgattctggatctacaaaccatggcagttgttcattgcaattgctagaaaagttgaattatttgaaatattgtgaagcccgcttagttaatttggaaattagcagttgttta

SEQ ID NO: 280400 - DNA, 687 bp, Cannabis indica
taaaaaagaataaatgaattattatttgaagtgatatatataattagtttataataacctcctctttacattaaaataaatattttaatttgatcccacaaattgtattaagagatattaacacatcaacatggcttatttatgtattttgtattcttcttcttctacgcaataatgaaattattatttttgatcattttgtgtgaagtgcacgttgattttttttaaaaaaaataaatatatatatattttttatattaaattagtaggtgagttacgatataataatatatgtccaaataatgatgagttgtttaattggtacaagaaataattaatgatatacacgtttttgtttgttaatcacataaaaaaaaatctatatatacggtatggctatttatgttgatgcaacttgcatgtactatacaataaatatctaacctaaaatatttcatgcattaataatatgaattttattttttagaatagaatctatatgattttattttacgagggttacttcaataaatccctatttgtttcaataagaattatttttttttagtataatttttttaatattagtgtacgtaataattatttagtattatttataaattttttaaaaaattattgtaatatcaaaaataaaaatttatatacgagtaataaatttatttttaa

SEQ ID NO: 280401 - DNA, 629 bp, Cannabis indica
agtgtacgtaataattatttagtattatttataaattttttaaaaattattgtaatatcaaaataaatttatatacgagtaataaattttatttttaatactataaattgttcgaaattttttaaaaatttataaataatcttaaataaataactgtaaaacatacataattatatataaaagaatattagattaatttttttttcttctgaataccaaaaatatctataattttaaaaagtagattctgtacgtatagtacgtaattgttaattatttggttgaccatgtaaaaggtcgacatcataaaattcaatgcaattaattgaaataattattggcacacattgtttttttttaaaaaaaaaaaaaaattagtgtagggacacatcttccttaattaattacaattttcccataatacagtgataagtgaatagtaaaaaaaaaaaattttaaaaaaagtaaaaaagaaaaaacaaaaaagtaagaagaatgatcatcacattactcctactcctacttttaaaacttctattaaatgtcaagtcaatacctacatgacagttcttaattagtctaggttattaaatttttatttttatttttatttaaaaattaatttaaat

SEQ ID NO: 280402 - DNA, 621 bp, Cannabis indica
tgctctttcagttttttgaatgcctcctcacactcgtcagaccattcgaatttctgacatttcttcaagatgttgaagaagggaatgcatttgtctgtggaccgggagataaaccggctcagggcagcaacctttccggttagactctggacatctttgtgtttcttaggggaaggcatgctcaggagagcttggattttttctggatttgcctcaattccccgctgactgacaatgaaacccagaaacttccccgacttaaccccgaaagtgcacttctttgggttgagtttcattccgtatctccggaccacttcgaagcattcttctaggtcatatgcgtggctagtgcacaccttcgatttgaccagcatgtcgtccatgtatacctccatattttgccccaagaaggcccttgaacatccggttcaccattctttggtaagttgcaccagcatttttcagtccgaaaggcatgactaagtagtagtatacccccttatcggtcctgaagctagtgcactcctgattcgcgatgtgcattttgatctggttgtaaccggcgtatgcgtccatgaaagacaaaagcttgaatccggaggtggcgtcaaccatctggtc

SEQ ID NO: 280403 - DNA, 366 bp, Cannabis indica
tgaaagaaggttgtaaaatttacctgttacaaattataaactcgaccaagggagccatcagatcattagatctggcaaaaaagttaaccatggctatttgcaatcaagtaataataggttttgaaaaacttacacacaagctaaaaccatatactcctgcaacaaggttagctggatagttggaagtaggatttatttaattttaaataaataatttcaaaaaataaaataattaaataaaataaataaaaaaaatattttatttttgaaaaataaaataaataataatattaatttatttgtcgaaaaaataaaataaattaaaatttaattttcgaaataaaaaaacttatttatttaaatttc

SEQ ID NO: 280404 - DNA, 1055 bp, Cannabis indica
tgattgcttcacttgaagaccgagaaaataagtgagttcacctaccatgctcatttcaaactccttttgcatttgggaaacgaagacctgcacttcagagttagaagtagatccaaaaacaagatcatcaacatatgaaaaaataatatcaaattgcatgtgtgtgatgaactgtgttttaataacatttccttttctataaccatgagagtgtaaaaactcagatagacgctcataccaagcacggggtgcttctttcaagccatacaaagcctcgtctaaaacatgatcaagaaggtgggaatccttaaccgttccattttgttgtggggttttaggagcagaaagattatgaaaaataccataagatttacagaatttagcatacacagtattttcaaaatcttttccatgattactcttacctctaactatcttaccaatgttgcaatgtttttgaacttttaatttcaagtaaagatacttaaaaacatctaaagtttcaatgttttctctaaaaaattctacccatgaaaaccaagagaaatcatcaacacacacaaaaatatacctcttaccattcaagctttcaacctggattggacccattaagtccatatgtaggagttcgagaactctggaagtattcacatcagaaacactcttatgagaaattttcagttgcttaccaagctgacatggtccacattttcccaaagactccttacctaatttaggtaatcctcgaacaattcctgcattagacaatctcctcagatttttaaaatgaatatgaccaagtttttcatgccataaatcggtggtgttatcaataacagaatgacaagtagcataggtagtgatggtgtaacagttatcattagatctgaacccttgcaagacaatttcatcaagaatattatacacataacaatgattactatcaaagctcacagtataatcctgatcacaaatttgactaatgctaagaagattagcttttagtccatcaaccaacatgacattcttcagtctaggaagcccttcgaaattga

SEQ ID NO: 280405 - DNA, 1365 bp, Cannabis indica
  modified_base (1119)..(1119): a, c, t, g, unknown or other
aaatataatttcatacatgtattataatttaaaataaaattattaattttacataaataaatttacaaaatacatgtatatattttattaagatgtaattattcttatatagaggtatactttattaatactggacttagaaaatatataactaattacaatttagaggttattcttatttataattggcccaaattgggacttgatttttttataacaaattagaggttattcttgaatagagtattcttaaatagaggttctactgtattatttaaattttgtattatgctattgatttatatttgaatcatttttttgtatatgataaatttaaattaacttttagcatattactagagtaaatattttacaatatacattatattttagcaataaatcaccaaaagaactgatctaaaaagttttactaaaaatggcaaaaattaaatataattttgttaacttaataatcataatgaatctttagtatactttatacttacaccaacaccaagtggtccaaaagtccatggttctagacttgattagtgcaaaatgatctattaattggagagaggttatcttaccattacaacacaattaatataattagcatttttttttgggtggaaatataattagtatttgcagacacatacatataacttttcaaaaagctcaaggttagttgccccgtgtaaatcctctactgaatttactttcgctttcatatctttttagaacatatttttactaagtgaatcatattttaattttgaatttgtatatctgtttaagatgtttcaacaccaatgattattatattattgagaatatgatacaagtatattaagggtgtctaacaccatttattatattatattattattgaaataattaaatattagttgtcacataaacacattaataaatgaaaagagatcttggccaatttttttatttttcttttttctttttttttttttagtctggtaaagatcttggctatttactaatctaataacatgctaagaacgtgttaagaaatttaaataggtacatcaagagattccttgttgaattgtaattagtgcggtttaattaaaatattttagngaattgttttaatatatttaaaaatatgaaggaaaaatttaaaataatatatcttattcaatttatctttataaaataaatctataatgcactcttaaaggaatgtaactatatgtcttatttgttttagtattcgaaattatttttagggtctttttactttcttacacttttaaaatagttgtttttttttttttttgttttttttttttaatttttttgttattttttactagtatttactac

SEQ ID NO: 280406 - DNA, 597 bp, Cannabis indica
cgctgaaatatcatttatacggagctaagtgttttaaggataaaatacattgaaggtgtaacggtaatttagtccctattcaatgtagatcatctatatgactgagagtgcaatttcaagttctaagtgtggattcaataacgaattaataagttagggaatttacttgatacattcagttcggcttattggaagctcggttatatagccccatggtccccatactaattgtaagactcagttaattgattttacttaatcaattataattctaaagttagactatgtctactttaggaattttcactaagcaagggcaaaattataacaaaagagattctaggttttatttgttaattaataaatatgttaaataacaatattatttaataattaatttttagttattaaataattagaattgacatttaaatggttaaattgaaaaattaacgtttttgagaaaatgagatgcagaaatgataaaactgtaaattgcaaaagtgggccccattgtccactaatatggccggccactcttataggcttttatcatttattttttcgttatttttaatgccaaataattctaactta

SEQ ID NO: 280407 - DNA, 625 bp, Cannabis indica
ttttggagattaagattcatcgtgataagaatcaaaaatttcttggcttacctcaagaagcttacattaatcgtgtgctcaaaaagttcaacatggatttgtgtaaggctggttttgttcctattctgaaagggacaaatttactaagcaacattgtcccaagaacgacttaaaaagagaagcaatgaagaatatcccatatgcaagtgtagtagggagtttgatgtatgcttaggtttgcactagacctgatattgctttcatggtcgatgttcttgggagatatttatctgatcctggccatgatcattgggttgcagccaagaaagtttttgagatatttgcaaagaacaaagagttttatgcttgtgtataagcatgtcgacaatctccaagttgttggttattcagattcagattttggtggttatgtagatgatttaaagtcaacttctggctatattttcacttttgttggtgctgctatttcttagaaaaagtgttaaatagactttaatcatatcatctactatatatgttgagtttgtcgtatgttatggtgcatctttgcaagctctatggttaaagaattttgtttttagagatacgactagttgattctatt

SEQ ID NO: 280408 - DNA, 565 bp, Cannabis indica
ctcctttgtttttcgatctccttggtttctggaagaataggtcacatgctcctgctttaggttctgaccctacagctcctctaagaattgtggagattagtggtctggcgtctcagcagaaaaagtgagttgtttcttttaagtttattttatgttgttttttagttgctaaactgtttttccttcaactatttttatagtgattgcggagcatatgtggctacatttgctgagttcctcattcatggaaaagatgttcctgcggattttgacatcgatgtttatcgtactcgacttgctgcccttttcttctcatctggccaaaggaaaattgatggaagcattgatagcgaggatgagaagcaaagcaagtcttctaaggcttctaaattgaaaaagtagggtcttttcatttggtgactatttggtgttattggttgaatctattatcagacaatagttagtgttattggttgaatctaggtattatatttggttttatactctggatctggttttaaacttttaggatatttgacattaatccttataatatgtttattct

SEQ ID NO: 280409 - DNA, 583 bp, Cannabis indica
cccctacaccaacaaacaaaaccaatcaagtataaggtcaatttcgacctttccctgttcaatgacttttcaaagtcagagaacccaaaacgacagcgttttgtgtttgaacaaaacccaaggctcgagaatcttctcagccactttctctctttctctgtcttcacttcgaaaccctagcagagagtttctctctgagaaactcgaagctaggtttcaatctacccagaaaatcaagccccaaacaccatacacagatcagatctacaatgatctgatctgtacacacccacacacacaaatagaaaagattagggatagaaaacaccagaaatttcccgaagttcaccaataaaattggctacgtctccgtttgagctgctcctcgaatttgagagctcgattccactatcaagatgattcaatcgtacaactatgaagattccaagtcacaggtaataatttcagactggtaatcttcttttaatacatgtatctattgtttaatccctctctctctctagatctaactctcttttgtgtttctgtgcatgtacgagcttggattcttccttcttcaagt

SEQ ID NO: 280410 - DNA, 865 bp, Cannabis indica
tttctctattttcgttagtacagactccgttttaaatttattaaaaaaagatttggaagtaactgatactacatatttttcgtccagaccaaataatctaaaatttgggtcttatatgtgtcctgtttaagacaataatgaaactaaaagaaaattacagttttataaacattgggtacttatgccactaaaaaaatcattgaatttatgccgtttacaaacttttgggtacttatgccactatttaccctttttaataatacattcttttttgaaataaaaaaaaagattgaatgtagttaataatatgtgcaggtgcaaaaagaggcattttaaaatatctgtttgcttgggtaaattattattgtaaaacatatgtaatataattaagagaaataatattttaaaatagaaagaaagaaaagccccacacatagttatactcatttctgcacactttcaagttgaatgaagaatatgtgtattgtataataattaataaagcataaataattgcataatccaaggaattcaattacactattttaggcccaacaagtaatagatgctagtaaatccaaagtactatatgtacttctcatatgttttgagtgatacttagtagtaagatagtaaggtatgtgagtatatataagtaataattgtggtatacacaatactttatacttaatgattaaacttttaagggctcgtttggaatgccgtattaggtcgtattgtattgtattgtattatattgaattgtattttatgcaatatttttatgtaaaactatatgtggtattaacttttatggacacttaaatatataatgttttagtataaattaaagtttaacatagta

SEQ ID NO: 280411 - DNA, 550 bp, Cannabis indica
atttgaaaatagtggaattgttttgtataaattataaggggtataaaatttgatatgagatacattattaagggcaaaacatgaaatttccctttcttttttcgacaaaacttataatttagctaaatgtgttatagtattaatattagaaaaacaattcaagttcattataaaaaaccgcgttattgtttaaagtcaaaataatatgaaaaaattgtatcaatcggataccaaaaattagagcacaattagcttttactaaaagtggaagaatttttgcttgaaaaactaataagacatatgtaacataaaccaagaaagataagcaaccaatttaaataaaggtaaataccattttagaccctctgttttacaaaagttatcaattagaccctgtgtcttgttaaatgacaaaatggatcctgtattttttaaaatagtacaaataggaccctgaattgattttttgtcataataaagtttaattataatccgatctaaaagtgctatgacaaaactgtttatattttttgtatctgttcgtattaag

SEQ ID NO: 280412 - DNA, 599 bp, Cannabis indica
tcaggcgaatggacaagtgaaagctgttaataaaaccctaaaggatactatcaagaagaaattagacgctgccaaaggcaggtgggtcgatgagctacctcaagtactctggactcacagaaccaccgagaagacggcaacgggacacactcctttctcgctagcatttggctcagaagcaatgcttcctatctaagtgaacaatcgactcatagaagagagttttataatcaagaagaaaaccaggaacttctaaaattgtccttggatctacttgatgaaaaacgagttgagtcgtaaatcaccaacgcagcgtatcaacaccgagttacaagatatttcaacaaaagagtcaagaaaagactattcaatgttggagactttgtgctaaggcaagtatttgcaaatacgagagatgcatctataggagtgttcaacccgaactgggagggtccatatgtcatcgaagcagtagttggaattggagtttataaatttgctcgactcaacggatcgctaataaagaactatcggaacatggaacatttgtgaccttactaccaataaataaatgatgtaactcgcattactgatttaaa

SEQ ID NO: 280413 - DNA, 740 bp, Cannabis indica
gagttcgagtcctggtctgagttttggttcatgtctggatttcagtctaggtccagatcaggctccgggtgtgggttcgcgtccttggtcttggtctaggtcgggtctgagtcccaagttccaatccagatctgagtctggattcagttctgggtctaagtctttggttctgatcctggtctgggttcgagtttgcgtccgggtccgggtctagctttgggtctgattcaaggtgtgggtttgaattcgggtccaagtctgtgtccgggtttgtgtccaggtctggaccccaatctaggtctaggtttgggtccaggtccagcttggggtcccgagtgcgggtccaagtttgggtctgggccaagatctcggtccagatccaagtccaacatttcgatcccagtctaggtcttggtacgagtccaggttcttatccggatccctatctaggtccaagtcatggtttgggatcgggtcccagatttaggtccaggaccgggtctcagttccgctctgcgtacacgatcgtgtctgggcctgaattccagtctcagttttggtctgaggctaggtctgtgttcggttctacgtctgggtcctagtctttgtcacagtcctagtcttgttctagggtccgtgttcggcgattcttgttcaggttctaatttttggtcccaggtctacgtctaggttcgggtttggtttttcgtcttggttttggtcctaatctaagtaccaga

SEQ ID NO: 280414 - DNA, 817 bp, Cannabis indica
tatacttaggcaaatggcctgtctggagggacaattttaagtatttgaagtatatactgcaagttttatgtgatgaatttacaagaacttatggaataaatatatatttttgatcaagttctcgtgcaaacaacaattgtcagagtgtaacagggatggttccatataaagatgttatatagtatgaagtcttgttcctgttttaaacttggaataggatagatccgaggtcagttcagcatattaataaggctatagagaagattatgattagggtacttgcttctcaacatagacaacagaggtcatgttaatcaaaagctcaaaagaatgcagaattcctaagtaggagaaatactttgggaacaagaataagattcataaaatttttagaatttccagagaacatcaggataataattttgtgtttaaccttacaagtagcatttgcagcacacaagatattttcatgtaatatattgggaaatttggctcatatctttagttatggaactcgagaacttcagctaaacctatctctttaaagaaaaataggttaagattctcaataagaaaaataaaaaaatatgcagtagagttatagtattagttaacatattccaagaaacaataaggtgaaggaaattacctaggaattagaatccgacgtgtggctcctggccccagtgattcagatttgatttcaaggacaaaatccttttaactggcggtaattgtaatgaccgcatggttaagttatgggaattaaaagataattaagaggttaattattattatgtgagtttttgtgcctctt

SEQ ID NO: 280415 - DNA, 617 bp, Cannabis indica
atatatatatattttaaataaaaatcaatgaaattggattcccttattcttttctttactttttaacggaaagggtaaaaagtaaaggactcactctagggctgaagtgttgaaactgtcataggactatttaggttaaaaaaagtggattatgactatacagtaagagaggacaaagaaaaatggttaatttgtagcaatgttgagtgagtctacttgtttttctgtttttagtttcgtaagttaggggaccatgctcactagtcactcttataagtaactaagtctactaataataaaggatcaatggttttggggttcaagtcgaggacttggcttcagtgtttttgtctcacccttttggactttgcaggcatggggcttgctctgaatttacaccatttattagttgttgtcagcgaaggagtggttttactattgtctacaatatgaaaatgccaatatgtacatataatacagatatagtagggtctgcagaacctgtgagaactcctatcctattcactattaactcctatggatgtcttcatttttaatatataattcttgcttctcaattttatttatttttttttgacaaagtgattaaaatcact

SEQ ID NO: 280416 - DNA, 534 bp, Cannabis indica
catacaaagcatatctaagacctctcactgttgatataagaaattctttcatggctttatcttttctggaatagttaagacttttacacactctaccaatcggaccacctgtcactggaactactctcggtttgccaccttacattacggtgggtggagtttgttggacaaccttgtaaccaaaacttttagaaagaaattctttcaaaaaaataataggtatgtaacttctttagtaattattgttggattgagttgtatttatattgatatgaatagatctacatatatccttatttgtatgtaccatctttgtcactgaaacacgaaatgcagcaattttgtgttttttggtattttttgcgagtttagcgatattttacgatgttgttagcgacattttgcaataaaataatgtgcgagaggtcacgaatgaagttttacaatgtttcacaatgtatgtcgcgaaacacaacagttttgtgttattttgacaatttttgcaatttttaacacctttttgtatctgatttt

SEQ ID NO: 280417 - DNA, 801 bp, Cannabis indica
cagggggagccttcagccttggatcctgtcactagttcagcacaacctgatctagatcctccagctgacactgcaacaccctttgtgtcgacaggaccaccttcccagggggagtctggcacagcacaggaacccacagatcatattcaatgaagggggagatatatgtaattcgtttcgcttttgtagtggctttgtttatattcctaaagacttttatatctggtttattaatattttttggtctttagttttgtgtgttagtcattgaacataacctgtcaagggggagaatgttagtgttattattttgtgacagtgtttgttctgttcaatgtctagtcgtatctggatttttagtctgttatatctgcactaacgtttgtttacgagagtctcatttaagtgttagttagtgccagctggacttattttgtggatatatatagtcagtttctgttagtaaagtggttatccattaaatcgttcagacagttatttcggttgtttttggagagatagtcgtatcttgtttcttgttgttgtgattacaggttagatcttggagcttgagagtgttcatcaatggcggaatgatctgaatctggaattgttgagttcaaactgaagggatttcagtgtcatcttcatcatcagatctgaagggatttcagattgaagacatgttgaagaggagctcagttgctgcacaagggattgtgcattaacaatcagtgttcttgattgtcgttggtaattcattactaattgctgtaaaggttgtatttgattcctttagag

SEQ ID NO: 280418 - DNA, 519 bp, Cannabis indica
tattatttagcttatatgtgaaatatgttaattttgtaatttttgctcggcgacaacggaaaatgcgatggatggctagattaatcacatgggtaattttagaaccctattttatagtggggaataatttagagagaataaatatcgggattgagcggggttatgggttttgaccattttacccctagcttaagaaatacccaagcttaaagtttaaggggcattttagtcatttaccctcaagttgcaaggtggctgcttaggtagatgacacatggcacttagttctttaagggattaattaatgaaactctcttttcatttgaaataagaaattaaggaaaattgaagagaaaaaccaacctaggtatctttctctcttcctctctttcggctgaggcaaatcaagggcaagggcaacctttttcttcctaattctctgtgattgagctggaaatttaaggagaagcaaccaaaggtaaccctagaacattgatttcatgtttttctttaagtttt

SEQ ID NO: 280419 - DNA, 566 bp, Cannabis indica
cttctgtttcagcaatttggtcctccaaggtccaaacaggtatttaattttgattattttgagattgattttccctaattttgagttgtttaattatatgattgtcaataaactttattttgttatcattattatataatatataatttaatatattgctttcgaaataagttactgtttgattatagtgttttatcttttgtcaaatagcaaagctggtaagattttcaaatgttgtagcttataaatccaaagctttatcacatgcctgacccaaaagtatctataatcatcagaaatcaaaacattttctaatcagtctagaagaatttttacacgttaccattagataaaaattggtaacagatatcttcttctcagcaccggaggtaaggttcattctgacattcttttatcttgttctctctttaataagattagagttaagttctctttagtctttctgtcatttttttcatcaatgaaatcgtgtaggtttgttctgttctaatcaatgtcaaaatatatgaagaaaaactttaaagttttatatggtgttgttttct

SEQ ID NO: 280420 - DNA, 496 bp, Cannabis indica
aaaccctaaaatatctactcaaactaaactaaccaattttttcaaatttcatgttatttttgccaaaatataattttaataaaaatagtatctaataagataaaatgttaaacgtaacatattcctaatcttataattttaattaataaaatatatttcaaaaaataacaaattttaaaaaaaaaaaaatatgatatggttagcaaactttgaaatttgaacaagattattttaaaagataatattttaatatcaaagtaagataattcaaattaaaaaaaaaaagatcttataattaaaataaataaaataatctaaaatctcaaaaaaaaaccataaaggctcttttgttagaaatcaaattttcaaaattcaaaacctactaatatcagaaactaattttaattaattaaaaattaataaaaattaattttattctgacaattagatttttaattgaaaattcagattctacacaaaattctaccaaaaattg

SEQ ID NO: 280421 - DNA, 512 bp, Cannabis indica
agagagccagtatacaaagaaccgtactgagagacaacaagagcggatagacaaacacctctctaaacaaacttctcgaccagtctcaggtaatttatctcatgttataaactgatgccttgaattttatttatacttatcttttattatcttcgcagagatgacttttctgaagtccgcgcccgcccttaaaatcaagtcgaagagtggaacagcgacgacatcacccgttgtcgctcagaagaggaagagcgatgtggtggctactcttgccgcagattcttctaagaagctggctaagaccacgcaggacaatgggaagaaagttctgatcgagccaaccgttcgaacccgcgacttcctggctatgcaggagaagttcgtaggcgaggagttcatatccaaggcggagaagatcccttctgaggagcttgttccgcgttctgtggagttggcttcgcagtcgatgaccttgttcctgaaagctgttgccgctggtttgaaggaagctg

SEQ ID NO: 280422 - DNA, 691 bp, Cannabis indica
tttttttttgttgttttagtagtgttttcgagcattgtcacattctcttgaaataattatgttctttttcccattgtccattgctctttatgagaactggtatagattctatgtcctgtcatttttcacaatatttcagtggcctttttttcatattaaaacaacagtaaaataacactacaaaacagtaatttgttgttgatttagtaattttttctctttgccagattttatggttttttcctggtgtttctatgattctggtgttgatttgtccgtccccaaccacgaaggagaggtgccgtttgtgttttgttactgtttacagtataaaagtaaatatattgggcctggacagtataaaagaaataaaaatgggcttggacagtaaaaatgtaaagtttgccgtgtcccagtatttttgaaaatatttggtaaaaaaacagtatttttgtaagtttccctaatattataattaaattgggtatattattttttacatggtaaaattgtagtttttctgtagtatataattgtaaagttcccaatataaatacagtagaatatttatctaataatacatttgagatcaaagcaaactatattttaatttagaggttataactaaatagagatacactagacaaaaaaaattaccaaaaagtattaaatgtaacaacaataacaataa

SEQ ID NO: 280423 - DNA, 495 bp, Cannabis indica
ctatcactcaaggctgaaaaattgaagaagaaaagagaaggaatggtttcgacctatagagaaagaaggcttaaaacttttactgaaggaatgtgatgtatcatcaatatttttctcttaagccattactatctatttataggtcaccacctaggtttaggttagaattattttgcattaaaataatagaaaaataaatggtaaaatccactagtgtggccggccataggatgttattgggccccactttgcaatttttctattttgtcatttttccatcccattttctcaaaaataccaattttccagtttaatcagttaaatgccaattccaattatttaataactaaaaattaattattaaataatattgtcattattaattagacttaataaagtctttcaattaataaataaaatctagaaaatcttttcgtcacaattttgcccttgcttaatgaaatttcataaactagaaatagtctaattttagaa

SEQ ID NO: 280424 - DNA, 606 bp, Cannabis indica
aatgccgcatgggaggaggcgtattgaaactgtcatacttaataaagtctgacggcaaaacccccaatctatacctactaggctatgatcaatcaagtctagtgacggctactctatgaggaatcacatcagtcaaaaaggattaacgactgccctcataaaatccctacagaacctagggattagaccatacattacctatgataaattcattgggaatatgtggctttactgatagttacagaaatgcatgtaccttaattctagggatcaccccacaaaaacactataaataccccccaaatctcattaaaggggggtcgagaattctaggtgtaataagaactagaagagtaaaaatccaccaagaacattctttgtaataaataccatcataaatacacagactcgtggactaaggctcattaacgccccaaccatgtaaaaatctatctcttaatcctttatagctctctaaaatattattattatattggttgccgaaaacctcggtcaacaaaactacaacttaataacagaaaataacatggttcaatataaattcacgcacaattcaaaaattataaacatatagcaagtaggaat

SEQ ID NO: 280425 - DNA, 613 bp, Cannabis indica
ttagtattgtatattattatattgtaacaaaaataaataaatatataagatcattaaatgtatacagtaatatttgatttatcgtattactgaaaattaatataccgttgtaataaaattatataccacaaagaaattataacaatactaaattaatactcaatatatatatcatgctaacaaaattatatatactactattaaaatatgaatacatactaaaaaaatttatatataataaaatagaaactaaatatcattttaaataaatgatatactatagacaacaaaaattatatactgttgcccccgattttgtccaaaataagtggaccaaccggactgtgacacgtggactgaagaagtaagactttgagataattcgactaagtcttcttaatcaaaaggatcagcatttaacatgcctcctggagaaggcatgtaagtttcatatactcgcggagagcaagactacaatgaggcatctccgggaggtatcaaatcctatctaaacagtcaactcgcatttaatgtcgcatgggagaaggcgtattgaaactgccataagtgttaaagtctgacggcgtaaacccccttctgcagctactacgct

SEQ ID NO: 280426 - DNA, 641 bp, Cannabis indica
aaaaaaaaattaccattaagggtgaaaacagcatcatatttagaaaaacctttaatttagtttcatataaatgtttgacagtagctatcagatcaggagccggtgtcgtctcctgggtcaaaatttgcagtacctgaaaccaaacaaaagcacaaaagtttccagattaaagaaaaaacgcattgcagaaacaatatcgacaacagcactgagctacaagtaaacttactagcatcaaaagattctcactcccttggggtggatcagatattatggagagcaattcaggattagatgaacctagtgcccttatgagaattgggatatggcgatgaaaggcctgaaatgcaagtcagaaccgtaacacaaaatctaaaagatatgataaaaaattacataatgacttgaaatcacacaaatttaattgcacataatcatattgggtgatgaaaatccatttccacaaaaaccaaacagctaaagtgaaaaaacataatcagctaagaactacaatctaattattactatttactgattgcttatgtattgttaaaatattacagttattcttttcttttcactttttcctttttttttgaaaagagaaaagacccatttatctagggtccttcccattattt

SEQ ID NO: 280427 - DNA, 781 bp, Cannabis indica
actgggatcgaaatgctggacctagatttggaccgagatcctgaccaagaaccaaactcggacccgaactcaaacccacacctagaatcagaaccaaagttagactctgcccagacccaaactctaacctagaacaggatgagaaccaaggacttagacccagaactgaatccaaactcagatcgggattggaacttgggactcagacccaacctagaccaagacccaggacgcgaacccacacccggagcctgatctagacctaaactaaaatctagacccgaacccaagctcagacccggagtcaaactccgacctgaactcaaactaagaatcgcaaatggaactagaaccgaactagaactaggagtaggaccaggaactaaacccaaacccgaaccgagatcaaaacccagacagagacctaaacctgaaccgagactaggactcgaactcgaacctagaccgagacacaaacccacacaataaccgggacctggatccagaatcaggatagagacctgggaaacaaaactaggaccgagacatagtactcgacccagacccgaacttaaacctagggcctagctcgtgacccggcaccagaaatggaacaagactgggacccgagattgggatccagatcaggacccagggcttggacaaaacctgtagtcggtgtctagatttggaacccaaccctggaccccattcctgacaaggatctgaaccctcactcggacatgaacccagtccaaaacccaaaagtggacccgaaccc

SEQ ID NO: 280428 - DNA, 516 bp, Cannabis indica
attcataactcgatcaattctaacccaaatcatacaagatcttccagacctgttctatatgccccaaataaccattcaaaggcaacaaaaccacccagaactcacagaatcacaaaacaccattaaagaccaagctttgagttccaaaactcaaacttggttagaatccactaacatgcaatcaaactagatcaaacctacataattatgcataactaagcctctgaaaatgaaaacaatcaactacagcaagtaatttacagattcaacatatattttcaaaattcatgctcttgaactaaaaactccaaaacttgattccaagtaaccatcatgcatacactaactctaaactacttaaaatagcaagattaaaccttagaaaacaacaacaaatcacagcagcaagtatcacaacaattcacatgcaaccatcattttttacacattttcttcataaaatacaagagaaagagattagggactttaccaaagttgaagaatgcttagattgaa

SEQ ID NO: 280429 - DNA, 850 bp, Cannabis indica
gaacttccgttgtccaccaacactctttttatcctactgttagcgagctggatggtgattaccaatgggtcgacgtgagggtacctcacgtctttttcatcttccttcgaaaatataatcggaggttcttcaatatttactttcttggaaggttctagagaaaaggcagactgtttgttcttcacttccttcacgtacctcttttgggcgttattgctttctcctgcaatatgtggccctctcgagataaccaatatatccttgttggaattatttcaccaggatcttagatctactcacaagtatgttgattaacaacctaaatatgaacttcttaaacgaaattaattaaacacatataaagtatgagaaaccttactttgggtgcagcggaataatatgtctcctcccactgagatctctaacccttgattcctttttgtcgcagagtattatcaagatctgagcccaaatgtccttctctgttgactctgaatttctgcacagccttcctcactatgattgaggtattacttgatgtgtgtgggcactactctatcacttagagggatttcgaaaaacagagaagagagagagagagagagaaagtggcagctcaggaggagttggggagaaagaaaagaatgcagtaatgtgtgtgtgaatcatgaagcctttaccttctatttatagaataccacatagggttaggattgaattacttggcaattaaaattagaaaaaaataaatgaataaaagggaagtaaagtggtcggccattgttgtagaaaaatcgtatacgcaagtgcacgcaatcgttaacaagtaataaagtgataaatcgagtat

SEQ ID NO: 280430 - DNA, 524 bp, Cannabis indica
ggaatggctccctatgagctgctctattgcagaaaatgtcgttccccaattcattgggacaaaacaggagagcggaaatacttatgccctgagttggttcagaaaacaaatgaggcaatagataagattaaggcgcgaatgcttgcttctcaaagcagacagaagagttatgcagatcccaaacgacgggatgttacattccaacctggggaccatgttttcttgcgagtgtcaccaatgaaagggattagacgctttggaaagaaagggaagctgagccctaggtttattggaccttttgaaattctggaaaaggttgggcaacttgcttatcgattggctttacctccatcattgttagttgtgcataatgtatatcatgtttccatgctgagaaagtatgtatctgatccaatgcacgttttgagttatgaagcattggaattgcaacctgacctatcatatgacgagcaaccggtgcaaattctggataggaaggaaaaggtccttcgaactaaaccata

SEQ ID NO: 280431 - DNA, 145 bp, Cannabis indica
gataactaataacgtgtctatatcatggaacatatagagcgttctatatgacttacagtgcaattccaagttctaagagtggattttattggaagctcggtaatataggcccatggtccccatactaattgagaccatactgctt

SEQ ID NO: 280432 - DNA, 575 bp, Cannabis indica
aaattcaagaaataaataattaagtatagaggtgttgaccgaggttttcgacaaccaataaaataataataacttagagagctgtaagaaattaggagagagattttttacgtggttggggcgttaatgagccttagtccacgagtctgcgtatttatgatagtatttaatacagagaatgttcttggtgagtttttttactcttctagctcttaaaaacccagaattctcgacccctttttaatgagctttggggggtatttatagtgtttttgtggggtgatccttagaattaaggtacatgcctttcagtaactatcagtaaagttatgcattccaaatgaatatatcatgggtaatgcatcatctaatccctaggtgctgtatgaattttatgaaggtagtccttaatcccttttgactgatgtgattcctcatagagtagccgtcactagactttattgatcatagcctagtaggtacaaattgggggttgtgtcgtcagactttattgcgtgtggcagttccaatacgcttcctcccatgcgacattaaatgcgagatgactgttcaga

SEQ ID NO: 280433 - DNA, 531 bp, Cannabis indica
tttgaaatactatctttgttcatttattgatcaaaaagtgtatttgttaccgtagcaacttacatcagagtctatttcatactaatctgatcttttagcttaacatgaaataaaacaaattacagacataagaaactgtactttaaagtggtcatctgacctgagtactcaattgattttatcgaaacctttgagcatagtccgcccagaaggccattcacttaaaagcaaatgttcatttagtacttaaagtggtcatccgacttggtactttattggtagtattttcttaaattttctccattccagtattttgctactagaatgagttgtgctactagaatgagttgcattttttcgtcatacttacctagcttgtatgctctgaagttgagaacttcgaccacttgatatggtccttcccagttagctccaagtacacctgccgtacttcctttggtgtttaggaatacccttctcaagaccatatctcccatgaagaatttctgagcattcacttgtttgttgaaa

SEQ ID NO: 280434 - DNA, 451 bp, Cannabis indica
tttgctacagaaattagaaatgtagaaaacatataattttgagaacgtagtgggtactttataccaaatgttaattttgagaacgtagtgggtacttcataccaaatgtaattttcgtcatcatccacacgtatctattaagttctacacaattaagttaaacattagttttgagaacataagatatacaaaacatttgcattttgcgacaacccatatctttaacgcaatataagttggacaatgatgaaaaggcaaataaaaatgataaaaattaattttctaataacattctcattgcgtttcttatcttcttccaaaatcttgatttggtttcgcaatccaggtgtagcatctgtacttctcttaacatgtgatttatcgatccaacaaaagtaatcacatcctcgactttcatcgttctcctgagttgaaaataaccctattagtt

SEQ ID NO: 280435 - DNA, 593 bp, Cannabis indica
tacttttttggattcctgtgaaaaattaagcaactttcatttttacagaaatcaattccgataaaaaatgagagaggttatggtgggtttgaaatttttggtgcattacgtgtcgaggattgtgcttatcgcactagtcactcggacaagaaggggaacacgcacccgcatcttcagacaatttcctgtctgaatgcgccgaatgctcggacacgctgctcctggatgctgcaacccgccgatatcaaatcctgcaaatgccgaggattccggcaccgtccccccttcatcctacctacacgcgcgtaagaggccgcatgcagcctcctcggtgggcaacaggtgcccatgcaccaaattttctaatttttgtgggatttttccccaattgtaaaataaaatgttatttttaatatattgaaacttaaatatcaattttaaattaataatatttcctttttgtaaaggattattattaattctttgatattttgaggtttaaatttaaaaaaatgattattttatttttaaattattgttaatttctttaatatttatatattatttaattataaggttagatattttaatat

SEQ ID NO: 280436 - DNA, 828 bp, Cannabis indica
cataaattaacattgggcaaagataataaagcagaacgacagtcctgaataattaaaccaaaagtcgaccccatgatttgagagcttcggattgcttggacagtgacaagactatccgtttcaaccacaacatggacccaatttttggttttgatccaactaagcgcctctttgattcccaaggcctcaactactgcagcagaataaattccaccaaagcagcctgcccgagcctccaagcagttgccacagtagtcacgggtcacgataccaaagccatattgttcttctctttcaaaaatcgctgcatcaacgtttaacttgattgtgttagtttggggtttagtccaacgctcaactccatcaactttgttatttatgcataacgatgatagagagtttttgtcttgagctttcttccattgatcaagtgcaattgtagctgatccaacaatattcgaaacagaagtattttttgctttccaaacggtgttatggaatcaatgaaataagtttctagctgttagaaattgttacaatactcaattacatcatttaaatggctattgggacgttggaggaagatttaattcggagaggagttactaaaaactaaattttgagttttctggaaacacttgtttttatgttgttttatggttgttttacgtaacactttggaacctagtttttgaaaacattacataaattaattgagcatgtttccagctctcttttccaacgtttttatcccatttaacacaaatataagtgttggtaacaatcacgtgatgaaaagtattaaattttcaaaatgtgatcctcaaa

SEQ ID NO: 280437 - DNA, 530 bp, Cannabis indica
gaccctaaggaacaattctaaagcaacaaaaccgagcttcaaccacagaaacacaattcaccattaaaggtcaaagattgagttctaaaactcaaaacttgactaagcaacatatcatgcattcaaatcagcccaaaattacttaaacatgctcactaaaactgcagaaaacaaacacaagctcatgcaacaatcacagccaccaatttctcaattttcactttgaaaacttaagcttttgcatagaaaatccataactctaatcaacctaactatcatgcatcacaagcagcttaattaacctcaaataaacatgcttaaatctcagcaaacaacaacaaaatcacagcagcaacacaacctaaactaagcatgcaaacatcatcttttcatcaaaattcttcaagaaactaaaaggaagagctacaaagatcttaccaacaacttgaggtcaaaatctatgctaaaaccagcttgaaatccaagagaaaaatccacttttcttgctgctcaaagggccgaaactagag

SEQ ID NO: 280438 - DNA, 595 bp, Cannabis indica
cacagtacgtttaaaaatcacgttaacacacctatgctagttagggtgttacagttagtaggtccagaattaataatccaagtggataataattctctaaaacacatgagtttatataaaaagaaatgccttgtttctttgctagaaattcagggcattggggtttccagtggccgttttcattgcaatagaagcattttccttttgggtatatcagcagtagtagcagcctttttctttttaactgtttttaaagtttgaacaggcttcttgctattcttccacttcttcttgttcttgggtttgaaagtagaggcaaagtttgcctcaggcttagccgccccattagcattcccaaaattatgagctttagatccctttttctatggtcctccaatcaaattttcaaatggctgaaggtcgttaaccaactcgtgaaagtcttgttccttcttattcatgacataatttgaagtgtaaggtagaaaggctggagtcagactgttcaagattagactcacttgagttgtctgatccataacagctccatgattctcagcttcctggaaataacttgccatttggagaaggtgat

SEQ ID NO: 280439 - DNA, 604 bp, Cannabis indica
ttaatatatgattaaattaacaattcatatgtaatataatagtatattgttaatcgtctctatacgttttttaatataattaaaattaattaataaatgagtcacccttaataatatatgatacttttaataataaaatataaattatattatattaattttaaataaataacatattatgtatttgtaaattaaaaaaataaaatatatttttcaatattacatatatgtttatataatatttatattgagcagcaacacctttacttgacattacatatatttgttttgcaaatattcatgataggataggatttggttatttacgtaaattattatcccactcatgcatgcatgcatggattttataatttcaaacttccatgtacgtacgtactatatacgtaaatatatttatacataaatcatatatttaagctaagatatttgtcaatattatttgtgtggtgcttgcatgttagtcatcggaattttattaattaacatgaagttatatataataataatattatttgaataacatatatatatatgggtgactattcaatggttacatttttattgtaatcatatggttatattt

SEQ ID NO: 280440 - DNA, 382 bp, Cannabis indica
aagggcctgccaggctagcagccggagcaaagtgcgaaggagtttgtccattcattccggatgggttgccgaaatgggatgatgctggcgccaaggcttggccctgactatacccgggggtggcaaaaaattgtatgccacttgcttgtggagttgcagtcggggaagtacccgtgggcgatactccaggcatgtaccctgctatcccggtgggatagtatcctccataagccactatttgggcttcttcaaggttgatatatttttggactctcttctggaagtcctgaaggctagcagctccttcttactgtagttcattccagaaaggagtccccgtacggatgcctgcttggagaagcgcaagctgttgtccgtcgtc

SEQ ID NO: 280441 - DNA, 808 bp, Cannabis indica
atatatttataaagtgacagttattacttaatattgatgtacttactacgtataatatcaatcaaattttaatatgttagcaagttttagaaattgtaactatatgtaaaatatatatataaatatatattgccaaatttgctacaaaaataaaacaaatgttatattttgattcaatacactataatattttatggcacaatattaaaatgattgttttatatatttattataaacaaaatattatgatgtatatttaattagtttatgagatcggtttattttaattgagtatttttttatattattatatagctataacatatatatgtatcatacataaattttatacgaatagtgtacataaataacataataaacacaaataaatagcatggtgataaaatatatattaatattcattttaattaataaaaaatacatgaaatttaatatttactaattaataaatgtatttctttcataaataattattttatatttatgtatatataattaacattagatagatataatgaaaaagaattttattttaaatttttaaaataatatataagatttatttgctcaactaaatagtgtaatttaactaacgggaatataattacatattatccaaatacaatttatatattttctacaaccatgcatattctttataatattcttaatgatcaaatattttggaaactcgtaccaaacgcaaatataatgctacctcactcactcaacactctataaatgctcttatttcactatatatctatatctatatataaaggaaaag

SEQ ID NO: 280442 - DNA, 571 bp, Cannabis indica
tctttagctttcttctcttctttccctctctttttctttctttttcttggctgctagcttcttgttctctaggacaaccatcagctatttctctcctttttttttaattgtttctttaaatgggctagtgcccatttggtccaaggcccattaaaagggacgggcccaataattctcgcctataaatagaatacctcattactcaaaaatttacgaattcttgaacacatcagactaatcaaaattttgttggaataccagtccaaactagggctgtacagaaattttcgtaaaccgcccaacccgaataacccgactaaaccaaaccgacaaaaccgaaaaaaaatacaaaccgacataacttgacaaaattctaaaccgcccaatctgtaaattgggcgggttgaattttgacccaaaccgcccaatgaacccgcccaaaccgatttaacccgattaagagttttttttttttttattatatatattatataatatataataatatataatatataataaaaaaaacccaatccctaaattgaatttagatttggaatattatgtattt

SEQ ID NO: 280443 - DNA, 546 bp, Cannabis indica
ttgacttaagaacaagaaaaatagttcattttcttaaagctcttacaatagtatctctgaatatgaattcttagataaaatctttcgacctcttgcctagtgaatatgaatcactatttatagggctataagcttggagaggaagtatttcccttctcgttacaattgatataagcagaaagattgcatagtaaatacagaatacactaatcgtgggatttggacagcttgccacatctctgccatctgatcccaaagttatagggatttctctgatgactcactatgcgaaagctgaattcgttaagtgttggcgtgctgcgcagatttctcactgctcgatctagaggacttcatccgagcaaatgtgtgaggtgccctgttcggcctgtgtcttgcgagcaggtaccaagagtcgattccacgtgtcacgatcgtgtgatgccacgtcagagtgcaaaaattgagataacaatatttaatgatctaatatatttattcatttttgttacaatataataacatgcaatactaaaaaaattatat

SEQ ID NO: 280444 - DNA, 609 bp, Cannabis indica
gttctataatgtggctatacggagttcacaccaggaagactttgtgaagttgactcaagggaagatgtcggtggctgaatatactctggaatttgaccgattatccaaatttgctggtgatttggtgcctaccgattttaccagaaaacaaaagtatgttcgaggactgaatgctacaatcagtcgagacttgaaaattaccacatcccatgacactctgtataagagagtggtagacttggccttaattgctgaagaggccgagcagcaagtgatgaaagagcaggctgtaaaggatgccgccatggcatcaaaccctcctgctggtggtaatttcagtaaggggatcgacagtagcaaccctgagcacaagcggaaggctgaggcttccggagcttcaggaggaaatagaaagtttcggggaaacagaggtggccgtcaaggccgcgggtcctcattccggtcataccctgagtgtcctaaatgtaagaagcatcatcctggtgagtgccgagccaaggcatgtttccagtgtggcgtggtgggccactttatcagggactgtccccaagctaagagagaagagcctaagaagaatgttgctcagaa

SEQ ID NO: 280445 - DNA, 748 bp, Cannabis indica
aaaatcagtaaaaaaaatatatatataattttaaaagagaaaaaaataattttgggcccctgggctgggtgggccctaggcacaggcctagcctgcctatgcccagggccgggcctgattaaccaccaagacggggaattcccaccccattagaggcgggtccccgcggtataaattttcatctctaagtgtaactctcatagttcacttttatttatctcataatatgagatgattatctcttataatctaataaaagatgtaacttctcaaaagccatcttttattatctcacaaagtgagatgttcaccaccatattgaataagaattcaaaatattctttattcacaaaataaatgataataattctcacaataataataaacactattttattactatcaatattattattatactatatataactcatatattaacataatatgtattttactaattaacatctcatatgtaacatacacataatatcaatattaaattataaatacatatgttacatatctcatatgtatgacatatatactataatatacatatatatcatatgcacataatatatatattaattacacaaatatatatgttacctatctcacacatatataacatatatatacattttaaaaaatgcatgatatatattatatacacatatatatatattatatatacatgtctcatataaatagatagaaaaataagtaatttctacatatttaatct

SEQ ID NO: 280446 - DNA, 481 bp, Cannabis indica
caacatcatgataataattaaggccacttccattcatccattaatctttaaccacatacggtgcttaccacttttcttaccttaattcagaagtacaaaagtatggccgacctgagtggaagaacaagctaagcaatcccggtcctatgtcacgacaattgaaacacaataaataccttaactcaaagttccggattaaaaccctagtttagaaatcaaacgtaacctaactcctaacaaccccaattcaggtcaagcatcccatatttaatttaaaacagatagtacacaactccccgggtcaaaactgaacataaagaccaacccgaaaaattttcccctgcaggcaaccggtcgaccggttctgatacaccggaacccatccggtcgaccggttccggcagaccaggaacaaagttcctcttcaccaaattcgaaccaaaacccctccaaacctaaccaaactttccaagaacagtat

SEQ ID NO: 280447 - DNA, 672 bp, Cannabis indica
cctacctgaatggaagtgggaagacatcacgatggactttgtggttggattacctagaaccacgggtttgtttgattttatttgggttgtggtagaccgattcacgaagtctgcatattttctaccagttaaaacaaccttttcagtggatcagtatacagatttatatgtcaaagaaatagtaagactgcatggtgtaccaaagtccatagtttcggatagagatccaaaatttacctctaagttttggcagagttggcaacaggctatgggtactaaactgaaattcagtacagctttccatcctgagactgatggacagtccgaaaggacaattcagatactggaagatatgctgcgagcatgtgttatggattttgagggctcatggagtaagtacctaccgttgataaagttctcttacaataacagttttcaaagtacgatagggatggctccctatgaattgttatatggccgaaagtgtagatctcccattcactgggatgaggcaggggagaagaaatacctaggtccagcatcagtacagcggacaattgaggcaattgagaagattaaagctagaatgcttgtctctcagagtaggaaaaagagttatgcagatctgaaacgcaaaaatgttgagttccaagtaggggatcacgtattttt

SEQ ID NO: 280448 - DNA, 768 bp, Cannabis indica
ggcaaaaatcaaattttttttaaaaaaatcatcattatttttgcctggtcagttgtgtaacggtgccgatacttaaggcctacggaaagtgaacagtctcactctttcactttcctctcaaaaaccctaagctctgcaacattcaaatttctttctctctatcatggagaataccacacccattgcagtaccccctattgctatgtttgttccatccatggcatcgactggtgatcctacagtggctcctacagtcgagactgcactgcctaatccctgtcgtgacattgtcctctaccagtcggaggttggtggttctgcacatcccccaagtcctgagtcgactccgtctccaccctcacctccggtcagtcagaaacctcgtacgtttctaggtaaggctcctcctctctctaaaaggttcgaccttcactgtcatctccttccccacctgtgtcaaaacgagtcactcgttcttcgtcgagtcaccagtctccctcaaaacccgtaggccctcctcgtcctccatctaaggtttctattcctaccccaaccagtgaacgtgttcaaaccaaacgaaaatcctcaagtgacaccacgtatcacccacctgaaaagaaatccaagaaaaaacccactccagttgcctctacagattcatctcccaaacagtcgtctagaggttctaaaaagtccaaacttcccaaagcacctatatcaactgtcgacccagcaacagtacaatgttttgttgatgcctctaaagcc

SEQ ID NO: 280449 - DNA, 887 bp, Cannabis indica
aaattctttttattaaaaaaaatgtatagatattgaaaatatacaaatataaattgtgacaaaaatataggaatggctcccataaacttctatccacatgtcctcatctcctcttaattaaataattttcttatgtggttgttcatgaaaaaaaaatagtacaataccatgcccatatatactactaatataaaatgttattggagttcactaatatgagcagcttgaaaatatgtatctatcgttgacaaataataatgtttattatttccgattacgacaatttgcgtagacattctttttgtctttattatttgtagtgacaacacaaaggcaacgttcgtaaaattaaacaaagagactgagagagagacatttcagacaatgacaatttttacaattaagaccatgatagaagtgtataatttgagttaaattaacctaaaattataagtcagatattatctttgattcaaattttataataagtgttttaatgcataaaattaacttttctttttatatatatatatagaattgtgtaaaaaaaattaataaaacattaaattttattaaaaatatatatatatataaaaaaactctattaatatataaaaataaataatattaattatatttataagttacaaaagagtctctttaatttagacctaatttatacactactatatcatttagaattctctttataaagatgaataaaatatacttatataccatactttataagcactctattattagagatctaattatgcttatattgtgtggttagtagccctacatcagttagaaactaatttttttaaaaatatatatattcaatttattatgtaagactacgtaagatcgatccaatttagtta

SEQ ID NO: 280450 - DNA, 148 bp, Cannabis indica
tttctttcactcaaaatctctcttgaagccgccactctccctctctctaccttctctgtttttcgaaaccctctaagtgatagagtagtgcccacacacattaagtaatacctcaatcatagtgaggaaggtagtgtagaattcagag

SEQ ID NO: 280451 - DNA, 686 bp, Cannabis indica
tggccgggaatttagaatgtcccaaaaatacccctttagtatgatttatgtggttttatggtggaggggcaaaatggtctttttgccccattagtattttgtcttttgtgatttatgaaatggaaaataaatgttatttgtttattttagttggctgaaataatatggtaaatgctttataaactcttttctcttaaaatccacacttagtcaaattagaaaggaaaatttcaaaactcacacactcaaagctctctctctttttcggccaaagcttgggctgctagggctgggatttttctgctcaaagcttgtaattttcaactcatccttgtgtaattctagtcaaggtttgatctcttgtaaattccctttgtgttttcttgaattttaagtgaaattgatgaaatgcatgcatgattttggtatatgttgctgctgtgattcttgttgttgttctgagattaaagcatgttaaattgtggttattttggttgttagtaatgtatgttaatggctttgctcaagtttggaatttttagctaaaaatatggttttcaaagagaattgtttagattctgtttctgtgttgttgctgtagtttctaatagttttcagaggtgattttatgctagtttaagtagaattaagctagtggaatgcatgtttaggtggatttgctcaag

SEQ ID NO: 280452 - DNA, 370 bp, Cannabis indica
taagcaatttacttttttacagaacttgatttcgattgtatttgaattagctatgaatttttgaaaatcgggaaaaatcaaggtggtgatcacctctcccatgcgcgcggaagggctgcttgcatcctcccagcgcagtggaaacacggctggacacctcttctgcgcgcgggggtggtatgcaatgcataccatccgtacaacgtgcaatttttcttcgttttcttcgatttttcatgctatttcatgaaattaacttccaatttttggtgtagttttgtattttgattttatttttcatatttcaaatctaattatcagaaataaattaatttaatttttcaaaattaattttagatattagtgtaat

SEQ ID NO: 280453 - DNA, 789 bp, Cannabis indica
ataccccgcataatgtgaattgcgattacgtggttcgacttaggtcgtactcgcagtatctcgctggttttatcctgggcgagatctaaacttcgagaagtgtcttacggacatttcagcttttattggaaatctgaatacacgtgtcctttaaataggagtctggtctcgagtttctaggtgagagaaatctcactataacatttcttgcctctgcttttcttctctgctcttagcattgtttttctctgttctggttttaccttcttcagagaaaatgcctcctcccctcatgcctattgtattttaactcttgttttaatataataacatttgttcttaaaaaaaaaaaatattgttgtgaaaaatagcatgaaaataatggttagtatttttgtataaaagtaaaattacaacttaaaaatattaaaaaactgtaaattcataattttgtaatttttttttattatttttaaatatttataaaaatattcctttgcttttggttagttagcaatttgatttttttttttttttttttagtaaagaattgtaaaaatttaattaagtaaaataatagaaatagtagaaaagaagaagttaaactaactttttttaaccgttaacaacctcgtaattactatgctctaagattttctacttcttgactgactagtcacactatgctttggtagaatcttatgcgttcgtccaaccaacttttttgtctgaattttgtctaaccactttgttttattgtagatttgtagtaatatttttaatttttta

SEQ ID NO: 280454 - DNA, 682 bp, Cannabis indica
atctccggggccagatggaatgagtcctggtttttaccaaaattctggggcattgttggtaaggatgttgtgaaattggtaactgatttttttgctactggtgctttcgaagcaaacctccccaatacaaatattgttcttgtaccgaagaagaagaacccaaaatccatgctcgatcttcgtcctatatcgctgtgtaatgtgctctacaaaattgtattgtgtaatatcggagaaccaaagtgcttttattcctggccgattgattactgataacattatggtctcttttgagattatgcactacatgaagcgcaaaagttcgggtaagaatggagttatggccatgaagcttgatatgagtaaggcttatgacagagttgagtggggttatttacaagctatacttcaaaggatgggatttgatgatcatatggttaagttattcatggcatgtgtttctactgctaaataccaagtcagccatgcgggtaaagagtttgggaacatcactccaggtcgtggcctacgccaaggcgatccgttatcctcctacttgtttataatctgtaccgaaggcctttctgctcttatcagacattacgaacagagacatctcattcgtggcattaaagtggctcgtagcgcaccgattgtttcccacattttcttcgctgatgat

SEQ ID NO: 280455 - DNA, 137 bp, Cannabis indica
aatagaaaaattaagtgtaaattccatctatagtggctggtcatactaatgggccccactagagaattatcccacttttgacaattttctcttattttctcaaaaatgccactttcccaattctaacaatttaaaag

SEQ ID NO: 280456 - DNA, 785 bp, Cannabis indica
gtgggaactttctctatctgtacaaccttctgtgtcactttatctcatataaagtggtacttgatttccacatgtttggttctgtcatgaaagacaggattcttacacaagtggatacaactctggctatctgagtagattataggttcttcatctagtaggttaagctcttctagtagtcctttaagccaaatagcctctttaattgcctcagtaacaactacatactcagattctgttgtagataatgctacaacaggctgaagttgtactttccagctgatacaatttccccatagtgtaaagaaataggcagaggtagattttctactatctctgtcacctgcatagtctgcatcactgtacccagtgatcattctactattgtcccttctcttgtagttcaatcccacttctgtagatcccaataggtacctgaacaaccacttcataccctcccagtgttgtttacctgggtttgccatgtacttacttagtacactaatggcataggctaaatctggtctagtactgaccattagatacatcactgatcccactgcacttgaatagggcacttcactcatagcttccttctcagctatagttttagggcattggtctttgcttaggtagtactgattagtcataggttccttagttagctttgcatttagtcagagaaaaaattttctatgactttctttatgtagttcttgttgggttatgccctaaataaaactctttacaatctgattgttatcatatagaaatttgaagtgatt

SEQ ID NO: 280457 - DNA, 780 bp, Cannabis indica
acatggcaataccctaaatctctcaaaaaaaggaaaaaactagggttccaaaaattcccccaacttgcagaccggttccaaaccggaagtccagttctgggacaccaaccggccgaccggttgttacaggtcccccagaaccgaaattccagttctgtgctaggaaccaaaataatgcccccatgaactcaaaattcaaccaaactttaccaaactctccagaacacctggacaatgcattcacaacattttccaaccaacaaatcccagaaaaaaccactaaatcaaattatgccaataaagatctaaacttgagtttcaaaagtcaagtttgcttaattccgacactatagctcaaaactgatatctagggcttaaaatcatctcaaattaaacataaaattcaaaccctaagcattctcaaacctaacagccccaatagcacaaaaccataacctcaaaccaaacaaaagcttaaaaactaaagaagggttccattagggcttaccttagcttgaatctcccattgtttctttgctgaaatcactaaaaatcagcagctcttcccgttgattttgctggtttcgaaatgagagagaagggaaggagaggtttctttcaattttttggtgtttttccttaatttcattaaatgagataaatgatgggaaaatcaatttcccttgttgaaaaaatcagcttgctaggtgtcaaaaagctacgctgccacttaactcccaccaaaagaaatgactaaaatgccctttgacccaaaactag

SEQ ID NO: 280458 - DNA, 481 bp, Cannabis indica
aaataccgggcaccggaattacaaaatatgcaagctactgaataacgtaaataacagtataataaattatttaaatagctataaataatttcataattaatcataaacaacaaataatttccaaattaactaagcgggctttacaacatgcctattgaaaatgataatgtggaaaataaaggttatgtgcctattgaaaatgataatatggaaaatcaaaattttgattatgaaaattgtgatgatgaccatttgaataattcactcgaaaataaaattttagaggataataataatgctgagcaaacaaattcatttaaaaatttacttgacatatttgatccaagaaattgggatgctcttgatctaaaaatgattgatttattagtgatgaagggtccaaaaagagattgttctattatggctggtcctaaaggtaaattttctagacgattcactgctaatttgtatactagagttt

SEQ ID NO: 280459 - DNA, 773 bp, Cannabis indica
gatagaaacaaatcctaaaaacttatattaccatagtatacataaaaaacttactataaaactaatacacataatgcaaaagagttaagcaacaatcataaaatttatatcgtaatcataacaaaaagtggtaacctaatacacaatcaatatcaaaggattcacaaattgggctcatgcatcccgcactgcattgaaagtataattaaaataaaaattgattaaagaagagttattcatatttacatgattttttaaaaaacttgcaggtttaacaatcatcatgaagctctggacaatctccataacataataactacattataatccattcggctgctgtcgatacatgtacgagttgatatttattggacctttattttgtatattttttcaaattatgtacatgtctacaacactaaatcaaaaagaagttaattagtgaattaatttttaacataatctaaataaaaaaaattataacacttactttgttacacaactcataatatcatttgggataaggtcatttgtcaagtcgaggtatgcaacactttgagtattgacatggtccgaccatcggaccactctctctcttcctctctctgaaaatcagaccccatcggaccccatggtccgaccatcggacctaggcctttttttttcattcattttcagagagaggaagggagagagtggggctaggtcgtacgcggtggagaggggggctggggcttcagtcgtacgcgatggagaagggggctggggcttcg

SEQ ID NO: 280460 - DNA, 644 bp, Cannabis indica
tatctaaacctatggcttatggtatgcctggttaattaattactctagtgctatcaacttactttagtaagatgttggtgtatttttctaatggaaatctatagatacttcttgatttctagatgtagattttatttatctaaggaaaattttcaactattccagaaaagataaaggccaagaaaagaattccttgaatcaacagtaagaggtctcagatatgctttgcaatgcattagaccaaacacttgctgttgagtgggagtaatgagttggtatcagattaatccagaaaagaaacattggaagacgatcaagtaaatcttaagatcaagaagaggaactatatgttagttgataagggtggtatttaatactcttagactacactaaataagatttctagacttgccttagtgctagaaagtctactgataagatgatgattactttggtgaatttggagaagtgtaaaaacctatctgaaatctctaagtctaccagtgagactaatgttaaagttgcaggaaagatacttattcagtctttagaaagttctatacatttttggcatagtaccaacaatttattaactactagtgttacttcctgactaaccaaaagtagttgccaaaaactaaaga

SEQ ID NO: 280461 - DNA, 671 bp, Cannabis indica
tgttatatgttttgcttttctcactgagtctgttgactcacagtgttattgctatgtgtaagtaagggcaaagctaaaattgaggagccgtgagagcgagcagatgaagattgtacatgtcggggcgattaggcctagagcgtacgatccttgggacagcagggcttctactgtttagtcgctaggcgacaaatatttggtatatggatagtaaacttttgtaattgcattttgtaaacgggatcccaaaattttataaatgtaatatattaagttttaaataattaagcaaaattttaagtattcacgatttccaatattctcgttcattcccaacgagtgcacagtacgttaaaaatcacgctaacacgcctttaatagttagggtgttacaattgtgattataacaatggataactgatagtgtatctatatcatggaacatatagagcgttctatataacagagagtgcaataccaagttctatggtggatccaacaaggaattaataagtcagtgaatttacttggtaaattctgggtctgcttattggaagcttagatatataggcccatggtccccatactagttgagacaatactacttgtaagactcagttgattgattttggttaatcagttataattctaaaattagagtatgtctagtt

SEQ ID NO: 280462 - DNA, 798 bp, Cannabis indica
ttgtctaatagtattttagtcctttaataatttttctcttttagatataatttttttttgaataacttttacaatacattttaaatacaactaatttataaaattatcctctaattaaaaatctataaatttaaaatttctcagaattctcaaattataaatgtattaagcaaacaaaattattctttttttatttttaaatctgaaatttttttttttggattttattttaggaaaatcttatttacaccccaaaaatttctaaaaacacccaattttaataatttttattttatataaaatttatatcattaattgtactaagtttttttttaacttttttcttttcaattcatattcttaaaaaatatacttatcaattaaaaataaattatattttaattattatgataaaaaaaaaaaaataaaaaattatatgaaattttcttagaaaaaaataaaaaaatatacatggtttacaaaaatttatgaaaataaaatcaaaataaatattaaaattaatataaaataatgtgtggaaaaaaaatatacaaaaaaatattaagagtaatttttaaaaattatttaagcttattttttttaataaaaggttatatttatcattttatggagtgcaaatagtactccccttatattattaaatactaatttcttttattattatgcaaaaaaaaaaagtacaaaattcttcgttttttttttttttaaaaattcttgaaacttttttttagttattttcttttttagttatattttttatttaagtctaaaaaaagt

SEQ ID NO: 280463 - DNA, 40 bp, Cannabis indica
gagtcttacaagcagtatggtcccaactagtatggggacc

SEQ ID NO: 280464 - DNA, 494 bp, Cannabis indica
ctgcctaaaatagaaagcggtaaacagatgatcacacaaacagtaaagtatttactctcaatacttactgcaccatgagtggagtttatctctgacgacaaatgtacatgtttggccggtctacaggaagtttaaaaaccttggcgctttgataccaaattgtaacgccgtaaacacttaggcacgctacctaaatatttttatgaaaccctaatcccctatatcaggattactaatcaaaatagtgcagaatttaaacttttatattaaacagaatgaaaataagacttgcaataaacttttaaacagttgggatccaaaaaatatttacaaactttattacaagtcttttctttccagccgacctaagcagcaaaatagaatttcaaaagttcatcacaagtagacccttaacccgcttggtctgatatggctcgaacatgtacattctttgcccagctcctgaaactcatggctgatcagctaatgcctta

SEQ ID NO: 280465 - DNA, 452 bp, Cannabis indica
acccctgaccataaccctaatccccgtgtcccacacggtattgagtctcgacgttcgtacgacgatactttagacatagtaacatcctatactcggtacgctagtcatactctagccgtaccgatgtgttactgtatcagcctatactcggtatgtcagtcgtactttgatcataccgatgtgatattgtcaaatagtacggaactatcgaccataatatcagcctatactcggcacgctagtcatactctagtcgtaccgatgtaatactgtcgaatagtatgaagccaacatacatatctaatgtgatctaacaggcttcctaacattcatgctaaacatgtaaatacatatgcatactgttatactaatcttacctcgattccgaatttaggtgtgctggtcaaccttagtggaacaaactgctcggcgaattacatgctcctaaatca

SEQ ID NO: 280466 - DNA, 749 bp, Cannabis indica
ccaaataacataaaaacgaggagaactagggtttctgaaaatcacccaaccggaattccggttctgggaatttttagagccccatccagaattccggatgcacaaccggaattccggttcctcgcaggaatttttcaaaaattcacacaaagctcaaaaccaatccaaacaatgccaaaacatccagactttttctaaatgacccaaataacaattctaaagcatcaacacagcccagaaagcacagaaacgaaaatcaccatgggagctccaagctttgagtttcaaactcaaacttggataatgctcacttgcaagcctcaaaactagcttagaactaaataaacaagcataaaaacactacagaaaactaaccctaattcatgcaaacactacagccaccgaaacctcaattttcacttgaaaaccatagctttttaacaagaaaactaaccaactaaaacaagaacaactagcatgcatttcaacctaactaaacatatttaattcaacattttaaacatagaaacaacaacaacaactagcagcagcaacatcatcaaaatcatccatgcattactcatctttttcatcaaaatttcaagaaaacaaaggaagaaaactagacaagaaatacctcaactagaaacactttaacttgctgaaaatcacttgagattgaagaggaaaatccacttttcttgctgcctcaagtggacgaaaaagagagagagcttttttgagaaatt

SEQ ID NO: 280467 - DNA, 139 bp, Cannabis indica
ctataataaccaacttaaaaatttccaaataaaatttaattaaatatcaaaattaagttataactacctaatttaagaatattccattttaagtttaacaacttaaaaaatatctctagaatcttcaataaccaattcc

SEQ ID NO: 280468 - DNA, 768 bp, Cannabis indica
tcccatctgactcaattcccgcccaaacggtatgcttcttgtgcatccttgaactccttctaccaggttcaggacatcagcaatgccctggctgtggtacgtacttgtgatttatttctttcctcgatattttgcctaaggcttttattctcactcatacttccttttccagattactgcagagaccagccgcctttccaagaccataattaatcatggcttcgtcctgtccgaatttgggggcatagacgaggtcgtgaggatcctgcagaacttgtctgctgaaaggcgggcgatccaggaggaggctgagcgaaaggaagccctcgccaaggcgaagcttgaggaggaggccaaacagagggaagcccaggcggaggtgatgatccgagaggaggtcctgcggagggataggctggaggcgaggcaccgggaggcgctgagggcggagggcgaagccactaccaaggccaagcgcgagcttcgggaagccagggaggagatggccgctaaggtgaggtccttagagaaattgcaccaggcggacttggagtccagggctaacttagccgtggagatgaaggagctcaaggacttcagagatcaagccttaaagaaggctaagagagatgagctcctctcccctgtttcctacaagcgttgtattaagcgctttgatgatggcgtctacatggcctggtcgacaaatggccagagcatcaagcttgacttctaccccaaacccgaggagatgattgctaaatttcg

SEQ ID NO: 280469 - DNA, 682 bp, Cannabis indica
atcatctatagaggatcttcgattattgggattagaatgatggttaaattttcatagcatatctatatcgttgaacatatatagcgttctatataattgagattgcaattacaaatctatagtgatgcaaggaggaattaataagttaggcccatggttatataggcccatggtccccatagtagttcagataatactgcttgtaagactcagttaattgattttaatcaattataattctaaaattagactatgtcttgtttatgatttttcactatgctagggcttaattgtgaagaaaagaggtttaaatgtttatttgttaattaagagacttttttgagcctaattaataaatatattaaatggtaattttatttgataattaattttaattagggggtgtttggtaacacttttgtttttaaattttagaaacaaaaaacaaaagtgaaatttgtgtttttaaaaaataaaaatgtattctataacgacttttgtttttcaatgttaaaattagaaaacaaaagtgtgttctataactttcaattttattattatttttaattttatttaagtcaggtctaggtccgggtctagggctggggccgtagtccgaccccaggactggggccggcgccagagtccgggtcccaaggtctaggttggggtcggagtccaa

SEQ ID NO: 280470 - DNA, 332 bp, Cannabis indica
ctctttctctccttcttgaccccattctccttcttgttgattggattcttcatagtcttccacactatgattgagataccacttgatgtgtgtgggcactcactctatcactcaaggttcaaaaattgaagaagacaagagaaaagatgatttcagcctaaagaatagaataggagacttaattttctgaagacaagtagttttttttttcaaaaactagttaagtgtgagccatcactatctatttatagataaccccctaggtttaggttagaattaattagcatttaaataataagaaaaataaataggtaaatcacactaagtgtggc

SEQ ID NO: 280471 - DNA, 649 bp, Cannabis indica
cggtatgggtgatcgcctcttgttcttgcccttttccaattccgccagggagttctcgattctcttatgaggttcggccatggcgaagaattctaccaaggattctggccttcgggcctgcagctctttccagaagtcggttcttggcaggacacctgttattaacatgcaaacaagcgaagactcgggagccttctcaacttttgttacctcagcgttaaaacgcttgaaataattctgcaaagactcaccagattcttgcttgatgttcgccaaagtcgtatagggtggcctatacgtcatcgtggcctggaagtgtgtgagaaatagatcgacgaagttctcccatgtcgatatcgatgcctctggcaattgggtgaaccaatcatgggcattctcttcaagcgtagccgcgagaatgcgacacttcgcgagttgcggcacctggtccacttccattatggtgttaaatttctctaggtagtctaacgggttagatgtacctttatacttgagggattcagataaacggaatccctttggaagttgggcctgtcgcacttctgcggtaaacggcgaggtgccgtgcagcttgtatacgggcttacgctgctgttcgagcattttcaaagcttgcagaagcatactt

SEQ ID NO: 280472 - DNA, 500 bp, Cannabis indica
ggtaaaatatatccaacaaaagtttgggggtgcaacctcatcctcttcctccgcctcagaaggactgctaggacgaacatcgtcctgttctacaatctcctggacctcggcgtccccttcatgatcctcctcctcctggacggatggatcttgttcggcactggctaaggtggcatgccaggccacttgagggtcagatgcatcaattctatacattatcttcttcgtacgagccatcatcctaaggctggatgggagatttaagctaaaagtttcgttactcgaagaggttggactagaatgaagacgaggatgatcctcgtgcaagagttgaagtagatactggtcgattttgtgttcgcttccccaaaactcgcctgggttcatctacaaaagcaactcacaagatgagtgtttggtcgaaatatcgaacattaaaacaagcaaatatgccgaccaggagtactcaacggattaaaaaaaagagaatattcgacgaa

SEQ ID NO: 280473 - DNA, 659 bp, Cannabis indica
gaaaaaggttggagtgggtagatgtaggtggggagggtattatgggaaaaatacaaaaagtgtcatatattaccaatttttataactttgcatttaggagacaaatttttaggttatttaagcatggaaattcaaatttcccaaatagaaattttgaaaaaactagagaaatttttttaataatctatataggaaaaaatgttgtttcgtagccaataaaaagtgtgtaatattaaacactatctacaatatttaaatatggggtaaatactattttggtccatgtattttacaaaaattatcaattgaaccacctgttttgttaaataacaaaatagatcctatattttctaaaattgtacaaataggactctgaactgattttttgtcaaaataaaatttaataataatttgatctagagatgttatgacaaaactggttacattttctgtatctgttcgtgttaaaaattatcttaaagttggttatattaaaaaataaaattgttaaaaattgggctcaggatcctatttttactattttagaaaatattgagtctattttatcatttaacaaaataaagagtctaattaataacttttacaaaatacaaggtgtccaaaatagtatttactttaaatatacaattaaaagtgcg

SEQ ID NO: 280474 - DNA, 694 bp, Cannabis indica
ttgaataaaatagattacattgaaatggagttttatttagggcataaaacccaacatttagtacatgtcaaagttcaggggggaaaattactaattagcctactttttaacagatactttttaatggcgttaaggcatttttcttcttttttttttctatagaaaaagtaaacagaaggtgaaccccgttaacattctcaaaaataagaattgagtttctaattgaccactgagtctctcaccacctgcaatgaaaccccgcaattcgattcattcgtaaccctaagcatatgccatatccctgaacccatgatcaaaacattgggagactttctatttttcttgaatgctgtaatcaaatcgttcaaattggaatcgtacggagcccatacgaaatccaatctcatcaaccttagtccaataatcgttttgcctcctggagagatcgtttttaactgactcaacagcttggggtttcattaccaaacccagaagcgatagagcaaagaatcgtgactgtgagtcaccggcgactacaacccatgacccgtttaggagatctgaagcgtcggctcatgtgagtttctgaaagtcacgaggccgaaacatcgtcgtggaaggaccaagtccaagacttttcgtattgggaagtgttgggatgagtgtgggtgacattccaaatgatgtcatggga

SEQ ID NO: 280475 - DNA, 675 bp, Cannabis indica
aacaatcaagaataaatatcctttccctaggatcaatgatctttttgatcaacttcaggagaagacagtcttttcaaagattgatctccgatcgggctatcataagttgagaatctgagaggaggacatcccaaagacggctttccgtactaggtatggacattatgaattcctggttatgtcgtttggactaaccaatgctcccgcagctttcatggatttgatgaataagatattcaaggatttccttgatatcaatgttattgtgtttatctaccacatccttctgtattctcaatcagaagaggagcatgagcaacatctcctaatggttctgcaacggcttcgagaacataagttgtacgccaaattcaagaagtgtgaatttcggctatctcatgtgtcctttcttgggcacattattggcaaggatgggatcaaggtggatccaggaacgatagaatccgtcaaggattggctaagccgaaaacagtaacagaaattacaagcttcttgggtctggctggatattatcgtcagtttgtggaagggttctccaaaatttcaacacccttaatcgagcttcctaaaaagagtcagcgttttgtatggacagacaagtgtgaggcaagcttccaagagctgaagtaaagattaattacagctccagtgtta

SEQ ID NO: 280476 - DNA, 661 bp, Cannabis indica
tttctttttaattaaacataacatattatacttataaaattccgggatcccgtttacaaaatacaattacaaaagtttgctattcatttacaaaagatttttcgcccagcgactaaaaaatagaagctctgatgtcccgaggatcgtacgctctaggcctaaccgcctcgacatgtacaatcctcacctgctcgctctcacggctcctcagctttagccttgcccttacctacacatagaaatagcactatgagtcgacagactcagtatgaaaagcataacataataaacatactaaaatctcaggttataattaggtgcacatacacctaaccataaccctacctgaatcaggaacgttcttgacaaagtatgactaaccgcgaatccagcctatactcagtactctaatcgcactgatgtggtagcagtgaatccatactgtctgatagcctagcatatatctgatggtatctcggtgcaactctatgtacacctcactattgccctgatatgctaatctgatggctatataaaatttgccaaacatatatctaatatgttattctgacgaaaacttgttaacccaagatatgtttctaagagggggtgaattggaaatttaaactaatttcggtaaattaaaacttttaacacaaaa

SEQ ID NO: 280477 - DNA, 423 bp, Cannabis indica
agtaaaacactcaccaaatacattctctgtattaaatagatcaatatataacaaagactcattgactaaggctcattaacgccccaaccacgtaaaaatccttctctaattttcttacagctctataaacttataatattttattagttgccgaaaacctcggtcaacattttggtactttcattgagagctgaagaaagctactgtaaacgaacacttgacttcacaaaaatggtggagactagaagtaccgtcagcctcgcccactagaagatgctcaagacccaaatgaggaagatgtagcctcaagagcagctgagggttctgaggaagaaggaggaataccagatgatgactacgaggaacacctcgatgagtatgcctatgacggaggaagctactcggagttggtgctccttagac

SEQ ID NO: 280478 - DNA, 487 bp, Cannabis indica
tctcaaaattcaaattgcacaaaaaacccaaaatcatgcttaacacacaactcttcaagctcaaagacttgagctttaaatccttcaacctcataatttttccagcagcataacactacttaaaacatcatttccaacctagaaaatactcaaaacatctcatccaaacccaacaatctaacccacaacaataactatcaatttcacacctaaattcatcaaaacaacaccaattcattgaacatgcaaactcaagaacaataaaaccaaaaacatgcttttaccacaattaaaattcaacaagaacttcaatcaaactcagtaaaggaaactacctcaattccaatcaaagcaaagctcaaaaatcttcaaattccaagctccaaatcaagcaacttccaccaaatcaaaaattgaatatcaaagatggtgagagagagagagagagagagagagagagagagagagaggagggggtagggggggt

SEQ ID NO: 280479 - DNA, 530 bp, Cannabis indica
accaaacctttttgacgaaagaggggtcaaatcgttataacgccttaatcaaacctttctagcgagaaagagatcaaacaactgtaatttttggtttaaaacctatctgacgagaatggaaatcaaaagttataattagcgcatcaagctgaatactaacggctcgcgctaagggaatgtattaaacgagacattaaagtttcttgaaaaaatacttaaaccgaacacgtgggtagaagatttaactacttatctaagcaataaaaatatatacaagatgacaagttcattaaaaatatatttgagtttgcttaaaataagatcatttctgatgaccgcgaggcagaatcaatgatggctcgcagattgagggtcgagcagataagctgctcgcgcgtaaagtaggtaattaactacttagcgtcagaggaaaatacgagaaatggaaacccctaataaaatttatgcatgtgattgtttaaattgtgaatgaaacacaagcaaacatccacatattaaagtttaaactt

SEQ ID NO: 280480 - DNA, 378 bp, Cannabis indica
acaacatgggattcgacattgcaattcaggatactacaagataacacatagatatcaattatggtttaacacaaaatcttattcagaaattattagcacatagcaagtaggaatgactagagaaaatacaaaaaaaaaaattcaatcctaaataatttccaaggttttcaacaaactgatatttattcgatcgaaaagagaatccgacgttgtccgtttaggcgagagtcaaggtcattcctatttcatgagcttccaccattgtttcatacgtttgtaagtcttatacagtagccaccattagggtgatcaatactaatataaaaaacttacaaatatacttatctttcgagattaaacggcgctaacttgctaatg

SEQ ID NO: 280481 - DNA, 704 bp, Cannabis indica
agaggcggccagcctcagcagcaagctgaacaataacacaagtgtaagaaagaattcccaagaagaaaaatgaagggaaaagcaaaactgtaaagcacttaccacggtgagggagtggctgaggtcctggacctggaagatagagttcagggaggcgcaagttgcgaaccgcttaggcgcgcaccgggtaagctgagaagcgaactcgccagtcatctccgcggcgaagggagccaaggtgggcccaaggaagcgacggaaccagtccgacagggggtccaagttaaggtcccacggatcctggtactccgggttgttgatgctttcctgtacctcaacccgcaaaaccctcctaagggcttccacctcggcatacccccgggagtattcgtccatggcatagttatgcttggctatccggagctcttgcctcacctcatccccaggaactggagtcagcacaatgttgggaggagcaggatgttcttccatgggggagaccccaccgtcaagaccatgggcaggagtgtcagctctccgaggccgcttgggctcgtcctgggcaaccatcttgcccttgcgcttgcgaatcagagcaatctcaggctcttcttcaccttcttcagcttcctcaggaagagcccggagctctcccgcaccttctgcgacttcctcagaaaagccccattgcttttcttgacctt

SEQ ID NO: 280482 - DNA, 584 bp, Cannabis indica
atatttttcacccctatcagttcgcaagatcttttaatgactttcttaattgtctttgctagaaattcatgaaaattttcaaatatttcaaatttctggcataagttaaatatctatagtaatcgtctaagaatttgatgagttactcataaccacccctagaatgtatatctctatgtccaaggacacattgaacatgccatccaagtagttacttaattgaaaaggaaaatgaagtgaacttaattgaacaatatgatcctatgaatgattcaactcatctagatgcttccaacttcgtagaaaatttcaatgataataatgagtctaatgactgtgataccagagaaaattaagtataatctagcattaactactatatttgatatattatgcctttatcttcaatttattacattatttgtgatgttttgtgtattatgcattttttttaatgttttgtcttgtactatttctatttgatgaaataaatatatatatatatatatttctcacatcatccttattgttatctcttgaagtgttaaatggattgtactctcaatgaagatgaacgtaaagat

SEQ ID NO: 280483 - DNA, 881 bp, Cannabis indica
  modified_base (818)..(818): a, c, t, g, unknown or other
  modified_base (855)..(855): a, c, t, g, unknown or other
atgattatatttaatgtataaattctattaagtctagaacatatgtcaaaatatgtatatatttgttcatgattatagtgtcgtcagcacagtagaatataatcatgattatatgttcaaaagtttaattctcatgatttgtcagttcactggatttagactagcatgataatcaacgataaggtatacttacttttgggctttgtgccctaaataaaactctatttcaatgtaatcttttctattcaattatcaataaagaaacagagttaatttcattacttgtttaatttcatttgattaacaaattcatccgaacccttatcacactgatattcttatttattgtgttgtcaacacagtggaaagtaaacaagattgagtgattaaatgtatccctagatttatcagtacacaaggtttaactgatatgataatctacaacgtagtttacttgcacctcggataagtgttatgtcctttacagggcattggttaaagtaacctttggttggatgtatggagtatgcatcagaagggatcgatattaaatttggattagatatgataaatttatcgtgatatctattcaattcaatatcacctagttgatcctagatcaaatgatcttaatcctgacatggttaggttcgatctcaagagtgttatttgtgctctttgattttgttaagtttaacataccttttggtccgggtgatacgtacattttgggaacatgatagtacaattggagtgggagcgctaatcatagatattgaatctatgcttctatccggacataaaagtgaaacgatgtntttcctttgagcttggctaaatagagataatgatagngcgctcattttagtgattatatagtt

SEQ ID NO: 280484 - DNA, 180 bp, Cannabis indica
ctcgcctaaacgggacactgtatcagttcgttggaaaccttggaaaataaactatgttagatttagtatttttataacataagtgattgtttgttttttctgaacctgtgtatgaatttatagaaccaaaaccttacttctgtttattgatatgttgtagtgccaatatgaataaccctc

SEQ ID NO: 280485 - DNA, 742 bp, Cannabis indica
cttctatcgatcgatatgttgtaccgctcatccctttccctcaccagctctgccttcactatcctaggactcaccgcctgagtcgacatcatcagtgtcggtgcacccattggaagcggatcacctaacacaaatcaaaaagaaaaaaaaataaaaacagtctattttatgcgtatataaaatgaaaacagtctatttttgattatttcaatttttaaaacatttataaaattaacttatacacattaaaattcaaaattttctagtaatttacaatataaatatttaaatttaatttttaattacaaataaatatttaataataatacttaaattatatttatgaaacttctataagtacttaactaactgttaaatgtattttgcatcctttgcgtcggttataaattggcgcaatatatgattgaaaaaatgtatcataaccctgaactatcccagctgccctctttcttcgaaacctctttttctctcttgttgtcggacttactccacccctttgttgctgcctaataagtgctatctctctatttcttttttaatctcgctttatctctcgatctcatctatctctattttgattgtttttctattttttcaaatgtttagtccctcaattcagtgaaacgcaatcatcgtccctcaaacctaaaaatgtctagtttggtgtttaaacaaatcttcatatattatagatatgatattgttgtgtttattttttctt

SEQ ID NO: 280486 - DNA, 663 bp, Cannabis indica
atatatatatatgatataaaataatcttaagtacatctcaatgctttggttatatataaaaaaagtacatctcagtgctttttaatgctacaaatttatttggtatatatgggacaaaaactacgtactccaatagatacgtcatgtgaaaaggagaaaggaataacaactcaattatttcaggaaacccttgtctgcgtacgtaaaacaaaaattgtacatgaaatgtacgttggccggaaaaagcatgagatgccgatgcaaactcttgcgcaagctgatgcatgagatgtacacgttgattttctaacgacgtttaatgtcgtgttagttaaaaattgacgtaatattaaattaaaactgttagttgactatttatgtctaacaataactgacatctattcaaatgtagtaataagtaagttgaaatatattttaaaattaagattgtcactactataaaggtccgtggctaattaaaattggctaactgacattaacaaaatttatgactaaagataaaaaaagttgtggctaattataaaccatcattattgtattgtgactaaaaggtccgtgactaaaagtattagtcacaaaaattataatctgttgtgactaaatgtatttttagttacaatatttgttgtgattaaaactaaa

SEQ ID NO: 280487 - DNA, 815 bp, Cannabis indica
attaattaaaaaaaaaatttattttcgaaaaaataataataaaataaaataaaatttaaatattttcgaaattaataaaataatatttaaaattaaacctacaattttgaaaaattaggtttcaaccaacctaaatatcatttcaaaatttgctaactacttttaaaaatttaatgttattttataaataaaaattaaaaaagataaataaatatctttttcagattttaaatttaatttaaataaataaaataacaaaatttaaaagttagcaaaatatcttacatctatttaaaattacatgattatagttatcttattttaaatttaaataaggtcaaattatttttaaaaaaaatttaatttaaaaaatttaatatctgaccttaaatttaaaaataagataagatataatcaaatttaaaaataagatagataattaagcaaaaaagatagatatttactattttcaaattcaaattacactaatatcatgaattaaattaaaaaaaatattaattaatttaattatgataattagaattgaattaggaatagtaaatgtataaatacagaactacacaaaaaatcggaagttaaatccatgaaaaagcatgaaaaaatcgaagaaaaacgaaaaaaaaaaatagcgagctgtacggacggtatgctgtgcatactcgtccgcgcgcgcaggggagtgcacagccgagggacgcaggcgcagggatgctgcacgcagcctattccgcgtgctgtccgagggacaagcctcgtgcgcgcgcgcgtgaatagttgcacgactccgatatttt

SEQ ID NO: 280488 - DNA, 483 bp, Cannabis indica
ttgatagctattctaagtgattaggggtggaccatcctatggacattagataagaaagtgtttgtttcaacaaatactacttttttaagaatatgactaagtctgaaaacaaagtagcaaagtagaggagattttttttcttgattccaaaagtgttctatcatcttatttgaaataagatggtcccactgtctctgttgtcttgacacaaccgaagaggacaataccacttatgttcttagacaaaaagtcatagtacctcgtcgtagtaggagggtttctaggaactcaccttgttgtgatttggaagacacttgtgattaaaatccattgttagtttaaacatgtaatggatagtcagaataaggaactaagaaacaaagccaagagaactatggttaagaccattcatatggaataaccgaaaagttttttattacaagggcaataaaggaaattttgaaaataagtctattcaatgga

SEQ ID NO: 280489 - DNA, 717 bp, Cannabis indica
taaagggaatgtgaatcgatgcaatagcttttcatggaataactcattgattacgtaagtatcagagtatgtaacccgctgactgtaaggtccaaggcgaggaatcaatgtacaaactgttacttagtatattaacgagaaaccgtatgtcactaaatatgaatagcgagacatcaaggacagaacacattagaagatgaaagcggcacatatccatcgtgaaagtccttagcatgcaaagaacaaactaagtgtaaaagtcagatcggctcgagaacaagtaagcgaggtgactgtctcgttatgggaagactgcatataacttcatcccgttagcatcagtgaggcttacaatcctgacgagccagaagatagcatttaagtgagcctcaaagaattccttgaggataagaacgatgatcgacatcagacatacattgtcgacctcgaaaggaagaacggccccagctcgctattgggatcactgtaaccaagtttctggcgagacatctccagatacaacaattaaagacgtgtttaatacacgattgttttgacccagtaaaagtggaaaaatcacaactatacaattttcaaatcataaaccgcatttacattgcgtgatatgtaatcaaatcccatgattttagggatagttgttgtaaatatattacagtcagctttgtaattgacagaccactatgtaattataaatag

SEQ ID NO: 280490 - DNA, 686 bp, Cannabis indica
tcaactattggttattggcttgactctacattcgcattgtatggtgatgatatagcttgccgtgccatcatgatctgctgggcactttggaagtctcgaaacaagcttgtttgggagaagaagacttccgctccaactcaagtcattcattcagcatggactacacttgaccactggcgtactgctcaagataaaactagtttattatcattgtcactcttgcaacatgataataacattgagcgatggactaaacccgattctgacacagtcaagttaaatgttgatggagcgttatttgagagagaaagtgcttatggtttcggcattgttgctcgagattcgacgggccacattgttgatctccgagccacatatcagggaggaaactacccagctgaggtggttgaagctcttggcatcaaagaagctctaagttggttgaaggacaaaggatggaataaagttgacatggaaactgatagtatggtaacggtgcaagcaatctttagtaatcaaattatgtcctctacttttggtttggttattagagattgtaagagtttattgtcagctttaaataatgttagtattcgttttgtaagacgatcagcaaatcgcgttgcccactttgttgctaggcgatcccgatttttctctgatcgtagcattcataggattgattt

SEQ ID NO: 280491 - DNA, 548 bp, Cannabis indica
tcgactggctccccagcctcattgtaccccctgtaatttaggggttcaacctcttggacctcagcgtccccgtcacgatcctcctccgtctggacggccgaatcctattcggcgctgggcagagtggcaagccgagccacttgaggatcagtggcgtcagctagatgcgtggttttctttgtatgagccatcatcttatggctgggtacagggtcagaggaatgtccttcactagaagaaggaggactagaacgaagacgaggggtgatcctcgtgtagaagttgaagcaaattctggtcgatccgatgttagagttccaaagactcacctgagttcatctactaaagacaacacacgagatgagtgttggtcggaatatcgaacaataagcaagatgaaagacggatgctatgcagttcaaaaacaagcattatggatgtaaacccacatgaagacatgataaagaagaatcgcagaagtttctaaccctagggtttcctaagcatttttctacagcacagtggaaattgcattcgaaatgtaaaca

SEQ ID NO: 280492 - DNA, 752 bp, Cannabis indica
ctaagagaaaaataagtatatctttagctttttatgggtacatatattattgagttagtataaatgtgttttgtagttgattttaaatgtattttatacattagtggtattttttaatttcttagaattatttttatgcctatgtaatttgcatattgaaattaatttttatgcagttctttttattattatatagttgtttaaccaattagagaaatatatatatacatatttttttataatttgtgtgttgtttttatttttatttttaactttacgcaagtattgatgtccaattaattttcatatcaaaatagaattgttattatgttgttttcttgttattattaggctgtataacaaagagaaaaataagtatatatttatttttttaatgtgtagatatattttagagttggtgtacaagtattatgtagttttttttaaatttattttatagattatccgtgtattttttttcttggatctgatgcaattcatggagttgttttcatgcctatttaacttgtgtattatattatagagttgttaattttttgttatttagttattcaatcaaacaaaaatgaatatatctatatatacatgtttattttattttatactattagtgatatttttttatttttttagtagttattttaatgcctatgtaatctgcatattgtagcggagttttatgtcaactttttttttttgtttatttagttgtttaactaagagaaataaat

SEQ ID NO: 280493 - DNA, 1112 bp, Cannabis indica
tgaagggaattaaagcccatgttgattgaggtgtcatgagcttggagtcattcaggtgtcgtgtataattttgcaagggaaacttacaaaaatactggaatttgggttaatttttacaaaaatactgtcacacggaaatatttttcaaaaatactatatttttataaaacaccagtaaaacacaaagcagaacaactcaaaacaacagtagaacactagtaaaacaccagtagaacaccagtgaaaacttaacacagtatactgcagtatgaaacttataaaaaaaaacacagtaaaaaagtaaaaaataccgcctgacagtatttttgtaaaaaaatagcaaaagttagtatacaatgtaaatttcccttttgcaattggagagaagaaacttggattgatgacgtaatgtttaaaggcccaaattatgaagaatgacatggaccatatctgttggggggtgtttgactgtttggaatgggttaatgctaacaagggaatggtaatgtttcagtaatgtgaaacattactttgtttattttgagtctttagtcttggaatgttattctcctttagtattataactacccttgaggagggtaatgttgatactttaaaaaatggtaagattgaatcattaccttctattatattaatttgaatagaatttttgaattaataaataaatttaaataccaataatattatcatttattataaataaaatattatggtatatatttagtttgtgagatcgatttttttaactgaattatttttatatgattagcaataatatatgtatattcattatatataaattttatgcggatggtgtatacataaatgacataagcaaataaaaataaataatatagtgataaaatatattgaaatattgattttaattaataaaaaatacaataaaatttaataggggctttttcatttttacacttcaaaacaattttttttgtatttttacgaaattccacatagaaactcctattgcaactaacgctgcaacctaaattgcaacaaaaaaaattgtaaagaaacccatattgcaattaacgctacaaccactctagaaacccaaaccgtaaaacttt

SEQ ID NO: 280494 - DNA, 500 bp, Cannabis indica
tccagatacttctccttcttgctgaaatcggttggcactattcccgaggctaacctcgccaaccggtcgaactgggtagtatactcagttacgctcataaaattcaatattctcgtaattactgatagccactgttcggctttcatgacgtccaaacctcccagataaatcggaggtgcctgctcgcggaacctttcatacatgggttccattctattcgccgctaccactatctcggcctgagcaacaggggcaggtgccactggaacttctggcaccggcactgcaggagcaccctgctgcctcaatctctgaatctcattatcttgctcctctattctggcttgcatttcagcaaacctaacttcccgattctgggcttcctgattggcttgggcagcctgtggcgggttaacattatcccgaccgcgagccctgcccctgggacctctacctcggcccctaacatttggggaaaactgagctccttaaccctgatt

SEQ ID NO: 280495 - DNA, 752 bp, Cannabis indica
gagatagagagagcttgataggatgaacttccttattttccaaatttctaatttttgaataaatgataaaaatgcataaatctttcctttatttcaactaacatatatcaaataaatcacatagttacataacactaagtccactaaaggacaaaagcttatggggcaaaatgactattttgcccctcccacactaaaaggattaaaaggcacttaactggtattataggaaattctaaattcccgaccaatcccgacattcccaatgtctaaataaactgccccgctatactaaaatactaaattgtgattttactgagccatacaccgcgttccatgttgtcgggcaccgaaaatacaaaattatgaaatttcactatctgacataaaaatgcattcagaattcaaatataacaacataaataattattaaatatctataaataatttttataattaaatctcaattatctgctaatttccaaatttaaagtaagcggtctttacaactatccccccttaaaaggatttcgtcctcaaaatctaacctgaacaactccggatacttgattctcatatctgattctaattcccaggtggcttcctccaccttgctgtttctctagggtaccttgaccaaagctatggtcttattctgaaggactttatcctttctatcaaggatttgtactggctgttcctcgtatgacatgtctggctgcagctcatggtcctcataactaagtatatga

SEQ ID NO: 280496 - DNA, 567 bp, Cannabis indica
tctttatcttattaaattgttttatacggactatcctatgtgacatctcggaaatcggggtgttacaatatggtatcagagcaatacggtcctaaagaatgtggttagccctaacatgtaaagttcaccgccatgagacgagctcgactcactgtactgtaagtggttattacttataattaaggtgcctttaatttctgcatgcgagagtgtaatattcttttcatgtaaaattgatgatcaaaatgatcttgatgtgttttggtttgtgtggttcaggagtttagaaatgcctcctagaaggtcagttagagtgggtcgaggtcgaggtcgaggtcgaggccaaggccaaggccgagatagaggccgagatgatggagggatcaatgaaccacctcaagcaccacagggatgggaagagcgccttgccgcactggaaggaatcattcataggcaggatgaagaacttcgtcagctgagacgtcaaccggagccgccagtccaaataaggcaggatgcagaaaatagagacccaccagctgcagtggtatatcctgctacagaggc

SEQ ID NO: 280497 - DNA, 469 bp, Cannabis indica
tagggattttatgagggctattattcccttttgactgatgtgattcttcacagagtagccgtcattagactttattggtcatagccttgtaggtgcagatcgggggttatgtcgtcagactttattgcgtgtggcagttccaacacgcctcctcccatgcggcattaaatgcgagatgactgctcagaggaaacctgacaccacccagagatgttttgatgctaccttgctctccgggagcttataaaaccttgcatgccttctctgggaggcatatccaagataatgcctttcttccaaagacttagctattaatttaagtgctaaaccctttgtgtccacgtgtccttgtctggttggtccacgtacattgggcaaaatcaggggcaacactgaccataataggaaatatttaaaattggaaatattccaaatcagaaatatttgaaaaaaggaaatatttcaaatt

SEQ ID NO: 280498 - DNA, 589 bp, Cannabis indica
atgaatttttcactaagatatgggttgattgtgaagaaatagtgttttagggtttatttgttaattaagagactttatggagtctaattaataaatattataaatggaaattttatttgataattattttaattattaaataaatagttttggcatttatagggttgaagttgcaaaagtggtatttatgaaaaataggtaaaatagttgggaaaaatgacaaaacccaaacttgagttgggcccattaagtagccggccatcaagtggtattttaccctattttatcatttttttattcctaataattcaactctaaccctattgaagatagttgttaggctatttctagcctatattctggatcacttttatgttcacttttcgatgttttaggacagaattacgcttgttttttatgttttcaggtttctcagagttatggaggccccgggatacaaaagtgcaataaaagacaagtggagccaagaaaaacgccaaattgaggctcggtgcacttttggccgcggcgagatcaccatggccggggccataactcgaaaacagagaggtcgtttttgggggctcca

SEQ ID NO: 280499 - DNA, 649 bp, Cannabis indica
gatatttattgatagttttttactataaggattccttattttttttttacgtaatattacattgtatagtgatactaagccataggattttggtaatggatatttgctgtaattttataaaaagaaaatattatatgattatattaaagtttaatatgatataaaaatatgacatataacttaatccaataccacttaaatactaattaataacacaattatttttaaatacccgaattaaaacatttctaaaattagcacctgtatggtgttttgtattggttaatgaaaattttcttttctttgaataaaaaaaaaaataataaaattatccaggaaataaaattcaatttaggaaaaaaaaattattttggaaatttttatttaaacttctctgtaccattgttttcacttttgttaagtgtataaataaatgactttcaattcacttcatttcaaatcccttaccaccaaatatttttctgtaatttcctctgtttttcttgaaagcattatcatggaggaattgggttcagccttgtccttttatcaagaggtgagtcattttcatttcttctttttctatatttgatcattaaagctgtcacttttcttatttatatcttttgttttctcttctgggtattgt

SEQ ID NO: 280500 - DNA, 543 bp, Cannabis indica
atatgcaggtctggaaagtttgactaagtttggaaattggttaggctttgaatgtttttggtttttctgagtaaaaccggctaactggttttacaatgcttgtcaaaccggttacccggattttgcagcagggaaacccgaaaatttagcttgtcatttcgcgtcagtttcaggtttctagttggttgaatccctgctagtttagggtattgccatattaagttgctatagctaggtttttggtttaaaacctaagtcccggttgtgatttagcgagtcacttatgcgtgttattatcgatgtgatttaggagtctataattcgctgagcagttgttccactcaggttgaccggcacacctgaatttaaaattgaggtaagattagtataatatcatgcatatgtaattacatatttagtgtacatgtttttatttcttgttagattacattgatagcaataatagtatacatagagctgtgctgattgctaataaatgtatgttggttaaaatattgatcgatgttgtcacatcaatatggc

SEQ ID NO: 280501 - DNA, 652 bp, Cannabis indica
gctgcctttacataaagacttagcaaataattcaagtattaagatgtttcgatccacgtgtccctgtctagttggtccacgtatattgggcaaaatcaggggcaacatttaccccccaagccttgtttatttgaaaaatataacaaggcttgttcaagtgcctccggttgactcctcggtttcctggcacgagccttgagcgcgtgaaggtgcatttaatgatcgccattaatgcagcgattcactttttgcacgcgtcgattcgtttcatgcccattgattgataaggcgcattaatggtgtcagacggatactcaaacgtttccaccgccttaattacgaaccaatccaaccgttgattcttgggaactcgaatcgtgtgcctccccagccgttcgattggtaggtgatagcgcctgttcctcatgcactttggcctataaaagccaccacctttccttcattttggttactttccatttttcgccaactctgttcgagttttccagagagaaaagaatcctcagaccaaaaaaccttcaaacactttacaactttctttgccaacctttgctcattactgtcagccttcatttctttgtttgatcaacatcaaacccccagttctaacacttcattgtaagtatctcgc

SEQ ID NO: 280502 - DNA, 683 bp, Cannabis indica
acaaaaaatttcagacacaaaaaattatatttgacccctagacaagattatcatcttccaatcctaaaaatataaataatgaacaacacctcattagttattctaggagaatgatgcatggtaatatcaaaaaaatcattggatgataataatatttctctaacaatgatagcctaagtaagaactaagaagtattgtagcgttttatttttaagagtatgaataatattaagacaattggattccacaatcaagctcttattctcctaataaaaaaaacacattaatatacatgtaaatgatttttagttttacaataataaattattaataaactcacaatttcataaaataataaagtagtaattttaattaatttttaaaaataatttataattttttttcaaactattagttgtaattattatttccaattttataaaaaataaatataattttttttaaaaataattgttagaaacttgccataaaaaggttattagattattaccttattaattttttttagttcccatcaatgggtattacccattaagaagtgttccatatatatatatagttttatttgttttatttttttctcattcctcatagtaatcattttctctcttcaaaattctactagcaatttccaccaagatttttgtcaattgctttattta

SEQ ID NO: 280503 - DNA, 579 bp, Cannabis indica
ttccaataaaagcatactaaataagactcttggtcttcataatgaaagctccataatgaagaccttttgactccactcttgtaactcccacacaaaagaacttgacacatataaagaagcttcaaaattcagtccactttgatgagtatgaccaatctttgttctccttccgtgttgaccacggtctcttcttgatttaagactttgtgtactaggctgttaagctcttccttgaatctcttagctcgtgccctagtcaccggacccactggaattggacttgatacttggtccttgatgtcctcatcactttcttctgatcctggtctacgtttgagtttgggtccgggtttgggtctagctttgggtatgattctaggtgtgggtttgagttcgggtccgacttcgtgtttggttttgtgtcaaggtctggacccctatctgggtctagtttcgggtctacgtccaagtttgggttccgagtgcgagtccaagtttgggtctttgtccgagtccaggttcgtatctggatccctatctaggtccaagtttgtgtttgggatcgggtcccagatttag

SEQ ID NO: 280504 - DNA, 536 bp, Cannabis indica
ctgcttaaaactgttacaatactcaagtatatcatttaaatgggtattgggacgttgggaaaagatttaactcagaaaggagttacattttgagttctctggaaatagttgtttaatagttgtttttatgttgtttcatggttgttttacgaacacctggaacaagtttttgaaaacattcataaacgtacataaattaattgagcatgttttcagttctcttgtccaacatttttatttcattgaacactaattaaagtgttggtaacaaccatgtgatgaaaggatttgattttcaaatgtgatcctcaaaacactataaatagaggtcttgagtttactttgggagtgaacaagtttctatcaagagagcacattgctacaaacattataggcttgataaatccagaaagcctattttctattcttttctttccctaagtgtcttgtggtagggaaataagtcttttggacaaaggtagtaaaaccttgttctaagttttgtgaattctcctattatacacttgtggtgtatg

SEQ ID NO: 280505 - DNA, 655 bp, Cannabis indica
acctctaaaaataactacaacttcaacaacatcacagcaacagaattaagtcatttctctttgaaaaccataatttttgagctaaaaatcacacaacttaagcaagatagcaagcatgcattaaaacctagataatccattcattttagacctaattaagcttctgaaaacaacatataaacacagcaacaacagccacccaaaaactagcatgcaacctaatcactttaaaaacttcaagaaacataagagaaagatgaagaaagcttactaacaattagagatcactaaatctgctcaaaatgagcttgaatcaccaagaaaaactccacttccttgctgctcaaggagggccgaaaagagagagagcttgagagaacaaattttgcttttctttctaaatttttctaactttgattttgaaatgagaaaatgagattaaatgacacctattcctatttacttcagccaacaattaaagaaaataaacacatataattcatttactaagtccactaaaggacaaaatatcattgggcaaaaagaccattttgcccctccacactaaaataacataaataacactaaaggggtatttttgggaaattctaaattcccggccattcccgacattcccaatgtctaataaaccgtc

SEQ ID NO: 280506 - DNA, 371 bp, Cannabis indica
ttggcatttaaaaggttagaattagaaaattggcgtttttgagaaaagagaaataaaaattgtgaaaactgcaaaatccaagtaaggcccattaacacctatggccggccacttggtgagctttttccaattaatattttcattattttaatgccaaataattactaacctaaacctagtagttgcctataaatagaaagtgatggctcagtcaaatcaaagattacttttttagaaaaactgagccttccacttctctctctatagccgaccctatacctctctcttttcctcttttcactttcgaaaccttagtgatagagtagtgcccacacacagcaagtggtgcctcaatcatagattggaagact

SEQ ID NO: 280507 - DNA, 407 bp, Cannabis indica
acaattaatttcacaatctatgatattttcctaattaaatattagaaaatataattagtactagaaataactatctagaatatatttcattaactaagtatttttcttattcaaatttaagttgtataaaaaaaattagttagaaataactaatttacaacttaaataggaatatttaatgaaataattaaaataagcttcagaaagaatctagttagttataattctttatttaattaaatacaagaaaaatacagatagtttatctagaaataatttcattaaactaagagtgtttttctaacaattaactttaaaatattaaaatgaaaaataaatttcatatattttaaaagttaattatgttgctaatcaattttattaggttaaactaatttaattaacct

SEQ ID NO: 280508 - DNA, 508 bp, Cannabis indica
gacattcgggctcagatcttggtgatactctgctacagacaggatacaagggttagagatctgagtggaaggagccattaatattctgttgcacccactgtaaggtttcctaaactttatatgtgtttatttacattattttagaaattcatatttaggatgttaaagaacatacatggtagtaaatctagatcctggtaaaatatattccaacaattgtctcatcaatgtcgccattgagaaacgttcttttaacattcatttgatgtaactcaagatcaaagtgagcaacaagtgtcattattattctaaaagagtcttcgatgaaactagagagaaaatctctttataatcaatgccttgtttatgagtataggcttttgctacaagacgtgccttaaacctcaccacattaccattttcatccctcttggttttaaatatccattacaaccaattggttttacaccttctggtaatgggacaacttcccaaactttattgtctt

SEQ ID NO: 280509 - DNA, 504 bp, Cannabis indica
ttatataaaataaaataaaaattgttcttcaaatatcagacaataataaaactggttttatacaaactaaaaaaaatacgataatattataaaaatggatcaaccccattacagaacagttaaaacttaaaacctgtgaaaccagttttgacgctataaaaaatcataacaaaatataaatgttaattataaagttaactgaaaccagtttcatcagacaatcaaataaaaaaatacacaaaaaaaaaaatactaatcacaaatataatcaaaacaacacaccatgcataccaatattaaaaacaaaatataagtgtaagtttcgaacctagaaacaaaataataaaaaagtaacttaaaataaaaaatttgtaataacataatgaaactattttcttttattcttttagtgaaattattagtttctttcaatgttgatgaaactgatttttttttactgatgcttttaatgaaataattagtttttaacaaaaaaaaaaagaa

SEQ ID NO: 280510 - DNA, 307 bp, Cannabis indica
aatttatttagtaattgacttggcactgggtgtagaaccgatttctaagccccttacataatggctccagcataacttaaagaattgaaaattcaactccaggggttgcttgacatagggttttctaaatatcctttacctaagatcgacgatctttttgatcaacttcagggaagactgtcttttcgaagattgatctccgatcgggctatcatcagtcgagaatctgagaggaggatatcccgaagacagctttctgcactaggtatggacattgtgaattcctggttatgtcttttggactgac

SEQ ID NO: 280511 - DNA, 571 bp, Cannabis indica
attcccaaattacaccccagaaaccccaatcaacagttcaaaacaaaataagaagaagaaaagaaaatcaaaatttccccacactttaacacagtcgagaacaaaaagtaataagaagaaagaggtgaagccaacgggcataggtttagaatctcactacgaatactacgtaaaacaaacacaaattcattaattgcttaagaaacgaaaaaacacactaattaattttcatttttagcttgcaaaaatattgtatttttccaaaaaaaaaaaaagttatttcattagaaaatttaaaaaaaaaaaattaaaagaatacgagaaaaataattagttacctgtttttttaaaattttctcatagaatagtctttttgaagaaaataaaaccatatttttccacatttttacacagtaagaacttataaaatttgtaattttctaaaacagatgaatttccacatttatagtttttttttggtaaaggtttacaaaaatataaatttgtttgaagataatattttgtaagaaattattttaaaaaaaaatatatgataaaaacaatttagagt

SEQ ID NO: 280512 - DNA, 311 bp, Cannabis indica
atgatgcaataaaagattaaacataaaactaaacatcaatattatttttactaaatagaaacacatagaaagagcatgactatgttgggttttgtgccctaaataaaactcatttcaatataattagatttactagttaataaagataagaaataacattttatgttgcagaatataatcttgattatatgtccgaaagtttaattccttgatttgtcaattcactggatttagtgtaacaccctaagctttaggcacgctacccaatatgattaagaaaccctaatcccctaaactggattactaaaaaa

SEQ ID NO: 280513 - DNA, 767 bp, Cannabis indica
acgagttaacacagatgcaaattccgtggccctttgccatttgggggattgacctgatcggacaattaaccaaaggtaaaggcggagtgtagtgtgcagtggtagcggttgattactttacgaagtggattgaagccaaaccactcgcaaccattaccgtacaaaatagtctcagataatggcaagcagtttgatagccaatccttcactaatttctgtgcgaaccatggtatcatcaaaagtttctctgcagtggcggatcctaagcaaatggtcaacttaaagcagtcaacaaaaccttgaaggatacactgaagaaaaaacttgaaggtgccaaaggaaactggccagaagagcttcctgaagttctatggtcatatcgcacaactgagaaaacggctaccggacagacagcattcgcactggcgtacgattatgaagctatgctgcccgtcgaactcgagccagcttcccacagaagattgacgtacgatcaaggtaccaatcacataatcgtaacaaaatcacttgatgagatcgaagaaaggcgagctactgcaaacttaaagttgatgaaccatcaacaaaaagtagctcgatatttcaacaaagaagtgaaggctcggaaattcttcgtgggagatatggtcctaagaagggtattcctaagcaccaaagacagtacgataggtgtacttggatctaactgggaaggaccatatcaagttgttgaagttcttaactatggagcatacaaattaggtaag

SEQ ID NO: 280514 - DNA, 799 bp, Cannabis indica
ttcgagcggtttgtgaagctgcaacctctgacttttctgggaggtattgaaattattaaggtcgatcagtggatgagcactgttacccgtatcttcgataatatgggggtgacgggaattgagagggtgaattgtgcggccttcatgtttcaagatcatgcccgcgtctagtgggacatagtgggtcagacccgagatgtcagtgtgatgacatgggaagagttcaagaaactttttgaggaaaagttttataatgttgctgtgaggacttcacatccagaagattttgtgaagttgactcagggaaagatgtctgtggccgagtatactctggagtttgatcggttgtcaaaatttgctggtgatctagtgcctaccgatttcaccagaaaatagaagtatgttcgaggactgaatgctacaataagttgggacaaattaccacatcacatgacactttgtacaagagagtggtagacttggccttaattgctgaggaggccgagcagcaagtaatgaaagagcaggctgcaaaggatgtcgtcatggcaaccctgagcacaaacggaaggctgaggcttccggagcatcagggggaaatagaaagttttagggaaacaaaggtggccgttagggtcgcaggtcctcattccgatcatatcccgagtgtcctaaatgcaagaagcatcatcctggggagtgtcgagcgaaggcatgtttccaatgtggcatggtgggccactttatcagagattgtccccaagccaagaaagagagcccaagaagaatactgctcaga

SEQ ID NO: 280515 - DNA, 808 bp, Cannabis indica
ccacactataagtcataaagggtcatttaggggtattttggtcaattctaaattctcaattatttctgacattcccaatgtctaactatattgccatgtgtggagtttggtcactaatagaggtctattttttgtttggccaagaagttagcaactaactctaactaacttacctaactgtcagttatgacagttaggatcaagactaaaggccaaaggctataaaaagccatgagttacaatcttttgggacaaggaagagagatagacttttgtgagctagtttagactgtaaaacagtgagagagttctggtgagatcagttgtaatagaagccttgcttctcgagtgtatgtgtgtcatgaacactttgtaaaacaacttgtaattctctctcaatctagcattaataaagactcaaagccattggggctgttctggccgaggagtaggcaaatgatcaatagatcacttgttcgaacctcgtaattctgttgtgtttgatctctcttctctaattctcttactgttaaaattgattgtccattatcaccatattcaagttcttgttactggttttctgcaactggttttactgttcttgttcactgttgcattgattaattttagttacttaattctggtcttaatcaagttctttgcattgtgctgtttgcgaggtgtttgatcatgcattgatcacatcaaatggtatcagagctcagtcgaaagggatcatcaaagaattgaaacaggacatcaagaacttcaagaacagaaccaagaactgatctgctatggcttctac

SEQ ID NO: 280516 - DNA, 1144 bp, Cannabis indica
cgctcctgtactactcttccttcagataaggaaaagtttgtggtatattgtgatgcctcgagacagggtctcggctgtgtgcttatgcaggctgggagggtaatagcttatgcttctcggcagttaaaggagtacgagcagaggtaccctactcacgatttagaactcgcagcagtggtatttgcgctaaagatttggcggcattacctttatggcgagaaatgtgagatatacactgatcataaaagtctgaaatatttcttcacccagaaagacttgaatatgagacagaggcgttggctagaattggtgaaggattatgattgtgagatcctttatcaccctggtaaagccaatgtggttgctgatgccctgagtagaaaaggtcagagtcagttgagttctatgaagcaaatctcccaacagctggcaaatgaaatgactcgagctcagattgagttggttgtggggcaattggctaatattaccctgcaatccactcttctagagagaattaaagaagcacaaaagcaagattcagaattgataaaaacccgagctagggtttcggctgggaaggctagtgatttctcagtagatgaaacgggaatgttgagatttggaaatcgagtttgtgtgcctatggatgagaacatcaagaaagagatcatggatgagtctcacacgactccttattcagttcatccagggtcgacaaagatgtaccaagacctgaaagccatgttttggtggccaggcatgaagaatgacatcgctgagtatgttgcaaagtgccttacatgtcagcaagtgaaagctgaacaccagcgacctgcagggttgctgcaaccactgaaaataccagaatggaaatgggaagatatagctatggacttcgtggtaggtatgcctagaaccacgggacaatttgactctgtgtgggtcatagtggacaggtttacaaagtctgctcactttttacctgttcggacgaatttctccattgatcagtatgctgagttatatgttagagaaattgttcgtctgcacggtgtcccaaagtccattgtgtcggatagagatccgaagtttacatcgagattctgggagagtctgcatcgagctatgggaactcagttaaagt

SEQ ID NO: 280517 - DNA, 524 bp, Cannabis indica
acatgttacgttagaaaaatatagtataagttctacttgttaagtagtttaagatactaaagaaaatacaaaatcgtttacataatattatttattataattgtatcatttgctcatcatataagataaatgttaggaaaaataaattagactgtgatattctcatattcttaatacattaataagaacaaatgttgggacaaaataaaaaaaataataagttcatgaaactgttttggatggtgtataatattgtgatatgtataacataattaaattttacaaaatataaaatgtataaatatatagtatttttatttaaatttataatggtatattataatataaatttataattaactaaataatcagattaatttaaggttatatatatactaaaaaatatattgtacagactcggagttgtctcgttttattaaaataagtacgggaagagccctaacagatttgaattgcctcccccctctctcttgttttatcggctgtccaccatctctcccatt

SEQ ID NO: 280518 - DNA, 651 bp, Cannabis indica
aaaatagtactttatgtcaatatgctttgagcgagaagtacttctagtgttcttagagaaagctactgctgcagaattatcacaatataatttcaacggtctcgcgataaaggctacaacatctagtgctgaaatgaaattctgcaaccatattgcttaataagtagcctcataacatgccatatactctgcctccattgtggatgaagctgtgagtgtttgcttgatacttttccacgatacagctcctccaaccatcatataaatgtagcctaaagtggacccttttatcgtccacgcatcctacataatcgtcatcactgaacccaaactatgtccagagtttcagctcgccgataggtcaacatatgatccttggtaccctgaagatactgcatgaccttcttagccgctttccaatggctaagtctgggatcactcaagtacctacccaacatgccaacaacaacaacaatatcagggcgtgtgcatacttgagcatacataaggctaccaaccagtgacgcataagaaacaactttcattttatctctctctttatcattttgtggacattggctctttgagaacttgtcacccttcactatcggtaccttcccaaaagaacatgaatgcatgttgaatcttttc

SEQ ID NO: 280519 - DNA, 718 bp, Cannabis indica
gttgtcgagcaaaattcgcaacaccaaatgtataaaatattattaatgacaagaagaaatgactgaagaacaattgcgagtattcaacctagaacggcgagtactcgaactgggaatatgaaatgcttaacagaaaactggaaacaacaataagacagaggattttagtggttcagtcagatcacggtctgcttagtccaatgtagcaagagtttcgtcgtcccatttcacggtggatcacccctttatatacaaagcaggtgtccaattagttatacaaagattgcattcactgtcaatccgtttacacattgaattacaataactaaactaaataacgtaaacatcaataaatgaatagcagttactaaattaagcaatgtatgcgcccttttaacatgggagttgactgttcatattctaatgttaagctcgcgggcctaacacttaattacgtttaggatgtttgcgttcttatctagtcgcctttgtggacatcgtatgatgagctgatagaacctagacatgcgagtctatattggcttatcaaggctgttgggtcatcgggaccaactcgcattataaagaatcgatctttatgcttacgcaggaatatggagaggatactcgcacatatcccgatatacgcgagttagatccattctcctatcccgcataatacgagttatagttatgcgatcagacttgggtcatactc

SEQ ID NO: 280520 - DNA, 737 bp, Cannabis indica
gtttcatcacaactgttggcgtggttcgtatcttttggtatcagagccaggttgaacgccacaaggaatactccttgataagttcgaatagttctctctagaactcaagaagaaaaacctctcaaaattttattccaaaatattcatatttttcaaagtgtttacaaggctttatatagccaacttacaaccaagaaaaaaggaaactaaaagaaagacaactttccaaataaaacaaagacaaaataaaggaaacaaaattagaaaaggaaagctgccaattgccttagaaaacgtgataagctcaacttgggtctaaattgagtccactttgatgagaaacacaaatttttgctctcctgcagtgttgactgtggtctcctcttgttttaaaattctgtcgactaagttgttgagttcttctttgaatctcttggcttgcgcccttgtcacctggccaactggaactttacttgtatctttagccttagtgttctcatcagaccttgacatggatctagatacgaacctagactcgaacccatacccggaccctcatttatctctattcagctaagctcgaaggaaatcatcgtttcacttctaaatacctgtagaagttataaattccatatctatgatcagcattcccattcaattgaactaccatgttcccaagatgtaagtatccaccagaaccaaaatttagcttccacgaataagtcaaagaacataaa

SEQ ID NO: 280521 - DNA, 997 bp, Cannabis indica
caggctgagtgcgccaacacacaaaaagaaggcccttgcagcaacctagagtgatagtgaagaagaaaagaactccactgccagtgaaggatcagatgaggataagcaggtactggcattcatggcccaaagctgtcacccagttgagtctgaagatgatgcagtctccacttcatcagaagctgatagcacaggtcgacaaaatgcttatgaagaaatgtttgcacaatgggagtacatgactaaacagatccgtggtctaaaaagttctctagagcaagtggagactgaaaaaaggaaagttagaagacacagtcaaaaacctcaacagacttcttgatgaaaaggagaatgagatctataaactcactgctgatctaattagaaccaagcaagctttacaattcattcccccaggcacaacaactatcaatcaaactctacagctccagaagccctatggtgatcgaacctccttaggctataagatgttgtataaacaaggtaatgacctgtctgttgagaattctcttccctcaaatgtcgattcaacaaagaaggaagatgagttacctgacatcccaaccaccattaacgaatcagactcatctgagaagagacaggttccaactggacccactaaactcaagtttgaaggaaggaggactgatgcagaaaatctgccacagaatgacaatttcattcctacatgtcatttctgcaataggagaggtcacattcgtcccaagtgctacaaattgcagaattacttgaaagcaatgatcaatcgaccaaatagtttccctcaaccaaataagtcacatggacgcaaacctcgtcgagaatggaaaataaagtccaaaccaaatcctggtttggattggttgcaaagctatccctgtctgcatttattgaagggcagtggtattttgacagtggatgctctcgttgttgggttttatgccctaaataacactcatttcaatataatcagatt

SEQ ID NO: 280522 - DNA, 1065 bp, Cannabis indica
ctatttaggtaatcctcgaacaattcctgcattagacaatctcctcagatttttaaaatgaatatgaccaagtttttcatgccataaatcagtggtgttaataacagagtgacaagtagcataggtagtgatggtgtaacagttatcattagatctgaacccttgcaagacaatttcatcaagaatattatacacataacaatgattactatcaaagctcacagtataaccctgatcacaaatttgactaatgctaagaagattagcttttagtccatcaaccaacatgacattcttcagtctaggaagcccttcgaaattgagagttcctatccctatgacttttccaacaagaccgttaccaaaagtaacttcttcacactgcattggtctaatgttctcaagatattctttttcacctgtcatgtgtctagaacacccactatcaaagtaccacatgttagtagcaatagttttaaaacaagaagaacctaccaagcatttatttttgacaacccatttttgtttttgtaaaacatgtttatttccaaggtaattagatttaaacatgttttgcatagtgatgcatttaggtcgaatgtgaccttttctcccacaaaaatggcaaatagggatgaaacgtcttccattccctttagaattgtcaaacttaccgtggtgcttcttttctgtaacagcagagtgctttgctgtagagacagaaacctgcgaggtagaaacagttcttccagaaacaaaactattagatttaacaaaagtggtattagaattaggttgattagaaacataacccagaccaacatgattggtttggccagatttttgaattttttcaaagatggtggaacctggatttagcattttcacattctttttaatgttatcaagttccttggttaaagaaataattttagactcttttaaagatagttcagattcacaacatttaagtttatcttccaactcattaatgttgttacacaagactttattatctttaaccagggagcgattttcagcacatgtttccatcaacttaccaaa

SEQ ID NO: 280523 - DNA, 975 bp, Cannabis indica
tttgtttttttttttttttttccataggaaattaattaaatggattataaagaagaaaggtactgtaacataaagacattaaagaaaagaaagaaagatccatgactaaaagaatccactatcttatattcatgaggttgtaggagaggggggttggattgattttgacatattccaaataagcccacctcttttttcttttttttttttttttaaattataattgatatttaaaaatcctgatattcacgctggaaaagggaaatatatcataacctcatatttttttggtttgaataatatgtaacattaagataaaccatttatttatcggttcctaacgtaacattaggagccaaaacattagaattgttagggacatagtacatggagacattaagaaaacaagacaaaaaggaatctatcttctgaactagatcctgaaagacatgatttatccctctatttgcttttaattattttcttaattaacacttggcaatcacaaacaattgtccaaccttaatactaaagttagtgctacatcaatattaattttggtgtctcaactccaacacaatattaaaaattatagtaaaaataatattctttattattatattatttttaataaaatataatataaaaactaatattcaaacaatctatttcacacgttattatgtgtataatagactgtttaaactatatttttggtgtataattttttaaaattatttaaaatttgcaaaaaatattttaaataactacaatacacaagcgtaaaaaaaattaatttttattttcaaataccaaaataaataaaaatatatcagtactctattttctaagataattgtatagaaaattattaaatatatataatattataaaatatgataaaagaaaaaaggttcaaaaataaatgttcaaaaatgctgcaacaggtgaagtatacactaaactagtaagcat

SEQ ID NO: 280524 - DNA, 528 bp, Cannabis indica
gacagaagaatgtgaaagagcttaggcacagctcacaaaacctcctgtcctttctaaacctctggaaggtgaggaactggggatatacctagcagtcacggagcatgccgtgagtgccgtgctgatcagagaagaggacaccgtgcaacatccagtctattacatcagtaaaagactagtcgaagctgaaggccgatacccgttgaaagaaaagcttgcctactgcctcatttagcaacaaggaaggtgaggccttactttcaagctcatcctgttcgggtgtataccgactaaccactacgacaaatactacagaagccagatgcctctagacggttactcaagtgggcggttgaattgggtcagtacgaaatcaatttccaaccccgaactgctatcaagggccaaaccttggccgactttgtggtggaatgcacaggaaaaacagaaagcatgccaaaaagcaatctcgagccaatacctcagccaagtaatatgttgggttttgtgccctaaataaaacccttt

SEQ ID NO: 280525 - DNA, 453 bp, Cannabis indica
aaaaaaaattaacattcaatgaaagaatgagaaaaaattaaagagaagtttgcataagttcttctaccctactctttgttgtttgttatttttgtattgtataagtgttctcaagtggcatataaggatgttcataagagaagaattttttttataaaattacgagcatgttattgcaaaatttatgtatttaaagcacgtatatataagttattgtgatggagtatgttttgttatttaagtaatgtataaaggaataacaatacttaaattagactgtatatgttatatgtgttgtagtttgaccaataagataaaagttaagtacatatttgttgggtccataaggtagataaggaggtcatgtaataagtggtgacaaacatgaagtccctcgtgtatttggtagttaaatttcgaggacgaaatttctttaaggagggtagaatgtaa

SEQ ID NO: 280526 - DNA, 640 bp, Cannabis indica
aaaatacttcaactttttttttcaaagtttaatgtttaatagattgctaccattttcaaacgttgatgttcaatacattgcattttttaaaaacactaacctttatttattttggtagcttttaattgcattatttagaaatggtgaaattcagagttattatgtctcatcactgtacagtactttaactatgtgtttaatgttgaatagattggtttagggtaccattgtttattcatgtgtttaatgttgaatagattggtaccattgtttttaatttttaatatgttggaggtatccatataattgttgtaaaggttgatgttctatacactgcatttttggaaaacagtttttttttatagcctttaattacattatttagaagtggtaaaattgttacaaaggaaattgtgtgacagagttattatttctcataattgtactgtacttactctttttgatccaaatttatgtccaaggccagaattaatgccttcgttgttgagtgtaggtatttttattattttggacataattggagtaaaattggtcaatttcattttgaaaataatgtacttcactatccaaaacctaatagtactggcaaaatataacaacagtaataatattcacaata

SEQ ID NO: 280527 - DNA, 491 bp, Cannabis indica
cgctggagacacgggcaaagctcaggacgatatgcccgcacagctcagtacgagcaagagaagtcatcctggccgtggaagagggaagcccaaagttccatgagcaggagaaccaaccgtaacattcggcgacgaagatgctatccagataagatttctgcacaatgacccgctggtcgtggaagtccagatagcaaacaaaagggtgtccagaaccatgatcgacaatggggcttcttcaaatattttgttcaagactgcttacgagaagatggggctccagctcaaggatttaactccatgtcttcagcccgtctatggtttctccggtcaaggagttgcgcccctaggacaaatccgcctacccctcacagttggacaagctccaacgagcataactatcatggcacagttcctggtatcggatgttccttcagcctttaacgtaatgctaggccgaccagccttgtacgacttaaaagctgtcacat

SEQ ID NO: 280528 - DNA, 590 bp, Cannabis indica
aacaataaaataatacatgcattaataaataatattcaaatgaaaagttatggctctttgtcatagcaaattatgcataataaatagataaaaagttttgcactaaaaaaaaaaatctaaatgatctcgattaccgttgatcagattagatagcatatgataactctaatgaccacttaagatcaatattttagattattaaatgattagggttaattgtaatattgagttattaattatgatttacatgtttatggagatttatttaaattcaaaatgtattaattatgctatatatgtgaatttcgcgttttctgtgcttgtgttcggtaacggtggaaagcgacgtgggccattagagagtcacgttttgtatgatttagaatgtcaatagcggggtactgttgttaggcattggagatagtcggggaattggtcaggagtggtaaatgactaaactacccttgctacaattaaagagttttcaatcataaataggaggtccaattcaaggtataatgcttagccttcttctttatggttttcgttagctcaagataggttaattgcatgattttagtgatttgagg

SEQ ID NO: 280529 - DNA, 427 bp, Cannabis indica
tcctagaatttaccaagtaaactcactaacttattaagtgtgggggagattaactgtcgtgtttatccgaattgttttccttagttgtttatttacttattttcactgtttttttagttcatgtcatttttcttgctttaattttagtaagtgtggattaaatgaattctgttgacaatgattgctcatgtttgatatgtatttttactttgatgtcttatgcatggtcttgtggaaaaataattttgttaatgatgaaattcttgattgtgtgatagttataattctaggaaaatgttagattcacatgatttgtgtgcttaactcatgattaattactgctcaagcttgattatttttttttaaaaaaaaaaaaaaactttgcacatcagttgaattttcacatttgctaatgtttggaaagata

SEQ ID NO: 280530 - DNA, 387 bp, Cannabis indica
aagtttctggctctcccccatcagtgatcattacatactcatgaggattgtatcttgaagttggtttgcaatctcttgtggatcttcttactggagtctcaactggtggtagaggtgcttcttgatcctgttcagttggctcaccatcatcatcaattgtaggaacatcataatcagtattcccaccacgatcttcttgttcatctgtttcttcattgacatgctcttcatggtcccccatgatcaccatgcactatgggtgaaagaacaaagctagtactatactcacaagaacattagtaggggacttttgcttttgaactctgtaactgtatgttagcttaagatatgtttccaagagggagtgaattggaaatttaagctaat

SEQ ID NO: 280531 - DNA, 521 bp, Cannabis indica
tggaaccgacaaaattttgtcatgtcccttttgttggtatctttcttcatggtcacggggagtctgtccagatttatcagtgaactttcctttgttcccgtttccttgcttgtggttgtcgcttgaacgcttgccacttgaattgttggaatagtggggaagttgggcggatgttctagtggaaggagccttcgctttgcccagcttttgctcaccttctgctcgttgaatggcttcttcaagcttgatgaagcgttcggctcggtcatggaaatcactcattgagtctactggcccgttcttccttatatctttccatagttcacagaggacttcaatgccccccaatatcgcggataactttccatcgtcggttacctgcgcaactttggtcacttctgtcatgaatctgctgatgtacgcccgtagtggctcgccttgtcgttgctttacttcgaccaaatctcccagatgcaatgggagctgacgtgaggaagaaattgcgcatggaattccgaaga

SEQ ID NO: 280532 - DNA, 520 bp, Cannabis indica
catgaagttcaggatcttggtaatcaccgttagccattgctcggccttcataacatctggacctcccagaaagaccggaggtgcttgcttccggaaccgttcatacaaaggttccaatctattggccgccaccactaactcggcctgagcagcaggggcaggtgccactggaactactggcacaggaactgcaggagcaccctgctgtctcaatctctgaatctcgaggtcttgctcctctatccgggcttgcatttcagcaaacctaacttcccaattctgggctccctgatcggcttggggagcctgggcagcctgtggcgggttctcatcaccccgaccacgagccctgccccggggacctctacctcggcccctagctggcgggggaaactgagctccctgaccttgattcgaccctaccgaattgccctggctcctggtagtccgcctggcgtccatctagtcggaaccgcctgcgaaaccaagagttggcatatcaggtcgtattcaaggagag

SEQ ID NO: 280533 - DNA, 503 bp, Cannabis indica
aatcactgaaatagtaaactgaattaaattagacaaaagttcttaaatctaacaatctcaatagttcggggagaatttttaacggccaaaaaagttcagggggcatgatttggtacatgttaaagtttaggggacaaaaatcctaattagcctataatttattattataatttattattatttgtatattaattaattatttttttttatttttaaaattcattagtggcgggcattagcgacggggttccgccgctaatgcctagtgtcagtttcgaatactattattggctaatgcccgtcgctaatattattattagcggcggagccttattccactgctaataaccattatcaacggctatttaatagcgacagactattagtgggggattaccgctgctaatagcctatagcggccgaaaatgggtttattagcggcggagtggtccaccgctatttaaggtaaatgttgtagtgcacttttgttttttatttttaaa

SEQ ID NO: 280534 - DNA, 412 bp, Cannabis indica
acttagctccatatgctgactttttctttattgcaggtcggtttgaagttggcttacacctactcccgggcaaaatctgctacttctaagagtgcggctctgtccgacaccttgagggcagaggcggacttggccaagaaggaagctgaggaggctagggcggagactgcagctattcgtcatgagttgggtgaggccaacaagaagctatttgccaccgagaagaagatctctatgctaacaaaggacctcgaagctactgatcactttgaggaaaccatcgagaccttatctactgaagttgaccgtcttcaggatgagaggagttctctgcggcaagttcttcttcggctaaaggaggagaaggacgcccagatgaccgaggcggaccgtttgaaggagaaggtcaatg

SEQ ID NO: 280535 - DNA, 495 bp, Cannabis indica
tctgaatccacttttcatacatgattttgtatgattcagctagagactcttcacagatttcagaatcatcagaatttgattcttcttgtttagtggtattattcaaacatactaatctagctttcacctgtgaatcacacaatacattagttaaaatagaagttacggaaacattctcagaattttcttcatcactttcggtttcatcatcactccaagtgacattgaaactttttttattctttttcaaggtgtttgcacactcggattgaatatgcccaaaaccttcacattccctgcactaaattccctttttgttagtaacagaaggtttaaaagaagcatttccttttgagaattttgaattattctttttattacccatctttttcatatatttctgaaaattcttagttaataaagcaatctcatcatcacattcactatcagaattttcattatcagcaactttcaaagcaatacttttacctttat

SEQ ID NO: 280536 - DNA, 698 bp, Cannabis indica
agcagcagcagcaccagcctttggccgtttttgaaacacaccatcaaagtattcagagggttggaatgtaggtccactgataggaggctcaagtgtttcatgtgattgggccacattcttctgagaagataaaaccttatagattagatttggaaacacaagtttaaaggttggctttttacctcttcggaaggagacaatctggttcagaatgtgtgaggccaaatcaattgaagttccagaagtgatgcggtataagagtgaagccacatcttgagacactacggtcttgtttgaattaggaacccaattgcttaaagcaaaccgcataagagatgcatgagcaaaagtgaggtgagtgattcgaagactctcccctggtttcaattctgaacgagcacccgtgagttcagagagcatcaactcacgatccatggacatcactgcattggagacattctcgggcaattgcaaagcttgagcaatatccttttcagaaaaagagaaccaatgacccctaacataaactcttcgatatagtctagaattctcatcaaggaaatcatcagtgagattagcataaaaatccttaacaatgtttgcaatgtatccaatgaaaccagtgagagtgttttcccattgatgaaattgaataaactttacaataccataaacacgatgagcatgcaaatcatagt

SEQ ID NO: 280537 - DNA, 982 bp, Cannabis indica
tagctagggtgttacactgcatgtggatgggtcagccacagatcagctatccggcgcaggaattgcccttgtcacacctggggggcaacacctgcatgcagtggtcaaatttggatttaaagcctccaacaacgaggccgaatacgaagccctaatcgctggactcaaactagcgaaggagatgaaagccgagcacatcgagatctgaagtgactcacagctagtggtaaatcatgtatctggcgaatacgaggcttggggagaaaaaatgatagcatatctgagaaaaatacatgatctgctcgcccaattcaaaagctacagcctcaggcaaattgcgagagaagaaaatacaacagcatatgcgctagcccgattggcgagcagcaatataagtgacaaggcgaacctggtcccgatacagtttcttggagaacccaacataactggcacggaagaaatcgaaatggccgacacgtctccgaacaggatgacgctaatagtagcctttctcaactatggggaactcccagataaccgaaatgaagctcagaaaatgaggagaaggcagcacggtacatcatcgtagacgggatcatgtatagaagaggattctcaatgccattactcagatgcataacacaaaatgaagctgcacgacttctatatgaagttcacaacggattctgtggaaatcatgcagccggacagagcttatcaaagaaaatcctaaggcaaggctacttctggctgatgatgattgaagattcaaaagcttatgtcgagaagcgcgacaaatgccagagattttcaaagataccaagagctccgcccaacgagctgacacaaatgcaaagtctgtggccctttgccatctggggaattgacctaaccggacagttacctaaaggtaaaggcggagtgcagtacgcagtggtagcagtcgactactttactaagtggactgaagccgaaccactcg

SEQ ID NO: 280538 - DNA, 514 bp, Cannabis indica
ttaatttctaagtttagtgaaattgatttttgagaaaatagaatgtgttttcagcctttgtttcccctctcaaccgaccctctctccctctcttaccctcttgatttattttcaacttaatttgtgagaatttagcttgaattgaagcttgattgttggaaaagggtgttgggagcttgagccttgattgtgcaagagattgaggtagttttatagtttttaatttgtgatttctttgctgaaatattatgattgaaaagcatgaacttgatgatgatgatgataggttgcatgttaagtggattggtgttaattttgttgaaattgagtttgtgttgttgtatgctttattgttgagtttgtgcagagattttatgatatttctaggttggaatttcatgttaaagtggtgttatgctgctggattttaataggtttgtgttgggtttgagttcatgttcttgaacttggaatcttgataagtttaagcttgattttgagatgattaagcaat

SEQ ID NO: 280539 - DNA, 680 bp, Cannabis indica
tttttttgattaatcgcatgccatcttctattcttcatggtgaaatcccttacaaaattctttttctcaataagccattatttcttattgagccaagaatttttggttgcacttgctttgttcgtgatgttcatccacatgtgactaaattagatcacaagtcattgaaatgtatatttcttggttattctcttcttcagaaagggtataggtgttattgtcccgatcctaacaaatatcttgtttctatcgatgttacttttgtagaaagtataccttatttttcgtcttcacccgctcctccttgtcagggggaggatgatgatttgttagtatattttgtcacatcctctacacctgatcaatgttctgacgagtctcttgttccttcacctacctcggtcataactcccacaatgcctacacctccaccaccaccaccacctctaccacctccaccacttcccaagccttctacagtgtacaccaggcgtgcacctcctccacctcccgtttcataacctgcacctgcatcttcgtcatcagatccggaaatcaaagatgatcttcctattgcactacgtaaaggtaaatgccaatgtacttttcctatttcttcttttgtttcttctaatcatctctcctcttctttttgctcttttattgtttctcttgattct

SEQ ID NO: 280540 - DNA, 394 bp, Cannabis indica
catttttatgtcatttagtagttttcataattttgcatttccggtgcccggtatcatggaactcggtgtttggctcagtaaaatcacaacttactgtgttagtagttttgggaggtttattagacattgggaatgtcgggaatggccgggaatttagaatttcccaaaaatacccctttagtgttatttatgttattttagtgtggaggggcaaaatggtctttttgccccaatgatattttgtcctttagtggactttatttagttgaattatatgtttatttctttaagtgttggctgaaataaagggtatgactttgcatgtttttttcatttattcaaaaaattcaaaagttagaaaaatagaattttccaaagctctctctctctctct

SEQ ID NO: 280541 - DNA, 166 bp, Cannabis indica
aagggtgtaacagtaaattaatccctatgcaatgtagatcatctatagaggatcattgattattgagattataacaatggataattaatagtgtatctatatcgtggaacatatagagcgttctatgtaactgagagtgcaattccaagttctatggtggatgcaa

SEQ ID NO: 280542 - DNA, 1702 bp, Cannabis indica
catccgatactggtaaactttgacaacgcccaggaaaagacataacacttatccaaggtgtaagtatacctatcgttgattatcatgccagtctaaattcagtaaactgacaaatcaggaaattaaacttttgaacaaataatcatgattatatttcactgtgctgacaacactataatcatgaacaaatacatatgttctggacttaacagaattcatacattaaatgtaaacatgaaataaatcatgtgaaccatgcaacataaaatgatttctaatctttattaattagtaaatctgattatattgaaataggttttatttagggcacaaaacccaacattatcttggtagaaataggccccaaaaccatcaagtcctggagccttactcctaggaatggaaaatatggattccttgacatcttccttattgtattctcgcaagagaaaatctgcatcttcagctcttaaaatcggcccaaatgaacattccccctaaaaccctcttcctattctgcattttagtactaagcaaatgttggtagaattgtaaaaaagcataaaaaatttctattgaattgtacacccaattgcctttcatgtcctgaatcgagtagatatgattttgtaccctcctttgccttatgcttgcatggaaaatttctgaattttcctctctctccttaacccaatgtagctttgctttttgatgtaggaaggatagatatattgctcattgtatttctttttggcagctctttctttgtcaataaggaccttatccataggatctacttggatgttgctataaccatgtagagttagttggcgtaaaactcatttcagactctcgatcttctggaccaccctatatatagctgttcctaagtgaaaattattccatttctcttttaaaacctcatcaaacttctctagtttttaccacattctaaaaaatcaaaatgctttcttcccctcggtcaattcaagatacactataataaatgttggagtgtgatcaaacaagctttcattcataaaaataacttcagtcgaagtgtacttatctagccaaaattagtttgccaaaacacaatcaatttttgaataaacatgctccccttgctcttgtttattattccaagtgaaaaagaagcttgtgtattttacatcttccaactttcatcattcaacacaatcacgaaaagctgttgatgatcatcacttgcgcctttttcctaactctcttttctgtcttaagaatatcattaaaatctaaaattaatcacgggatattaatgttggctgccaattgctttagatctgcccataaaggttctctctcattagcattataaaaaggatagacaaaggtgataagaaatacctccttagtcgcaatcgtggttgcttccaaaatgcatacgttgattagtgaaaaattgaatattaatagaaaatatatttgaatttcaactaatcaaaatatgtccattgtcacaccgtacattattagaagaaaagaaccaccctaaaaatattcgaacatatgaggcccccaagttatgaggtcttatcctcatttccaagagaccaaaaagccccactttcatattatcaactaatttcttgacttccatttgtttctgagacttattgagccctcagacattccatgccattattctatccattaccaa

SEQ ID NO: 280543 - DNA, 579 bp, Cannabis indica
agacatatgataggtgacaaggattttttgattaacattcggcctatgcagtgtggggaagtcagctttggcaatggcttagctggaaaatttgttggtatgagaactctcaattttgaagggttaacgagattgaaaaatgtgatgttagttgaagggcaaagggctaatttacttaacattagtcaaatttgtgaccaagggtattctgtctcatttgacagtgatgattgttatgtacttattgatgataatcaatgtattttgcaaggatttcgatccaatgataattgttataccctaactcctgttttcacttgtcattcagccatcaatagcaccacggatttgtggcatgccaaacttggacatattaattataaaaatctgaaaaaattgtcaaatgtaggtattgttcgaggtctacccaagcttggtaaggaatgtgttggtaagtgtgaaacatgtcaacttggtaaataattaaaaatcactcacaaacgtgtgtctgatatcaatgcttcaaaagtattggaattgctttacatggatcttatgggtccaattcaagttgaaagt

SEQ ID NO: 280544 - DNA, 528 bp, Cannabis indica
gctccctagatttctgctgttgggaactaggcgaagacgtcgctggctccttgccaagtccagcggtcattgccttggggtgcacgtgaatgccagctgcctccatggctttttgcatggccagcatcacttcttgcattttctggttttgcgctttctgagcttcgatctcggcttcgtgatcgatagctttttgtctgagaagcaccagttccgagtaactaccttcgtcgtaggcatactcatcgaggtttccctcgtagtcatcatcggggattccttcctcttcctcggacccctcagctgctcttgaggctacatcttcctcattcgggtcttgagcatcttcaagagggcgaggctgacgagtacttctagtctccaccatgtttgtgaagtcaagtgttcgtttacagtggctttcttcagctctcaatgaaagcaccaaaatgttgaccgaggttttcggcaactaataaaatattataaaattactgagctgtaagaaagtgagagaaggatttttac

SEQ ID NO: 280545 - DNA, 568 bp, Cannabis indica
atattttattttcttccattgtaataaaatctctaacaatcaaaagcttatcccttttcaatggaagaggagataaatcaagattgtgagaatacaaggataagagattttatgtgaaaaccattcatgggtgagcatggtggtgtatattatgtgatttactattttatatgatagtaatatatataatatatatatgagttatatatatgtgacatatatgtgattatgagtttatatcatataatatatagtgatatataatatgatatttgaatttattacatgtttgtatgtgtatatatatgagatatataatatataacatgtatatgagttatgtgtattacatatatgatgagatatgacataatatatatattgtgagattaaatatgtagaaatacttattttctatgtatttatatgagacatgtatataatatatattatgtgtatataatatatatcatgcatgtatattaagtgtatatatatgttatatatgtgtgaggtatgtaacatatatagttgtgtaattaatatatatattatgtgtatgttacat

SEQ ID NO: 280546 - DNA, 789 bp, Cannabis indica
gattagatgtgttacaaatttctctcctcttatggacaactttaagcaaccaattatatattttagcattgcatttgggagacaaaccttttaggtagttgggacaaggaatattggaactttaacttttttgccctgtaaataatgaaataccattcagccttgagcccgaatttttaatcaaaattacattgaaagacactcatcaatatggaaactagttttagaaagaaagtgctaacagcagtaataacatttaaaattgactctcattcctatggcacattatcttgcaatcataaactgtacccaagctagatcgataacaaaaaacatacttttcaagcacacatagttgatgatgaaacaaatctaaacaataataagataacaaatagagtcagaacccagatgaagtacaatattgacaatacaagagagaatattattaagatagattgaaatacaagaagtataataaagtgtaatcattttaaattaatattataagtataataaaattttaattatgaaattatatgtgtataattttaaattattaagagttttgttataaaaattaaaataatttaagtgtaaaaaaaataaattgctaaaagatccttatttaataataaattgcaaaaaattaattaataattatacttaatttaattttaaaatataattaatcttaattaaagtttaaaaggaaataaattaacaggttaatatgaggttataagtcatttttttttatttaatttctaaattaatcacaaccattta

SEQ ID NO: 280547 - DNA, 793 bp, Cannabis indica
aattttacaaaacccaaactctcttcttgctcgactgttgaaagtaagatatttttggaatcatgatctattgatagcttcttctggtggtgtgtcttctttaacctggcaaggcctttgttgggtcgtgacttacttgtaaaggcttgcgaatgacagtgggtaatggtacacaaatcaggtgtggattagacccttggacacctgcaaacaccatttttacaccaacatattattttggtttttatagtcacatggtatctgactatatcacaccagattgtgaatggaatgtagacaaattaagaagtgacttttttgcaatagatgttgatcatatcctcaatattcctctttctcaaagtgttacaaatgattgttggatatggccttttaatgccttgggagaatattcagttcaaataggatatcatttagcatgttcattggaagaataagacctctcttcgagctcactatcatcatcaacatggtagaaatctttttagaaatcaaaattaccatcaaaagtgaaaatcttttctttgaaggtcattcatgatgggattttatgccctaaataaaacttaattcattataatctgatttgttatcaatagaagattagaagataatatcccatgattcatcagtgcactggacttacactgatgtgatagtcagcgataaagcttacttacaccttggataagtgttatgttctttctaggacattggcaaagtatgctagtatcagatatatggagtatacattggactgagaccgatattg

SEQ ID NO: 280548 - DNA, 489 bp, Cannabis indica
aacataaaaatgaggaaatctagggttcctgaaatttccccaacccgtagaccggttgtccaaccggaattccggttctgggaattttcaaaacccatccggaattccggatgcacaactggaattctggttcctcgcaggcagaaattcaaaatttcataactcaaccaaatcacacccaaacaacctcaaaccttccagacctgttctataggacccaaataacatatctaaagcaataacacaacccataatgcacagatacaaaaagtgccattaaagcccaagctttgagttccaaaactcaaacttggttaaagctctccaacaagcaacaaaccatgattcaaactcatattcaagcatataaaaactgcagaaactaaaacctaactcatgcaacaactacagcaacaattcacacaatttcactttgaaaacccaagctttttaacaagaaaattaaccaactagagcaagaacaactag

SEQ ID NO: 280549 - DNA, 870 bp, Cannabis indica
gttttccgaattcaagtgtgctggccgacctgaacggaattcacgtgctagatggatgccctaatcacaataattgtaacacagatgagtgactcgctaaatcactttccgggacttaaacttgaaactaaaagtttccctatcgataaacctcatggcaataccctaaatatctcaaaattggccaaaactagggttctggaaattcccccaacaggcagaccggttcccaaccggcaatccggttctgggtcaccaaccggtcgaccggttggtactggcctcccagaaccggaattccggttctgctgctgggaaccaaaaatcatcccccttaattcaattcaatcccaaaccttaccaaactctccagtatacctatacaatgcataaacatccatttccaaccaataaatcacagaacaaaccaataaatcaaattatgccattaaagctcaaagcttgagtttcaaaactcaagcttgcttagaaccattatcaagcatcaaaaccagcagctaggaacttaaatcaactcaatattgagcataacaactaaacccaaatcatttctaaacctaacagccactaacctaacaaatcacctcttgaaactaagcaaaacttgagaaaaaacataactagagagcaactaaagttaccttggttaaatcctccttgattccttgctaaatcccagaaaacaagatgaaaattctggtttggtccttggtttgtcccagccgaaagcaagagagagagagttcaagagataatccaattttccaatttttcttctttatctcttaattctcaaaagaaaagggtttctaattaaatcttgctgaaaagtaatgtgctaggtgtcac

SEQ ID NO: 280550 - DNA, 774 bp, Cannabis indica
actggctggccaggggtgtactactaagaggctagctggctagaggttgtccaagtgggggcattgtagagcttgagatccctggccggccccccagaccattggttgtcgggatttggttgttctcaccacctaacctttgtgctaaggcttgtcctccttcgaataggggaaggccttgtttgtcatggttcttaaagaacctcgttggacagtttgtcggtaaaccctccttgaacagtcaactagtctcccttagagaggatctttgatgagatcttagcctctcccagtagttctttcattgaaccaccttatcaggtcgctagtttctctattgcgagggtcaagctccgcttggtgagatcagaggatgtactcttggtcatacatccatctcagaaatttgcgtctctgttgtgcaaatacatcgcaaccaattacgcgtgtttctttagtttggctgacttgggagcgaccactctaagtctagctaactcaagatctactctcaagtctacatggggctcaccaattcttggtcccatctctacagcacaataccagggacgaggtccagttgtgattcctgggggctgctccacgtggatttttctttcagtgggaggtgccagtggagggtctctctaggagggcaaattgttcaaatccaccggaatggttttgctaacctagccagctgtggtggccaaattcgtcgtgcctgctgagatggcaggagtggccacatctgtggtatttgtggagattcca

SEQ ID NO: 280551 - DNA, 570 bp, Cannabis indica
cccatgagcttgtcgatgtgagctctaatgtcacccgtatcagcatagttagtgcgatggaacaaagttaagcactcatttttctcattctgagaacttcttatacttttccttaatggcagcaagaaaatcttttgcattttcagtttgaggaatactatcacgaatggactcatccatgtgatacctcataagcatcaaacaacaacgattggaatgctcccaatcctcataggacttcttgtccttttcagtggcatcatcagcgggtttaggcggtgcatccattctcaaggccaagtccactctcataagagtcaaatttagcatgagggattcaacccactgcttgtggttggttccatttagcgtcaacatggcagagtttcttggaacgcttaaagctgaatgagaaacaagagcaataaccattaaatgcatgttataacaaaatcatgtcatttgtgctcttttctcataaataaatgatcgcaaaataacaaatgatcatcatgtatgctagagttctttagacaaaacaataaaatagaactcatacacatgtaagaa

SEQ ID NO: 280552 - DNA, 421 bp, Cannabis indica
catacaaaaaaaatctaataaaaatataataaatatttattatatttttcaataatttttattatataaataattttttaatatatataaatgtaattggattggatcgtttttaattggattttgagattgacatccaataaccgattcaatccaattagaatccaacttttagcatccaatccaatccaattgtaattggatatccaactttttgtaattggattggattagatcggttcagttcaatgagattggattggatgatgcccccctacttatgatgaccatgttggcaggtttgttttgttaaaaaaaaaaagacacaaaattatttcacaaaatacaaaaaaaaaaaaaaaatcaagaaaaaaaaacaaaaataacgatatatagaatttaaatatttttaagatttttt

SEQ ID NO: 280553 - DNA, 519 bp, Cannabis indica
aaaaactaaaatagaaaattagaatccagaaaataaaaaatttaaatctctccccccaaactaaatatgacattgtccccaatgtatacaataaaatgcagagagaagagacttacctgagaccctctcagaaagggtttggtggacccttttcatccaaaagagccctcgtactaaatgaagaaaattgaccaccaatagtgttgattttagagttttgcacaagagtaagctcaccttcagaactaccacacatcaatcttttccaacgccgtcgaatcgttcgaagtcgctctttaggctttgctttcttctgatcaactttaataaaagaacccttcaccatctcaatcttgcaacaggtaggaaggtcggttggggcaaaaacattaaaactgacctcctcatctaccactcgcaactttaactcccccttttgaacatctattaatgctcggcccatagctaagaatggtcttcccaaaataatgggaatagttgaatcttcctccatatcaa

SEQ ID NO: 280554 - DNA, 792 bp, Cannabis indica
caaatcaaccccaaattgattcaaactttccagacctattccatacatcccaaataacatttctaaagcatcaaacctacccagaatccacagaaatgaaaaacaccatgtgagctccaagctttgagttaaaactcaaacttggctaaagctcactcacaagcctcaaagctagcttagaatcacataatcaagcatagaaacactgcagaaaacaaaacctaattcatgcaataactacagccaccaaattctcaatttttactttgaaaaccttagcttcttaacaagaaaattaaccaactcaagcaagaacaactagcatgcatttcaacctaactaaacataattaattcaacattttagacatagaaacaacaacaataacaagcagcagcaacatcatcaaaatcctccatgcattactcatcttttacatcaaaatttaaagaaaacaaagaaagaaagctagacaagaattacctcaattaagaacactctaacttgctgaaaatcacttgaaaatgaagaggagaaaccactcttcttgctgcctcaaatggccgaaaaagagagaggaaaatagagagagttttttgagaaattctatttttttctaagtgtaattttttaatgaaaatgaaataccatcacataacatatattaaatccatttcagccaaataacaattaaataaatatttaattttcaaataataaactcacataagacaaaacactaatggggcaaaaagaccattttgcccctccaccataaaaccacataaatca

SEQ ID NO: 280555 - DNA, 544 bp, Cannabis indica
gatcagaccttgttgaattttctcacgaacaaaatgacaatcaatctcaatgtgcttagttcgctcgtggaatacgggatttgaggcaatatgaagagcagcttgattatcacaccataattttgctggaatagaagtcttaaacccgaattcagtcaaaagctgataaatccatattacctcacacacagactgggccatagctctatattctgattcagcactggatctagatacaacattttgtttcttactcttccaagagaccagattgcccccaacaaatacacaatatcctgaagtggatcgtctatctaccttggagcctgcccaatctgcatcagaaaaacactcaatctgggtatgtccatgatccttgtaaactatacctcgtcctggtgctcctttcaagtaacataaaatttgctctaatgctgcccaatgatgaattgttggagaagacatgaactgactaataacactaaccgggaatgcaatatctggacgagtcacagttaaataattcaactttccaactaacctg

SEQ ID NO: 280556 - DNA, 565 bp, Cannabis indica
tttatagtccgtgaactcgtggagcagttcgcggactatcgctatgtacccggccattctttctttgcgcatctgatattctcccgacacctggttcactaccagttgggagtcgctgtagacttctactcttttagccccacggtttttgctaatctcagccccgctatcagggcttcgtattcggcctcattgtttgaagctggaaagtcgaaccgtagagctgcttggagtcgaagtccgcttggagatatcattacaacccccgctccggatccattctcgttggaggctccgtccacaaatactttccacgctgggaccgatggtgtcggtatgttcgcggttgcttcggcttcattacattcagtgatgaagtctgctagcgcttgtccctttatggaaatacggggaacgtagtgtaagtcaaattgacttaactccattgcccatttgaggagccttccggatgcctctggcttttgcaggacctgccggagtgggtggttggtcaacaccttgatcgggtgagcttggaaaaaagggtctcaactttctcgaggcc

SEQ ID NO: 280557 - DNA, 450 bp, Cannabis indica
caaaaatatatttggcactcaatgctccagaacagtccagagaaatatgtagattaagttttcaatttttcaaacaatttacaaatcataaaaatttagaatatgtctaatatacacatataaaaatcaagtccaataatcaagttgagtccctactctcccaagtcgttaaactttgtccaaaagatgatcttaagctctcaagtcccgagctccaattatttagtccaatcttagatattactctaatctataccatcaaatggccaaataattatcatcattgcattctacattcgaaatcgagtctaacgacataaaatatgcctacacttaaaatttggagttccaaaacctcacctaagcggtgcacattaattatcggtggcggtaaaaattagtgtatcggaaacgttgctgaaaataggggtagtttgttgggttttatgc

SEQ ID NO: 280558 - DNA, 909 bp, Cannabis indica
aaaagcatacatgcattagattaaaaacagtcagacctcgcggtcattacaaaatatagtttcgggcatagaggatagaggcacagagccgaacctctgatgggaaaacgcccacttggccacattatgagccataaaattacatcgtctactaacagattcaaacatacaaccaataaagaaaggggaggtgattttacaaaaagagacgtagttatcaagctcccaccgggactccttcccattaagagcattgatcaccaccctcgaatcactctccacaataagaaacttgacaccacgaacttttgcttcctgaagggccagacagcacgccattgcttccccacagagagcattagaaaattccagcttagaagtaaccacccagatcaccttgccaacgtgatcccttgcaaccacagccgcacacatgctgtccaaccccactctgatgtcgcaattcagcttcaaccaatcctgcgggggagggcgccaaacttccgtcggacacggtatggggcaagggagcaagtgagcacgatgatctgcaaaagaaaactgaatagtgtcaatacatttaacaatatctgctggacaattattatgtaccttatcattccgagtccgccatattgtgtcaacgatcagcgatgcatagagaaaagcttcctgttcacttatgccttttttgcttaggtcccataagaattttacccagtcccacattcgtataccagtgtcacaaatagggtagaagccccatggagaggatcgccaaaggtggaaggcaaaattacaagataggaaaagatgctccatagtttctgctgccgtaccacacaggggacagctctcatcctcaataggaaacctcctacctataaccgagcgaatcggaagagcttt

SEQ ID NO: 280559 - DNA, 571 bp, Cannabis indica
gaaagaacatagcacttatccaaggtgcatgtaaactatgttgtagattatcatatattaaatcacataatcttgattacttttcactgtggtgacgacacaataaacaagacataaatatgataagggtttggatgaatttataattcaaataaataagtaaatgataacacgaaccaaatgacacacaataagtgatgaaaatacttctatttctttattgatatttaaaagataaagattacattgaaatagagttttatttagggtataaaacccaatagcctcttcttcacaaaccaaaattgagcaattagtgattgactacatgcccacacataacaagttggtcctcaatcatagtgtgtaagactgtgaagaatccaattcaagagaaggtgaatcgggctcagatcttggtgatactctgccatagaaaggatacaaggtttagagttctgagtgggaggagtcatttaattccgctgcaaccactgtaagatttctcatacgttttatgtgttaaattacatcgttttagaaattcatattaggatgttaaaaaacatac

SEQ ID NO: 280560 - DNA, 718 bp, Cannabis indica
gccaggcattctcaattcggtattaccagcagagtatagtatggctgataaccaagtgggatcatggcatgagaaaatttggataaatgaacctacagtctttcagggagattcagatatggagaatgctctctggactggaagctctaaagaatgtattttaggacctcaagaggtaatgccacgaaatcgggataccgcttgccatatttctagttatggcagaagtggtaggggctccatggttgagcagaagagtaaacctacgtcatcaatggtgggtttaaaacggaacaagcggttccggggaaatcgaggcaagggtgtacgcaaggattattcttaccctgagtgcccgcgatgtaagaaacatcatcccggagagtgcaaccgaaaagcatgcttcctgtgcggcatggttgggcactttaagagaaattgccctcaggcaaagaaagataagcagaagctggaagtaaagcctgtacttgctcagacatttgttatcactcaggctgatgttgcatccagtccttctatggtgaaaggttagcttcttatcagcaactcccattttaatgtattatttgactttgggactatatactcgtatgtagtatcgagagtatttaatcttttggatagactttatgattttcttgtaagagggtttggaaccttaatgcctagcggggaattggttatctctaataggcgc

SEQ ID NO: 280561 - DNA, 525 bp, Cannabis indica
aactgttttcacagcttgaacaggcttcttgctattattccacttcttcttgttctttagtttggaagtagaggcaaagttttcctcagccctagccgccccattagcattcccagaattatgagctttagatcctcctttctgtggtcctccaatcaaattttcaaatgtctgaaggtcgtttaccaactcatgaaagtcttgttccttcttgttcatgacataatttgaagtataaggtagaaaggctggagtcaaactgttcaagatcagactcacttgagttgtctgatccataacagctccatgattctgagcttcctagaagtaacttgccatttggagaaggtgatcacgcacgttctgatgaggtttcatccgtgcattgatgaaattccttgtcgcttcaaagcgagattaaattgatgccatcccgaataattcagtgaacttgttcaagatatctgcagtcgtgagattgttagcaaaccttgttttcaaggtgtcaaccatgctagaaagcat

SEQ ID NO: 280562 - DNA, 888 bp, Cannabis indica
ttagagacaaagagcatttaaagatggttgttggcctgtatgcaatgaagaaagggtttgactactacgttaggaagtccggtactgatatttggtacgtcacatgtaaggatacagattgtgggtggagattaagagcgaagaagaacgtactttctaacatgtttgaggtgagtacatttcataatgtacatacatgttcccttgatcttcgaggaaaagataaccgtcaagcatcacctgtaatagttgcccatctaattaaggataagttcgcaactgacggctcggatcagttgccctctgatataagaaaaagtatgcacaaggattacgggatccaaatgagttacgaaaaggcatggaggtgcagagagaaggcaatacacctggctcggggtacacctgaagattcgtactctttattacctagttacttgcacatgctacagttgcggaatccaggtaccatcacggattttgtggtagaagatggtcgcttcaagtattgtttcttctctctgggtccttctattcgggggtttaagttttgtcgacctgttatatgcgttgatgggtctttcttgaagactaggtatggtgggcaaatgttgtgtgcagtggctttggatgcagggagtcatatctttccgatagcttttgctatagttgacagtgaaaaccacaattcctggacctattttatgagaaaattgaaagaaacgattggtgatgttgagaacttagcttttgtttcggataggcatcaaagcattgttcgtgctttggatatcgtgttccctgatgcacaccacggtgcatgctaccaccacattattatgaacgtcaaccacaagttcaagactgacgtcttcacgaatcacattt

SEQ ID NO: 280563 - DNA, 751 bp, Cannabis indica
cagattagagcccaaaccaaacacatacacacagccctaattcaagcctaaaaccataaaatctacttcaaagactaagaaaaactcaaatagaaacgctagggagatttaccttgactcaaaggagtagaaaccttgctaaaattcacaagttacagcaaagaacacccacctccttgcagggtttgggggattcgaaagaaagagagggagagatgaagaagtctcaacttttctaggtttttcctcttatttatttttttcttattaattgtgttttatcaaagaagaaatacaccagcccccaaatccactacaagacaaagaacattagggtaaaaagacctatttaacctttgaccaaactaaaacaaataaaaacttccaagggtaaattggtcaaataacaaaccccgaaaattctaacgtctctaaaatttagcttataacaccccactgaaattctagaaacacaaaatatgactctctaaaggcccagcgccgctttccaccgcttccgaagacaaacacagaaattgggtaatcttacattaaatagcataacaacataaataatattaaatatatttcgaaaatgtacatttcataattattaattaatctcatacataaatcttaattatttaatatttcaaggcattaaccatatgcggcctttacaattatccccccgttaaaaagatttcgtccccgaaatctacttaaacaactcaggatgctgagtcctcaa

SEQ ID NO: 280564 - DNA, 556 bp, Cannabis indica
atatggaggaagattcaactattcccattattttgggaagaccattcttagccacgggccgagcattaatagatgttcaaaagggggagttaaagttgcgagtgcaagatgaagaggtcagttttaatgtttttgccccaaccgacattcctacctgttgcaagattgagatggtgaagggttcttttgttaaagctgataagaagaaagcaaagcctaaagagcgacttcgaacgattcagcgtcgttggaaaagattgatgtgtggtagttctgaaggtgagcttactcttgtgcaaaactctgaaatcaacactattggtggtaaattttcttcatttagtacgagggctcttttggatgaaaagggtccaccaaactccttctaatggggctcaggtaagtttctctcaacacagttttattttcacacattggggacaatgtgcatctttagtttggggggagagacttaattttttttctttcagtttatttcagtttttttttcgtttagttagttttttttttagtgtcgtgtgttgatatctgagct

SEQ ID NO: 280565 - DNA, 634 bp, Cannabis indica
agttggtatggcgcaaggccgacaaaaactaaaaaattaacaaagtagtcttgaagaggaagcatggccccagccatcaggtgcgtctggctccaagccccgaagccgccatagttatggttgggcgtctccgcatctcggggcggccggtgatacgtcccggatgttgagggtttgattccagccacctccacgatgttctccagctggtgggggcaggttagggtggagtgaagctctgccgcctcccatccggtggcccgagacttatacccctcctgggcaacgggacccagtgagacatcttcaagggtagccagacgcttaccactcttcttggacgactttgaaccagatgcagacatgttttgattctgaaaaaagagttaagattccagcagttaggccccataccaaaccctaaaccaagaaaaagggaatgggggtcccctaaccgctggaaagaggccccctccggacatctgtcaaacagaaaaccctagaaggatttcctggacaaaagtcgggtgcaaaaaactcacagaagacaacattgcgcataaaagaaaaagaaagggcagaaaatcgagaaaaagcagtctcctctatgccctagacgaccagtatacgaaga

SEQ ID NO: 280566 - DNA, 1215 bp, Cannabis indica
tatacaagacattcgttaagacaatttggtcggaaattttaacagttcccgttttgttgatatgaatctgatgaccattaggtaaagtgaccaagttagcaacattagttttatttaaagatgtaaaacaatgaagagagtgacaaatatgatgagtagcaccactatctacaatccataaaaaaaggggaaaagagttgttattaccgaagacgtttgagaccacaggaaggttttcactggtggaaggggcgccttggatttgttgattgagaagagagatcagctgttgactgagctggatttgtgaagagccagccgcggaggggtctggagtgggagtcaccgtggcttgattggcccgagcagtggtggtggtctttttcttgtctccatatccgggaggaaaaccgtgtaggaaataacatttgtcaacaaggtgacccggtttgagacagttggagcaagttggtcggggtttcttgtttcgagatggttggttggggttgggtttggccgaagtagcagcaacaacgccagtattgccaaggcagcgttgtcgttcttgttgaacgaccatggagaacaccttggatagagaaggcagtggctcgtaaagtaaaatctgagcccgaataccccagtaagactcattgagaccaatcaagaattgaatagtctggtctcttgtataatagtcttgaaccttttgcatcgcgccgcaagtacaaccacaagtgcagggaatattaggttggtattcgttgagctcgtcccaaagagcttgcaactgagtaaaatatgtggtgacggaattatcaccctgtttgacattgccaacagcggttttaagctgtaagatgcggggaccattgctttggttaaagcggtcatggaggttggaccacatctcactagcggtggttttgaacatgatactagcagcgatctcacgagatacagactgaagaatccatgacataaccatattgttgcaaatgtcccatgcagatcgagaatgatcattaggaggaggacggggtatggtgccttcaatgaagggggttttgtttttggcagcaatattgatagaggctgcacgcttccatgactggaaattttcttgaccagtcaagagaaatgaagcaatgagattgtttgggtgatctccagttcctagataaagcggagtacgctcatcatgagaaggtcgat

SEQ ID NO: 280567 - DNA, 516 bp, Cannabis indica
tagaacttgaggaagccgagggaggattggcttgagtttcttcttggctggagggactgccttctcacgactttgagaagctcgaagttccttctctgcagtggcttgctgggctcgagtttcagtagaagggcctgttggagtggaggcagggactgatacagcaggaggaggaactgccaactgtggaggagattccttcgaagattcagacgatgaagtccaggttctaagaggtcttaccgatttgcgagccactttcttgggaggacgttttggcttctcggtttgagattcacgctggggaagcgatgaatctccaggctttgcaacatcaggaggatgaactgaagcagcagggggtgcattggaaggagttgcaagggtttcttccaattttttggtgtgccctagattcttggttctcaccattttggatctgaaagagaagatgaacagagacacaaggaacaagaaaataggttcgggtaggtggtgagttaaatgacaaagatt

SEQ ID NO: 280568 - DNA, 755 bp, Cannabis indica
ttgatagaaaaagctcgcctactgcctcattctagcaacaggaagctgaggccttactttcaagctcatcctgttcgggtgtataccgaccaaccactacgacaaatactgtaaaagccacatgcctctggacggttactcaagtgggcggtagaattgggtcagtatgaaatcaacttccaaccccgaacaaatatcaaaggccaagccttgaccgactttgtggtagaatgcacaggcaaaaaagaaagcataccagaaagcgatcccgagccaatagcacagccaagtaagattgaagacaaaccgacctggaagctacatgtggatgggtcggcaacagatcaactatctggtgcaggaattgcccttgtcacacctgggggcaacacctgcacgctgcagtcaagttcggattcaaggcctctaacaacgaagtcgaatacaaggccctaatcattggacttaagctagcaaaggaaatgaaggccgaacacattgaaatctgcagtgattcacagctggtggtaaatcatgtatccggcgaatacgaggctcggggagaaaaaatgatagcatatctgagcaaaatacatgacctgctcgcacaattcaaaagctacggtctcagacaaattccaagagaagaaaatacaactgcagacgcgctggctcgatttatcaagcaacaatataagtgacaggaaaaacttggtccctatctagtccttgaaagagcctagcatcactggcac

SEQ ID NO: 280569 - DNA, 358 bp, Cannabis indica
ggtaaaataatttctaacatgatgcacttctggccgcggctagattagtgtggccgcggctagatcagtgaagcagaaacacagaattttgaagccacagtcgccgcggcgagatacaccctcgccgcggccatatagaaactacagaagcgtgattttaagcatctatctggccgcggcgagctacagcttggccgcggtgagatcccgtacggcccaggggtaaaattgtccgacgaaccctaaaaatcacttataaatagaaaactgcgattagaaatcaagggaagcgatttggagacctaaaacacagcagaaagcagcaggaagagcagagtaattcaaagtgaagatccag

SEQ ID NO: 280570 - DNA, 681 bp, Cannabis indica
gggcataaaacccaacatcttcaacatcctgcgaggaaacaaaaagtttgagtggacagaagaatgtgaaagagcttttcaagatctaaaggcacagctcgcaaaacctcccgtcctctctaaacctctggacggtgaggaactggggatatacctggcagtaacggagcatgccataagcgccgtactaatcagagaagaagatggcgtgcaacatccagtctattacatcagtaaaagactcatcgaggccgaaggccgatatccgttgatagaaaagctcgcctactgcctcatcttagcaacaagaaagctaagaccttattttcaagctcatcctgttcgggtgtacaccgaccaaccactacggcaaatactgcaaaagccagatgcctctgggcgattactcaagtgggcggtggaattggggcagtacgaaatcaatttccaaccccgaacagctatcaaaggccaagccttggccgactttgtggtggaatgcacaggaaaaactgaaagcatcccagaaggcgatcccgagccaacaccacagccgaccagcactgaaagcaagccgacctggaagcttcacgtggatggatcggccacagatcagctatccggcgcaggaattgcccttgtcacacctggggggcaacacctgcatgcagcggtcaaatt

SEQ ID NO: 280571 - DNA, 539 bp, Cannabis indica
cagtgttgctgcagtgtacaaaacactttgcaggtagggataggtgtgctatactgaagctgtctggtgcagaagtagtctcccgaagcataggtttgttctatggcaggtggttaataatcaattgctaactagagacaagtttttcaggtttcaaatcactctggaaaatgtcaattgtcctgtttgcaatgctgagattgagagccataaacacctatactttgactgtattttctctaagcaggtggttactgctatctttgattggattggtgtcaaggcttggcctttgttgtatgatggatggcttagttggtgttcgaacaggagcaatgggcagagcatgagcatctactatgcctgtcttgcagcgtgtgtttacagcatctggaggaaccgaaacaactgtattcatgagaatttttcttttacagttttgtatatagtcaatgagattaaagttgttataaagaataggttgtatagcttacaaaggaagaagttaagtagggatgttaggaagatgataagctttt

SEQ ID NO: 280572 - DNA, 589 bp, Cannabis indica
cccaattctgaaggcccatttgccttatttgaataactgtaataaattaattaaactagtttaacctaataaaattgattagcaacataattaatttcaaaatatatgaaattgatttttcatcagattattttgaaattaatttaagaaaaatacacttagtttaatgaaacttttcaagataaactagatgtattattctgtatttaattaaataaaagaagttataactaattagattcttctagatacttaattatttggattttcatagaaaatatatttaagttgaaaattagtttttgaaactaattttggatcaacttaaattagaatattttgaaattaataattaagtataattttctaggaaattagttattcatatattctttaaaatacttttaagttgaaaatttgttaattttttatcaacttaaatgtatattttcaaattaaggtgattagctcaagatacttaatttgatatttgattaaacttggaaaattatttaagttgaaattttgttattttagagcaacttaaattagatatttttaaaaaaattattttattatattttatata

SEQ ID NO: 280573 - DNA, 632 bp, Cannabis indica
cctatatagttgatgaaaaaggaggtgggctatagtatgatgtggcaggagagaagagaaaagtaaaggaaagacttcaaaaatagcattggtatccctttatttttaattaaaaaaataggaaaaatacaattgattaaaaaattagaagtgtgttaagtgggactaattggacaactaacaccattggaaatgataaatttactaaactaacaatgtgaaatattaaattttacaaaataacctcaattaaaaagtagtcacatcatttttagttatataaaattatatatcacataattgacaattataattaattatgtagatataataatcttaaccaggcagggtcggccttaggcataggtggactaggtccgcacctaggacccactcattttagaggcccaaataaaaaaaatacattttaaaaaatatacatattattttaattatttttaaaaatatcattcatctttatagtaaagcccaaaaatattttttttgtctatgatccatttcaactcaggatcagtcctgcctgtagaaattttattatgtttatataattaatatgttaaattaaattctcttaatttaatcctaaaggaaattatgtagatttaatttaa

SEQ ID NO: 280574 - DNA, 566 bp, Cannabis indica
tctctctcttcgaaaccagctgaggcaaaggggttttgggagctgaaattctgtgttttcagcaaaggattcaagaggaatcaagacaaggtaaccctagtttcttttccccttaagtttttgaagttgtagtttagtttcattatgaaatttctaggtttagtggctgttgggttttgaaatgtttggggttcaatttctagggttagtttgagttaatctaagtccctagcaactggttttgatgcttgatgttagttctaagcaagcttgagttttgaaactcaagctttgagctttaatggcataatttgatttattggtttgttctgtgaattactgcctggattttattgtttatgcattgtataggtatactggagagtttggtaaggtttgggattgaattgagttaagggggttgatttttgggttcccagcacagaaccggaattccggttctgggggacctgtaccaaccggtcgaccggatggtgacccagaaccggatttccggttgggaaccggtctgcctgttgggggaatttccagaaccctagttttgg

SEQ ID NO: 280575 - DNA, 918 bp, Cannabis indica
ttctagggtttcctgtgtgacacgtgtccggaggggacctctttccagcggttaggggacccacatttccctttttcttattttaggggttttggatgaggcctaactgctggaatcttactctttttacagaatagagaaatgtctgcttctggctcaaagtcatcaaagaaaagtggtaagcgcatggctacccttgaggaggtcctccctgggacccgttgcccaggaggggtataacgtcccgggcgaccggatgggaagcggctgagctttactccaccttgacctgtccccatcaattggagaacattgtggaggttgctggaatcaagccttccacctcagggacttaccaccggccacctcgcgacgcggagacgcccaaccacaactacggcggcttcggggcctggagccaaacgcatctgatggccggggccatgcttcctcttcaggattattttgttaattttctagtttttgtcggccttgcgccataccaacttattccccaagcataccgcctgctttcaggcttatttattttttatgccgcccgaggatggggatctccccgcccggcggaaattttgtatttttatgaacttgtttccgtccccaagaagggggacaaacttaaggacggtttttatgggttccgggcccaccctgctaacgaaggggtggtcccgtataacaggcagactcacgttaaggagtatcgccatcgctttttcttctcctccggatttagggcagtggaccatccggagctccttactgagtgggtgaggatccctccatatgaacggactgcacctactcaggcctttcttcggagagcccaggcctttgcctcttacgaccgggccgatcttgacgtcgggggtctagtcactacggagacagcaggaa

SEQ ID NO: 280576 - DNA, 453 bp, Cannabis indica
accgagcttccaataagcaggaccagaatttaccaagtaaactcactgacttattaattcctttttgcatccacgcatagaacttggaattgcactctcactcatatagaacactctatatgttccacgatatagatacgctatatattatctatttttataatcatgatttgatcaatgatcctctaatacatgatctacattgtataggaattaaattaccgttacacccttcaatgtagtttatccttaaaacacttagctccgtataaatgatattttagtgaagtgaaatgagtactcaactatttatctctgtttagccaagcatgaaggaaatcatcgtttcacttctaaataccagtagaagttatagattccatatctatgtttagcgttcccactcaattgaaatatcatgttcccaaaatgtacgcatcaccctgacccaaa

SEQ ID NO: 280577 - DNA, 689 bp, Cannabis indica
aaattgggggttgtgccgtcagactttattgcatgtagcattcccaacacgtttcctcccatgcggcattaaatgcgaaataactgctcaggggaagcttgacaccacgcggagatgctttgatgttacttaggcttccgggagcatagggggctctgtatgccttctccgggaggcacgtcctggatgttacttagcaaataattcaagtattaagatgttttgatctacgtgtccctgttcggttggtccacgtatattgggcaaaattaggggcaacatttaccccacaagccttgtttatttgaaaagtaaaacaaggcttgttcaagtgcctccggtcgactcctcggtttcttgggacgtgcttttggcgcgtgaaggtgcatttaatgatcaccattaatgcagtgattcactttttgcagacgtcgattcgtttcatgcccattgattgatacagcgcattaatggtgtcagacggatactcaaacgtttccaccaccttaattacgaatcaatccaaccgttgattcttgggaattcgaatcgtgtgcctccccagccgttcgattggtaggtggttgcgcctgttcctcatgcactttggcctataaaagccaccacctttccttcatttggttactttccttttttcgccaactttcttcgagttttccagagagaaa

SEQ ID NO: 280578 - DNA, 703 bp, Cannabis indica
atggatttgaaaaattgaagtgatgacattagttttatgcaaattaaactggatttctagttgaattttagtttcgtagtagtttttctacactttttttcatgaattcgaaacaacttctgttttgatttattcaggtcgtcttctcaggtgaagtcaccaaaattaatggtgattctctttatggttgaattttcgttttagttgcgttaggttgctgcgtggttgcgcgatggttgcccaggatggatggatcatgagttgaaggtgtgtgtaagtggtatttgtgtaattttttttatttggggtgtatatttatttatttggccagttggaagtatttttataacattattacttttttttttgttaaaattgaaaaaagccctaaaaaattaattaagattttttatatataaaatgtgattaattaaagaaaaatagtttgaccatgaatagtaaaaaaatataaaagaaagaaaaataaatagaataagtgtttgtattttttttaaaaaataataaataaaatttattgaaagagtgaaaaggtgttaaaaaaataaatataaaatgtacacttattaatatatatttatatatataaagataaaaaaaaataagtgtgagaaaaaaagttaagagagagagagatgttgaccgaggttttcagcaactaataaaatattataaagttagagag

SEQ ID NO: 280579 - DNA, 605 bp, Cannabis indica
attaaggaagcaatttggctcaaaggattcacacatgaactggggttcaaatctgaaagcataacagtgcactgtgacaaccaaagtgcactgcatttgatgaaaaaccccatgttccatgaaagatcaaagcacatagatatcaagctgcatttcatcagagatatcattgctgaaaaggaggtttgtgtgaagaaaattggaaccaaggagaaccctgctgatatgatgacaaagtatgtcagtttagccaagtttaggctctgcctagacttgctaaacattctcaattgctgagagaagtctcaagaccagttcagtccctaagcatcatcaaatctttctttctattaatgaccaaggtggataattgttgtgttggtcactaatagaagaatgacacatcacctaagtctaaatcctactcaactaaacataacggttttacctaactgtctgttatgacagttaggatcgaaccatgaaggaaaaggctataaatagccatctgctgcaacaaggaatgagatggtattttggaacttagaaagagctagttcagtgtttaacagagagaatttgtgtgtgagatgagttgttattga

SEQ ID NO: 280580 - DNA, 689 bp, Cannabis indica
cccaaacccagacccgaacctgaaatcagacccaagcccgggagtcaaactcagaccaagacccagaataaaacccaaacatagacctgcacctggacccaacctcgaactcagactgggatcagaacccaggacatacacccgaaagtcaacccagactcagatcgagatcgaaacctaggactcagacccgaaccttgacctagacccaggaccccaacccacacccagatcccgatctagacctagaccgagatccgaacccaaacccaaactcagaccaagactcgaaccctaacctaaactcaaacttggaatcacaactagaactggaactggactaggtttaggaccaggaccaggacaaggatcaagacttgaacccaaacccaaataaaaacccaaactgagacccaaacccaaattgggactaggacccaacccgaacctaggctgggacccaaattgagaccaaaatcaggacctgtacctagaattaggatagtgacctgggaacggaactatgaccatgacctaagacccgaccccagacacggacttgaacctaggaccgagctcgtgacctgacacccgaaatggaactagactgggacccgagatctggatccgaatatgcacccagggcttggacataacctgtagtcagtctctggatctaggaaccagcc

SEQ ID NO: 280581 - DNA, 567 bp, Cannabis indica
atgatggcgaaggaaaatcatagccttggccttattttgttttgtttcagtattttgatctttgatggtgtctccaagacccatagcatctaaatggatttcagcatcaagaatccatgacaaatagttttttccagaaatatcaagtgccacaaaatcaagttttgcaaggtttgccatggataaaactatatcaatataaagtgtaaattattagacatatacataaactttggaaaaaaaaatacaacaaaatatagtacaatatagaataagataataagattaaacaatataatatgataaacaaatcaacacacatatataatatataagcatctatatagatatatataagcatagacatatattgtataaatattaattcattaaaaaaaatggctaactcgaatgtgtttcagtcagatgagtatatatatatatatatatatatttagtgtatcatgactttgaagcaattcgagatcacataacaaaaacattgtcataccttggttagaggctcgtgctgataacgtattatgaaatattagtattatgtaatat

SEQ ID NO: 280582 - DNA, 550 bp, Cannabis indica
agtgaaaaacccatctagtggctggccacatagtgggccctacactagtttggtttttgtcatttttctcaactattttatatatttttcacaaataccactttctgtactttcaaccctataaatgccaaaactattaatttaataattaaaataaatatcaaataaaattttcatttataatatttattaattagactccataaagtcttttaattaacaaataaacccccaaatactatattttcacaatcaagccatatcttagtgaaaaattcataaactagagatagtctaattttagaattataattgattaactaaaatcaattaactgagtcatacaagcattttgtctcaactagtatggggaccatggtcctatatagtcaagcttccaataagcagatctagaatttaccaagtaaatcaactaactcattaattcctcattacatccaccatagaacttggaatcgcactctcagttacatagaacgctctatatgttccacgatatagatacaatattaattatccattgttataa

SEQ ID NO: 280583 - DNA, 861 bp, Cannabis indica
cctcaacaagacaatgaccgagattgcggagtatacgtcatgaagtacatggaggctgtggccaatgaggaagaagtagttgatgaggtataccactttttaaatatttcagaatgtactacgcaagtttgattgagattaacgttgtgtaatttaaattttattcggtgttttactgtcaagttgattagagttaattacattttctaagtttttgtttttgtttctgtattgtggcacagtttcacccggttgaggcacgtttggaaatcgctgcgaggatcataactgatgaacaaaatgaaattcgtaccaaagtggttgaagatcgtagggctgcacaaggcagctcatttgcatcatcctcggcccctttgcgtagtccgtcaaagtctccacgcgatcctcggttcagtacagcgaagtctcgcaatgcaaacatgtttcccccgtcaagagcctcccctaggcttcagtctaccaagactaagatttcatatggtgaatagtgtgtaaaaacacttgtgttattaataggttgtgttattagtgtgttgtgtagtttggatttgggagcataggttgtgttatttgtgtgttgtttagtttggatttgggagcatttggatttagacatctgtttttattagttcacgtttggaactggttattatgttcacagacttgtgtttattttagttttgacaatatattaaaccatacttagcaaatctttgtactcacaccataacaactcttacaatgtacccatacttcagaagtagttgattgtacttcacagaaattatttaacccgaaaacaaaggtgacttcttaattttctttatttgtttttttggt

SEQ ID NO: 280584 - DNA, 814 bp, Cannabis indica
gtacgagccatccaaacacatcagaaactacaacttttaccattccaaagcatatcattccgagccttccaaattgcccaaccaatcatgacggcttcttcaaccaaccccatattgcctactgccaacacttccataaaccagtcaaaaaaattagtagctacagaatgcccaacacctaacgctgatcggagccaacaagaatgcgcaaaagagcattgaactaaaacatggaaaatggactcttccgtaacattgcaaaacacacaatgtaaatccacaggaacatgtttactatgcagctgagtacggtgtaggcaaacaacccgaaagagctttccaaacaaaatgtaaaatcttaggaggggctttaatcttccacaacatcttccaaacatcctcctccatggatgaattccaactaccattgaccgactgcaagtgagtataggcgcttttaacagtgaaaaaaccagtcggatccttattccaaaaccaactatcactctcaagattaacactcaaaggcacctgcttgatgagctccacatcacgagactcaaacaagtcctcaataagctccaaatcccattgtctactatctggcttcattagttgagacactttacaattgaccagtgccggatgattggatatcacatacgggttagcctcagacaaaagtcaaggtgtgtttaacacttcagtagctaaaccagatcctattctcctacagacaccatctctgagcagctgtgtgacgcaaagatactgcgccatataaaactcggattaccacctaaactcggcctcc

SEQ ID NO: 280585 - DNA, 90 bp, Cannabis indica
tctaagagtggattcaacaaggaattaataagttagggatttacttagtaaattcggttcacttattggaagctcagaaatatagatcca

SEQ ID NO: 280586 - DNA, 992 bp, Cannabis indica
tatggcgcaaggccgacaaaaactaagaaattaacaaaataatcttgaagaggaagcatggccccagccatcaaatgcgtctggctccaggccccaaagccgccgtagttatgattgggcgtctccgcgtcgcgaggtggccgatggtaggtccctgatgtggaaggcttgattccagctacctccacgatgttctccaactgatggggacaggttagagtggagtgaagctcggccgcctcccatccggtcgcccgagacttgtacccctcctgggcaacaggacccagggagacctcctcgagggtagccaggcgcttaccgctcttcttagatgattttgagccagaagcagacatttttcgattctgtaaaaagagttaagattccagcagttaggccccataccaaaccctaaaccaagaaaaagggaatggggtcccctaaccgctggaaagaggccccctccggacacctgtcatacaggaaaccctaggaggattccctggacaagagtcgggtgcaataaattcacagaagacggcattgcgcactaaagaaaaagaaaaggcagaaaatagaaagaaaacagtctatcctatgccctaagcgaccattatacgaagaacgtatggtcttctacaaaaaataacaacaaatgcgtgacaacagtaatcctatcactagagcagtaaactcaaaccgattatatgaaggatttaaacacttgcattcccagaaacttcgaatgcaaacccagaaaagaacaaacagataagtaacagcatgccatgcatattaataatgaagcaaagggtgcaaagaacttacaatgaagtgttgagactgggggtcctgctgtgaatcgaatgaagacaagaaggactaacagtaacaaacgaagaagaactggagaaaactgcaaagtgtttaaaggtgtttttctgggtctgagaatttttctctctgggaaatttgagcaaagttggcaa

SEQ ID NO: 280587 - DNA, 548 bp, Cannabis indica
aatctatcacttcgtccttcccgagtgtcgtgttcggcttactctcccagctcaccattctcgaaaagcgatgcgacttcttcactgcatactcgttgcccagctccacgatggcctcgtatgcccaatactgcaacgctgcagtatagccgtaagatgagtattttgcctccttctgagtaactcccttttcaatctttttcagcatcttattcttcacatccacgtagtctttattacaagtttccatcagcttggtgtacgaaatctttccccacgggtactcgtagaagaatggaaggttatcaaccattcttatgacaaaaggaggaacgacagtcttctcctccttaccagtgaggacgcccataacaaacaaggccatccccaacttgtagacatcatcaacttctgtgcagctctcaaaaactctgcgcagttggccaaagctgatggaaggattaccgttgaaatattccataatcaaccggtccgaacttcctttctctttgatgtcttcctcagtaggtccgggcaacaagtttaac

SEQ ID NO: 280588 - DNA, 618 bp, Cannabis indica
gggcataaaacccaacaaatgcaccctcacgcgcccgaagatcgtgccaggaaaccgaggaatcgaccggagacacctctgcaaaaagcgaatcgctgcattaaatgccatcattaaatgcaccctcacgcgccctaagctcgtgccaggaaaccgaggagtcgaccggagacacctctgcaaaaagcgaatcgctgcattaaatgccatcattaaatacaccctcacgcgctctaagctcgtgccaggaaaccgaggagtcaaccggaggcacctgagcaagccttgtttcatttttcaaataaacaaggcttggggggtaaatgttgcccctgatttcgcccaatatacgtggaccaaccggacagggacacgtggatcagacaatttataaatatttgctaagtctttttatgccacaaggaaacatcctggacataggtcccggaggaggcacccggagttcaaggtgctcccggaggctcacatagcactaaagcatctccatgaggtgtcaggcttctcctgagcaatcaagtcgcattaaatgctgcatgggaggaagcgtgttgggactgcaacacgcaataaagtctgacggcacaacctccaaccagc

SEQ ID NO: 280589 - DNA, 481 bp, Cannabis indica
aacctaaactaagcatgcaaaccattaaattcttccaaaaattccaagaaacaaagaaaagaagctagaacaagatttacctgtactagaattactttaaacttgctgaaaatcacttgaattgagcaaagaaacacagccctagcagctcccaagcttggccgaaagaaagagagagaaagagctcttgaaactttctaaattttgaaatctttgaataatgagagaaagcatgcaaaatataactcttatttcagccaacaaaacataacataacatccattttccacttactaagtccactaaaggacaaaacataaatggggcaaaatgaccattttgcccctcctcacttaaaataacataaagggcactaaaggggtattttaggaaattctaaattcccgaccactcccgacattcccaatgtctaaataaccgtcccctaatactaacatcctaagttgtgattttactgagc

SEQ ID NO: 280590 - DNA, 801 bp, Cannabis indica
caccccaaaggggagtttataatgaccagttgactctacaatattttctaattgcttggctcatatagcttgatcaagttttaatttttagattttttggtctcctttctgagaacaacaataacgtttttatctgaattctgaatgcttcatttttcaatgttgtgaatattgtgggtaagaaatcttatattaagataacatccttattattatggcacgatatatcgggtcatatttctaaagaaagagttgatcgattacttctagctaaaattcttcctcctgttgatgtttctggttgggatacttgtgctgattgtacttgtagaaaattgcctaaaaaaaaaacagactgctaactgtagtcactctttataagagattatcgacactgacatcagtagaccttattccaccacgttgtgcaaaaacaagtattttataacttttatcaatgattttcctcgttatggctttacctacttgattcaagaaaatctaacgctcttgataaagtcaaaatcttttgaaatgttcttgagaaacaattagaaggagtcatcaaagttattctttcagatcgtggaggagaatattatgatcgttattcagaatatggactacacatgaggccttttgtggaatattttcaagaaattgtgtagtttctcaatacaatatgtcaggttcactgtgcaaaatggcattgctgaaaggagaaatcacactctcatagatatggttagaagcataataagtagatcaaaatcttccagagtttttatggggtgaagcact

SEQ ID NO: 280591 - DNA, 1023 bp, Cannabis indica
taaataatttgtcaaatttgtcattttgtgtaaaaaaacctttatatatgttgggctgatattaatgggcccttcacctacatcttcttatgagttaaaccatcgtcgtacgttagaacagtaccgtagtacattaggttttttggaaaaacgggattgatgaataatgttgacatttgaccatactacgtacgcctacacgtgtatttaattgtgtaattcagagatttaagcacccctcttttgacacatcagatgtgcccaatggagtacatcccaatggagtacagctaactaaaaaacgtactatagggttattctccacgacttatataacacacttgagacgttttccaatccagcatcaagtttatagagaaattaacttgtaatttagttattagcattacaatatatcaagtatgagttcaggtccacactgggttattttcaatggaccaaatgaaggtatctatagtacgtacgaagatgctgtaagcaaaaacactacttctgatgcgtccataaaaataattcgttatgaatctttcatagaagctttttctgctttatgtctacatggagagacgggacaatgcttcactgggcagcaagttagagaactttgctgtgttaatgagtttccctgcatgtgggattctgatgatgataatgatgaagaggctatccttaattctgtttgctcactgtttgatgagggtgaatgttctggtgcaaataaatcacccgaacaggacaatgtgaaagattcgactgacaaaggtgaggaccgaaatggagatgatatagaagttggggacaaaggaggagtggatacttctcccaaaaacagtaaatgatgcactgtgttagtgtccaagttatgttattttatattttgaagctataatgtttgatcagtatttgttatgaaatatgtactttggtttattttggagtattaatgtcactttcctcattaattaattgtggaagtaaaagtgaagtgaatcattgtgaaat

SEQ ID NO: 280592 - DNA, 701 bp, Cannabis indica
aatactaaaatacaaaaacatccaaattacaaaatgactaatctacccctcactaaaagcttaagttataacttaacttaagggtattttggtcatttcaactcaacattcgtacttcccgacattttaacctagtctgatataattccaattcaattcatcttttattgtcgtaacatttctgaccttcctaccaagttccacagtttcccggcccaaaatattttattcaaattatggtatctacgatacccacatattccaatacaatctccgtaattaataaattacgctttattattcattaattcatatttcccctaataaactcatgattaatttaagtaggattataatcctactctaatacccacatgatcacatatttaataaaatatggccaattaaatatcaatacaattctcgggatattacaattatcccctccttatagaaattttgtcctcaaaatttactcaaacaatccgggatatggctcctgccattacgacttcaactcccacatcacctttcactattattgttctttcacaacactataactagtgatataatcttaattccgtaacactctctcttttctatcaaattctgtactgattgttcttcatatgacaagtctgtttgaaattcaatattctcgcaactctgtgtatagatcgcttctaccttatacttct

SEQ ID NO: 280593 - DNA, 825 bp, Cannabis indica
ggaaaaagggaaattgggcatttttcttaagctagaagaaacttagaggaaaggtgcatctcctctcttctctctctttctctttcgattctcttgggcagcagctaggattggggattttgagtttgaatcaaaggattttagtgattcttagaagctttaatccaaggtaactcttctttattaattttcttaatctaggttaggttttacatgtgaaattagattctaggttgctgtgtgttttgaaaggatttaatttagtattctggaaatgatttgaagttgtttaagcttaattgaattgaatctataggttgaattgaggttttggcaaggattgagtttgagaactcaatcctagctctctaatggtggattaagattctatgtgattttataagttctgttgcttgggattggttcatatcagtgtgtacaggtatactggaagtttttagaagatttgggtttgatttgattaaaggggaagaatttttgggttcccagctcagaaccggaattccggttcctggggccctgttgcaaccggtcgaccggttggtgccaggaaccggatttccggttggcaaccggtttgccggttgaggctttttcccgagccctagtttttcccatttttgcgtaatttagggtattggcatcctaattatcgatagggttaagcttagtttctattttaaatccccgataagtgttttagcgagtctctcatcaaagtttgaatattatggtttagggccctgtaaaacgtcgagctgcgtttccactcaggctgaccggcacacttgagcacggaacgag

SEQ ID NO: 280594 - DNA, 604 bp, Cannabis indica
ccaacttacagcagctagcaaatattatagggtctaaaacacataattatgcatcaaaatccaacaataaaccccataatttcagattgcacaataatcacaaatcatgcttcaactagcaaaactccaagttcaagaacatgaactttaacccaacacatacttattcaatttccagcagtaaaacaatagataaaaaaattagattaagcatgtaaaacatccttgaattgtactctaagcccaatcaaacacaaatcaagagattaacacacaaattatcaagattaaacatccatttccctaaacatgcaaaccaagatcaaacaacttaaagcatgctttttccacaataatttcagcaagaattcaaccataaatttcacataaacttagcaagaatctacctcaactccaagctcaagaattcacaacttcaaagctccaaaacaagctaagaaccaagcttttcttcaaattcaactttgaaataataagagggtttgggagagagagggggtcggccaagagtgaaagtaaaaccagaaatttgcatttcatttcatcaaaaatcaattttaatcaaacatagtaaataggggtg

SEQ ID NO: 280595 - DNA, 641 bp, Cannabis indica
ctatttcaatgtaatcttttctattcaattatcaataaagaaacagatttaattttattacttgtttaatgtgctatttggttcatgtgatcatttatttacttatttgatttataaattcatccaaatccttatcacactgatattcttgtttattgtgttttcaacatagtggaaagtaatcaagattgtgtgattaaatgtattcctataattcatcactacacaaggtttaactgataggataatctacaacgtagtttacttgcactttggataagtgttatgtcctttctagggtattggttaaagtaagcttgggttggatgtatggagtatgcatcggaagggattgatattgaacttagattagatatgataaacttaccgtaatatctattcaattcaatatcacctagttgatcttagatcaaatgatctcaatcatgagatagttaggttctagttcaattgtattattcgtcttcttcaatctattcgttaaagtcgaccaatggatcttctcgtgacatatagattaaggacatggtaattcaattgagtgggagtgctaatcataggtacagaatctatagcttctatctagacatagaagtcaaactatgatttccctcgtttta

SEQ ID NO: 280596 - DNA, 738 bp, Cannabis indica
agttgggctatttggcgcgcgcagaatgaatttgtttggcaaaagaagagttggtctgcatcagctagaaatatgcttgatcagtataaatttgctcaacgaaggaagggtctttcgttgtctccgctgcatgatggggggcaaaatcttgagcgttggattgcacctgagttaaacaagatcaaagttaatgttgatggggctttatttgaacaagagggacgctttggcatgggttgtgtagctcgaaatcatcatggggctatggtagaagcattcaagaaagggaagattggttgtgttcaacctgaaattgctgagataataggcattaaagaagctttgagttggattgcaatgctaagaacactgtaaaattctgaatatagccctaattaattcaagagaatcagacaatagaatatatattagcgaaaatgtaccagtccatgaatcgcttgaagaagggtatgatcttccaattttgcagtgagttctttctctgtaacctttgtctcttgatgatggggtttcaagagaataagaaatatgatactgcaaattggggaccattaccgtttatattaccaacagacaaaactgttggtaatatttattgactatttctatttggcccctcatcaaaatagaaattgtccttatggtaaccacatattaaaatcatgacaatcatgtccttaagtcataaattttattccaaaatagaccacataaatt

SEQ ID NO: 280597 - DNA, 800 bp, Cannabis indica
aattttcaaaacccatccggaattccggatgcacaactggaattctgattcctcgcagacagaatttcaaaaattcacaactcaaccaaatcacatccaaacaacctcaaaccttccagacctgttctataggacccaaataatatttctaaagcaacaaaaccaagctttaagcacaaaaatacatttcaccattggaggttcaagattgagttcaaaaactcaaaacttgacaaaacctccaaacagccactaaatcaagcataactaaactttactttgaaaaccatagctttagaacaaaatttctcaaacttgaacaaagataactagcatgcatgaaacctacttaattccattcaattcaagcatagaaaaccacagaaaacaacctagaactacagcagcaacaacatcaaaattaaacatgcaaccattttctttttccttgaaaaccaagaaaactaaagagcaagatccaaggcttaccaagagcttagaatcacacaaaatctgcttgaaaatcaaaggaaatccagccctagcacacccaaccagccgagagagaaagagagaaaaagagagctttgatttttttcaaattttctaactttgtaattttttgtataaatgagaaaataacccaactaatacttactttcagccaacataaagcattataaaacacatataattcacataattccaattacaaagcccacaaaaagacaaactaacaatggagcaaaatgaccattttgccccttcacactaaaatctcataaataacactaaagggg

SEQ ID NO: 280598 - DNA, 740 bp, Cannabis indica
tctggttctggttcaggtcccaggtcccctttctgagtttgggttcgggatcgagactggggtgcggttataggtcccgaccctggttttgtagtgggtgaaatctacaattacggaatttgggcaccagcaacctgtcaagaacaaagagagagacaaaagttcaattgggagcaccggtggggtgtcagccaaagggactccgacgctcaagtcagtacgattatagtaaaaaataacaataacggaaaataaatgtaatataaatggtagtcggacggatgagtggacaagcgaacagacggactgaaagtgtaactccgatggtgaggcttaagagaaaagcttagaaaaggcgactgtctgcttgagtcagtgagtagtgtgagtatcgaatgtgttctgtctagcgtctatcgtatggttccttttatcgtgtgttctcagtgccgttggcctctgtccacgtcacccgttggactcgttcaaattggttacttccctaattattagggagtagtaaccgtcctcctgactggttccatatttacttgattttacccgtttggctgactggccgggctcggacccggttgcgggacgatccggcttgtggcccataggctcactcgttagtctatttcaaggcatagtgagtccgtctgactgtcttattggggcaaacattgttggatccattattgatgggctcgtctgacttgcatattggacttctcaaa

SEQ ID NO: 280599 - DNA, 499 bp, Cannabis indica
gccagtaatctcagctcctacaaccttaaactctggtttatattcatcattaaatgtgggatgggtgatggttttgattttcaggacacaactaatggtggaaggagcaaaccgaaacctattccctctaatataagctagataaaggaactgactcttcctatttagaatgctttcatcaaggttggcataaaactctctcaccagattctcatttgggggttggagatgagtaacagacaatgaccacccacgagactcaattaactccttaattctaggaaaatgcttgagcttaacacggtattcaggccacaatgggcgacgacatacattttcttgaaatctaagcagtttatcattagagtaaaatggtgcattggacagattttgctcagacacactaggttcaggaattttggatttcttaggcactgacgaaggagttgcatcagaggaaacatgtttcctttttgggtgagactttggcagagggggc

SEQ ID NO: 280600 - DNA, 584 bp, Cannabis indica
gatttagaatcaaccacttctcttgaagatgagttgattcctattccaatagttgcttttgacaatattcaggattccattcctaatattgatcaagttttagatcaagagcaaccaaacatagtcaatcaaaccccagaggtacaaactcaacaacctcaagaacaagtgcctttgcgacgatccactagagaaagaagaaatgctattaatccagatgaatacatagtgtatcttcaagaacatgaggatggcattggaatgatggaagatgatccaatcaactttcatcaggccatgaaaagttctaactctcaaaagtggaatgatgccatgaatgaagagaataagtctatgcaagacaataaagtttgggaagttgtcccattaccagaaggtgtaaaaccaattggttgtaaatggatatttaaaaccaagagggatgaaaatggtaatgtggtgaggtttaaggcacgtcttgtagcaaaaggctatactcagaaagaaggcattgattataaagagactttctctccggtttcatcgaaagactcttttaggataataatggcacttgttgctca

SEQ ID NO: 280601 - DNA, 616 bp, Cannabis indica
taagcagatcataatctgactgaaccactataattctctgtcttattgttattttccagccttcgttgattgtttctcattcccagtcgagtactcgccattctaggttgaatactcgcacttgtcttcccacataaatttcttcttgttacttataatattatataatttggtgttgcgaaattcactcgacaacatttggcgccgtctgtgggaacgactaagattttatttatttcaaagaaaaataccatcatgggtggaaatcatgcaaacggaggagctaacaacgggtccatcaacattgggacgatgaacgtaccgttatcgggaactggaatgccacctgtggacgtcattaacggcggagtagggagaagcaacattagacctctcaactggttcccagaaacgaccgaccctcaagtcggggacacatccacaccaccagcaaccatgcattttccccctgtcactccgacagtggtatccgagggaatcatccaactcaccactgatcaatatattgcgatttaggatcaactgagcgcgctacaggccgaagtagatggacaaaatcgagcccgacgcccccctcgagttcctgctactcgca

SEQ ID NO: 280602 - DNA, 628 bp, Cannabis indica
atggcaataccctaaacaacataaaaatgggaaaaactagggttcccaaaaatcccccaaccggcagaccggttctgcaaccggaattccggttctgggaatcctggaacaccatccggaattccggttgcacaactggaattcgagttctaagcaggaaatgaataaaaattcataactcactcaaaacgatcccaaaccatacaaaactctccagacctgttctaaataccccattaaacaattccaaagcatcaaaaccgagcttcatacaaaaatacacaattcaccatgtgagctccaagctttgagtttaaaactcaaacttggctaaagctcacctacaagcaaccaaacctggtttaaactactcaaatatgcatataataactgcagaaaacaatactaaacaaatcccacaagtacagcaagctaattgaacaatccaccactaaaatcaagatttagctcaaaacttcatacttttttaaaatcaactaaataccaacaaaaacttgcttgaatccacatattgaaacctaattaaactacagaaaataaaattaaaacctagcaacaactacagccacaaattctcaagcgcgcaaaactcaacttttcttaaaaa

SEQ ID NO: 280603 - DNA, 505 bp, Cannabis indica
ggctttcctttcttctacggccaagatcacttcttcttgctcgtgatgtgctgttcgggcgtacctctcctgagctttgcccgaatctccaactatgtgcgggcctccaatgatgacttgcagatttccgtctatcggtggaggtagcaagtcttggttattgtcgttcctctgattctgatcggtcttgacatatttctgtacatgcggattatttttccttatccgaaattcaatttcccgcttcagattgttagacattcattggtgtcgtggtcgtagtctccgtggaatcgacaaaactttatcatgtctctcttgctgacatccttcttcatgggcccgggcttcttatacggggctagcgactgagtggccatgtaaacactttctatatcctcagtcaagatggtaaatgcagtgtactttgcttgattcgtcccggggagcctcctcgattttgccggtgaactttcccttcttcccattcccttgcctgttattg

SEQ ID NO: 280604 - DNA, 623 bp, Cannabis indica
atctaaccaccaagtgtttcttggtactgaagctaaatttacctcagaacagaccaaagtaagaaatgtacctttctttgctcgccatgcaatatacttagcacattccttcttcatgtgtcctttcatgttgcaaaagaaacaaccatcatcactgttggtttgagtttgtttcttatgtgcaggacctttatccttagcagcctcattctttcttttcttgcccttatctttagaggtgcttgccaaatgagcactttcagtcttctcttgcttcaatctttcttcctcttgaacacaaaatgaaatgagctcattaagagtccatttctccctttggcagttgtaactgaccttaaattgactgaattgtggaggaagagagataagcactaaatgcacaagcaagtcatccgaaagctcaagctttagtgccttcaactttgaagcaaggtgagacatttccataatgtactcccttatgttttccttgcccttaaacttcatggaaataagtttctttaaaagagtacttgtttccgccttatcgctttttgcaaagcgcttctcaatttcagcaaggaaagttgtggcatcggtgacctcctcggacaccgcacccc

SEQ ID NO: 280605 - DNA, 631 bp, Cannabis indica
tcatatttttcatcatttttttcaagaaaacaaaggaagaaaagctagagagaacataccacaacaagagttcacaaatttaggttgaaacaagcttgaaatctcaagaaaatggccagcttcttgctgctccaagagggccgaaatagagagagagttgagagaaaaaatggttttcctttgaatattttctaactttctaatttttgaaactttgaaaaataaaagataggaaatcaatatattcatttcagccaacaattaaaattaaataacacttaattcaattaaataaagcccactaaaggacaaaatatcattggggcaaaaagaccattttgcccctccacactaaaataacataaataacactaaaggggtatttttgggaaattctaaattcccggccattcccgacattcccaacgtctaataaatcgtcccaaactactaacatactaagttgtgattttactgagccaaacaccgagttccaaaataccgggcaccagaatgtaaaattatgaaaactactacgtgacataaagatgcaatctctgaattcaataataatagtataaataattatttaaatagctataaataattttcataattaaacgtgattaac

SEQ ID NO: 280606 - DNA, 600 bp, Cannabis indica
attctcaatatcttcagctttcattttgcccttatctgcattactggagaaggatctccatgcaagtgacaatgtctgttcataagcacgcaattcagcgtccaacttgtctatgtcggacgagttccaattgttaataacaaattggttaaactcaggtgataagctgttgagaacaaaatgaactctttgctctccagataaaacaattcccagcatagctgctttctggaatttcatgttcatcatgagcaagtgtgaagtgatactctgaccaggagtcatcttcacactttggagttcattcctaaaggcatattctagatgaggattgggtgtgggttgtacattttgacactacaaatatcaataaacagaaataaattattggttcaattaaattcatacacaagttcagaaaataacaagtaaagcaaatatgtttgcaaaaataccaaaataaaacatattaattattttccaaggtttccaacataatgaaatacagtgtcccggtaggcgagagtcaaagataacatttgttgaatagagtagtcagctcatctaaaatggacaccattttagcaaccttttattcga

SEQ ID NO: 280607 - DNA, 662 bp, Cannabis indica
aataaaaaatcatcaaaataacccatcaatttaaattattttataaataaatttaatttagaagtaattattacaaaaattactactaaataactaatgaaaacttaaattcttaaaataactttttaaaatctatacgtataatatataaataaaattagagacttcaaaaatatataagctttatttatatactatattaagcactataaaataatctttaaacaatgtgagacttatatttaaaataatatttaaacaatgtgaaacttttatttacctttacatgtaaagaaaataaataagggttttttttttcagttttaaccaaaaaaagtaacaatattacaaaaatactttcagctggccaaataaacaaatatacagcccaaataaaaaaaattacacaaataccacttacacacaccttcaactcaggatccatgcttcctgggcaactatcgtgcaaccatcgtgcaactacgcagcaacccaacgcaaccgaaataaaaattcaatgagaaagagaaccaacattaattccggcgacttcacctgaaaagacgaccagaatcaatcaaaacaggggctgcttcgaattcataaaaaagtgtagaaaaactactaagaaactaaaattcaactggaaatctaatttaatt

SEQ ID NO: 280608 - DNA, 578 bp, Cannabis indica
ccccctcaagctggagcatagatgttaatcatgcccagcttgttacaaagataatcaacccgcaccccattcaaagcctttgtaaaaatatctcctagttgttctccggtcttcacatatcctgtggagatcagaccttgttgaattttctcacgaacaaaatgacaatcaatctcaatgtgcttagttcgctcgtggaatacgggatttgaggcaatatgaagagcagcttgattatcacaccataattttgctggaatagaagtcttaaacccgaattcagtcaaaagctgataaatccatattacctcacacacagactgggccatagctctatattctgattcagcactggatctagatacaacattttgtttcttactcttccaagagaccagattgcccccaacaaatacacaatatcctgaagtggatcgtctatctaccttggagcctgcccaatctgcatcaaaaaaacactcaatctgggtatgtccatgatccttgtaaactatacctcgtcctggtgctccttttaagtaacataaagtttgttctaatgctgcccaatgatgaat

SEQ ID NO: 280609 - DNA, 583 bp, Cannabis indica
attgagcataccacaaaactactctaaacaaataaggacaagccataaaaaatggtacaaaagccataaaaagcacataaaaaagtaatgtaaattcatatgaattaaagtaaaaaaatattaactaaatttattaattgatttataaataaattgaaaaattaattaatataaaaatatacataaataaatcaattacaaatataattaattgtgtaaatgttctaaataaatacccaaaaatcacaaaagaaattcacctttcaaaactataaacttgtaaaaaccaaacttagaaaatattatatacctaaattattgttattataattaaaaatgctagttggctgtcaataatataaagaattttaaaagaaataattaataaaatataaatagtaagattgacttaaaattatttaagattttgaaaaagtgaatgaaattaatacaattacaaagacataattgacgcacaaatcaacctgtcaattactaaatataaaaaatctaattgataacaacaaaagaataatttaatgtaaaatcatttgaaatgaatacaaattttaataaattaaaa

SEQ ID NO: 280610 - DNA, 854 bp, Cannabis indica
tagggacacagaaccagggtcgggacctagaaccgtgaccaggacccggacttaaacctagaatcgaacacagacctagcctcagactcgaacttagacccgaatacgaaactagactcgaacttagacccagactgggatcgaaatgttggacatagatctggatcaagatcttgacccagacttaaacttggacccgcactcgggacccgaacctagacccagatcggggtccagacctggacacaaatccggacacagactcacacccgaactaaaacacccacacctagaatcagaccaaaagctagacccggacctggatccaactcgaacccagaccaggatcagaacaaaggacttagacccaaaactgaatcaagactcagatcgggattggaacttgggactcagacccaacctagaccatgacccaggacgcgaacccacacccggagcctgatctggacctagactaaaatcaggacccgaacccaaactcagaccaggactcgaactccgacccgaactcaaacccaaactcgaactcagaatcgcaaattgaactagaatcgaactaggactagcaccaggaccaggacctaaacccaaacccgaacccagatcttaacttgaacctaggacccagctcatgacacggcaccagaaatggaactagactgggacccgagattgggatccggatctggaccgagggcttggacaaaacccaaagttagtgtcaggattcgggacccagccctggacccgaacatgacaaggacccgaacccacacccgcacctgaacccagtcccaaacccagaagtggacccgaacccgtaccctgtgacc

SEQ ID NO: 280611 - DNA, 502 bp, Cannabis indica
agcttccaataagcaaatcaagaaattaccaagtaaatccactaacttattaattccttgttgaaaccacgcatagaacttggaattgcactctcagtcatatagaacgctctatatactccacgatatagatacgctattaattatccattgttataatcctaatttgatcaatgatcctctaatagatgatctacataatatagggattaaattatcgttacacccttcaatgtattttatgcttaaaacagttagctccgtataaatgatattttagcgaagtgaaatgagtactcaaccatttatctctgtttagccaagatcggaggaattcatcgttgcacttctaaatacctatagaagttatagattccatatctatgttagcgctcccactatattatactttcatgttcccaaaatgtacgtatcaccctgaccgaaaagtaggcttaactaaaaaatcaaagaacatgtatagtactcttgagatcgaacc

SEQ ID NO: 280612 - DNA, 602 bp, Cannabis indica
gggcataaaacccaacagtaatagggttccaaaccctgattcataactatcacattttcactttgaaaaaccatagcttttgaaccaaaactctaaactaatttaaaaccaaccaaacatgcatcaaaacagtttcattccactcaatcaaacatgcttaaacctctgaaaacaacatataaacacagcagcaacaaccaactcaaaactaagcatgcaacctatcatttctcttcaaaaattccaagaaacatagaagaaagatatagaaaccttaccaacaattagagatcactaaatctgattaaaatgagcttgaatcacaaaggaaacatccacttccttgctgctcaaggagggccgaaaagagagagagagagagagagcttgagtttttcttaaattttctaattttttctaacttggataaaatgagaataaaatgcatctaataaacctttatttcagccaaaaagaagccacataaatcacatattaaaatcactaggtccactaaaggacaaaacatcattgcgataaaatgaccattttgcccctccacactaaaataacataaaaggcactaaagggtattttgggaa

SEQ ID NO: 280613 - DNA, 576 bp, Cannabis indica
aataaatagatagaaaaaacatgcacaaattaaatgagaaaaataaaataaatagttaatcaaattaacacaaaatagagaagaaagatcaaaaaaaaaaactcttatgaactacatgatacatcttctatatgtacaattcacatatatatagtgttattaaaatttaataaattctttaataatgaaaatatacaaacatttagtataagaatagtgtttgtaaattatttatttcaagctataagattactcatattcctacacaatattatcaatttaattaatataaaaatttacatttttaattaataattaaattcttgaatatttattataatgaagatttattataacattcaaatattgatcgattgtcttaataattcgattaagacataatgattaataaatttttcatattcttaaaaaaaaattgtcattattatgcatattaatatatatagaagcatacattttattagtcaaaactaaagaatgaacaaaaaaatgatgattaaactatttttgaatttgtattgaaatattaggattagaactaagtatcacaaaata

SEQ ID NO: 280614 - DNA, 585 bp, Cannabis indica
agggttttctagcaaagtgctttcttgatagaaaacttctcctcttactctcaaatgagcaccatagacctcctttatatagtgtttaggatatcaccatttgaaattcaaaattcataagtcataacctccatggatgttatggactcaataaagatatgtaactcatgcacaccataactcctatagagttaagaatttcaaattaagatgtgtaacatctttttacactcttaatgttggtgataatggtggaggttactcatagtaacaagtaactccccaaatgttacaaaaagatgacaactaatatacattgtcatatgttacattttattagtttattacacatatttaatctatatattatattattataaataatataacaatcccccactagattaaatattatctctttagtaacaaacttgtaacttttgtaacatttatttaatcaatcaaaaatattatatcaaaatataacattcccccactttgattgactaaatacacacttttaaagaagtcttgcttaggtgcattaggtaaaatgtctttcgacttgaattttaccttagtgta

SEQ ID NO: 280615 - DNA, 863 bp, Cannabis indica
tagccgagaggaagaatcgccatcttgcagaaacatgtcgaagcatgttacatgcaaagaatgttccagggagattttgggctgaaggtatgaagacagctgctcatgtaatcaataggcttccccaggctaagttagggttcgtttcaccctttgaaaaactgtgggttataaacctgcagtaagtcactttcgagtatttggctgtgtgtgctacgtgttcgtgccaagccacctacgtagcaaatttgacaagaaggcgtacgatgtatctttgtgggatacgacagccaacggaaagggtggagatgttgcgaccctacaactggaaagtgttacacatcaaggaatgtggtctttgatgaaacatcatcatggtggtcatcgcaaaaggaagcattaccagattctaaagaaatggaagatgaattgcagaagaaaatgggggagcaaattgttgagttacctacaactcaagatacagatgaagaagaaaacaccgaggatgaggcacctcagaatccatggcaaacgggggtgcatcaaagagaaggacatgatgatagtcaaccagaacttcggagatcaacaagagcgcgaaagccaaatccgaaatatgctaatgctgctgtagctgaagaagaaaagttcagagaaccagagtcatatgaagaggcataccaaaattccaagtggctaggagctatgaaagaagaaataagtgcgctagcaaagaatcagacttgggagttggtgccaaagccgaaggaagtgaaacccatttcgtgcaaatgggtctacaaggtaaaaactcgtcctgatggttcaattgagagatacaaggctcggttagttgctcgagg

SEQ ID NO: 280616 - DNA, 591 bp, Cannabis indica
taattactgaaatgagatctcaatcatatatctctatttagccaagctcaaaggaaatcatcgtttcacttctaaatacttatagaagctatagattccatatctatgatcagtgctcccactcaattgaactactatgttcccaagatgtaaatatatgccagaaacattggttagcatccaggaacaacttgaagaacataaataatacaactaagctaaacctaaccatataaggattaagatccatagacctaagatcaacaattgatatcgacttaaaaagatataacggtaagtttatgatatcttatccaagatcaatattagtcctttccaatgtatactccatacattcgatactcgtaaactttaccaatgccctaaaaaggacataacacttatctaaggtgtaagtataccttatcgcaaagtattatgtcagtctaaatctagtgaattgacaaataatgagaattaaacttttgaacgtataatcatgaatatattccactgtattgatgacactataatcatgaacaaatatatatgttctagacttaatagaatttatacattaaatataatcat

SEQ ID NO: 280617 - DNA, 462 bp, Cannabis indica
tttttattcttttgaaaaattttccctttagggaaaatcaaagtttcattcaccaatagattgacataacaaagtacattagcctggtttttctagtctttgtttcatttttctggactattccagatacctcatcttttgtgatgattaacaaattttttcattacttttcttaatttcatcttaatttttcttagagtatgcatttatttttttaaattatttcataccattgcatttattgtctctcaaaattttcttcgttcttgttgactttgcttttagccaacgacaatgagtcttttaataagcgataaacgatatgtcgtaataagaatacgtaataaagcaaataataataataagaagacacaaaaattttatagagattcagtcccgagcagttcggtaatagcctaatcctcgttagttgtattgacttaagaataaggaagaagattc

SEQ ID NO: 280618 - DNA, 317 bp, Cannabis indica
aactacacaaaaaattggaagttaattccatgaaatagcatgaaaaatcgaagaaaacaaaaaaattgcaagggtgggtgacaccatcctcatattttccgatttttcaaaaattcataactaattcaaataaaatcaaaatggagctctgtaaaaaagtaaattgcttaatttttttccaaactgtacgactaaaaatatttccaaaaaagattttcaatattttttcacgtaaaattcacaaacatcaatcaacatcatataacacatagatcaacgtgaaaccatccaaatcacatacaaatcgttttaagtcc

SEQ ID NO: 280619 - DNA, 1333 bp, Cannabis indica
cttccacctcaagtgttagattaattatgattcacaacaacccttaagattaatggttattgagaattcataactaatcattaataatatacaagtcattggtaaaattctaataagttatgttatttagtaattgcttacaatttctaaaataacatgttattgaaccatttgctcttttaagagtttgttggtccatccttaagatgacttattagaacagtaagatcaatgttttctagtgattacattttgtacaataagagttcaactacaatattaatttgagacacaaattaaattatagaatgataaagaattgaagttgtagtacaacatgctgtaggaattttacttggtgaaattccaagttcaacctacaccactcaagaaatttgtcaaaaacgacagggacaaacttgtcccagaaaaattcaaattaaacaccccaatcaacgacaaagaaatcttggtcgtttctcctgcacgacaatggaacttgtcgttctcgcctacacgacagatcgtttgattcaaaacgatctgtcgttctccttagaataaaaccaagaggaatcagagctaaccctagctcatttcctctcttcgaaccttcgagagtctctgaactctctctctttctctctgccttctctctggttctcaaaccctagaaccagagatctccctcgatctattgatcgatctttcccagaaaatcaccccagaaacaacacacacacacatacacaaatattagccaaaacacaaaagtttagagtaagaaatcaaacaccagaaatatagaggttcgccctaaaattaggggtacatcctctgatgagctcgccttgaagatcgacctcagatcttgcactatgatgaatgaatgttacaacaggtaagaaatccaagtcacagatcgactggtatttctaggtttttctctctttttgttttctgtgtttatttctctttttctttctgatttctctcactaactcacttctgtttcttgtgcatggtcttgaacatcatctggagctgaacaacttctcagatctggtaacctagggctttagcttctggtatatctcatctcacttctcttctgtatttctctagtgcttttatagttgtagttttagggttgatcacagaactaggagttagttacaacttcggttgtaactaacaactagttcttgatccactagaggcgaagccacctaggatctattttctgttgtattctgtttgtattttatctgtatttttcacttcatcttgtaacacagtaataataaatattacagtgagatctaatttaaca

SEQ ID NO: 280620 - DNA, 700 bp, Cannabis indica
atgacaaaagtctgttgttttatacaatcttttttggaagctacccaaacaatggagtgcaacaatgtgataatgacaaaaagtgacaatcaccagtatactcacagtgcagcaacctgacaacaacacaacaacaacaattaaaaaacttttatctggtttaagggggggatttgttttaaaagatgttattttggttgatactatgactttgacagcagaaacaaccataaagcaacaagaaaataaccaaaagcaaatccccgaagatgttgaatattgaaaaatctataattatttgttcatcaattgatattgtaactaaatattgttaatagctaaaaaaaactactaacaattattatcttttttctctaaaaaagaagacaaacataattatataaatacttaatgtataaattaaaaatacaataataattgtttttcacggtactaaaatatataaacaacttaaataaaattataatgttcaatatcacgtgcaagatatatgtaaaattaacaacaaagcaatgtttcttaaaaaatattactcttcaatgcataacaaaatccatgcacaatagcttgaaccttcttggaagattgaaacattttcgtgtacactttcaatgtatgtaactcacttcattctatcaaaggaatagaaatagatgacaagcctattctgatcaacatt

SEQ ID NO: 280621 - DNA, 569 bp, Cannabis indica
tctcttcaaacttgatttttgagaagaaagcttgatttttggcttgttttggagcttgatgcttaaggattaattgtgctaagctttgaattggaagttgaggtagtcttcataactttgattctcattttgcttgctgaattttagtgttgaaaatgcatgaatatgatggtaatgaagatgataattacatgttgcatgagatgatgttcttttgttaatttaagtgagttttgcttgaattctttgtgtgttggttgtttgagctctagatggagttctagggtttcttctttatcttgaattcaaagtatttgatgatgattgttgctggaaaaatagttgggatgcatggttttgaagctttagttcaagagcttggattttatgagttaaagtcatgatttgtgtttaattgtgggattttggatgcatgagatatatgtttttaatcctataatatttgctagctgctgtaagtggattaattgtgaatttggttgtgaaaagcaagcttgagttcatggaactcaagcttggtgctttaatggcactttttgatttttagt

SEQ ID NO: 280622 - DNA, 715 bp, Cannabis indica
cttgtattttacttcatcatcatcttaggattactatcccttactaagatccatgctcccatccataggatatcaaaagtttactttgaaaattatcgcaataataaagtatgcaacgaataatgtacttcaataaccttgattatcaatgattagtgtaattcaatacaatgaagcaaaatagccttgattattaagcattaatgacccattaattccataatccttctcaaaatagacaaagtcaactatattaattcattattaatgttccaatttctaaaatattacaaattactttattgtacttatcccaaaaaagcaatttttatacatttttatttatggtaaaactttattataatcaaatcaatctatattatgacataattattcctattttaatttccaaaagacaagttgtaaaacttccaaaaattgtctccttttaagttaccataaaaacatttataatgataccttcctatacgacatagattacaaaccaaattccataaaatttgacttcccaaatatatctgaacacaataaattcgcatttgacaattagtattcccacctccttttattacaatatcttcgtatttattattctttaaatgacttgattaattttaaataatgatattagaatctgaatactaaattccaccactttccctttttgctaataattcctaaaaatatgaaccaa

SEQ ID NO: 280623 - DNA, 638 bp, Cannabis indica
ttacatcaaagagttctataatagtccatggattttggtcacagaatactaaactcacattccatatattaacatacagtttgaatccattgacagaaaatggatattaaacacttgtgaaagttgaacagtattgtattctgaaaatagaaatataaaatttctatttgaaatctaaaatttaaagtcaaagacttaaatttataccaaatatacaatgagtaatgattctagattggaccaccactactaatctaactctaagtttaatttgcctaaagtaagcatatataagtaggagattctaagatcgaggattatatcatttcaggatagatgttgggattatagtcatctgtgtcattcaatttcataaaagaaaatagaatgacattataagcagatgatttataatccattcctccaatgatattctatgtaagcaaattcaaaatgaataagctaagaggaataggtcaaggataatttcgatttaaaataagaatccaacgatgtcctggtaggcgagagtataagttattcttatttgtataaacttcttgtttcatattgtaaatacttgtctaaggtgtcatctattgatgaatagctagatgttgcatttacaaatatttatc

SEQ ID NO: 280624 - DNA, 498 bp, Cannabis indica
gaccggaggtggtcggggtggtagaaatccccaaaacccccgtggatgcggtagaggccgcggtcgagtctcgagaggtggacaggagaatccacctcaggccccggttgattgggagcaaaggtttgctgagatgcaaactagaattgagcaataagaagaagagatccgacgactgaggcaacaggatgctcctgttgagccgcccccgcaaccgcctgctgcggttcctgtagcccctgcggtgccagctgagcaacatgttgctggtaatcgcatggagcctttatatgagaggtttagaaagcaagcacctacagtatttttgggagctccggatgttcttaaggctgaacagtggttggctgttatcgagagaatattgaatttcatgggtgtggtcggaaatgatagagtggcatgtgccacatttcaatttcaagaagatgccctgatttggtgggagatggtatccctcaccagggatgtgaccagaat

SEQ ID NO: 280625 - DNA, 650 bp, Cannabis indica
tgtaatagaagtttctatataaaattccgtaaaaatagcaaaaaaaactattttaaactgtaaaaataaaaatgtccctaaaatttattagttgtcaagcaatatagtactttacaaattacataaatagagtagcgagagacaaagagactcattaacactcaattttgtgataactcgtttattacattcttataataagttttctttttttttattaatttttgtgaagaaaaatactcaatgacgtcttcttctgtgagaggttcaagagtagttgtttgagagttgttcggttcggctcaatgacatcctctgttttagatttttattttcatttattaatttactattattagtttaattccaattaatatttttatggggttagaattataaggagttcattccataattaattttaatgctgtgatcgtgtttatatgttgaagctaatttagtttttccattagtcttgccttttgacatttcttagtcttttccttttagtttttttcgggttcgagtcttgtcttttggcatgggtggtgtagctcagaatcatcacggtgctatggtagaggcattctagaagggaaagattggatgtgttcaacccgaaattgctgagataataggcattaaagaag

SEQ ID NO: 280626 - DNA, 606 bp, Cannabis indica
aaaggtgtttatggtaataaaaatgatacgatttttaaggaaagtttacaaactgtttttctacataataaataaggtataatttgtttatactgaatttgatttttaagtatttttcaattcaataaaagttgaataaaatcaatatgtgtttaaagtgtaattttaagttttaaggatattaatacaattttggtttaatttaggttgaataaagactatagataccatgttttatgctataaataaaataataaataatttgacttattaaggattttgacatgttttagtctataaataagtaatatttttaagagataaaataaaataattagtatataatattttgaatatttaaggaataatgggtattaaaaggaaaattttatttatgtttgattttaaaagggtaaaagtaaggaatagggatcctatgaagattatgaagtagaatgctataatttagttgttactagccaaagggtaatccctttggctagttctagtattttttagggagatctagttgattagtgttggttgtttcttttcagtttgaatagtattctaattaaagttttatgctgttttttgatgtttttt

SEQ ID NO: 280627 - DNA, 603 bp, Cannabis indica
gattgccctcaactcagaaccaaggcaccaaaggctccagcgaaacccactttagcaagggtgttcgccattactcaggctgatgcagaagccagtccttcagtggtgacaggtcagctctcgatcaacaacttttacttctctccattgtttgactctggggctacacattcttatgtggcagccagaatctttagtaaattggatagaccacacgatagttacgaatcagggtttggaaccctattacttgacagagagttagttatctgcaaaaggtggattagatctatgcggatcagaattgacgatagggagttaagtgctgacctaatagaaatgagcttaacacatattgatatcatactgggaatggatttcttatccaaatattcggccagtattgactgtaagaggaagatggtaatcttccaaccagaaggagaagaaccgtttgtttttgtcggttcggttcagggatctcggatcccggtgatttcggccttattagctaaggaacaattgtatggcggatgtctagggtttttggccgtggtgttagacaccactcggccagactctgttcagccagaagacatcaag

SEQ ID NO: 280628 - DNA, 552 bp, Cannabis indica
ggaggtgaaaaatcactaaggaaggaactctctcatctaggttggttgaatagtcaagatgacattagtttgacaaagtgtcaagtggatgagatgagagcatcatattccttttatagtgtttcaactagggcttagggtttaattatatggattaaaaaagaataagatattgggcgaaatttcaactatggccgtacacataaagtaaaccaatctctagttacaattttgccactttttttcaaccacttattcttctttttaataataccatattttctaattcaatccaatagatgccaaaactatttatttaataattataattaaaattaattatcaaataaaattgtcgtttatgtaatttattaattagaacatacaaagtctcttaattaacaaattgatctcaaaacctcttttcttcacaattaagcccttacttagtgaaacttcataaataagacatagtctaattttagaattataattgattaattaaaattaattaactgagtgtggaagcagtattatctcaactagtgaggg

SEQ ID NO: 280629 - DNA, 373 bp, Cannabis indica
aattataattctataattagattatgtctagtttatgaattttcactaagcaagggcttaattgtgaagaatagagattctaggttttatttattaattggaagactttattatgtctaattaataaattgattaaatggtcattttatttgataattaattttaattattaaataattagttttggcatttaaatggttagaattggaaaagtggcattcttgagaaaataaaggaaaattgtcaaaagttgaaaaattctctagtggggcccaatagtatggccgaccactatagatggaatttacacttaatttttctattattttaatgcctaataattcctaacctaaacctaggtggttacctataa

SEQ ID NO: 280630 - DNA, 840 bp, Cannabis indica
cttttgatgatgccatggttcgcgcagaaatcagtgaaagattgactgtcgaactgcttcccgttgtctgaaactattttgtacggtagtctgaaccggcatatgatgttcttcactataaagtcttgaaccttctttgatgtgatagttgcgagtggttcggcttcagtccactttgtaaagtagtcgactgctactaccgcgtactgcactccgcctttacctttaggtaattgcccgattaggtcaattccccagatggcaaagggccacggactttgcatttgcgtcagctcgttgggcggagctcttggtatctttgaaaatctctggcatttgtcgcacttcttgacgtaagtttttgaatcttcgatcatcatcggccagaagtagccttgccttagaattttctttgataagctctgttcggctgcatgtttctgcagaattcgtcgtgaacttcatatagaagccgtgcagcttcatttggtgtgacgcacctgagtaatggcattgagaatcctattctgtacatgatcccgtctacgatgatgtaccgtgctgcctttcttctcattttccaagcttcatttcggttatctgggagttccccagagttgagataggctgctattggcgtcatccagttcagagatgtatcgatcatttcaatttcttccgtgccggtgatgctaggctcttcaagaaactggatcaggaccaggttcgccttgtcacttatattgctgctcgccaaacgggcttgcgcatctgcagttgtattttcctctcttggaatctgcttgaggctatagcttttgaactgtgcgagcagatcat

SEQ ID NO: 280631 - DNA, 691 bp, Cannabis indica
tataaaatttcaaaattatataacatataattaaataaatttttgaaaaatatctaatttaagttgttctaaaatacaaaattttcaacttaaataattttccaaaatttaattaaatataaaattaagtatcttgaaccttaatttgaaaaatattcctatttaagttgatctaaaattaacaaattttcaagttaaaaaatattttaaagaatatctaaataactaattttctagaagattctacttaattattaatttcaaaatattctaatttaagttgatctaaaattcgtttgaaaaactaattttcaacttaaatatattttctttgaaaattcaaataattatgtatacagaataatctaattagttataacttcttttatttaattaaatacagaaaaatacatctagtttatcttgaatttaaatttcattaaactaagtgtgtttttcttaaattaatttcaaaataatctgatgaaaaattaatttcatatatttcaaaattaattatgttgctaataaattttattaggttaaactagtttaattaacctattacagttattcaaatcagacaaatgggtcttaacaattggggttgttcatgtgagagagggctgggttcagtatgtcgtacccattactaatggcccctaactctcttttgggttttatgccctaa

SEQ ID NO: 280632 - DNA, 534 bp, Cannabis indica
cccattggtcatagagacccccatcgcgaataaagtggtggccagagtcttaattgacaagggaagttctgtgaacctactcttcacggaagccttcaccgcgataggcttgacagaccgggacctctcacccagtgggtcccagctcacagggtttaatagaacaacacttatcccaatgggaaaagtaaggttcccagtcaccttgtgcccggacaccccctagagcacatttacatactgcactttcgtagtggtggactgcccgacaacctacaacgcgatcctcggccgaccggccttggtagactttggcgccgtcacatcgatccggcacttgtgcctgaagttccctactcgggaggccggaatcggaacagtgaggggataccagggggaagcaagacaatgttacaatgtcgcaacccacctgcccgtgctaatggtccgggagtcagctgagccagaagtggctgaagaggatgagttagacccccgtgtggggtccgaaagaattgtagaaccaatggagga

SEQ ID NO: 280633 - DNA, 600 bp, Cannabis indica
tttgtgtttgggtttgttttttggatgttagatatgttattttatgttgagttaagttggttgtggtggctggttgttgtgttagccaagctttgagctttgaagcttaaacttggagcttccatggtggattttgattatgtgtgtgtagggttgttttgttgctttgaaaatgttctttaggttgtatagaacaggtctagaaagtttggagtggattggggttgatttggtcgagttatgaatttttgagtgattcctgcactgaactggaattccggttcagagaggcctgtaggaaccagaattccggttggcttccaggaatttttttcccagaaccagaattctagtggggaaccggtctaccggttggggaaaattttggaaccctagtttttcccatttttgtgttatttagggtatttccatgttatttatcgatagggaaacttttagtttcaagtttaagtcctcgggaagtgatttagcgtgtcgcttatcagtgttgtgattgatgtgatttaggagcctgtaattcgccgagcagattgttccactcaggttgattggcacacctgaattcggaatcgaggtaag

SEQ ID NO: 280634 - DNA, 628 bp, Cannabis indica
caagtttagtggcttcttgttgttgttgttgatttatgtttgctgaagctaaattatgtttttatagagtgttttgatcagatttttatagctagttaattggatgagcaagctttgagtatttgaactcaagcttgactcatcaatggtgaattttgattctaagctttgaatgttgttttgttgcttgaaaaatgtttattggggtctaatatgcaggtctggaaagtttggttgagtttggaaacgttgttattaggggtttgatttttgttagatttctgggtaaaaccggctaaccggttttacactgcttgtaaaacccgttactcgaattttgcagtagggtgtgaaactggtttttctcaacttgtcgttttgtgctagttttgggttttcaggcagtttgttctctgctagtttgaggtatttttgtattaagtttcagtaggtcaagttgggttttaaaacctttgtcccgattgtgatttagtgtgtcacttatcgggttgtgatttttacagtttaggagcctgtaattcgccaagcagatcgttccactcaggttgaccggcacacctgaattcgcaattgaggtaagatttgtataatagtatgcatatgtatt

SEQ ID NO: 280635 - DNA, 513 bp, Cannabis indica
caacataaggtgttcatgctcaccttaacaaagcatggatgattgatcacaatatgcgaaagtactagattgatcggctacgagatcagcataaccattgatgcaacaacttggttatatggaacaatggagtggacacggaagtatggaggattgatcagaatatgcaaaagtatgcactgtaggggctttcattgtccgaatggacatggaaggttctctagaattcgccgtctctactagcttcgtggaagaacctatccttaactacccactggttttggatataaaatcgtttaggtgttggtagatattgagcgcaacataaggtgttcatgctcaccttaacaaagcatggaagattaatcacaatatgcgaaagaactagattgatcggctacgagatgagcataaccattgatgcaacaacttggttatatggaacaatggagtggacacggaaatatggaggattgatcagaatatgcaaaaatatactttgtaggggctttc

SEQ ID NO: 280636 - DNA, 618 bp, Cannabis indica
aaaattaaaagaagattccaagcttcatcttcaatcttggacaatctccacccttctatccaaccatccaactcaacttgctaggatagcaatccaagtttaagcagctggagctgaaataagaagaaaacaaacatggttagaagatccagaattaataacccaagtggataataattctctaaaacacatgattttatagcaaagatagaaataccttgtttctttgccagaaacttagggcattggggtttctagtggcccttttcattgcaatagaagcattttccttttggctttgcctcggaattagcagtctttttctttttaactattttcacagctttaacaggcttcttgccattcttccaattcttcttgttactgggtcttgaagcagaggtaatgtttgcctcatccttggtgttgtgaaaagttgtgtacgcaagtgcacgcaatcgttgacaagtaataaagtgataaatcgagtatcgtctccacagggattgaaaattggaaattaattgataaaactaattactcacaaattgatttaaacaaaataaaataaagtgttgagaatatataaaaattaacaaacacaaactatgagaaaaa

SEQ ID NO: 280637 - DNA, 558 bp, Cannabis indica
caagattcctgtcaaaggcatttcgtttctccttgagatgtttcctgtacgctgacaacgatcacatgccttcacaaaagtactagcatctttgaaaagtgttggccaaaagaatccgctttgcaacaccttggcagctgttctagttccactgaagtgtcccccacatggtaaagcatgacagtgattaagaatagagtacatctcctcttcaggcacacaccttcttattatctgatctgcacagtgcttgtagaggattggctcttcccaatagtaatgtttcacctcagaaaagaatttctttagttgttggcgagatagctcaggaggagtgatattggcagccaagtagttaacataatcagcataccatggtaccatcagactttccctcacactaaagagttgttcatcgggaaattgttcatttatttgtacctctttcgtattctgactttcttccagctctagtcttgacaagtgatctgccaccaagttctcagtacccttcttgtcttttatgtctagatcaaattcttgcaaaagaagaaccca

SEQ ID NO: 280638 - DNA, 550 bp, Cannabis indica
taatttcacaatcaatgatattttcctatattagaaataataattagtatagaaataactatctagaaaatatctcaattctactaagtatcttttcaagatttggaaaatatctgatttaagttattatagaaagaatctataatttacaaacttaaaattttccaaacaaaatttaattaaatatcaaaattaggtggtaactacctaatttaaagatattccctttttaagtttaaaaccaacttaaaataatatcttttaagaatcttcaataactaattcctagaattcctcagcttaatattataatcaaaatatattcaaatttaagttaaaagggaaaattagtaataactaattcataacttaaataagaatatttaatgaaataataaaagtaagtttcagaaagaatctagttagttaaaattctttatttaattaaatacaagaaaaatacaaatagtttatctagaaatgaaattcattaaactatgtttttcttaaattaatttcgaagaaattaattatgttgctattcaatttt

SEQ ID NO: 280639 - DNA, 605 bp, Cannabis indica
cttagcatcacccaagtagtcaatgttggcctgaggattagtcttccaaaagtcaaagaagagctcaagaccggttgtctccaaggcattgaccttctctttcagctttgtcacctcggccgtaagctcctgctccttagcttccttctcctccttcacccgatgaagaactgttcgaagagaagtcctctcattctgaagattgttcacttcagcaaataaggtctcgatggtctcctcaagacgggcagaaacctcgagatccttagtcagctcaattatcttcttctaggcggcaaacagcttctttttggcttcacctaactccaaccgaacaacttcgagttttgccatggcgtcctcagcatccttcctgaccaagtccgcctccgcccttatagtgtcagacagagccgtgttcctggaagcggcagacttagcccgggagtaagtgtacgccaacttcagaccgacctggacgaagaaaaaactttagcatttgagctaagtatagaagattaaagcgaagtatcaagaaagacttacccctggtgaactccttcaagactccgcccaccagcaattccaaagaagagtcattatca

SEQ ID NO: 280640 - DNA, 579 bp, Cannabis indica
ccagcattaacttgatgcctttgcagtgtttaaaagattgcagttgggtgaagcaaagccaaccacagtaactcgccaattggcggatcgatcactagctcaccctagaggagtcattgaggatgtattagttaaagttgataagttcatctttccagctgacttcattgttctggacatggaagaagatagcaatgtcccaatcattcttaggagaccattcttggcaactggccaagccttgatcgatgttcagaagggtgaattaaagcggagagtccaaggagaagaagtggtctttaatgtgctaaaggctatgacatacccaaaggcaagtgatagctgtttcttcattgatttgattgataaaattgtgagtgagaaaaagctgctagatgatcctctcgaactgagattaactcaagatgaattgacggaacaagagggacaagatgtcatgggttatgtgaagtggcttgactcctatgggcccttgaaaagaaggtattatgaggaatcgggagcagttccaaaagagctgatgccatctactgaaaagcctccagaacttgaattgaa

SEQ ID NO: 280641 - DNA, 625 bp, Cannabis indica
tttttgcctcgtagtatgttgctagaatattatttccttcggaaatgcaaactttaaaagcttcaataattcttcaaagatgttattaggaatttttcccctaacttttaaatgcaatagctttgctaaaaagttaagagatgaaatccaatcacaaccgggatacaattcagcttcaatttcctcaaataagtcatcaaattgtgggtttgtggttggttgttcatcttctccttgtggatcctcagttgtcgagggaaagaagtcttctaaaataggaatcatttcatcctctgattcaacatcggcaactgctacatcaacgacggcatcctcaggctccccgtgataaatccacttctcatatccttgcataaaacctcgatcaaatacgtgtgctctaaccctatctattttttcaaacctactatttatacatctcacacaaggacatcgtattcgtccatcacaatccttatgttctgatgccattgctaaaaaggcttgtagaccattccaaaattcatggcaaccacgatttctgattttggtccaagacttatcgattgtcgccatctacaatttagacgacaaatgaagtattaaatatttgaatgatttgtaa

SEQ ID NO: 280642 - DNA, 518 bp, Cannabis indica
cctttttttcctatctttccgaggtcgacaatgtacgcctagttgcttctttgtttgagagcttaacgcttcattgtaacaatcacagttcttatgaacagagaatttctaaaggctcatttgaatgtttagcttcagactcgtcaagattgtaagtctcactgaaaagatatctgaagttaactggtggaagttacaggaatgagccttcctatagcgagataggcacttcgcttattgagtccactcgaatgttatacttagtttgggcattttacaccaagtgttttcacagtcgatatgcgttgttttctccttcccagatgtaacgaggttgatgccttgctttatacattcaatgacatatggtttttctttaatacactaaataacaatttgtatatcttttcctcgcattaaaccttacagtcagcgagttgcaagtatactcagctacttacgcaattaatgagttattccattaaaagtgattttattgatctatattccctttatct

SEQ ID NO: 280643 - DNA, 932 bp, Cannabis indica
aaaaaaatcgtagaaccaatggaggacgtcgaggaggtatcagtgtgtgacctcgactccaccaaggtactccggctaggaaagagcctagacccggaggaaaaggaaaaaataataaagacactgaagggcgccattgacgtttttgcatggtgccaagaggacatgactggcataagtccccacgtcatcacccatgtcctcaacgtcaacccggacatgccgccggtccaacaaaagcgacgacccctcgattcagtgaaggtcgaggccttagagaaagaggtggataagcttttaacaaacggcatgatccgcgacgtttactacccggaatggctagccaatccggtcctggtgccgaagcctaacggaacctggcgagtttgtatagacttcactgatctaaacaaggcttgtccaaaggactgtttccctctgcccaggatcgaccagatggtagacgccacttccggattcaagctactgtccttcatggacgcgtacgccggttacaaccaaataaagatgcacacggcagatcaagagtgcactagcttcaggaccgataagggggtatactgctacctagtcatgcctttcggattgaagaacgctggtgcaacctatcaaagaatggtcaaccggatgttcaaaggcctcctggggcgaaacatggaggtgtacgtagacgacatgttagtcaagtctaaagcgtgcaatagccatgcggacgacttagaagaatgtttcgaggtagtccggagatacggaatgaagctcaacccaaagaaatgcacctttggggtcaaatcaggaaagttcctgggcttcatcgtcagccagagagggattgaggcaaacccagagaaaattcaagctctcctgagcatgccatcccccaagaagcacaaagacgtgcagagcctaac

SEQ ID NO: 280644 - DNA, 421 bp, Cannabis indica
gacaagttctttagcagcttcggctgcagctatgtattcagcttccatagttgagtccgatatcgcggtttgtttagcacttcctccaaaccactgctccacccccaaggagtaaacaccatcccagatgtagatttcctgtcttcaagacatccctggaaatctgagtctgtatagcctaagggattcaaagcaccacccttgtagactaatacataatctcttgtactctttaagtatttcaaaatatacttaacagcattccaatgtacccttcctggatttgactgatacctgctcacgattccaactgcatagcagatgtcaggtctagtgcatagcatagcatacattagacttccaactgcagaagcataaggaatttttgccatgtcttctatctcttgaggatcagtaggac

SEQ ID NO: 280645 - DNA, 639 bp, Cannabis indica
ttgacaagtgagcaattaagttaggacatatgtggaaatgcaaattaggattggcgttagatgtatgattgggttgcacaacaagaataggctaaacggctcaaacttgggtgactagggaaaaattgattttatagggaaggttagaaaggctcaaacgtccaaagatggcctaaatcatttctaagtcataaagctcgctaggatttcgcctcaaggattacactagctaattctagatgcttaaactctctcaaagtgttagctattctaaaaactcaaggtatggtgggataacacaagcacacaattgttgaaagcattcctcataggctagcatttagacaaaaataacacttaaaattagcattttcaacacacaaaccaaggcactccacaaatggaggaaaatggatacttttcatcatcgagcgctaccctaaaccaagctgaaaatgcaagcagtatttttctcatttgcaagctaaaacaaaacgtaacaaacatgacaaaacaacatgactaacacatataatgcttactacacacaattctaaattcaacaacaacagtagacacataacaaacacaaacagtagcaacacttaaactagcacacttatttcaacaacacaacac

SEQ ID NO: 280646 - DNA, 567 bp, Cannabis indica
ttctgtttcccaggtccctatcctgattttgggtccaggtcgcggttattatgtgggtttgggtcccggtctaggttcacgttcgagtccttggttctgatccttgtctggattcgagtttagatccgggtcctggtctatttttgggtctgattataggtgtgggtgtttgagtttgggttcgagtatgtgtccgggtttgtgtccaggtctggacctcgatatgggtctaggttcgagtccaagccaagttcgggtcccgagtgcgggttcaagtttgggtctgggtcatgatctcggtccagatctaggtccagcatttggatcccagtctgggtcttggtccgagtccaggttcgtatctggatccctatctaggtccaagtctgtgtttgggatcgggtcctagatttaggtccaggtccgcgtctcagttccggtctgggtacacagccgtgtcggggcccgagttcttgtctcaatttgggtatgaggctaggtttgtgttcggttataggtctgggtccgggtccgggtcctggtcacggtcctagtcttgttctaggg

SEQ ID NO: 280647 - DNA, 495 bp, Cannabis indica
aatcaaaagggggagaaatattgaaatttattaagtatatgattaagggggagctttgtcatgctaagaaaaggtaacaataaatgcaaaggtaaaacggtataaattaatatatgcatatattaagggggagctaaactcaacatgtttcattttactttttcttttctttaaaataatcaaatattttgatatcatcaaaaagggggagaatgttgaccaaaagtcaatcactcacttattttgatgataaacaaatatttgattattatttgttactaatcttttcttaaccattttgcaagcaaattcacaaagtatcaatatttgctcggtaaagtcaaacataatcaaagaagtggattcaacaagtatatcaattacttcatacttcataagatcaaaagttttatcaagagatcaagaattcaagaccctatccaaaagaggacttcaaaagctaaaagtcaaaagtcaacccgaaagtcaaagtca

SEQ ID NO: 280648 - DNA, 658 bp, Cannabis indica
acattttatcttattagacatttttttattaaaattaattttggcaaaaataacatgaaatttgaaaaattggttagtttaggtttgatagaaattttaaggtttcaaaccattaaatttttcaaacttaattattttattattttaataattagaaatatactaaccataaaaaaatatattgtttttcaaatagtttattttataatgcttaaatttattaaattataagactaagaatataatattaggtatatctaaatttaaaattcaagatattatattatattatcttattagaaatttaaataatttaaatttttgaataaacttgaaatttgaaaaattggttagatatttgaatataagttagaatttaggatgtttaggaatttgttaggttttgaattttttcaaatattgtctaacaacctaaatttaaattctagttaagatatatattttttaaaatagagaaattttagcctactttccagatttttcagattatctgttacttgtttgtttgtatgtttgattatttaattatatattcaaattttttttacaaacctaatatttatttgatctaaattgctatgatttacttgttgacaaatccaaggatctgattttaataatagttcaattgtcaata

SEQ ID NO: 280649 - DNA, 760 bp, Cannabis indica
tgaggactcgtaccaacgttaaacaattgggcaccattacgaaggacactcctggacataccatctttgtgttgatcctttaaatcattttcaaaagtagtagccaaaggagtagcgcacttactagccttttcgagacgagaagcaaaccaattttgaactgtgaacctgatgaagtcaaccaaaatagttactggatattttcagaattcttctgtcaccttgttgaagctttcggcagcgttgcttgtcattatgttgtaccgatcgcctagacaataaggacgagcccacttttcaaaccctatttgctcaacgtatgtagcaatggcagggtccatctgtttcaacacctcaaaatgtctatcacattccgtcttgttccatgcgtaagctacaagccatatttgctggttacatacatcagtcttaaacttgtgaacgacattcatagtaatatgcttgaagcatgcacagtggcacgcttctgggaaaacaacctcaacaacatgttcaatgctttgatgcctatctgatatgatcataagatttttaacctcaccaatggcttcctttaacttccgcaagaaatacttccaagagtcatgattctcactgtcaacaatatatatttatagtaaatttaaatttgagttgcaaattaatttaaattagtataacttaaattaagtaattttcttaatatttattgaaaaattaatactaagatggaaataattcattttattttcttaaccat

SEQ ID NO: 280650 - DNA, 971 bp, Cannabis indica
tcacgaacaatggtatccattatgtcgaagaggagaatgggaagtttttcattgttaaaatctgggaaagaagctctggacctgttcatctcggagtgtggggccttgagatccattcttgttgatgtcgagtgtaacaaagagggtcttcgaggaaaacaaacagagggtaggctcaacaacagaaccattttcaaagagaactacaaaatcattcacttttaatggatgtttgggggggactccatgggtgcgtagcattgtctccgcttgcgggtgagctcggtgcaatcagggaagaaatcaaggaagctcgacgagttcacctgagaaactccaaggtgttgtaagactgccaaacgggagtgaagatggtgagtgcagacaatcaagcttttggtgagtttgagaacctggttttggatattagggaagagatgaaagatagattttgtaatggttttatcatttatgtttagtgattgcaactgggttgctcatttcttagcatagcaagctttcagactcttctgggagagaggatttcctctcgttgcttcttcacccatttgtattgaccccttttgttttctacctttctctcttcttttttttttttaaaaaaaaaaaaaaaccaagcaattttgttttgtaacagcattttagttatactagttggagtagcacatgcgttgcacgtgctcatcttactaaattaataatatttagttttagtggttaaaaaataataatatttagtggtgaagaaatttataaagaaattataacatattaaaaggttcaggctttagaagaaatataagctcacctttatataaatactagtgaaataatacgtgctccgcacgtgaactaatcacaactgggtaaatactattttggactttatgttttgtaaaagttattaattggaccttctgttttattaaatgataaaatggaccctgtat

SEQ ID NO: 280651 - DNA, 651 bp, Cannabis indica
tgtacatattgacctcgccggcctgcgtgccgagttgccaggagttgttttagactggttgtatctgctgtgtattttgattttatgtttaaatggttgtcgtatatatttctttagcaaaactttttacaacagggattcccggaacacactttttatgccgttataatgtccatttttagtgttttattttagtcaagtttttaatattatcacggtttttaataattaattattctattagtattaaactagtttataaaatcacacacgtggcgtccctatagattagggcgttacagttatggacgaagatggtggtctaggggttatggacgacggcaagcagtttctggatctaatttatttttaactttttagtttttttttttgtggttccaaagtgtgttcatacccatttccattccatcatttgtatttgttaatgtttgaatcatagaattctatatttcaattcaaaatatgttgttaatttataatttttctgcatttgtgtaatttttttctgttattttttataggttttttttctatatttgaataatttaagtaaagattttgtgtaaatttatggaatttgttttctattttaatttttgggtaaattataaattataattataattatgt

SEQ ID NO: 280652 - DNA, 707 bp, Cannabis indica
aaccgtaatcggacaaggacacggactccaaatcagacctagacctgaattgggagctggacccgtatcccaacccaaacctagactcgagacccgaacccgaacctgaacttagacccaacatggaactagggtcgggacctaaaaccgcaccccagtctcgatctcgaacccaaactcagaaatgtaacctgggacctgaacaagaacaagaccaagacccgagacagtgatccagatttttaactccatattcaagcaacagggcctagaacagaccagtagtcggtgtctaaatctggaactcagacttggaccagaacccagacgaagagcaaaaccggaacccagactaagacctggtacccaaaattagaacctgaacaagaatcgccgaaccaagaacatagaacaagattaggaccgtgagaaggacccggacccagacctagaaccaaacacaaaatagctttagaccgaaactgagactggaacccgggccccgaccacggtcgtgtacccagaccggaactgagacccggacctcgacctaaatctgggacacgatctgaaacatagacttggacctagatagggatccggattcgaacctggactcagacaaggatccagattgggatcaaaatgctggaccaagatctggacagagatcctgacccagacacaaacttggatcgcactcgaga

SEQ ID NO: 280653 - DNA, 734 bp, Cannabis indica
atgtaattattgaaccaaaatttatatatacatatattatatttttatttttttatatatataatattaattttaagttttttcggggccttcgaaattgtgaggcctagggccaaggccccagctgccccaccctctggccggccatgtattaatccgtctagtaaccgttaatagttaggtgatttggtcaataactctcttattactatgtaaaaaatattttatttagaacataaaatcttgattttttttttttttaaaaaaaataaagtgcgtatatgaatacgagtgtaaatgtaatgctcttttttttttttaaaaaaaaaaattacctatagttttattatttagttagtaactacatataaatagttagtaaattgaaaaaaaaaaaaaaagagaaaaaaaaatgagtgccactacaataattagtatatgagaaaaaacaatattaatattcaataataataataataataataataataataataataataataataataataataataataaaagttttgtttgttttgtatgaaaggaagaaagaaaaaaaaaagttttgtttgttttatacttaagggaaggaaaaggaaaagagagttgttaatctatcttaaacacaaagcaagcaatagtcagactttgacctactcaaattatgaagccaacaaccgtataatcaaataaatttaagaaaaaagaaacaactataatagttggat

SEQ ID NO: 280654 - DNA, 679 bp, Cannabis indica
aaagaaatatggggagcccaaaaaaactgctcgagattgttatcaaaactcgctaaaagagaaatcggcaacattatagcaactacagcagtctagtctgacctttgcaccggatgaacccagtatggaagacctagatgatgtgtgcattagcaaggagttctcagaccataaagtccagattggaacaaagcttacacctgagtttcgagccaggctgatcaaattcttaatcaaacgccatcactgctttgcatggtcccatgaggacatgacagatattgattctaacattattgttcacaagttgcaggttgaccctgattacccaccggtcaagaaaaaaagacgtaaatttgcacccgatcgcaacaaggtgataaatgaggagatacaaaaactaatcgatgtgggataagtcagaggttgactatcctgactggttagcaaacgtagtagttgtgaagaagaagaatggaaaatggagggtatgtatcgactttactgatctcaacaaggcatgtccgaaggattcgtttccacttcctcacattgacatgatggtagacgcaacagctagacatggattgttgagtttcatggatgctttctctggttataaccaaatcttaatgcatcccaatgatcaagaaaaaacatcattcataactgagcgagg

SEQ ID NO: 280655 - DNA, 608 bp, Cannabis indica
atatgtactaaattaataaatatattaaatggcaatattattcaataattatttttagttattaaataattagaattggcatttaaatggttaaattagaaaattggcatttttgagaaaatgggaatagaaaaataacaaaatggggaagttgcaaagtgaggcccaatttcctattctggccgcccactatgcataggcctttaccattttatcttttcattattttaatgccacacaactctaacctaaacctagagggaattctataaatagaaagtgttggcttcaggaaactcataactttgcacattgtttccttcagagaaaagccaagccgccccttctctctcttttccactcttctaattttgaaattcccttgagtgatagagtagtgcccacacacatcaagtggtacctcaatcatagtatgtaagactatggaaaatcagcatcaaagaaggagaagaagagatccagattcagatcttgattatgctctgctacagaaaggaatcaagggccagagatctgaatggaaggagtcattatattccgctgcacccaatgtaaggtttccttaaactcttatgtgtttatttcat

SEQ ID NO: 280656 - DNA, 1295 bp, Cannabis indica
ggcactacttcccttaaaaaaaaaagtaaagaaacaaaaaaaagaaaaaaaaaaaaaactaaaaaactaagactctacttgattcatcaatatttggcaagccgaaaagcattcttagatggatccaaacttcaaactttgcgagaataaattatgtgccccatgagcttcctttctaggattaattttaaacaatacgttgttcttgtagttttgcaaattcaaaattttagaagttacatacatatcacaacgtgacttttatctcctagctaaaagatgaaaccaactaaactctatgactaatctatcattatcatgataatctcaaaagacaacagcataagaattaaaaaaaaaatacaaattttattggtttttatactatctgataaaaaatatataaaaaaaaatatatttaaaaaaaaatcaagaaaaagttaaaaaaatatatataaaaaaaaaaaacataagtaggagtaactaattatcataagaataactagttactttatactatttttcccatttttttatttttgttctaaattttttccataaaataattttatcgagaaaaaactacatttttgtaaacttacaacttaaaaaccataaaaaatgaaaattcaaaaaaaaaaaaaaaaattaacacaacatctttgtttcatgtgttagtgtgaaaaagactaaaatgtgaataagttttcacaaataagctaccttaattttggaaggtgagttctatttgtcaactttgaataatgtatttttgtgatttagaaaattcagtatatatagcttaagcaagtacaacctataaaagcttttacaaaaagcatgaattgattattaagcaacccatattttttctttcttgacattagacttcctgtctaatctaaaactataaggacataaaaacaccataacaattattatataagtactcgaatctcagaccaagtttgacatttttggtgtatttgaaagtaattgtagaattaccaaacactataattacaaatattgtaaaatacaatgtgtatttggctgtaaactgtgattacatataaattcttattttcatattttataaataaatattaattatatagaaaaataacattaattatctaaaaatagtaatagttttgtacttagactcaattctcatgaaaatcataaaattagaaataattgacaccttcaattatccccaattacaaacacatcaaatctggtaactactccgaattaccactcaattccaactaaacacttactttccaaac

SEQ ID NO: 280657 - DNA, 570 bp, Cannabis indica
caaaacatttggtaaaaataaaagaatcacaattgcacgatgattataaaaagagaatgaaattcattaaagataacaaaagcatataatatcaggattaaaagctgcccggccagcctgttgtctgaaaaatgaaaaataattctaagtttaaagaccgcttggccgatcatgatgtcttagaaaaggctttatggtcgaataagatatataaaaaataaaaagatagaaggagaagtgtttaaacagctggaatcttaggctcattgttcggctcttctgggccagtagaagctggaggatctgttgtttgaacgggaggtacaacagcattttggccagaggtagaagtagccacctcagtttcaccatagtctacttgggaagtgcagaactcgaggtacatgtccttagcatcacccaagtagtcaaagttggcctgaggattagccttccaaaagtcataaaagagctcaagaccggcttgttgggttttatgtcctaaataaaactcatttcaatataaccagatttacttattaatatagatcagaaataacatttaatgtt

SEQ ID NO: 280658 - DNA, 516 bp, Cannabis indica
agatactccattccgattacaaataagaggggagacattggatctccttgtctcagccctctacttgttccaaagaatccatgcgtagatccattgaacatgatagagaaacgaggagttctcacacaattcataaccaatctcacaaaggcctgagggaattgaagagctagcagcatctcctccacaaaatcccattcaatagtatcatatgctttttgtaaatcaagttttatcaagcaattaggcttgcctgatttccttccataatgtctcaccaggtcttgacatatcatgatgttgtgccctataaacctcccttgaatgaaacctccttggttttgggcaaccaaattaggaagaatgcatttgattctagaacacaatagctttgttgcaatcttataaataacattgcaacaagatattggcctaaagtctttaactgtagtagggcatttggttttaggaaccattgtcagaatggtagtatttatctctttgagaattctccct

SEQ ID NO: 280659 - DNA, 1058 bp, Cannabis indica
ctttcagttggccactgctgattgtttagggccatctcctccaacagatcataagcctcattcgcactctttctcataaatgctccaccagctgctgcatctataagagttctagtgttaccaaccaacccgttgtagaagttgtgaaccagcatccacttctctataccatgatgagggcactttctgatgagatccttaaacctctcccaagactcatggagagattcattatcttgctgacagaagttgttgatttctcctcgcaacttggcagactttgctggaggaaagaactttgacagaaattttgttgccaagtcattccaggtggcaatggagttgggtggcaaggaattcagccaactcttggctctttctctaagtgagaatggaaacagtctcagacgaatggcatcatcactaactccattgactttgaaagtctcacatagttccatgaagttcgatagatgaagattggggtcttagaagggagtccaccaaactggactgaggactgcaccatttgaagtatggcaggcttgatttcaaagttgttagcatccactgccggtggcctgatacatgactgaacccccgtaagagttgggaggatataatctctcaagctacgaccattagcttgatcttcaacggcacctccattattaccattgtttcctccattatttgcaacattggcattgtcaggcatgatttttggtgtttcagcaggtgttgaaactctctcttgccttttgttcctcttgtttctcctacaagttttctcgatttcagggtcaacgggtaatacaactgcttgcccttggcggtgcatgcactcaagatacctgaaatagaaaaaagcagttttgcaagagacaggttagaaattcagcaaaagaaatataccaaagtagaagttagtataattttgtgcaatattaatctttatacaattccccggcaacggagccaaaaacttgttacgaaaattatgaacactacgcaagtatacgcagtcgagtagtagctcacgcaagtgaggtcaaacc

SEQ ID NO: 280660 - DNA, 613 bp, Cannabis indica
aatcacgtaatacgcctatgctagttagggtgttacaataacccttatgcaaagtgtaactacacttcatcgctgattatcacatcaatgtaaatccaatgcactgatgaaacaggaactttttctttcgaagcatataatcacaatcacattccactgtgttgacatcaatgtaattgtaaatgactgtatattctggacttaacagattttgtatatatattaaaccataaacatgaaaacaacatgtaaatataaatgacttctaatcttttattgataacaaatcagattagattgtaatgggttttatttagggcataaaatcccaacaaactcccacttgcactatcataaaacaagttttgcatttcaatcaatctattgtcttgatctttagatcaactgtagtatatttgactcaacccaaatttctggaaccatgttcataaaacattatgcaacatcctttactatatgctattactcatcaagggatactgaaatccttactgcttattaagtacatctgaataaacagaagacatatctctcatactttaaagaatgaaactagagataatacagtgtagaattttcttcagttgaataa

SEQ ID NO: 280661 - DNA, 524 bp, Cannabis indica
aaacccaacacaatcatgctccttaccatatctttaagagtcctatttcgtctctcagcaacaccattcatgctaggtgatcctagcatggtgtactgtgggacaataccacattcctctaggaatttagcaaatggtcctggacgttgtcacctaagccaccgtagtactcaccaccacgatcagatttgacattgttaatctttttgttgagttgattctcaacttcagctttgtaagctttgaacacgtccacagactgagatttttcatgaatgagatataggtacccataacgtgagtaatcgtctatgaatgatataaaatattgttgaccattccaagatgccatagggaatggcccacaaatatctgtgtgaatcaattctaagacttctgaagctctattggcacctaatctcttagttttggtatgttttctcttgatacaatctacacaaatattgaaatctgtgaagtcaagagactctaaaatttcaccagacgcaagacgctcaattcta

SEQ ID NO: 280662 - DNA, 674 bp, Cannabis indica
ttctaaacggtcggttacggtttcgtaaataaaaccgtaaccgaccggtcggttataaaattgtaaaaatcgacgataactgaccgattttcacccctaacgccattaatggccacattaagcattctccaaagccagttagcaatcctctgatgaatattagacttcttgatccactatatagtatatacaacttatctatttcattttcaagagctctcctcagaaatgtatgccaaagtgaaacttttacctcttaaaccaaccattaattccttgaacttgaagtactcaaaatgaagccaaagaatctaaggttggtgccagaagtcaatggactcgccactaagtgatatatccttaaaggagaatgtttttaaattccataatacttttccacaaaaaagaatcaccattctttatagtgacagaccaaaaactttcatgaatacagtacttgcttaagaaacaggacaccaaaggccagtgacggacccagaatttttgatcagtgggggcttaattattataaaaatatttattatttattttacattaaaattataattattttatgggggcttttactattttgttgtataattatttaattaaatagaagatatttaattttttttaacactaattttttttagtgggggctatagccccca

SEQ ID NO: 280663 - DNA, 868 bp, Cannabis indica
tattggaagattagatatgagaaataaagggttacttatgaaatggctttggcgatacccattagaatcaagctcactttggcataaagtgatcaaaagccgttatgggagagcagaaaattgttgggatactaaatcaggtcatagattatctccaagaggtccttggaaggatatttcagatctctatggtgaatttttggaattggtaaaattcaaagtgggtaatggtacaataattcggttttgggaagatatctggattggagatacaacattaaagagtcgtttcccagacctgtcagtggtatcaaagacggaaaatgcgagtataaaagatcttgttgctattgaaggagaggtaggaaattgtgttgcaagctcgaatttcaagtttagaaggaacttgatgaagagggaaatgcctaatcttatagctctactgcaactgttggaacatattagactgctcaacatctcagaggatatcagattatggaaaccagatcctggtgggaattttctcttgtaagtccgcattcttctggtttacttcagaccataatcttggcgagttattctggacgaagactttaagtggaaaagcaggtgtcctggttaaagtgaaagtctttggatggctggtggcattaggaaaaattaatgtgcatcctatgatgacaaaaaaggcgaccatttatctgtttgtccccgggatggtgtgtttgttgtaagaaaagtagtgaagaagtggcacatttgttcttggggtgctgtcttgcccaaagactttggataaagttgttgaatgtctttgagatccaatgggtacttcccggatcagtccctctaatgattgtgagcaagg

SEQ ID NO: 280664 - DNA, 683 bp, Cannabis indica
tagagttattgaaagttttcatagccatgtgatatatatatgtttcggggtttggtaccctgttacctttgggagaccttatagtatccactaggtggatttggtctttgtccttctggattgacagttgtgaattgaccgtcaattgaattgcaactgtctgattttgacataatcttgggaatggattttttgtctaagtatggggcaacgattgactgcaaacggaagatggtggtgtttgagcccgatagtgctaacccagcagtgtttgtgggtaaggttcagggggcacgcttaccaagaataacattgttgaaagctaaggacctgatgagcagaggttgtctgggattcatagtcactacagtggataccaggcaacttgtgacatcagggcctaagaatacaagattggtatgcgagttccttgatgtctttccggaagatttaccgggatcgcctcctacccgagagattgagtttgttatttagttggtttcgagagcagatccagtatcaaaagcaccgtatcaaattgctccagcggaattgaaagaattgaagatacaattacaagaattattgaatttgggattcattagaccgagctactcacccttggggtgctccggtattatttgtgaaaaagaaaacacgggtctctacgaatgtgtatggtt

SEQ ID NO: 280665 - DNA, 425 bp, Cannabis indica
attgtgaattttaagttttattaaattaaaatttaataataatttgatttgaaagtgttataacaataatgattatatgtttttgtatgtttgtactaaaaattaatttcaaattgtttatattaagaaaaaaaattaataaaaatggagaattcaaagacaattttgcactatttaaaaaaaacacaaaatttaaattattatttaataaacaaaaattaatttacaatttttacaaaaacacaaaatttaaaatatttacccgacaatatatacttataaattatcacacatacatatttatattaaaaaaaccatatgatatgaaatataaagacaaaaaatatttgatttacttgtacggacacgtggaactgggtaggtcactttggtatatcatcacaagtggtggcaacacatggtct

SEQ ID NO: 280666 - DNA, 568 bp, Cannabis indica
cattttttatttttaatttctttttttttttaaataaataaataatttaaatatatttttttgagatttaagtatttatagttcggacttcaaatccggattttaaatacagttaaatgccacgtcagatcgtgtgggacgaagttcgagacgtgaggtgaaaatcaacggttgagatttggtaagtgaaaaatcgacggttgtcgtttgatattcttttaaatagaagtagtagtgtactaccatgttcctattgttttgggccacgctttaggcccactaaattttattttattatttaataaaacttattaattttatttttttttacttattttaattatattatattgtgttggtgtttttttagcaactaacttatgagatagataacttaattaacaaccaatatgtttaatttattttttggatcaacatctagatttaacttcagtttttaaaattattttttttttgtcctttaatgggattgagtttattaaaaattctatgaaatgagatgagatgaataacaaacatattcaagcatcatcatcatcatcattat

SEQ ID NO: 280667 - DNA, 668 bp, Cannabis indica
cagggttgttgcagcctttaaccctacctaaatggaagtgggaggacatcacgatggaatttgtggttgggttgcttagaaccacaggtttgtccgattctatttgggttgtggtggatcgattcacgaagtctgctcattttctgccagttaaaacaacctattcagtggatcagttggcagagttatatgttaaagaaatagtaagacttcacggggtaccaaagtctatagtttcggatagagatccgaagttcacctccaagttttggcagagtttgcaacgagcaatgggtacaaaactaaaattcagtacagcattccatcctcagacagatggtcagtccgaaaggacaattcagatattggaggacatgttacgagcctgtgttatggattttgaaggctcttggagtaaatatctaccgttgatagaactcatacaacaacagttaccagagtacgatagggatggctccctatgagttgttatacggtaggaagtgtagatctcccattcattgggatgaaacagtggaaaagaaatacctgggtccaaaatcagtgcagcggaccaatgaggcaattaagaaaattaaagctagaatgcttgcctctcagagtagacaaaagagttatgcagatcaaaaacgcagagatgttgagtt

SEQ ID NO: 280668 - DNA, 817 bp, Cannabis indica
ggcattttggtaattatgacccgaggagggtaaattgatgaaattaatttaatgacgtgcttaatagaactatattattatacagtatgcctgtgttgtcttttcatgtgtgttctgacaggttagcgcggtatagtcacaactgggtatttcgggccgaactgggttcgggcccgaaatgcaatttaaattgaaatatttggcattttatttaatattgagaaatctgaaatttatttggcaatatataagtatgaaatgtcaattatgcccttgtgagtgtatatgcatgttttatagccttaggggcaaaatggtcttttgacctttattgatttacttgaataaaagatgatttttgaggaaaagcaaatgaattttctggccttatttcctccttgcccgacccctctctctctcaaaccctctcttgaatttcatcttttcaattggtgagaaattgcttggttggagcttagtttttgggggattaattaggcatagcttggaattggaaattgaggtactttttacagcttttgattttgtttatggttgctgtaattgttggttggaaaagcatggaatacatggatgatattgtgatgttgcatgttagtgttctagtgtgagttgaagcataatttagttgtgatatatgtttattgagcatggaatgtaagtttaggtcagaatttatgagttattgattgagtttgcaactctgatttcagtgttgttcttgagtttgtgttttgggatttgatgattcaaggtgtgaggttgaattttgttgtttttgctcaagctttggagc

SEQ ID NO: 280669 - DNA, 742 bp, Cannabis indica
cataacttgctcaaatcaactccaaatcaattcaaaccttccagacctactccatataacccctagaacatttctaaggcagcaaaactacccagattgcacataatcaaaaatcaccattaaagctcaagctttgagttctaaactcaaacttgagcaaacctagctaacatgcaatcaaaccagcttgaatctacttaaacatgcataactaagcctctggaaacaattacaaacatccacaacatcacagcaacagaacataaacatttctttcaaaaatcatatattttgcatagaaaaaccatagctttaaacaagatagcaagcatgcattaaaacctagataatccattcatttagacctaattaagcttctgaaaacaacataaaaaacacagcaacaatagccacaaattcatgcatgcatcatatcattttcatcattttttttccaagaaataaaggagaaaaagctagagagacataccacaacaaaagattacttgaatttaggttgaagctagctgaaaatcaaaggaaaatccagcttcaagcacacacatacccagccgaaaaagagagagagcttgagagagtttttgaaaattttctcttttcttaacttgtaattttttttgtaaaatgaaaagaatgaaataaaagccacctatatcatttcatttcagccaattattaataaaataaacatttattttcattaataaactcactagaagac

SEQ ID NO: 280670 - DNA, 386 bp, Cannabis indica
taaaataatttccaacaacgtgtccttggcttcacccaagtagttgaagttttcctgaggattagccttccaaaagtcgtagaagagctcaagaccggctgtctccaaggcatgaactttctctttcagcttcgtcacctcggccgtaagctcctcctcctccacccgacgaaggactgctcgaagagatatcctttcatcttgaagactgttcacttcagcagataaagtctcgatggtctcctcaagtcggtcagaagcctcaagatccttagtcagctcagctattttcttctaagcggtaaaaagcttctattggcttcacccaactccatccgaacagcttcgagttccatcctggcatcttcaacatccttcctggccaa

SEQ ID NO: 280671 - DNA, 693 bp, Cannabis indica
tgcgttttcctcatcatgaccccgtggtcatagagactctcattgcgaattagattgtggccagagtcctaatcgacaacgggagttctgtgaatttattattcaaagaagcctttacagcaataggcctaacggaccgagatctttcaccaagcggttcccaactcacggggtttaatggaacgacacttatcccaatgggaaaactgaggctcccaatcaccttgtgcccggacacaccccaaagcactttcaaatactgcacatttgtggtggtggactgcccaacagcttataatgcaatcctcggctgaccggccgtggtggattttggtgcagtcacgtcaataaggcacttgtgcttgaaattccccactcaagaggctgggataggaaccgtaaaaggaaaccaaggagaggccaagcagtgttacaacgttgctgcccacctacccgtcctaatggtccatgaagttattgagccagaaatggcgaaagaagatgagttggatccccttatggaatccgaaaaaattgtagaacccatggagggcgtcgaggaagtgtcagtgtgcgacctcgactccacaaaagtcctccagctaggaaagagcctagaatcggaggaaaaagaaaaaataataaagacactgaggggcgccacggacgtttttgcgtggtgtcaagaagaca

SEQ ID NO: 280672 - DNA, 527 bp, Cannabis indica
aaagtttctccgcagtggcacatcctcaagcgaatggtgaagttgaagtagtcaacaagaccctgaaggatacactaaagaaaaaactcaaagatgccaaaggaaattggccagaagagcttcctgaagttctatggtcatatagtacaactgagaaaacaacaaccggacaaacaccgttcgctatggcatacggatatgaagctatgctgcctgtagaactcgacccatcatctcacagaagattgatgtacaaccaagataccaatcacgtactcctggctgaatcacttgatgaaatcgaagagagacgagccactgcaaacttgacgctgatggcccatcaacaaaaagtagctcgatattttaacaaactagtgaaggctcaaaaattcttcgtgggagatatggtcctaagaagggtattcttaaacaccaaagatagtacggcaggtgtacttggacctaactgggaaggaccatcaagtggtcgaagttctcgaatccggagcatacaaattaggtaa

SEQ ID NO: 280673 - DNA, 505 bp, Cannabis indica
ccatgttgagaatgcccatggctgatgaacaaagtacttatttgggacttccttgtactatggggaggaataaagatgcaatattgggttttcttaaagataagatgctcaagcgaatacagagttgggaaggtcgtctattatcaaaggctggtcgtgaggttttgctcaaaacggtggctcaagcgttgccaacctatgcgatgtctgtgtttcttcttccggttaagactgtttcacaccttgagagcttaatgtcaaagtattggtgggggtcctctaataatagaacaaaaggtgtcagttggtttagttggcgtcggctttgtagaagcaagaattcaggtgggattggctttcgtaatttgcgggattacaatcttctcttgttaggaaagcagggatggcgccttcttctgtatgaagattctcttgtgggacgtatttactgttggaatttattttaccaggaaaattaaacacataaaagtaagagaaatcttac

SEQ ID NO: 280674 - DNA, 141 bp, Cannabis indica
ttagcgctcccactcaatggcactaccgtgtttttaacagcctaaatatgaacttctaaaacgataaacaaaatacataaaagttaagaataacttacagtgatggcacggaattaagtgtctccttccattcagatctct

SEQ ID NO: 280675 - DNA, 553 bp, Cannabis indica
gccgaaaaaatctcggtcaacattttggtgctttcattgagtgctgaagaaagcgtctgtaaacacacactgcattacaacaacacaacaatggtggagactcgaagcacacgtcaacctcgccctcttcaagatgctcaagacccaaatgaggaagacgtggcctcaagagcaaccgagggttccgaggaagaagaaggaattcctgatgacgactacgagggaaacctcgatgagtacgcctacgacgaaggtagctactcagaattggtactcttaaggcaaaaggctgtcgatcatgaagctgaaatcgcagcccaaaaagcacaaaaccaaaagatgcaagaggtgatgctggccatgcaaaaagccatggaggcagcaggaatccacgtgcatcctaaagccatctctgctgggcttggaaaggaaccagaggaatcttcgccaagtacccaaaagtagaagtctagagaaccaagtcccataaggtatcccactgaagggaaccaaaagaaaaaccctacttctacccccgggaaaaagaaaaagg

SEQ ID NO: 280676 - DNA, 543 bp, Cannabis indica
ttaaacgatcatgaattttagttttattctttgaaggttgatgtgagttggtgcgaggaaagtagttaatcttaagatcttttcagctgactatatcttcaatgctgggattagtggcaagctcaaggctaacaagcttcaagctttatcaaagctccatttattgtgagcaggtgaattacataaagtttatttggtgtagactcaatgtacctaaacataagtttattctgtggcaagctccgaatgaacatttactatctagagataaacttccgatatgcaacatccaattgaattcgacgttatgccttgtttgtgaacaagttttttagagtcattcttatttattggttgactgtagtttttctcaaaaagtgctgcagggtgtacaatattggcttgaatacattccttggcctctccactttcaagattggctaaaatggattcgattaaaaaaaaaacggctaattagtaatttttttccctttgacatataccaaatcacatcctctgaattttttttagccgttaaaaatt

SEQ ID NO: 280677 - DNA, 467 bp, Cannabis indica
atatagatttgacgtataacaatataaaatctaattactcattcaaactaaatgaaaatactaattagttcgattggatgttggatgtattggatttttagacaccccatccaccatccgatccgatccaattgaatatttaaaattaacatccaatccgatccgatcacaattggatatccaatgtttggcggtcggttgtaattggatcggtcggttctcattggattggatcgatttatgcacacccctaaattaaagtataacagataagatatctcattgcagtacagtttagactggagtaaagattacactgggaatttcaaggatagaattcgtaatcttaaagatgatgttcgaaaatggagaaaaggaagggatgctgattcaattgagagatttaaagaagctgaaaaacagttatttgaagtctatactcaaagagaggtgttttggaggcaaag

SEQ ID NO: 280678 - DNA, 738 bp, Cannabis indica
gaggtctccctgggacccgttgcccaggaggggtataagtcccgggcgaccggatgggaagcggctgagcttcattcgaccttgacctgtccccaccaactggagaacattgtggaggttgctggaatcaagccttccacctcaggaacctaccaccggccacctcgcgacgcggagacgcccaaccacaactacggcggcttcggagcctggagccaaacgcacctgatggccggtgccatgctccctcttcaggattactttgttaattttctagtttttgtcggccttgcgccataccaactcattccccaagcttaccgcctgctttcaggcttatttattttttatgccgcccgaggatggggatctccccgcccggcggaaattttgtatttttatgaacttgtttccgtccccaagaagggggacaaacttaaggacggtttttatgggttccgggcccaccctgctaacgaaggggtggtcccgtataataggcagactcacgttaaggagtatcgccatcgctttttcttttcctccggatttagggcaatggaccatccggagctcctcactgagtgggtgaggatccctccatatgaacggactgcccctacccaggcctttcttcggagagcccaggcctttgcctcttacgaccgggccgatcttgacgtcgggggtctggtcactacggagaactgcaggaaggccaaacttatccttccgcat

SEQ ID NO: 280679 - DNA, 577 bp, Cannabis indica
tagctgtttaacaagtttactcgtcattcaataatttcctgggagtagctgtccagggatttcaagaagcaatttcaagctgctagggataggcgacccgaagcagccttgctaaccaatataaagcaacagcctgacgaaacatttaaggcgtacttaagtcgttttagcacggctgccgccagggtttgaaacttggatgacaacacacaacttacaacccttcaggtagggatctccactgatccattaaccgccgggggcgagttgtgggatgatttacaaggacatccggtaagaagcatcactgagttcaacgagaaggctcaggtgtttttctggaaggaagaagcccaaaaggaaatgaatttgttgaaaataagctcaggaggtaaacccagcaatgttttaacagggactacttccacgagaattgataactcgggggcttctggtccgaaagaaaggacgaaattagggaaccgtcgaaggatagaaagaaacaaaagaagcatgacaaatatgtgccagtgtatactatttatactaagctaaatgaaacttgggaaaatattta

SEQ ID NO: 280680 - DNA, 488 bp, Cannabis indica
atcaacagtgagaggtctcatatatgctttcctatgcattagaccagacacctgctgttgagtgggagtaatgagtaggtaccagattaatccaggaaaggaacattggaagacaatcatgtaaatcttaagatcaagaagaggaactatatgttagtcgataagggtgtatttaatactcttagactacaccaaatcaaatttctagacttgccttagtgctagaaagtctgctgatgagatggtgattactctgggggtggactagtgattttggagaagtgtaaaaacctatgtaatggtggagaaaaggttgggtttaatacaacctgtcagatcctattacggagagtatactacatactacacttgatttgtatatcaaggtgttgagattatttgaaatgcaccttttgttttatattagtgcaagtgggagtttgttgggtttgtgcctaaataaacccatttcaatataatcagattta

SEQ ID NO: 280681 - DNA, 94 bp, Cannabis indica
tttctttataatttcgcccttgcttagtgaaattcataaagtagacatagtctaacttcactgtaaacggatcaaattaccataacaccctaca

SEQ ID NO: 280682 - DNA, 516 bp, Cannabis indica
tagttgtcaaaatattttttaattaatgtacatttttattgagcatttaaattgtttttattacattgattttgtgcatttaattattcttttcttctaaggaaagattctttctcagctggtctctttttggttttgaaaacttcttgtaagagaagaaattctcttatgaaaagttgtctaatttttggaaacttgactttctctttttttaagggatgatttcagttttgcctttattagaacaaatcaaataaactttatttggcaggtttgaagtccaaattcatgattttggttcaatttagaaagattcctttatggtcctgatcaactactgcgaaacacgattctgatgctgcaaatcaggaatttttttaagaaagttttgtacaactgggaaatcatttttgtgattgtctctagggtttctatattttataaataggacctacagagcagccaaaccattttatctcttctagtctcatattttcatatctttctttgtgagaa

SEQ ID NO: 280683 - DNA, 1152 bp, Cannabis indica
cagttctcggtttatacttgatgtcgaattgactcaactccatcgcccatttcaataacctccctgatgtttctggtttcgccaaaacttgccttaaggggtagtttgtcaaaacttcaatactgtgagcctggaaataaggtcgcaatttccttgacgatgttatcaaggcaaacgccaacttttccatttggggatagcgcgtctcggcatccagtaatcgcttactgacataatacaccgggtattgccgtccttgatcctcgcgtactagtactgaactaatcgcatattccgacactgctaaatagatggacaagacttcaccggtcattggctttgacaagatcggaggttgccccaagtgcgtttttaaggtttgaaaagcttgctcgcatttttcggtccagtggaaccttttgttgccttttagaatctgaaaaaactccttgcacttatcagaagatcgtgatataaagcggtttaaggctgcgactttacctgtgaggctttgaacttcttttggcttggttggtgatggcatttccaccaatgccctgatcttcgcaggattggcctctattcctcgctggttaaccatgaacccaaggaatttcccggagccaactccaaagacacatttcagagggtttagccgcatcttataccgtcgtaatatatcgaacatggcctgtaagtgggcaatatgatccttcgcatgttgagattttacgagcatatcgtcaacatatacctccatggtttttccaatgagatctgcgaacatcatgttcactagcctctgataagtcgcacctgcgtttattaaaccaaagggcatcactttgtaacagtatagtcctcgatcagtaatgaacgaagtgtgttcctggtcgggttcatacatcgggatttgattatatcccgagtatgcgtccataaaactcaggagttcgtgacctgcagtggcatcaacaagctggtcaatgctaggaaggggaaagctgtctttgggacaggctttgtttaggtctgtaaagtcaacgcatgtgcgccatgagccattaggcttaggcacgagtacggggttcgctaaccagttggggtaaaacgactcccgtataaagccgcaggcaaggaggcggtcgactt

SEQ ID NO: 280684 - DNA, 152 bp, Cannabis indica
tcaattatacttctcaatttagactatgtctataatcagatgcagaaaagataaaactacaaaattgcaaaagtgaggcccaaatccacattgcaagggccgaccacttttatagcatttatcatatgatattttcattattttaatgtcaa

SEQ ID NO: 280685 - DNA, 776 bp, Cannabis indica
tagacatatatgatctgcccatagaccacactatatattattattattttaattaattactctctcaatttaattcttatatatacgcgtacatatatatataaaaataaaaatatatatgcatactggccactctatattttaattatttgattataataattattattatttgcaaaattccctaccttcttctttaaggaaaatcttaaatataaggttataataagaaagtaaagtaacaaatgttatacacaatagatcgatttatgtataggcactgttaaatatattaatttgtacaataatttacacttttatattatatcacttttatatatgtatgcaacaataatttacatttaatataaacatattattaattaataagaataatatttaatttttgtttatcaaataaaaatactaattaattaaatattataataatgagtaattaatactattatttgactcttaaatatttaattatttaaggggcatttgctaatatttttatttttttttttttttaattttttaatcataaaaataaaagtaattttttgtttttaaaaaatatgtgttctataaccatttttgttttttttttttaatttttaaaaattgataagaaaaatatcactacaaaaaatcttatttttaatcacaacaaaatttgtgactaaaagtaaaaaagttgtaactaattataaatcatcattcttatgttgtgactaaaataggtccatcactaaaagtattagttacaaaaa

SEQ ID NO: 280686 - DNA, 570 bp, Cannabis indica
gtgaatcgctacagtaatggtgatcattaaatacaccctcacgctcccaaagcacgtgccaggaaaccgaggagccaaccggaggcatctaagcaagccttgttcacttcacaattaaacaaggcttggggggtaaatgttgcccctgattttgcctaatatacgtggaccaaccggaaaatgacacgtggaggggaagagtttagcatttgaattaaatagctaaatctttataaagcaaaggattattttggatatgcctcccggagaaggcatgcaaagtttcatatgctcccggagagcaagatggcatcaaagcatctcctggtggtgttaggcttcctctgaacagttgtaaagcccgcttagttaatttggaaattatcagttaattatgattaattatgaaattatttatagctatttaaataatttattacactgttatttatggaattcagaaatgcatggttatgttattcagtagttttcatattttgcatttccggtgcccggtattttggaactcggcgtttggcacagtagaaatcacaacttagcatgttatta

SEQ ID NO: 280687 - DNA, 590 bp, Cannabis indica
gtgcttctgaccatatgacaggtgatagatcactattttcttttctaagtaagtactctcatgaaagtactgttcgcataacagatggttcgtgtttaagaattgatggaattggaactataacaatctcaccaagtcttgtcttaaattctgtcttttacgttccaaagcttgattgcaatttactttttgtaagcaaattgagtagtgatcttaattgtgaagttaagtttgttgctaagttttgtgtttttcaagatgtggaatcggggaagatgattggctatgttgagttcagtaagggcttgtatctgctaaaaatcgacaaccccatgtttaaccatggaaatcgttgttgtttctcccaaggtcaatctctttcctcagtaaatcagtccaataaaatcagtactatcatgttatgacattaccgtctaggtcatccaaattttgtatatcttaaacacttattcccatccctatttgtcaatataaatcctcagtctctcaggtgtgatatttgtcaattctctaagcattctcgtcactctttcattccaagacctcatcaagacatcaaccctctcatc

SEQ ID NO: 280688 - DNA, 592 bp, Cannabis indica
tcctccctaatggaagaacgttcattagtaatttaacgcagtagaatctcgaaagataagtactatttgtatgtgtttattttagtatggatcaccctaatggtggcgactttaatagggctttcaaaagtatgaaacaatgttagaagctcataagatagaatcgccttgtctctcgcctaaacaagacaacgctatattcttatcttgatcgaataaaaggttgctagaatgtttatcattttagatgagctaacaactctattcaatggatggtatctttgactctcgcctaaatgggacaatcatatcagtttgttggagaccttggattatttaggattgtattgttttagttattttcgcttgtcattcctatttgctatatgtttagtaatttctgaattgtgtgtgaatttatattgaaccatattatttgctgttattaatgtagtttaaatttcgaatcttcattgttggtctaacttggcttgttgttttaataagacaaatttctaatgaattgtcatccatgaaacaaacatgatagtgttagatctcaatagataaatattgtaaatgcaacatctag

SEQ ID NO: 280689 - DNA, 571 bp, Cannabis indica
ttggatgttggattggattggttctatctattggatgtatttcatatatatatttattgatttaatttgagtttatccaatattttacacctaatattttttggatcggatcgaatctatccaatattttaggtcaagtgtgtattggattggactggatctatccaatccaagaaaaaaagagtaaaattttaatgttaattttcatatatacatatagatttgacgtataacaatataaaatttaattactcattcaaactaaatgtaaatacaaattagtttgattggatgttggatgtattggatttttagacacccatccaccatccaatctgatccaatttgatatttaaaagtaacatccaatccgatccgatcataattggatatccaatgtttggcggtcggttgtaattggatcggtcggttctcattggattggatcaatttatgcacacccctaataatatgtataaaaatgaaatatatgtatgtgtatataacatgcggaataaacgaatacatacactatataactgttgctccagaattcgcccaaaatacgtgg

SEQ ID NO: 280690 - DNA, 595 bp, Cannabis indica
tttttttttactttttttaaaaataaaaaattatagaatatctatttattattattaattttaaacaaatataataaaattaataaaaaatacaaataaaaaatactcattaacatcttaaaaaaattcaagtaatttaaaatcacgaaactcattatctataacacaaaaccgacaaagtcataataaaatatgaactaataattgtctaatcttgaagaaaactattaaaaaaattctaattgttaataattttcactcattatcttcatcgtcgatttgctctctatttatgatcagcatatcagtgtaacttctcttcgcttgtgcatatagctcctcctttatacgcttccacgattgctttgtaaaggttatagtattcctatttcccttcaaaacttcttcttccataagttcaataaaaatttcttcttgtttttcaggccaaacagaagcttcgctattatcaataataaccacctcactatctgttcttgtcatctattcaatcgacattgacatgtaattataaaactaattctaaaacttatataaaacaaaaaacaataaaattaatttaaaaaattacaaa

SEQ ID NO: 280691 - DNA, 619 bp, Cannabis indica
caagaccacatcagaaatactacgagacatagcgaacttagtacttatggagccagaaagctttgaagcagctcataaacaagaagtatggagaaaagctatgaagtaagagataaagatgattgtgaagaatgagacttgggagcttgtagatcgtccacaagacaaagatacaataggagtcaagtgggtctataagacaaagctcaacgcagatggctctatccaaaaacacaaagcaaggttagttgcgaaaggatactcacaacaatacggaggtgactacaacgaaacatttgctccagttgcacgtctcgatactattagggctttaatagctctagccgcactgaagaaatggaagatttttcaactcgatgtgaagttagcattcctaaatggttatcttgaagaagaaatctatgtagagcaacctcaagggttggtggtacaaggacaagaagataaagttcttagattgaaaaaggctttatatggcctaaagcaagctccgtgagcctagtataacagaattgacagctactttaccgagcaaggatttaggaggagcaagagtgagccagctctttacatcaaaactcaaggtacgaaatgatac

SEQ ID NO: 280692 - DNA, 533 bp, Cannabis indica
tattttttcaactcgacaggtatattttttttgcttttcacttagtacgtagtgttatttttttgcttttcaaccgctcatgtgtatgtgagtgtatttttttgatctactacattcctgatttaaagaacggtaaagactggctgattgtaaatgagtacataccgcgcaatgtttgggacttcccggacacggatggggagacaccctttgtacaggaaaacaattcagctgaaaccgagttcgttgttcaacttccacagttggatgatgttgactatgttcgccatgatgtcgacccaactgaagttgcaaacatccatcgtgtgaattcacagcctcaacaattagatgatttcattgtcgatgatgacaacgagggtctaaataccgaagaagacaactccttagaattagagagtgacagtgatgataatgctgtatatgtaactgatgatgaggatgatgaattgtaattgacatagtgttttaaataaaataaaaattacaacccttcttctttaatatgtttg

SEQ ID NO: 280693 - DNA, 536 bp, Cannabis indica
gagttgtgtccaaatgtgaaaattttgaatgaaggtgagaaagtaagtgtgggggagagaaggagaatgttgtagttcaccaaagaaagttgttgcctgagacaagtacaattccatgcacagttagtaaaaccaggtttgatcattgcatgatagatttaggagaaattattaataataagtcttattttaattttgcttatttaaatcttggtccatcaagaaaaactcaggtttttattcaatcgactgatcaaactaatgcttatcctttagggatagttaaagatatttttgtgcaggcttatggacttagtgagaagttggatacaaaagcatggatacttagaatggaatttgatgatgaaacactcaaattcaatgtgttagattccattcataaatacataaagaatgactctttgttagaagattcgatgtgaagaccacatgagtacaacatgcagtcgagctaacgacgttaaacaaagcaaccttatgggagttttttcaatacccttttttctttttttttt

SEQ ID NO: 280694 - DNA, 686 bp, Cannabis indica
atagataaacgtctttctaagcaaactcctcgacaaacttcaggtaactcgtccttttgctataaattgacgggtaggattgtgatttttacttatctgttctttgtgcttgtagacatgactttcttgaagtctgcccctgtcctgaagatcaagcaaaagggtggaacaccagcgacttcgccggtcgttgcccagaagaggaagagcgatgtgatgacttcgcttgctgcagattcctccaagaagttggctaagactactcaggacaaggggaagaaagtcgtcatcgactctcctgttcgtgctcgcgattttctggccatgcaggaaaaattactggctgagattccttacgaggatcttgcttctcgatctactgaactggccgtgcaatccatggctttgttcatgaaagccgcggctactccttcgaaggaaactgattcgctgaagaggcagaacgtccattttcaagagaacataaagaagctgaagcaggaggtggcgaggatggaggagcttaacaaggccaaggagaaggagctcgaggaagtcaacagggcaaaagaacaggtggagctcgagctcaagaagtcgcaggacacgatcgctgagatggctcgcgacttggaggctgaaaaagagagtgggaagaaacagtacgatcaggctgtgtctgacta

SEQ ID NO: 280695 - DNA, 824 bp, Cannabis indica
gccggagtctaccaattgaaggaggaggatagtgtgaaagctcaacttgaagctctgaaaaaacaatttgaggctttcaaaactcaagaaggtaaagcactccaaatggttgcaaaagtggaaaagcaagaaccatgctttatttgtggagggacagatcatcaaccacaagagtgccctaatcttagtatgttgaggggaggagatgaggaacaatgtaatgccttaggggattacaagaagccttataatgcctactccaacacatacaatcctggttggcgtaaccatcccaatttcagttggaaggatacaagtcaaaatcaagcatctgggagccaatggaaacctgatcaacaaaataattctcttgagaattccatgaaaattctcgcagactctcaactagagttcaggacttattttgctcaggtgatagaggaattgaaggacataaagattcaattaacaaagttaaatgattcttcagccattcaagagcgtggtaagcttcccgctcaacctctaatcactcccaaagggcaacatatggcacaaacctctacttcttcagagtctaatctaaagggggttaatgccataactactcgaagtggtcaaagtacagtatcaccattacctaagaccactagtgtaccaatgcctgctccagatgctaatatgccacagaaccctccagtgaaggtgcccttccctcaggctttgaaatcttctaggaaggtactggaaaatcatggtgaaatcctagaaaatttaaaacaagtgaagatcaacctgcctctcttgcatgtgatcaaacaagt

SEQ ID NO: 280696 - DNA, 547 bp, Cannabis indica
gcaaggagttttttcagattttgaaaggcaaactttaaaaatacacttggggaaacctccgatcttgtcaaagccaatgatcggtgaagttctatccatctatttagccgtgtcggaatatgcgattagttcggtactaatacgcgaggaccaaggacatcaatacccggtgtattatgtcagtaagcgattactggatgccgagacgcgttatccccaaatggaaaagttggcatttgccttgataataccgtcaagaaaattgtgaccttatttccaggctcacagtattgaagttttgacgaactaccccttaaggcaagttctggcaaaaccggaggcatcggggaggttgttgaagtgggcgatggagttgagtcagttcgacatcaagtataaaccaagaactgtggttaaggggcaagccttggcagattttatcatgaatttcccagcaccgaggtagcgactcatagaagatagaagcgacattgctatagcgaacagagagacgtggacattgtacgtcgatggagcctcaaatagc

SEQ ID NO: 280697 - DNA, 525 bp, Cannabis indica
catacattctacttttctttattacattgaaaaaaaataaacaaagaacaagaaagtcaaggttgtgagataatgaaggttctgaacatcttataatccttaaggtataattttttttgctttattttctacatctcttttttaaaactgaataatgatttttgtatataatatattagacataaacacctacttgtcttttcacctcgcaaagctcttcaaagaacgatgagtattcctgtatttaataatactgactgctctaacttcatcagtttatagttctaaattaagcactaaattattctaaaacaagttgattgtatcatgaattttaattacttttgtcattttataaaaaattaaaaaatttaattgtatttttagacatccttataacaatacaaaattggcaaagtattacattttattctttttatttgtgtctaaaagtgataagaaagatagatacatctttcctatgatagtttcagttaaataatgttcatcttatgttatcataca

SEQ ID NO: 280698 - DNA, 523 bp, Cannabis indica
aatacccctagagtttaataaaatctccgaaattgagaaattaaaactctaatattcatttctaaatattggggtccaaaataattaaattcataaataataataaaataatagaaattagtgctaattgccttttctaatccaaattactaaggcggtcgttacaattatccccccgttaaaaggatttcgtcctcgaaatctaacttgaatagctctggatatgttgagtcctcatatcagactccaattcccaggtggcttcctccaccttaccgatcctccagagcacttaagcagaacaatagtcttgttccgaatttgaataggttgttcttcataggataagtctaattgcagttcaagggcttcataactcaatagatgagtcgggtctgacacgtatttccttaacatggaaatatgaaatatgtcatgaaaagccgacgatgctggtggtaaggctagccgatacgctacctgcccgaccttctcaagtatctgaaatggcccaatgaaccta

SEQ ID NO: 280699 - DNA, 581 bp, Cannabis indica
atggattttcaccattagacaaacataatagtgttagatctcgaaagataaatattgtaaatgcaacatctagctgttcatcaattgatgacaccttagactagtatttacaatatgaaacaagaagattgtataaataagattacttcatcgttggattcttatttaaaacgaaattatcctaatggtctataaatcattttatgtcattctatattagatgacgcatatgattatattcccggaattctatcccaaaatgatataaatcctcaatcttagaaatctcctacttgtatgggcaaatcagacttagagttagattagtagtggtggtccaagaaagaattactcattatacagttacactttcacaagtgtttaataaccattttctatcaatggattcaaactgtatgtaaatggaatatgagtttagtattctgtgaccagaatccacttgcactattctaagaactctttgatgtaactaaacctaagtcataaaaagatacaaccagatattttttaaatctatggcatttgtatcttgttcatagtggttttgacaagatcattct

SEQ ID NO: 280700 - DNA, 706 bp, Cannabis indica
taagagtactcttttctattaatgtataccacaaaattaatgccaatattttcccaagctagcaacttaaaactatgtattatgagtgtatatatcccactgtttgtgtcttgatttgaagtttcaatagaattcaagtactcttcacaatccatccaaaataatcattttggggtttaagaaaagcttgaatctgaaagtgttatcagttcctttaatctctggttggtacatttatggtaagaaaagtcaacattgaatgctgacttggtcaacttgagtttcaccagttgagaaagctttataatctccaagaaatttctcaacctctactgtttgattccctaatttgtcttgagaagctagtttcttcatgtcatgtgctattctgctcctgattagtaatgctgctgccacaattgacattgccataacaaagattcctatgctgagaactgagaacaagaaaacacaagataaattaaatattacttatatgaaaaggtaacaaatccttgagttaattatgaaatataattctgtttacagataataaatatatatataatataactcggctacacaggagcaaggttggaccaaagctaatatggacttaaatcaaaatgaatttatggaaccattttctaaaacaaattatgatattttttaggggtaagttgaaaaatgcctcttttattcatca

SEQ ID NO: 280701 - DNA, 629 bp, Cannabis indica
ctacctttatcaaatatgctcacagtatatttctaatattctattgatcttcgcaggttacccctttcaagaataaagcattatactattttcgctttaacttccatggttctcaataaccttctttaattcttaacatcatagccaaaaatatcaaccttggaattttacaagattagactattcctttgtatgaattttgtattctcatttatagtataaattgtctacactgatagacaacatattaactctgtatgtccaatcgttactactcggtcaaaatcataagatcccatagtacataattcataattatgtctttctattccttctatgagatctcctaagctgatctactgacttaacttagtaacaagttaagtattcatttctgatagatattcaattagagcacttcttatttccacccacttacttgtctcaataccttgtaaatttctgcttattaacacatcacttcctcttgataatctctggaacgactatcgattctgcatcctaatatgaatctttctagcgtactttgtcctcactcatacgcttcccgggatgactccccgaaagatttcccatcttgagattaccccaagttaagtatgcttaac

SEQ ID NO: 280702 - DNA, 627 bp, Cannabis indica
aattaactgagtctccaagcattattatctcaactagtgtggagaccatgggcctatataatcaagcttccaataagcagatctagaatttactaagtaaattctctaacttaataattccgccttgcgccactatagattcaaaattgcactcttaattatatagaacactctatatgtaccaaggtatagatacgctatgaattatccatcgttctaatccaaatagtcaaagatcctatatagatgatctacatcaaatagggataaatttaccattctaaccttcaatgtattttatccttaaaacacttaactacctataaataataattcagtaaactaatataattattgaaatgagatctcaatcatttagctctattaagccaagcttgaaggaaatcatcgttcactcctatatacttatagaagttatagattacatatctatgattagcactcccactcaattatactatcatgtttctaagatgtaagtgttcaaccatccaagcttcaacgaacaactctaagaccataaataatacaattaagcagaacctaaccatattagatttaagatctattgacctaagatcaacaagtgatattgacttagaaaga

SEQ ID NO: 280703 - DNA, 603 bp, Cannabis indica
acagagtagccgtcaatagactttatggtcatagccttgtaggtgcagatcaggggttgtgtcgtcagactttattgcgtgtggcagttccaacacgcctcctcccatgcggcattaaatgtgagatgaccgctcagaggaagcctgacacctcccgaagatgctttgatgccatcttgatctccgggagcatatgaaacctttaatgccttctccggggggcatatccaagataatgcctttccttacaaagacttagctattaatttaagtgctaaaacctttgtgtccacgtgtcctagtctggttggtccacgtacattgggcaaaatcaggggcaacatttaccccccaagccttatttaattgtgaaatgaacaaggcttgctcagatgcctccggttggctcctcggtttcctggcacgggcttcgggcgtgtgaaggtgtatttaatgatcaccattactgaaccgattcactttttgcaggcgtcgattcgtttcttgtccattaattgatacagcgcattagtgggtgtcagacggacactcaagcgtttccaccgcctcgatgacaaatcaattcagccgttggatcctggg

SEQ ID NO: 280704 - DNA, 596 bp, Cannabis indica
cgcttttattaaattgtaactggaatcagaataatcagtgggagaaattgatagatttaaataaaaaaaataacttgaaacaatattttattatactatttacatattaaattattcagaaagaaaactagaatcatattattttatttacataattaggaaaagtaatcgtgataatttaattgaaaaaattgtcagatcattttttttgtttatagacttttaaaagatttatttatctttttcatttttaattaattattaaaattaaaataattaggaaaagaaaatgtattttctataaaaaaaattgggagaattttttcttttattttttttccctaattttgtgtggatatcattactttttctatttctaaatttagtaaataattaattgtatgaaaatcgatatcataccattaatttcattaattttttaaaaacgtagagaccaacttatatatacaacaaatatatataattttgggtgattctacaatgcacccccttaaaaaggatgtattgatgcacccttaacttatttcggcattcagaaaaaaaaatttagtctaattttctttcatattcatgta

SEQ ID NO: 280705 - DNA, 682 bp, Cannabis indica
acttttgtcatccttaatttagagtggttgcctaagaagcaactaagattttgaagtatggtaaataaaatatgttcatgttaaaataatattttttgaaactgattccctccttggagcagattaaagttatttagttgttgttgttgtgttgttgtcgggctgttgcacatctgagtgtactgagtgattgtcactttttgtcattatcacattgttgcacaccattgtttgggtagttaccaaaaaggattgtgtttctgtgttgttgaatgtgttcacacacaacgaatactgtgtgaaatcagtttcattggttaataactttatgtaaaacaacagacttttgtcatccttgatttggagtggttggcagccttccttcagttggtatttcagttgtatttgagttgttttatggtttcattttagtttctccatcattatatgcactagtttagcaaaagtgcaatctcttgatattaattctccacttaattcgtaatcaacatagtggttgttgtcatcccaatgatcattgctctgtactaaaatttataaaggtttcatgcctgaaactagtgtattaatttttctatattgttaagcaaccagtttaatacatgagaacaacatataaacaactattatatgacagtaatcagtaaatgaccttaaatgt

SEQ ID NO: 280706 - DNA, 709 bp, Cannabis indica
acaatctctgttatcatccttaaccctagccgtagaggatttaaagaaaaggtatatgaaaaagaaacagtacgacttgcttgattgggtgagatattttcaccaagaagatagtcaagatttggtagaattagcatcttgtattgctttatggttgagtagatatattttcccctcgaaaacttctagaagaacagttcaaagcgccatgtttccgttggcctgcagactcgcttacgggaagcactttcctctaggagctgcgtatcttggaactttgtatcataacctcgattccatcattactgatgccaattcttatagtgaaaataaggaggtgataagttcaatagatgcatgtttcctccagatgttcatttgggagcgttttccaaaacttgcacctatccgcaagtcactgcaacctggagaacctcgtccttgggcatgggtaagttcgaagtgttggaaaaccttgtgtaatgttacaaaggatgtttcgaattttacatttcgcccttaccttaccaataattgcacctattttaccctcgatatgtacccaggaagtgtagtaccattgacagatgaggtccgttcttctttcactacttctgctggtgaagcaggattttggtttgttgtctgccttccccgatcactgttatgtcttcgagatgatccgaaatctttatcttggtcatttgtt

SEQ ID NO: 280707 - DNA, 651 bp, Cannabis indica
agaagagagaaagtcttgagaaacaagacaattgcactggtgaaagtgttatggaggaacagtaaagtagaagaggcaacctgggaactcgagacggatatgcagcagaaatatccagagttgtttaggtaaatttcgggacgaaatttctataaggagggggtaattgtaataccctggaattaaggaaatggattagcaaagccctaactagttaattgagtattattgtagaattatattatattataatttattatatgtgaattaatatgagaaatgacatgttaagaccccgttggtgagctaggggcattttagtaattttgacccgagaggggtaaaactgtgaatttaatttatttatgtgcttatgaactatattattatatagtatgcctgttttgtccttcttcaggtgtgttctgacaagtcggcgcggtatagtcacaaccgggtatttcgggccgaaccgggttcggggccgaaatacaattttgggattatttattagcattttaataaagtgtgattaatctgaaatttaattgggtatatttatgttagaaatgactatgttatccttggaatgcttttatgtgttatttggccctagggggcattttggtaaattggccttttggattaatt

SEQ ID NO: 280708 - DNA, 477 bp, Cannabis indica
cacaagggtacacacaggtagaaggtatttattttgatgaaacttttgctcctgtagcaagattagaatctattcgtttactcttgtgcattgcttgtattcttaatattaaactgttccaaatggatgtgaaatttgccttcttgaatggcatttgagtgaggaagtttatgttgagcaaccaaaacgatttgaagatgctcagtttccagaccatgtgtataaacttgaaaaagctttgtatggtctgaaacaagctcctcgtgcctggtatgaaatgttaactcaatttttaatttctcatgattatcaatgaggtagtgtagataaaactcttttcatcaagcatataaaatctaattttatcattgcacaaatctatgttgatgatatagtttttgggtctacatctaaccatgaagtgtaggtatttgttgatcaaataaaaaatgagtttgagatgagcatggttggtga

SEQ ID NO: 280709 - DNA, 468 bp, Cannabis indica
ttggcttcgtaccatccgacagtatcacatcggtacggctagagtatgactagcttaccgagtataggctaatattatggtcgatggtactgtactgtttgactgtatcacatcggtaaggctagagtatgactagcagctagagtatgactagcgtaccgagtataggctgatactgtaacacatcgttaaggctagattatgactagcggttggagtatgaccagtgtaccgagtataggctgttactctgtcaaaagtatcgtcatatgaacattcgagacttagtaccgtgtgggacacagggattagggttgtggtcacgggtatgggcgtctgatcataacccgggatttatgtatgttttatgatttatgcttttcttactgagtctgtcaactcacaatgctatatttatgtgtaggtaagggcaaggctaaagctgaggaaccgtgaggacgagccgat

SEQ ID NO: 280710 - DNA, 775 bp, Cannabis indica
ttttaattgtcatctagacaaaaaatcttgcaatcagctggtgaggatctttttaccgtatatggttgatttatttttattgagtaaaggttgagggcattttttagagttgctttgtttttggaaacctatccaatatgaatttcatgcacctcaggatttgtaatcacttttgtttccaaacttgtttcctcttccttctcaattgtttcaattatgaaagtttgataatttgtgtatatagctagctttgtatttgtaattttcagtatattccatgtgtaattcaatgtgatcattatgtttagagcttctaccaatgcaagtttcaggtaatgtgtccgagttatgtgtagggtcttctgtggttgtagctaaatttatttactcatagtttacctttatagctaaatttattttctcatagtttacctttaaagggtatattgtctcattatcgtttttgtttctaatttgttcatagaatttttaaccattatcatctttgatcttcataggtggcatttcagtttttacttgaaattgaacataatgttggattaaaatcctcaatatgggctcatatgtatattagtgtattgctatttgaagcttggcccaaaataaagtgatcattttagtaattgtgggtcattgggtattaaagtgtcatgggctaaatgtgtagataccctaagcgatatttctaatttattgaggggctaaattagaaatacttaaaattaataacctagctatgaggttataaattggt

SEQ ID NO: 280711 - DNA, 514 bp, Cannabis indica
ggtgctctactgtgcaggaaagggtaaagttttttctgatcagccatgagtatgggagctgaacaaagaatgtacatgttcgggccacactagaccaagcgggttggggtctaccagtaatgtattttgagactctgttttgccgcttaggttggccaaaggatgtcgtcacggcatcgaaccctcctgctagtggtaatgtcagtaaggggaccgacagtggcaaccctgatcacaaacggaaggctgaggctttcggagcatcagggagtaatagaaggttccggggaaacagaggtggccgtcacggccgcgggtcttcattccgatctgatcccgagtgttctaaatgtaagaagcaccgtcagggtgagtgccgggccaagacatgtttccagtgtgtcatggtgggccactttatcagagattgtcctcagaccaagaaagaggaacctaaaaagaatactactcagaacccggggcgactttttactatgactcaggctgacgctga

SEQ ID NO: 280712 - DNA, 140 bp, Cannabis indica
attattataatacgaaataaatgattaaataaaatacatattttaaaataatatcagttcgttggaaaccttggaaaataaactatgtagatttagtatttttataacatatgtgattatttgttattttctgaacttgt

SEQ ID NO: 280713 - DNA, 430 bp, Cannabis indica
cagtctggagagaatggcgatgacgatgatggggacgaggaggagtccacacaattgggattatagtgtcgtcatttgtcacaatataagtatcatttgaacaatgaatttgataatataagtattttatatttgaacacttattttagttattttaatgtgacaatataagtattttatttgagcacttaatttagtagttgcatgtaattatttgaattaccaatgggagtgtcccttgtggtgcccacttctatggatgataactttcagtatttgaagtgggcactacacctgtcgtgccatttgttttggttattggcacgataccatttgtggtgccggttgtaacatattggcacgaacctattggcccgaccaaaagggcacgacatgtcgtgccaatcaacagatgggcactaaaaaatga

SEQ ID NO: 280714 - DNA, 218 bp, Cannabis indica
tatgcaatgtagatcatcaataaaagatcattgattattgggattataacaatagataattaatagcgtatccatatcatggaacatatagagcgttctatatcactgagagtgcaattccaagttctatgagtggatgcaatgaggaattaataagttagtgaagttacttggtaaattctaggactgcttattggaagctcagttatataggccca

SEQ ID NO: 280715 - DNA, 674 bp, Cannabis indica
atgcaagcacttagaggaatgcttcgaagtggtccggagatacggcatgaagctcaacccaaagaaatgcacctttggggtcaagtcaggaaagtttctgggcttcatcgtcagtcaaagagggattgaggcaaatccggaaaaaatccaggctctcctgagcatgccatcccccaaaaagcataaagatgtgcagagcctgactggaaaggtagctgccttaagccgcttcatctcacggtccacggacaagtgcatacccttcttcaacgtattgaagaagtgccaaaagtttgaatggtcggacgagtgcgaggaggcattcaaaaagctaaaagagcacatggccaagcctcctatcttatcaaaacccgttctcggagaagacctatttctttatttggctgtctccgaacacgcggtcagcgctgccctagtccgggaagaagagaaaactcagcatcctgtgtactatgtcagtaagcgcatgataggagccgaaacaagatacccagtcattgaaaagctggttttttgcctcctgatggcgtcaaggaaattgaggccatacttccaagcacatccgatcaagatactgaccaaccacccgctccggcaagtcctccaaaaacctgaagcatccggaaggctcctcaagtgggcaatggagctaa

SEQ ID NO: 280716 - DNA, 496 bp, Cannabis indica
attaacttctaaaacgatatgaaataaacacatataaagtattaggaactttacagtggttgcagcggaatataatgtctccttccactcagatctctaacccttctatcctttctgtagcagagtatcatcaagatttgagtccgaatctccttctcttgaactagcttcttcacagccttacacactatgatttagtaccacttgatgtgtgtgggcactcactagctctttcactatagggttcggttattgaagagaggaagagagagagagtggtttcggctaggtataggaagagaggctcaaatttttactgaaggaaagagatgcatcatcttttcccttaagtcatcactacctatttataggaaaccaattagggttaggttagatttaattagcattaaaataatggaaaaaagtaaagtggaaaatccttgtgaagtggccggccatggataggcattgggccactttgcaattttgccatttt

SEQ ID NO: 280717 - DNA, 603 bp, Cannabis indica
aggaattgccctcatcatgcctgggggaaacacctacacgctgcagttaagtttggattcaaagcatctaacaacaaagatgagtacgaagctctaatcgcttggctaagactagcctaggagatgaaggtcgaacacatcaaaatctgcagtgattcacagctggtggtaaatcatgtatctagagaatatgaagctcggggagaaaagatgatagcatatctgagcaaaatacacaatctgctcacacaattcaaaagctacggtctcagacaaattccaagagaagaaaatacaactgcagacgagttagctcgattggcaagcagcaacgtaagtgacaaggcaaacctggttcctatccgatttcttgaagagccttgcatcactggcacggaagaaatcgaaatgattgatacatccccaaactggatgacaccaatagcagcctacctcaactatggggaactcccagataatcgaaatgaggcttagaaaatgagaaggaaagttgcacggtatatcatagtagagggagtcacgtacagaagaggattctcgatgccattgctcagatgtctcactcaagacgaagctgcacga

SEQ ID NO: 280718 - DNA, 538 bp, Cannabis indica
gcctccctccgtttggcctcctcctctttggccttggcagccgcctcctggcgctcagcagcctcttggtagatctgcctctccgcagtaaggtcctgaaggaccttcctgacgtcgttcatgtccccaaagtcagacagaacgaagccgtggtttatgatgttcttggagaggcggccagcctcagcagcaagctgaacaataacacaagtgtaagaaaaaaattcccaagaagaaaaataaagggaaaagcaaaattgcgaatacttaccacggtgagggaatggctgaggtcctggacctggaagatagagttcagggaggcacaagtggcgaaccgcttaggcgcgcatcgggtaagctgagaagcgaactcgccggtcatctccgcggcaaagggagccaaggtgggcccaaggaagcgacggaaccagtccgatagggggtccaagttaaggtcccacggatcctggtactccgggttgttgatactcgcctctacctcaacccgcaaaaccctcctaagggcctccacctc

SEQ ID NO: 280719 - DNA, 608 bp, Cannabis indica
tttttaaattaattttattgtttttgttttatataagttttagaattaggtttataattacatgtagattgaatagatgacaggaacagatagtgaggtggttattattgataatagcgaagcttctgtttggcctaaaaaacatgaagaaatttttattgaacttatggaagaagaagttttgaagggaaataagaatactacaacctttacaaagtaatcgtggaagcgtataaaggagaagctatagtgcacaagcgaagaaaagttacactgatatgctgatcataaatagagagcaaatcgacgatgaagataatgagtgaaaattattaacaattagaatttttttaatagttttcttcaagattagacaattattagttcatattttattatgactttgtcggttttgtgttatagataatgagtttcgtgattttaaattacttgaatttttttaagatgttaatgagtattttttatttgtatttttttataatttttatatatttgtttaaaaataaaaataaatgatattcataattttttatttaaaaaaagaaaaaaaaaatacaaaatttatgttttttagtttttaaaattaa

SEQ ID NO: 280720 - DNA, 514 bp, Cannabis indica
ggacattcgggctcagatcttgattatactctgcaacagaaaggaatcaaggattagagatctgagtggaaggagacatattattccgctgcaatcaatgtaagtttttcttaactttatatgtgttttccttttatcgttttagaagttcatatttaggttgttaatcaacatacttgtgagtagatctaagatcctggtaaaattaattccaacagatgagccattgaacgatccgctaattgcaaagtaacggtggtaggccttgcttctccaattccaaacttcctaaaaatagacataggcatgagattaatactagctcccaagtcacaaagagttcttccaacatctcaacccccaatagaaattggaattgtaaagcttcccagatctttcaatttgggtggaattttactttttagcatagcactacatccctctgtcaaagcgacagtttcaaactcaccaagcctcattttctttgtcaaaatgtcctttaagaacttaacat

SEQ ID NO: 280721 - DNA, 643 bp, Cannabis indica
tctctacattcaacggccttaccccgtatcataccccaccatggcccctcatttgtacttgagacgttaacatacaacataccatacatacagtcatgacaaccataatatacatccatacacaccataatttatattgattcacaaactcaaattgtgtccataccacacattctcagtaccatattcacattcataataatacatctcaaatattattttaatacaaaaaaataaaaaattaaaaataaaaaaaaaaaaaaaaaaaaactacctaatttccttaccttggaatccgaaagttagaatgacttcaactataatcctttgaaatgcttaaaccgaaacaacactgctgcaattattattccttaattttaaaccatgataagaaaattctaattagaagatgggttgaatagaattaattcttaacaagaaattcttaattaaacttaccttagctctcttaaatatatggtagtcgatcaccaccataaacctccactaagatatagtccaacgcttgtctctatatggtcgcagagaccttttactcacacactcttactttctgtaagtcaccgaacacacactccacaattagataattttaataactaaacctcacacttttactcat

SEQ ID NO: 280722 - DNA, 1125 bp, Cannabis indica
cctcaatctttttctcactcaaaacttattatgctttcttttattcttcttcttcttcttttatttttgttttttttaattaattatgatttggattatctttacttaatccaatataatataaaaaaaatttgataaaaaaatataatataataaccttattattttaaagatatttgtgtgccataaaaagtactaatttttatagataactacaaaaacttttctatgtatgttgggtctacattagaccattcatttaaaaaaattaaaaaaaaaaaagtattttcacacctaaactttttattattatgctaaaaacaaatactttgacaatcccttcaattaataaaagtaaaattttattttaaaaaaattacaacataaatactattagttttttggtttgttactaatgtttactacaaattttaaaattagtaccaaatatgtttttttaaaaaaaaataaatagaaattcattcaatttttcaaataccaaaaaagttaacaaaaaaaaaaacattttttattaagaaaagaaagtgtattgaacaagatcttcctattccacaaagcactaaattttatttttcaaagctataagttaaacaagatcctaatatatattatttataattaaaattattgacgtaatttttcataaactcattctaacaagataataagtagagaattaaagaatgagaatcaaatttatagtggttccacctaagaagcacaatttcacttagttacctttataatgttttaattgaacttaatttaaatttaaatatagggttaaaactattttgaaccatgcatttaataagagttgtcgatttgactatttgttttgttaaataataaattgaaccttgtaattttttacaagaggagtgttaattacaatctttatgtccgaaatcacatatcaaaatatttttttaaattttttttttcatagcggtatttgttatagttacagtatcattcttgtaaattttttaaaatttccgaatagtttacaataccgaaaaaaagagttcctgatattccagtttaccacgcgtgttaaaaaaacttcaaacgtattttcaacactggaaactattcgaaaaa

SEQ ID NO: 280723 - DNA, 821 bp, Cannabis indica
acatacatacacaaatctatacatataaacattaaaaaaaaaaaaattaaaaaaattaaaaataccttaaataaattggaggaggtggggcttggtggtctgcggtggtggctggcgtagctcggccgccgtcgatggtggtggtggccgacggtggtggtggtgttggaggtggtggtggtggtttttttgaagagaaaaagagagggattgagagggattgagagggggggttagaaattgagagagattgatagagaatgagagagaatcaaagagagattgagagaggggggctgagaggttttcagagaaaacctaggcaaaaaaatgaaaaatggaggagaagaagggggcttcgtgctcctgattcatatatatacttttaccggcgcatccaattgcgccggtaaaagtgtttttaaaatctgacctaagtagccaaaaacgagcgtttaagtaaatacttttaccggcgcaataaatacttttaccggcgcacaattgcgccgctaaaagtattctcacttatcacatcaaaatccacacgtttcctttaacactgcgccggtaaaagtattcccacctaccaggaaatccacgcgggaagtttccctctctttttttgagacttgtaccggcgccacaataaatgaaatgaaaggcggcaaacttctcgcgcctgttggcgcttcatttggtaacttttaccggcgcatattcagtattgcgccggtaaaaccagacttttaccggcgcaataatgcgccggcaaaagtaaagcctaaatggaagtgagatttcagattttgttttatctc

SEQ ID NO: 280724 - DNA, 579 bp, Cannabis indica
gacagataagtatttgtaaatgcaacatctagtgtacatccaaagatgacaacttaagagtagtctttacaatatagaaacaatgaagaattattaaataagaatgactttgactctcgacctaaaccagacatcgttaaattcttatttaatcaaaattattctttagtttttcctcttagctttttcattaagaaattgcttagaaagtatataattggatagattgtttataaatcatatgtgtatgatgtcattctattttctcatataaaattgaatagagcagatgactatattccaaatattctatcccaaaatgatataaatccttaatcttaagaatctcctacttgtatatgtttactgtaggcaactcagacttagaattagattagtagtgctggtccaagctagaatagtcactccgttgtatagtttgtataaatttatgtctttgactttcaattttagatttcaaatagaattttttttccaagaatgcattggacaatacaatatgactttcacaagttgttaactaaggcttagatgtttaatagctattgtaaagtgatt

SEQ ID NO: 280725 - DNA, 782 bp, Cannabis indica
tttgggtgaactctgaaacaaatactggtgttttctctccttgtttttcatttttctttcatctaatctaagctatggatgtgtgtgggtgtgaatctgggtttcagatctagaatcgagcaagttctcagagagaacttgctctgctagggtttcgagtttgtgagtgtgtgagtgaattgtgtctgagtgtttgggattctagactcttctattgagtctttgaatcaaaggattcatacgacatcaagattggtgtcgtggggttaatacggggtcgtattggtctaagttttacttagacaaggaaaggtcaattctgaccttgatactgatattattggctttgttggtgtagggttaaaacagtaaaatcctacagtggtatcagagcctggtttggctaaggaagatcaacaaagaatcaagaaaaatatcaggaaggaattggcaagaaaatcttgaaagaaagattgacaaaagaacaacactcaaacagcaagaagatcaagattcagattcaaactcaaattccagaaatacaaaactgagaaattctaaaactctatctgtttcttatcaattttattaaaatgagtaacataaaagttgacattgataaatttgatggtacaggggattacaggatctggagaaggaaaattaggtcacttctagctcaacagaaactactaagggtgctagatgaacctattgaatggccagaaggaacttctaaaatacaacaagaagaatacctagaaactgctactggaattcta

SEQ ID NO: 280726 - DNA, 643 bp, Cannabis indica
ccctgtattttctaaaatagtaaaaataggaccctgagcttaatttttgacaacttttttttaatacaaccaacttgaaaacaatgcttaatacgaacagatacaaaaaatgtaaacaattttgtcatagcacttttagatcggattataattaaactttattttgacaaaaaatcaattcaaggtcctatttgtactagtttagaaaatacagggtccattttgtcatttaacaaaacacagggtccaattgataacttttgtaaaacagagggtccaaaatgatatttaccctttaaaattagataaagattttgtttggttgaaggaagttgttcccctcttattttgtgttgttgtaaatgaatatttttgatggctcctaaagaatctcacattattagtgtatgaaaatataataccatatatctttatatattaaaagtgcctatctaacggcaattcttggtttaacagaatatacttataaataaaagaatattctgttaaatttaacgattaggtttaatctcccgttaacaaataaacccaataattaaaccaaaaaattaaacaatacttttaaatattaataatctctttttaaaattaaaaaaaaatcatcttagccacatatctctct

SEQ ID NO: 280727 - DNA, 534 bp, Cannabis indica
aaaattcccccaaccggcagaccggttcccaaccggaagtccggttctgggtcaccaaccggtcgaccggttgccacaggtcccccagaaccggaattccggttctgtgctgggaacccaaaaaatctccccttgaactcaaaactcaaccaaacttaaccaaactctccagggtacctatacaatgcataaacaaccatttctaaccagaatttcacagaacaatccatcaatactcaagttgccattaaaccttaaaactttaaactcaaagctcaaagttgcatagaaccaacaataaaccttaaaaccagctgctatgaacttagattaactcaaatgaaccctaacattcggactaaacaaacatcacactctaacaaccactatctaggaaaaacataacttaaaatcaatgaaaacctagaaaaatacaactaaagaagaactagagttacctttgatcaacctccttgaattccttgctgaaatcccaaaaaaaaaactattgaattaaggtgattctcctttggt

SEQ ID NO: 280728 - DNA, 701 bp, Cannabis indica
ttacgcataatacattcataatattcattttcattatgtatatacatgcatatatatatataacataaagttatcggtgtaaataaagtttaatttttccgtttttcattttttcggtgtttatttcgaattctatatacattactatattcgtatagtattatagatcgatctaagcattgaaaatccattgaaaaacttaaagatggaaaaaattttcagttaaaactttttcggacccgattaatttcgtgatattaaagtatatattttttcgtgtttttgtgcataaaatctatgtggatctctttattatttgatttagaaccatttagatttgaaaacacgcaatttggtcgtcggaaacgcaatttccgatcgggtttgggtcgggttcgacggacccgcgtgcagaaaaacgggtcaaaatcgacccggttcgctgaagaagacgacgcaaaacgacatgtcgtttggagaaaacgacgtgtcgtttggcgtaaacgacgtgtcgtttgaatggcacattgcagctgtcgtttgtagaaaacgacatgtcgtttttcacattgtggaaaacgacatgtcgttttacgtcttctgaggcagcctcttcatgaatgaaacgacgtgtcgtttttaccttagggaaaacgacacgtcgtttttgtatgttttctgcacactttagaatataaaaa

SEQ ID NO: 280729 - DNA, 508 bp, Cannabis indica
tatatggagctttagaaacaggttcgactccaggtgccaaatcaattacaaaatcaatctctcgctgtggcggcaatcccggcaactcctcgggaaacacgtcgagaaaatctttcatcaccctgactgcctcaggcccaaatgttttaggtctgctggagtcaaataccaccgctagaaatcctacatagccattgcgtagtaaatcccttgcccttaatatagaaataaccgggatccgagacctctgaactgatccaacataaacaaatggatcttcaccttctggctgaaaaatcaccattttccgcctacaatctacactggccgaatacttggacagaaaatccattcacagtataatagcaaactcagttaatttcagttctataaggtcagcgctcaactccctatcttcgatcctaactggcatagacctaatacgcctattagagataaccaattccccgctaggcgttagggttccaaaccctctttctaaaatatc

SEQ ID NO: 280730 - DNA, 531 bp, Cannabis indica
aaagggcaaaaagaccaaaatgcccttacccacactaaaggtcataaaatcacttaggggtattctggtaaattccaaaatctcgactattcccgacattctcaatgtctaactatactgtcccgctatattaaaaatactaagatgtgattctaatagccaaacaccgcattctaatgttgctgggcacaaaacatgcaaaattataaaatttctatatatgacatataaaatgtattctaaattatatagatcattgtaaattaataattcacaactaatatgcaaatttcataactaaaccctaattatctgttaatttcaaaattaaagctaagaggtctttacaattatcccccctgaaaagtatttcgtcctcgaaatctaacctgaacaactctggatattgagctctcatgttggattctaactcccaggtggcttcctccaccttgctatttctccagagtactttgaccaaagctatggtcttgtttcgaagaaccttatcctttttgtcaaggatctgaa

SEQ ID NO: 280731 - DNA, 343 bp, Cannabis indica
taagttttatttgttaattaagagactttatatgtctaattaataaatatattgtatgataatattatttaataattaatttgtagctattaaataattggaattggcatttaagaggttaaattagaaaattggcgtttttgagaaaatgggatggaaaaatgacaaaatggcaaaattgcaaagtggcgcccaataacatcctatggccagccacactaagaatttaccatttatttttctattattttaatgccaaataaatctaacctaaacctaggtggttacctataagccgccacttcccctctcttttcttcttctaaattttcgaaccttgagt

SEQ ID NO: 280732 - DNA, 288 bp, Cannabis indica
aagtgaggcccaatttccttatatgggtgcccactatgcaaagcttttaccatttaatttttcattattttaatgtcatacaattctaacctaaaacctagatgacattctataaatagaaagtgttggcttcaggaaactcatgacttgcatattatttctttcatagaaaaagcctttgccgccccctctctctcttttcctctcttcaattttgaaatccttgagtgaatgagtagtgcccacacacatcaagtggtatctcaatcatagtgggtaagactatag

SEQ ID NO: 280733 - DNA, 610 bp, Cannabis indica
taatttcaggcgagagcagcgaaaaaataaagaaagtcggggtaagatgaaacttcaaggaggctggggctcgaagcctattgtttcacatgttgtcgagggggtaagtttatatattacattatcattgatttaattttttctagtaaaataacaatagtaatatattttctcttaaaaataggctaaccccgacataggagaactgccaactgcggtggaaacttttcaaaagtttcaccataaaggcaacaattggcgcaacgagtacgcacaacaagcttacgtaagtttacattttaattcaatttttatttatttctttcaatttattttgtattaaaattaaccatttaacttatttgtttgttttaggagcaaatggttgaaatagcggcaactcaaccagcgcccactgaagatcagcccgatgagcctattgtcgatcctacacagtacccccgagacttacctgttatgacgcaagtactcggggaacgatctcgacatcttagaggctttggccatctccccagactgaagggagttggggccaaaagagcacctgccacgcattcttcggccccaccgactgttacaatggaacagt

SEQ ID NO: 280734 - DNA, 773 bp, Cannabis indica
ttttctcttttaatggcagcaaagaaattagggttttctaggtttctcttttcttctctttctttaaacagccacgggttagggttcaaaggggttattttatttttcttttcttcttctaaatggcagcaaagaaaaatagggttttctaggtttttcttatttcttcttgctatattttctacccgaaaatacaaacccaaaaaaccacacaaccattcttcaactttcggccaaaacaatacacacctgaaaactcaagaacataaacacatacacaaatacaaataccagaaaagtaataagagtgagatgagagaatgcaaacagtgataaagaagaagacaccaaatttgatctcggagttcgcccaaaacaaccggctacttctccgtcaagccctcagcttgattccactaatcatcaaacaaaggttacacttttgatttacaacagtttgtatttctctctgtttttctctcttttgatactaacaaaaactctcttttcttttacatgaacactctaggaggagctcacatggagatgacaactcacagccaaaaggctctctttttactctgttgttatttctgatgttgttctctgttgttgtatctctctatattattgctccttgttgtatctgagaaaagcacctccttttatactgatctgtaaatctaatctagggcagagccctatagatatttgtaactgttttgtaactgtctttgtaactgtctttgtaactgtctttgatgaaagggtat

SEQ ID NO: 280735 - DNA, 680 bp, Cannabis indica
caacaaccatattagcaactcttacaatagctaagttagtaatctagtcttatacatcaaccatgttagcaacctaatatcatacaacaaccatgtccaatccaatcttatacaacatgtaacacaactcaatttcatacaacaaccacattatcaaaccttaaagcaagtcagtctcatacaacaaatatttcttatttgaaattataatcattatatatacatcatttgattttttaagctataaatttttatttcattctcatttttgaaaatagaataacattgtgaaatactccaaaacacgtttatcattctctgtatataaataaattattatcttggctgaaagacaaagaatcaaataagagcaaaatgacgaaatgaaaacattaaaagtagccaaaaaatcttgaataataattatatgttatatcacccttcatataaatgcagtattgtatacttgtatatatatataaataaatcgtatatataaaaagatttgctaaagtacatatatatagaacacttcttaatgggtaatacctattgatgtgcactataaaaaattaataaggtaacaatctaataaccttttatggtaaaattccaacaattattttttttttaaaaaaaatatatttattttttagaaaattgaaaataataattacaac

SEQ ID NO: 280736 - DNA, 508 bp, Cannabis indica
ttattttattacacttttaccacttgcacacacaatcttgtgggtatgtctggaaattattcatggcggaagtaacccagaagactccgactgctttaccgtgagacccattttcggtgaaatccactgccaccgccgccgtcgcagcatgtgggtcgggatcctccatagccggattttctgtggcgtcgcctgagagatacgttgcggagatcacctccaacggagaagaagacgatgggccaaagaagaaaacgccgctgaagacatcgccggagaagaaggaagacccgctgttagtgctagcgtcggaggaggctcgggttaaggtgtattttttgggttgagaaaaggctcggctggggtaaattttctgggctgagagtattaatttctgggttggttttttttgtttgtgtctttgctgtgttcttcagagaagaacaaaggtctcacggtaagataattgaaaaaaattgataaaatataatataataccaagttttaa

SEQ ID NO: 280737 - DNA, 496 bp, Cannabis indica
gtacgattttactgaacccagccctccgccatttagtccaatagctccagtttatttgccaaagtcggactcgggcgtaatcattattatgtgatttagcttagaacctagttattagtgactagtgatataattaagtttatattttgctatctgtctaaatatgtgcatgtgcattttagttaggatttacttttatttatgtgactacctgacacacattttcttactgagtttagtagctcactcttatcaaattaccatgtgcagaccaaggtaactgaaagtctagagtgccggtggcgagtagaattttggacgcttgtgtgtgtgaactcgctgagggccatataactgcgggcggtctagggtgctctatttatttatttacgttattaaattaatgtcgcaattattttagttattatttattatgtcttttgtacgaaaactggccagttgtgaacatttttaagtattaaataaaaatgcgaca

SEQ ID NO: 280738 - DNA, 390 bp, Cannabis indica
tttcagagaaagaaaataatgcagtaaactgtgtctgaaacctgaagcctttaccttctatttatagaataccacatagggttatggttgaattacttggcataaaaaatgaaaaataaaatgagaaaagggaagcaaaggtggccggccatagcattgtggaaacaagccttccacttttccaactttcctatttcatcatttctagtttcccattttctcaaagattgccaattctctcattcaaccacataaatgtattattaaataatatattttcatttattttatttattaataaaaactaatcaaagtttcccaattaataaatataccctgtaaactctctatttactgttttacccttaataggtaataaattcacaaata

SEQ ID NO: 280739 - DNA, 544 bp, Cannabis indica
atgcagttcaacgatcttttatatctattgaactatggattatattcataactccacatgatctctatatcactaagagatggaccatgatctctatatcccttaggggtggatcataatctccacatacttaggggtggactatactattgaaatatgtagttcattgtgaactctagactatattcaatacactacagtattcattggcacacattttttttaatcatggatgtaatataatgaattagaaaattatcagaatatattcttgatcttaatttatgttccaattaacatttattgttgtaatagaaattgataccaataaagttctttgacattgtatcacactaccttatttcagtgggagaattttaaaattctaaacccaccttcatttggttgacacttgtgatagaaaatttagaacactactgagaaagtaaatctaaccattcatatggatagaaataacttatcaagattatgagaataagatattagaattcttgcatagtctattcaaatgacttgggcaaaa

SEQ ID NO: 280740 - DNA, 58 bp, Cannabis indica
ttacatgagtcttacaagaaatattatctcaactagtgcggggaccatgagtctatat

SEQ ID NO: 280741 - DNA, 367 bp, Cannabis indica
aaaactcaaataataatttacaaaaactgaaaataaaacaatgtacattataaaatgaatagaaacaatatttatactttaaacgaggttgagattcaaggatttctcaagaaaaaaggatggccagattttaaacccaaacttttctatttgggttcggatgacattcaaagagggtaaaaaatgaaatttttttaggtgtatgttattatgtatcgaaaatggaggatttttttaaaaataatgggctcaaacggttgagaaatgggggatatatggtggggaggaggtgggttcggcgagggttttgctgggtatattgctctctggttttgctggtcgctgagtgaagtgggaaggaagaaga

SEQ ID NO: 280742 - DNA, 527 bp, Cannabis indica
gttttacttcgaccaaatctcccagaggcaatgggagctgacgtgaggaagagaattgtgcatggaatttcgaagggaaggttttccatgaactaaactttccaggagccaacttgaaataccattattgtgcggcttccgacagagtggcagggaagattctgcaacatacgtcccctcgcactccctgtaaatccatttgcatctcaaaatacttgagatgggagagaggatcttctctcccagtatacatcttccatgttggcattttgaacttatggggcagtggcaggagattgatctctggtgagaagggagttccgcgagcacggtctaactcaagatcattgttacgctgtccggccatgccatgaaacatattcttcaattcgtcaagcagggcccgtacggctgggctgacttgattggcgttttggattacatcagcgtctttttgagcggggatttgagtatgggctccgggctgcacgatcgttaaagtattctgctcgtctgttccccttctt

SEQ ID NO: 280743 - DNA, 575 bp, Cannabis indica
aaatatccaagcattttcaaaatattagtagagagttaaagattgctatcagtgttatttcagttgtaacaacagagttgtgtgtgtgtgcaccaaactgtatttattttatttcaagtcttaacacaaatagtatcgaaaaatctcaaaagtgtaaaggtctcaactccaatttttttcacgggtattgaaagtatttatattggaagggtgacactctttggagttggaaatgtaacaattaacgcacaaatgagagaggataaactttttaggacaagcaatttgaacaaatattgatcacaagatagacatatcaaaccaatagaattcaaatgacaaacaacctttgggatttacatgaaaaactcacaaaataaagagccaactaactaactaataaataaagaaatataataacaattttttttagagagacatgtgatgctacggcaaccttagagcatactttgaattcttggtagatatttttttttacaaatatttacacaacataagacaatattcacaagaaaataaaatgtaacaaaaaaaagttactaacctcttgattg

SEQ ID NO: 280744 - DNA, 782 bp, Cannabis indica
attatacataaatcacccttaagtaaatttaaaagagttaaaactttataattacttaaatgatagaaatgattctcattattcatgactgaagttaaaattgtacatcagtaatgtgagttacatcatttatttatttgtagtagggtcgcaaatgttccatgttccagtagttctttattagcgagccattgacccgagctaatttgtaaactccaattccaactactacttcgatgacatatggatctacccagttcgagttgaacactcctgcagatggatctctcgtatttgcaaatactcgcctgagcacaaagtctccaacattgaatagtcttttcttgactcttttgttgaagtatcttgtaactcggtgttgatacactgtgttggtgatttagaactcagctcatttttcatcaagtagatccaaggacaattttagaagtttctggttctcttcttgattataaaactctcttatgtgagtcgatatgttcacttcaacatgcagcattacttctgagccaaatgctagcgacaaaggagtgtgtcccgtagctgtcttcttgatagttctgtgggcccagagcacctgaggtagctcgtcaacccatctgcgtgcctttggcagcgtctagcttcttcttgatagtatcctttagggttttattaacggcttccacttgtccattttcctgaggcctggatactgacgagaagcttttgataattttattcctctcgcaaaattttgtgaacaagtcgccatcaaattg

SEQ ID NO: 280745 - DNA, 957 bp, Cannabis indica
tactcgggtacactgggtcatactccagctgctagtcatactctagccttatcgatgtgatacggtcaaacagttacagaccaccgaccatattatcagcctatactggtacactggtcatactccaattgctagtcatactctagccttaccgatgtgatactgtcagatggtacgaagccaacatacatatctaatgtaatctaacaggcttcctaacatgcacgctaaacatgtaatacatttgcatactgttatactaatcttacctcgatttcgaattcaggtgtgccggtcaacctgagtggaacgaactgcacgacaatttacaggctcctaaaccataacaatcacaacactagataagtgatacgctaaatcacttcccggggacttaaactagaaactaaaagtttccctatcgataaaaagcatggcaataccctaacaacataaaaatgggaataactagggttcccaaaaattccccaaccggcagaccggttctacaaccgaaattctggttctgggaattcctggaacaccatccagaattccggttctgagcaggaaacttcaaaatttcgtttctcactcaaatcaaacccaaactctttcaaaccatccagacctgctctacatatcccaaataacaaaacccaagcaatagaaccaagctttaaacacagaaacacatttcaccattagaggtttaagattgagttcaaaaactcaaaacttgactcaccctccaagcagccactaaatcatgcatatctcaacctatttcaacataatttaacaccagaaaatacatttacacaacaacaataatcacagcaacaagatttctcattttttctttgaaaatcatagttttagagccataattctaaactagcttaaaaccaaccaaacatgcatcaacatcagtttcatttcactcaatcaagcatg

SEQ ID NO: 280746 - DNA, 451 bp, Cannabis indica
aactatgaaacacgaaaatctcaattttcacactcaccgaaacactacaaaaacttatccaaatcactccaaacttcacagggcacatatataccatgaatactatcattcttatgtaacagaagttaaaatcgagcccttaaatggaaaacgccattaacgctcggactaagctttaaaatgttccaaactcgatttctaacccaaaactacttcaatttcaacaagaaaacatcggaactagtcccatgactacccgagaacaatcctataaggtcagaaccttcataactattctaattcacaaaacccctatacgaaaccaattgttattaaacttaaaacgaaattaaactttaccttaagcttctccgctctgagaattcgctatcctgctactaccggagcttagatcgctaagttttggattgaaaatcaaagaaaatgaata

SEQ ID NO: 280747 - DNA, 637 bp, Cannabis indica
cttttcaaaccttaaaacacacttggggcaacctccgatcttgtcaaagccaatgaccggtgaagtcctgtccatctatttagcagtgtcggaatatgcaattagttcggtactagtacgcgaggaccaaggacggcaatacccggtgtattatgtcagtaagcgattactggatgccgagacgcgctatccccaaatggaaaagttggcatttgccttgataacatcgtcaagaaaattgcgaccttatttccaagctcacagtattgaagttttaaccaactaccccttaaggcaagttctggcaaaaccagaagcatcggggaggttgttgaagtgggcgatggagttgagtcagttcgacatcaagtataaaccaagaactgcgatcaaggggcaagccttggcagattttatccttgaattccccagcaccgaggtagcactcatagaagacaaaagcgacattgctatagcgaatagagagatgtggacattgtacgtcgatggagcctcaaatagcgagggctctggtagtgggatcttattaatcagtcccagtaattttaaggattgaaactcgctctcgagatgaaagtcgagtatcttcaggcttttagcgactcccaaatcgtgg

SEQ ID NO: 280748 - DNA, 594 bp, Cannabis indica
gggttagcgatagcatacaactcatctgacactgcaccctggttgctcaaccgtagttcattaatctacatatcagggaaaatattaaattaagaaaagttgaacagttattgagaacaagattaagagtattgagaggcaacaaggcttacttgagttttgaaccattcagggaactcagtctcttgcactgtctcaatattgcctacaccccttgcttgaagcaactccttgtgctcactatataatataatgcacttagtaagttaagaattttttagatgaagtcgactattgtgtgtttgtgtttatggaatttatacttacttgatatacggttcaacctctgtgcaattgttcaaaatgtaccactccgccttacgcttgctttgcatgggtaaggtgtcgactgtcctcataccgaggggtcggccaacatgcttgaatacagaaaattgtcgagttggcatgttttggacaatgtcattgttccggtcaggacggttgaatcgagtttccacttcccgaaagtacattgagcaaaaggttaatgcctcattaaccacaaaagattcagcaatagagccttccgga

SEQ ID NO: 280749 - DNA, 688 bp, Cannabis indica
ttcatctatgtaaacctagaaacatgatagggtccatctaaatcaatttgacatatgtgagcctatatgtttgattttgggcttagatgcatatagaaagcccatttatttttagatatttaaatggactaggttgctagaataaaatatcacccattagagttttatttaggcccaattagtattgggcttattcaatgaataataattatttaatgaaaggttgaattcctctcctttgggccttatgtgagagttagggggcccttagtagtgggtgcgacatactgaacccaaccctccctcacatgaacaactccaattacgaaggcccatttaccttatttaaatacttgtattaggctaattatactagtttaacctaattaaaaattgaattagcaatataattaattttgaaataaatgtaattaatttttcattgaattatttttaaattaatttagaaaaacacacttagtttaatgaaatattctagatagtgatttttagtagctaattaatattttctaatatttaattatgtagaaaaatatatttaagttgaaaataattttagaccaacttaaattaggatattatttttagaacataaaatgagaattaataattaagttgattttattcaaaggtacttaaaagggacttaattatttgtttctatttc

SEQ ID NO: 280750 - DNA, 531 bp, Cannabis indica
aaaaaaatgtactattacttttttcctgacgtacgaagtggtttaattcattaaaaaaggttggtaaaggcccattcatataagcccaacaattttaaatgttaccaccaacccatacaactcaacaaaatatctaaacccaaaaatcatacaataaccttattttccaattaatttattcaaaagtaaatgtaattgtactattttactgttcaaaagtacgaagacagtggaatagagtttccaatatttcaaaggcccattaatatcagcccaacacacttaaatgtgatcaccaacccatattactctacaatctgaggcattcaatctcataaaatctaatttaaatcgactcaccactatctttcccttactcttcatctctaattcttggatatcaataacaatcgaacactgtaactccactccagtacattaacgtcgaaggaacaattggttacttatcagtaagtccttttttttttttttatctttctcgaaaaccattccttacctattaactttatc

SEQ ID NO: 280751 - DNA, 513 bp, Cannabis indica
cccaaccaggcgcacatcccctttttcaaggtttgtggcacgattgttgtaggttggaatgtagcagtccaagtcgcccaggtatccatcgtggtcgagagatcgaaggcgcgcctcagtaaccttggacggagggcttacccaattggtgcccaaggcaccctgtcttctatgaggaaccgctgcagcaagttcctcactgacgtagtccacgccctcaaccaggacgtctccgtcagcatcgattggctccccagccttattgtactccctgtagtttgggggtgcaacctctgcctcttcctcctccttggaggaactgccacgatgtacatcgtcctgcccctcaatctccttcacctcagcgtccccttcatgatcctcctctatctggacggctgaatcctcttcggcgctgggcaaagtggcgtgccgagccacttgagggtcagatgcatcagccagacacgtggttttctttgtacgagcgatcattctatggctgggtacagg

SEQ ID NO: 280752 - DNA, 334 bp, Cannabis indica
acgttgtgatggactcggaggagttcatgtagggggaagtattctagtgcagaggcactactccatgggtggatctgaatagcgacagtggcacagggtctttgatcaagtccaagagtgggcgtgcgagatcatcaccaagagggtggttctacggaggtagagggacaagtgcagacttaggattcgggagaagcgtggggtaagcttaggagtcgagatcagggagatttgcctgcggtccgtcgatgagggcatcgacatattgaagtgggggagaatgttacgtgcagtctatgatggcacgttacaagctaagtgatgcccacaagtt

SEQ ID NO: 280753 - DNA, 775 bp, Cannabis indica
tggtccacagcctcctcttacgaaaaatgaaagtggacacagaaaaggaggatgaggtttggtttcatgtagggagaaatgacatgagattcggacggatagagtttggactcattactggcttacctatgggtagtgcccctacagacgaggaaatacacgccaagtccaacgaccatctagttcggacttattttgaagggaagagttctgttcagttggactcccttatgctccaacttgagaggtgcgaagataaagatgatgcctacaagcttggactgatcgctttcattgaaggtgtattagtatcaaaggagggcaatgtccaagtttggcctgagatgttgaagtttgttaacgatctcgacttcttctttaagtatccgtggggcgagcgcgcttttcgtaagctgatggagacattaggaaagaatatgcaacattacaaggataatgttgacaagaagaaggggaagaagattgctcaggaggcaaagtacacagttagtggctatgtacctgcctttcagtactgggcatacgaagcaattgagaagttggggaagaagtatgcccactgcaacgggaccaagttccccagaatgttgagctggaaaacaccggagggccagcggaaacaagatgtcaaggcaaccgacattgcactgttattcaacagtcgggtatgtttctttactgttctgtattttatttaaatttattgaaaatgaacattcgcgacattgttagcgatatgttagcgacattatgc

SEQ ID NO: 280754 - DNA, 406 bp, Cannabis indica
ccttaacaatcggccagcacttctaaaaaaaacccggggtcattccatcaggccctggggatttatctggatgaatttggaactaagcttttcgaacttcttcatctgaaaccggtaacaacagctcaacattctgctgggatgatacatgagtttgcacgctgcatgtgacttctctccagtcggtttgggaagaggaaaaaagctcgtggaaataagaaaccataagatcatccaaaccactatcccagtcaacccatgcacccgaatgatctttaagttttgcaacaaaattattccttcgtcttgtagtcatagaagcatgaaatacttactattattatctccctcttgcaactacaattgcttcgatctttgacgccagaaaactgttgaaattatttta

SEQ ID NO: 280755 - DNA, 711 bp, Cannabis indica
accctgacctagacctagaccaaaaaactgggaccacacccaggaactaacaacaagacttagacatgggacttaaaaatcagacccacactgggactgggacccgaagtcggacccggacccgaacccgaacacggaccaatactgggaacgaaacttggacctgaacccgaaatgggacccaaactcaaaccaagactcgggacccaaacctaaacctggaccaagacaaagacctaggaaccgtacatagatgggggacctagactagggacctaggccccagaacccagacccaaatcgaaatccgggactagaacccgaactaggacttgacctagacccgagaatctgaagtcagacctagaccagacccgaaacctaccccgaacccaaactaggataggaacctggacacgaacaaggatcaaacccgaacccagacccaaacccaaaattggaccctgactcgagacctgaactcagacacagacgtagaatcagacccaaacctagacctagacctggacctgaactcaaacccagactaggatcggaacccaggacctagacccaaaactgaacccaaactcagatcgagaatggaacttgggactcggacccagacccggacctagacccgaacccacacccagagcctatccgaacctagaccgaaatttgaaaccgaactcagaccaagactcgaac

SEQ ID NO: 280756 - DNA, 245 bp, Cannabis indica
tggctgcaccaaacatgcaggcctttggtgttcagccttcacttgctgacaagttaaacacttcgcgacatattcagctatatcatttttcattctaggccaccaaaacatggccttaagatcattatacatcttcgttgttcccggatgaactgagtaaggagtcgtatgagactcattcaaaatttctcttttaatgtcgtcatccatatgtacacaaatacggttcataaaccgtagcatcc

SEQ ID NO: 280757 - DNA, 680 bp, Cannabis indica
tttctttcgttttgtctttgttatataataatattaattaatgtgatattatgtggcgtcattcttttcactaattgacttctcatgtatacatacagttttttttcttttagtggcggttttgtggtttggattttaatatttggaacaacttttactaagtatataattagtgctttaaagatgatgttaactagcataaactctattataggcttatcacttgatttttttagaccgtattattagtttatgttctttattgtaaacttattctaataacttccaaaaacttgactttggcatcttactactatgcttgtttgtttatgtattaattccaactttaaattttcactaaaatcgtttgactcctttgtcttttaatatcaccgtcattcatttatgtccactcaaaccatattatatttcatttgaattctcttctacttttttcaatccataaaatatgcacttaaaagagtaggaagtcaacataagaatatgatttcttttcttcctttttattccaatatttcgtaaaatatattacatttacattacatgtactctaattgactttgaatcatagtgttacatgaaaagttatagggactaattagcaattgttagtattgcctagttagtataaatatataatactattacatagatgggga

SEQ ID NO: 280758 - DNA, 719 bp, Cannabis indica
tttaggatatatataaaatctagtaagtgatagaagaaaaaacaaaagccatcaaatatatcattttaaaaatttaattaaaaaaaaagagattttttaagaaaataataaaaataaaaccaaaaaaaaaaagataaaaaaatgtgatacgatgttgttttttttttaaatagttgttgtttttgaatttttttattaattattgaattaattgatatttaatgtgactaaaaaatatgaaaaaaagaagaaaaattttagagtagaataaaattattttagagtgtcatatcaccgcctcatacttctcctttatatatatagattattattattattattattgatagaaagagtaaaagtgatgatagttacaatttataattctattaatatattattattattgttatgttattattattattattattattaattgatagaaaaataatttaagcctaagagattgttcatattcatattaattattattaaattattaggtaactaattatgtgttgtaacttacttattaaaagtattatcaagagaaaattacactctataccctttttatattgtcctcttttatttttaccctcttttttaaaatctatcattttacctctttttttaaacattaatgccaattttgcctctgtcacttcaagatactctctatgtgactctcttatatcagggtattttgggtacaa

SEQ ID NO: 280759 - DNA, 791 bp, Cannabis indica
aaacagatgcactttataaattgcttacaaaaccaatttaaatgtccatcataaacttatcgagtccaaaaatttccctcttattaattagactttaattcccttttgagtttttgatttggcaaaatttatcaaaataagaataatgataattatcaactccaacaatacaaatattaaagttaaaataaacaataatagtccattgattataagttcattttataacacatggaataggattatatatattctaattataaaaataagtcattcgaacgtatttaaataaatactatattttcatatgaattcttaagagcgatcttcgaaactaattacgttccagtaaaaaatttcaatatcgtatttgtttgaaagaaaaataaaaattatactttttgaaattccgtattttaatattcccagtttgattatttaattaaatgattaattaaatgcggaataataaaactggtactgaaaacagttttctgtagttacagaatgcaactctgtaactccagagaaacccagaaaaacaaacagtgcataaaagtaaaaacacacaagatttttgtacgtggtttcaacaatcctttcagattgttactagtccacggggccacgcccagagataagattcattagatcggtatcaaaaatacaaagtaattgacttatgcataaatagactccctcttattgtatgccgcaagcttgatgtattccacctactaaccgaatcttgataaaactccaagtgctcgaactcccttcgatcaccttga

SEQ ID NO: 280760 - DNA, 649 bp, Cannabis indica
cttggacataagacccagaccaggacccaagacatgagctagaattggaccaggatctagatttagacccgggactggacccaagacccgaggcttgaacccgacccatattcggtgtctaaatctggtaattagacctaggctcgaacctagagccagaccaaaactcaaacctgtaccaaaactcaaaactagactcgacatgtggtttgtgtttggatttgggactaagactcagacctgaaccaaaacacgaacctagacctaaaccaggactcggacccagacccacacccgaaccttaaatcgtaccctgtgacccgaaattggaaccggatctggaagcggaccattaaactctaaatcctaaaccttaaaccctaaattctaaactcattacacttacccctaaaccctaagccctaaagccctaaatactaaaccctaaaccctaaacccaaacctggacacgggccaaaacccatacccaaaccgagattggaacccaggacgaagacccagacccagatccagacccaaacctagacccaaactcaagacctaaacccggaccaaaacctacttcgtgacctagaccttgactaggcctcggttttggaccccgacctggaccaaaatagggacttgg

SEQ ID NO: 280761 - DNA, 776 bp, Cannabis indica
aacctctttatatagttctttaaggtctccataggcagctgcttgatgttagtcaaggcactgacctccaggttaaccttccttgcggcgaaaaactgtctccagaagttggtctgtaacttgttccaacagcccacggatcctggctctagtttcttcaaccattcctccgtggacccgcttagagtaagcgcgaagcacagacattttgcgtcattgctgactctcatgaccgtcatgacccggttgaaccgcgacagatggtcgcttggatcggagttcccagtataagctgccatctcgggcatcttgaagtttttgggaagctttgcttccaggatgtgcttggcacatggctcccggtcctcacagtctgagttagagtcatcgtctttctctctccgggagactcgggtgatatcttttcggagtgtggcaagttccgccatgattccttcatttaacgttctcgtggagaccgcgggcccgtatttcttttggtcaaggtgatcccggaggtcatcttgattcccattgatttgatttctcaaatcgacgggagagcatttttgtccccttcttcctctaccctcgggctcctggtgcacagacacgctttttcggtcctctcgatcctgagggccaagactccctttttggagttttcccctctgcggacctttccctttcgggaaatctgagcggaccttccgctgatcctgcgcctttttctttctccccggggtagaagtggggcttttcttttggttcccttc

SEQ ID NO: 280762 - DNA, 874 bp, Cannabis indica
gggatgggggtttctctcgcttttggcatagtgggcccccagcgggaggcccgcacgacgggctattagctcagtggtagagcgcgcccctgataattgcgtcgttgtgcctgggctgtgagggctctaagccacatggatagttcaatgtgctcatcagcgcctgaccctgagatgtggatcatccaaggcacattagcatggcgtacttctcctgttcgaaccggggtttgaaaccaaacttctcctcaggaggatagatggggcgattcaggtgagatccaatgtagatccaactttctattcactagtgggatccgggcggtccgggagggaccaccacggctcctctcttctcgagaatccatacatcccttatcagtatatggacagctatctctcgagcacaggtttaggttcggcctcaatgggaaaataaaacggagcacctaacaacgtatcttcacagaccaagaactacgagatcacccctttcattctggggtgacggagggatcgtaccattcgagcctttattttcatgcttttcccgaaggtctggagaaagttgcaatcaataggaaaaaaaacctccctttccgaaaggaagaacgtgaaattctttttcctttccgcagggaccaggagattggatctagccgtaagaagaatgcttggctgataaataactcacttcttggtcttcgaccccctcagtcactacgagcgcccccgatcagtgcaatgggatgtgtctatttatctatctcttgactcgaaatgggagcaggtttgaaaaaggatcttagagtgtctagggttgggccaggagggtctcttaacgccttcttttttcttctcatcggagttattt

SEQ ID NO: 280763 - DNA, 1000 bp, Cannabis indica
ctttggccactaacctggccttgtatcttataggttcattcttagttctgccttctttctccttgaatagccatttacagtccactatgctcttatctttaggtttaggcactacaatccaggttctgttcttcttaagagattccatctcttcatccattgcacctttccatttcctggaatttggtcctttaatggcctcttcatatgattgaggttcattattggccatttccaattcactcataaaggcatatgcaatgtcttcatcccaaatattaaaactatatttaggattaggtcttggtacccttctgcccctgtccctgactaattgataatcccccaagtcttcttgagtgccttcatcaacaatgtcagtgttgtcttcatcaggttccacctgaacctggttcccaggttccacctgaacctgatctccctggttctgttcaggtgtgttcactgtttgttccacctgaatagatccagttccttcatttgcagtgttacctgcattttcagtgtcttttgtacctgcactagggttagaagaaataggcaaacatggaaatatatcttctttaaatattacatccctgctattaatagttttaaaacctttttgttcccaaacccaaagtctatatcccttaactccttctggatatcccagaaaaacacatttcatagccctaggttctaatttcccaacactttggtgtgcatatgctgcacaaccaaacactctgagattagataagttaggaggtttaccagaccatttttcctcaggagttttgaatccatttgcactggatggactcctgttaattaagtacacagctgttaaagctgcttctccccagaaaccttgtgatagtccagattgcaacagtaagcatctcactttgttgagaatggttctgttcattctctctgcaactccattctgttggggtgttattctaactgtcctgtgtctctgtatgccatgttc

SEQ ID NO: 280764 - DNA, 566 bp, Cannabis indica
aaggtttcccatgtcgatattgatgcctctagcaattgggtaaaccaatcgtgggcgttttcctcgagtgttgccgcaagaatgcggcattttgcgagctgtggtacctgatctacctccattatagtattaaatttttcaagataatctataggattagaggtacctttatactttagggattcggatagacgaaatcccttgggaagttgggcttgtcgcacttccgtagtgaagggtgaggtcccatgcaacttgtatatgggctttcgttgctgctcgagcattttcaaagcttgcagaagcatgctttggtcaatccctccagtcgcaggagtcgggactgctgcgactgcgggagtcgcaactactgcggcgaggttcgctgggacggtgatcccagtagtcgcaatcggtgcggtaggcgggttattgtgagtgttgacaccctgatcgtccacatggggatcacggagtgtttcctcgttatgaggggcgcgagaacgcgctctaaaaactgcattgaggtgatcacgcagatcacctcgatgtacctgatagcgtcc

SEQ ID NO: 280765 - DNA, 854 bp, Cannabis indica
ttgctctcatgtagtaatcataaatatatttccctctcttatgcatatcatgatcttcaccatttgctctcatgtagtaatcataaatatacttccctctcttatgcatatcatgatcttcatcaagattaatagtgaaacctgcatccacaagaagccatttggaaaccttcaaaaagatccttattcttcaatcacacttttcacttctctaagtccacttggaaaatatatggcatcttaaaattgtccagccttttttacttcattccattatattcaagtatttatacaaacttaattaaatttgtaccatataagatttgttgtataataatcaaggaataactcctataatcatgtacataatatattaaagataattaaagaattaaaaatctaatacaaggataatataagagattaattatataaatattacaacacatatattgttatgattaataaagacactaaaagatattggactttgccacattagcaagtgctctaactaactctattagttacaacctaatattacaacacatatattgttataattaatgacactaaaggatattgggaaataatgttttttttttaggctcagctctatggcgtcggttcctttataggaaccgacgacatacggtacacgtgtttgctgacacgtgtaccctatgccgtcggttcctataaaggaaccgacggcatagggttataaaacaaaccctccctcagctttcttcctcactcgaccaaacccagccaaagccaaagaaccagtacctagcagagacgaaaaaccctcgccgaccaccgcctccaccacccatttctcccccatttct

SEQ ID NO: 280766 - DNA, 780 bp, Cannabis indica
ttttttttaattgttggaagatggggctatgagtaactttgtgttggagctgtgagtaatcatcctagttgactgtcaatgctgagaagaacatcttgaggctccaagcaggttatggaagcaccttgtcctcaagctgaaccataatggtgaggtaatttggaccaagaccatgcaaaacattagtaagtaaatgtgatttaggataggggtcacctgctattgcgagtgtatttgcccatgtctgcatatgtcaaaggtagggagccatagtcatgttctctttctgagttgtttacaaccaggtgcatgtgacatcaactattcctttgaatatgttcaatatctcaagcgtaaagattaagggtagatgtgcagcccatcatttcggatgttatggcttcaatcattgagccataaagttagcccataagaaaccggttcattgatgatccaagcctcataatctagatttggaccttgtttagaagaggttataccatcactagttggattggtcacgggaataaacttaggagggcacagtgttgttccatttaggaaaccaccaagatgatggccaccattgcgcgccaaagggtgaagttattacagtccaactccacaacgaagcattggctaagagtgctgccgaaaggagatattggtgctagttgactgctaggggcagaggaggagctccgtttggttgctgaagattgtatagtaaggtgcatgtagttccatctcaaaactaattggcaatgagaggagtagctc

SEQ ID NO: 280767 - DNA, 509 bp, Cannabis indica
gaagaattcagaaaatatccagtaactattttggttgacttcatcaggttcacacttcaaaattggtttgcttctcgtctcgaaaaggctagtaagtgcgctactcctttggctactacttttgaaaatgatttaaaggatcaacacaaagatggtatgttcaggagtgtccttcgtaatggtgcccaattgttcaacgttggtacgagtcctcaaggtgagagaggtggtgatgtgaacttagtggagagaacatgcacttgcggacttttccaaacgctcaaaatcccttgtccccatgcatgtgccgcagcagttagtcagaatgtgagcgtgtacacactttgctctccatattacacaaaagaaacgtggaagaagatctacgatgccacaattaatattgttggcgaggaggatgagtgggtactaccggaacacatcaagaacataagaatcggggtaccagtggagaaaaaaccagtaggtaaccctaggaagagcaatgc

SEQ ID NO: 280768 - DNA, 556 bp, Cannabis indica
agcaacagaaagctaagaccttactttcaagctcatcctgttcgggtatacaacgaccaaccactacgacaaatactgcaaaagccagatgcctctggacggttactcaagtgggcggtagaattggggcagtacgaaatcaacttccaaccccgaacagctatcaaaggccaagccttggccgactttgtggtggaatgcacaggcaaaaccgaaagcatcctagaaagcgatctcgagtcaacaccacagccgagcaacactgaaaacaaaccgacctggaagctgcatgtggatgggtcggccacagatcagctatccggcacaggaatttcccttgtcacacctgggggcaacacctgcatgcagcggtcaaattcggattcaaagcctccaacaacgaggccgaatacaaagccctaatcactggactcaaactagcgaaggagatgaaggccgagcgcattgagatctgctgtgattcacagctggtggtaaatcatgtatctggcgaatacgaggctcagggagaaaaaaatgatagcatatctgagca

SEQ ID NO: 280769 - DNA, 252 bp, Cannabis indica
tagatatacagtactacaactggtaagtaagtataaccccttttgagtgtagtagtgtcttctttaccagtggggtgaaacagttgtgagcagctgacctgaataaggtgggtcactgtccaaaacagaacattgacataataatttctatttacccatttccagtcaagtagtataaaaacctcttttatttttctttctcgatgttatgttatgtcattgttatcaaaaccacatttttcattttttttt

SEQ ID NO: 280770 - DNA, 754 bp, Cannabis indica
cagacctcgcggaatgctttaacatattaaagaagtataatatgaaactaaacccaaaaaagtgttcctttagagtttccttaggaaaaattttgggactcatagtcaacgcgaggggtatcgaagcaaacccagtcaaggcattgatagacatgccatcacaaacagagcgtaaggaagtacaagccctaacaggaaggatggctgcactcaacagattaatctcgaggtcaactgataagtgtttgccattctttaatgtattgcgaggcaataagaaatttgagtggacagaagagtgtgaagaggcctttcagaacatcaaaaggcatctagcgacgcctccagtgttggcaaaaccaataactagagaaaccctactcctctatctagctatctgggaaggtgcgattagtgaagctataatacgagaagagggtaagcaccaacaacctatttactatgttagtaaaaggttactatgggcagagtctagatatccccctcttgaaaaaattgttttgtgcctagtccacgcgtctcgcaagctacgtctgtacttccaggcacaccccataaaagtgttaaccaatcagcccttgagcaagttttatcaaaaccagatgcttctagatgattaataaaatggtcaattgaactggggcagtttgacataacataccaccctcaaacatccatcaagggccaagccttggtagacttcttaatagaaggtataactcgagaagaaatt

SEQ ID NO: 280771 - DNA, 508 bp, Cannabis indica
tttctatataacagtatacccaagagagactccagcttcacaccttgtgggagcaaattatatttctgaccatttaaggtacctctcttgagtaatttctcacttaggtggtgtataatttggttggaggtaatgaaatggaatggaaaggaaacaatctccattccattcttttgtttgattgcatattagagtgttggaatgtcattccaatggaatgatctttccaccattttggtagaatgacaattccattttgaaatggaaggaaagaccattccaatgcatgatgagaaaacattcaaaaaaaagttttatcaattttttatgcattttaaattttattccattcaattcttattcctattccccattctcattctcatttctatatttttcattccttccaaccaaacaccaccttagttcttgattttccacaacaatttctaactccaccatcaacaaacttgaatcatgttttcttttatgtcattctatcctacaa

SEQ ID NO: 280772 - DNA, 843 bp, Cannabis indica
cattcgatttatatattctttcactaaatcatagcacaacattctaattcgcttaacttcattttgatattcaccaacataaattttaggaaagtaatactcaatcaatttcatcttgaagcttggatccaaaacagttgctatggctaatatgccatgaatggaagtccaatactgctcaaatttatccatcatatttaatgccagaatttcacaaatcttagagaagaaatgattagcagtaggatatttagttccagaaaatatcacagttacattgtaaaacaacttcaatttttcacacataacttttgccaaaagccaatctcgctcactaggttcttttttgtaatttttctcagtatgtattaggcgactaaatacatctttataagtaatggcactagtaagcatcaaataagtagaattccacctagtcttgcaatcaagcactaaccttttgttgctagagcatgataatcctttcttagcctcttcaaacttttcaactctttttggagtgccagtccaaaaaactacactctcacgtatagtttttatggcaccttgaattgcccctagtccttgttgaacaatcaagttcaagatatgagcagagcatttcatgtgaagtagtttccctttcattagtaaagaagtatttctcaatttttctttcatttgatccatcatggcaatgttcacagtacagttatctaaggtaagggtagacaacttacgctcaatagaccattcaatcaaacactccatcaacactttaagtttagcagtatgaggggtgggcacatatataaacctgaatgtacacaaaaaaaattatta

SEQ ID NO: 280773 - DNA, 706 bp, Cannabis indica
ttatttattttatttatttttttttcttttattattacagctaacactttgacaaagatggttcatggaaattggaaagtacaaaactattattttttgttacatttaatgtaagaaaattaccaaatacccacactatatagtattgttgcttaattagataggggtattttaggaatttcgatatgaaaaacacaaatctcgtacctgatattgacttattatatgtatattatatataattaaaattcaaagtagatatgaaaaatatgtatggattttattatttataatattttgagattttatatatatgttggttaatttcttcttagacataatattatatatttatatgtatccaaccactttcaccgatttctaccaaccaataaaaaaaatcatctcatatattttcacgttacaaaaatttagtccaattaaaacattttttatatatcatctcaattaacacaacaatcactatcaacttaattaattaattaattaattatataataacacttgttggcggctatatataaatatatggttattaataatttaattattataaattaatagtttagtttctatatggtgatttttgacaatgattgattttttttttttgtaagaaaaaataaataaattatttttgaaaaaactcacaaaacctagctactctatcaatatgcatgtttac

SEQ ID NO: 280774 - DNA, 676 bp, Cannabis indica
tctccttgcaggatttccgaaaccatgatccgagcatgtgaatcatcgtaatcctggcagtgaactttgatcttacccacatgctcgtacaaataccctcgggccacaatattgtcgatgttgtcagagcagagatgtacttgctgattaagggccgcatggtcatcaaaattgtataggataccttggtcgttgagggaaatgaactcctcagcataaatttgtggttgtacctcatcctgaggagcgtatggttgtggaacatacgcctcaccagccacctctccttcttcctcttgttcggcagcgttcctctgctgcttaagggattggacttcggcttttaattgttcaatctccttcgcttgccgagccacaacatcagacacttcccttttcttcctgccgaacagttgagatgccctggtcaggaacctacaaatcataaaatgcaaattagcaacgatttcatttgtgtaactaaataaataacatttgaagtaatagcatacccagcagccctgacacgtccaggatgctctggtgtcccgagcgcctgcgtgaggatatcgttttggccctggacctgaatttgtccctgactaagcttctcctctaattgagcctaatgcacgcatatattcaagcaattagtatatgaattatatacactaac

SEQ ID NO: 280775 - DNA, 464 bp, Cannabis indica
tccaccacctccatccaaagtcactgaccaccaccaacacaaccgaaaccaccatcatccgtagctatcgtaaacaccaccacccaccactaccgaaaccaccaccatccataaccatcgtaaacaccaccacccaccactaccgaaactaccaccacaacctatttttcaaatccatatcacacaaaaaaattaaatactaaaactaaatttaaacaaattcaaatccaacaaacaaataaacacacacaaatatatacacaaaatttcagtcccaaaactcaaatctgaaaaccctaaatttattttccccacaacaattatcttttctcatatctgaaaataatgaacacaataatacccaaatagggatatctatacacagatcttgatgattgcaaaataaaaaatatagaaatccctagatctaaagagagagagagagagagagagagaggagagag

SEQ ID NO: 280776 - DNA, 655 bp, Cannabis indica
agactatgtcttatttataaattttcactaagcaagggcatgattgtgaagaaaagaggttttgaggtcaatttattaattaggagactttgtatggtctaattcataaattacataaatgacgattttatttagtaattaattataattattaaatgaatagttttggtatttataggattaaattggaaaatatagtattattgaaaagaagaataagtggttgaaattaagtggtaaaaatctaactagaaattggtcctttaaagtgtacggccatgatgtggattttggcccaatattttattattttttaatccatataattcagccctaatccctagttaaaacactataaaagaaacatgatactctcactcatccatttgatcttcaaccaaatcaaaagttttcaatctctgacaactagttgatgagagagttccttccttagtgatttcagcctccttcattgttcttcacattcgaaaccttgagtgaatgagtaccatgcccacacatagcaagtcaagtactcaatcatagtgagtaagacggtgataaccaaacccgaaggagagaaggagatccatgtttagatcttgataatgctttgctacagaaatgaatcaagggctagagatcttgaacggaa

SEQ ID NO: 280777 - DNA, 853 bp, Cannabis indica
ttaaataaaaataaaaagtcacccataaatttctcataaaccaagaattttagttatataggcacactttatatagaatagatatgtgtatattactttattttttagagattattcagtataatgatttgataattattatacatgttatgatcttaaattttaataagattttttttgttttatattgttaaagctttattaatttttttttaaatttttattataatgtttgataataatgatagtataaattgctcaaatcgtattgcaccacactgtatttttgcggtgtagtttttgcagttttaaaatcttgcagtgcagttgcagtttgagaaattattaaaaccgcatatgcggtttgatttgaaaaaatgactacaactgcaccactcacaccgcaaacacctctaatatatagcgtacatattatttatttatttatttttttggaaacttacaaaaatattggaatttaggttaatttttataaaaatactgttacacaaatttttttacaaaaatactgtgttttcataaaatactagtaaaacacaaagcagaacagctcaaaacaacagtagaacaccagtgaaaacttaacacagtatacgcagtatgaaacttataaaaaaacacagtaaaaaagtaaaaaatgccgcctgacagtattttattaaagaatgacaaaagttagtataccgtgtaaatttctttgttttttttttttgtaaaaaaaaaaaattacaaaaaagaaaaaaattgtatgggcttttcccatagtggcatgtattgagctaggtcagcccattaaagacccattaaggcccagcttaacgacaacggtaag

SEQ ID NO: 280778 - DNA, 827 bp, Cannabis indica
acagtaccagttgttattttgattaattattaattaaaaaattagcatagctatcaaaaaataaaaatagaaatagcaggtcaaatatttatgtcaaccgcaaattttgtaatttttttttaaaaaaattgttattatttcgtttttttaatatttaattgaagataagtaaagtcatttgactacgaccacaattgttatctttctttaaatgtcattggtaagactatgtattatcttttttattgaattacattttttaattaatttatgctacttttactatgggaattttaaacaataattaaaaaaaattaagatgatacgaaatcttataaaactacgaagtttgtttataacattttttaattaatttatgttacttttactatgagaattttaaacaataattaaaaaaattaagatgatacgaaatcttataaaactacgaagtttgtttttataaacaatatttatactttggggaaaaaaacaaaatttacatatttgtaaataagtaaacatctattatgtttgaaaataatgtgtataaaactatacaatatatttatttaattatttttttattataaaaaaatgaatttttttctccaaaactgttccaaatataatatttttttaatttccaatttaattttaaaatatagtaacgtgaaatgtacataaaattatattaaagtcatttcaattatattccaatttttaaatagtatttaattattttaataatattttataatttaaatttattaaatataaattaatttctaaaataataaaaaaataaatattgcttttaattaaaa

SEQ ID NO: 280779 - DNA, 489 bp, Cannabis indica
agtcttttcctgatcttcaggtgctatagctatttggtggtatccagagtagccatcaagaaaacagtaatattcttgccccgccaatctgtctagcatttgatcaatgaagggcaagggaaagtgatcttttcgggttgctttgttgagtttcctataatcgatgcaaatcctccaaccagtgactgttcttgtgggaatcaactcattcttttcattcttgatcacggtcattccacctttctttggaaccacttgcaccgggctaacccacttactatctgagatgggataggccactccagcatccaaccacttgactacttcttttctgacaacttccttcatgggtggattgagtctacgttgtgcgtcgattgtcggtttggcattgtcttccattagaattcggtgcatcaccgttgaaggactgattcctttgacatcacctagtgtccaagcgatggccttgttgtgagctcggagtac

SEQ ID NO: 280780 - DNA, 513 bp, Cannabis indica
ctgcgtactgcacaccgcctttgcctttgggcaactgtccgatcaggtcaattcccctaaatggcaaaaggccagggactttgcatctgattcaattcattgggcggtgactgaggtatctttgaaaatctctggcatttatcacatttcttaacgtaggccttggagtctttaatcatttgttgcccagaaataaccttagccttcgaattttctttagataaactctgcccggctgcgtggttaccacagaatcctttatgtacttcttacaaaagtcgtgtaacttcttcttatgttacacacctaagtaatggcatggaaatcctcttctatacataactccctctaccatgatgtaccgcgcaacctttctcctcattttccaagcttcgtttctattgtttgggagttcttcaatgttgaggtaggctgctattggcgtcatccagtttggggatgtatccatcatttcaacctcttccatgccattacttaggtgtgtaacacaag

SEQ ID NO: 280781 - DNA, 714 bp, Cannabis indica
ggtgttcatgctcaccttaataaagcatggatgttgaattcgagaaaggcaagaaaacatcaagtcgtggagtaagtcgactttcggtaacaatcagatgataaaaagttatttggaaagaaggctggtcgaattggataaattggatggaagtgttggcggaaatcaaactttattggaggaaagaagaaagacaaaaaaggaatgacaaaatttagcttttgctgaagaaagaagtgcatggttgaaagctaaatgctagtaggccaaagagggtgatgctaactcgagattttttcatgacatgttgaatgcaagaaggcaagaaacacaatttcatgaattgaaaggaaagatggatcgtttatgaatgaagagacttttttaagagattatacacttctgagaagacaagagggagaagtattgaaggaattgagtggttaaaaattttggatttcttggagggacaactagaaaggccttttgaagaagatgaagttaaaagtacgatctttagttgtgaaggtagtaaggctctaggtcctgatggttttagtattacagtctatcaaactagctgggaagttattaaagaggatttgacggatgtcttcaaatcttttgagaaagatggatcgattcaccataaccattgatgcaacaacttggttatatggaacaatggaatggatacggaagtatggaggattg

SEQ ID NO: 280782 - DNA, 1281 bp, Cannabis indica
atacagtgatgacaacgattttaaaaattgatgattttttttttatagatttatttatcgttatattttttttttcgggttccaatttaatttatgcaaggaatatatatatatattgaaaactgattttataataatatataaatttataatttattaattaattattattttttaaattcaaaataattagaaaaaaaaattaagatctaaaatattaatctatttttcttctcttattaagaaaataaaaatttattggaatacttattcatacttttaaaaaatttatataaaaataatatttttttaacttcaaaattcaatttactacttaagttttcttaattttatttctctctcattttcttatgatagagtgttattttcttaaatattgatacaaatagttttcttttaaaacccagataattggaatactaaaattagagtttgtagaatgttaaagtctcttaatacgaagaagaatagagaattgataagtatcgatattgatttttattgatgagaagatgattattttttttattcattattatttgctttttttatttttttattcaatttattgtatacttaatgtatctattatttatctttccaggataatttaatgcatgcaacaatgaaaaaaaaaaaacttaactttaaaagttttaagaaaccctattagagtgaaggttctttataccatctgcaaaatttaaaaactagtgagaactacaattgagtacagaatacttgcaaataagtataaaattttatttttggcttacacttaggtcatgcatgcatcatgttaattttatttatgtgtaatctgatataattttcatttattgatactctccactccctatattcatcatttttttaagtgcctatttatcatcttgatctcttatgttcatttttttaagttttcgagaaagtcattcaaataaattttctaattgtatgatattatctcacaattcaaattaatttttcttattacattctcatttattgatactctctattcgttctatttgacatcatcatttttctctcgattgataagacagtgaaatgatgctctaaaattgctccaaatatcactatatggtctcttcttaattctcactttcttttaattttacattaggttcatgattatctattttctcatatttattttctaatttttaaataatattaatctataaatattaaaaaaaaaaacctctttttactggctgatatatcacgtttaaaaat

SEQ ID NO: 280783 - DNA, 245 bp, Cannabis indica
tattcaacaagatctagaaaagttttctatgaaagattcaaaggctgttctacagccgattaccaaccaataccttatgtctaaatctatgtgcccgaagacaaagttagagcaagaagagatggctaatgttccctactctaatgcagtagggtccataatgtacttgatggttagtactagacctgaccttacttatgttggaaattattttaccacgatcttatatctactcacaagtatgt

SEQ ID NO: 280784 - DNA, 734 bp, Cannabis indica
atgtttctaatattccattgatcttctcaggttacccacttttcaagaataaagcattatactattttcgctttaacctccatggttctcaataaccttctttaattcttaacatcatagccaaaaatatcaaccttggaattttacaagattagactattccttcgtatgaattctgtattctcatttatagtataaattgtctacactgatagacaacatattaactttgtatgtccaatcgttactactcggtcaaaatcataagatctcacaatacataattcataattatgtctttccattccttatatgggacctcctaagctgacctactgacttaacttaataacaggttaagtattcatttctaataggtattcaattaaagcatttcttatttccacccactaacataaactcatcttgataccttgtaaatctttacttcttaacacattctttcctcttagaaatctctagaacgactatcgattctgcatcctaatatgaatctttctagcgtactttgtcctcactcatacgctttccgggatgactccccgaaagatttcccatcttgagattacccaagttaagtacgcttaactccaaggtaagctcatggtgggttatcagaaagtagatgcttctttgtcgttcctaattgtatttcttactttcattcttttgtaaaaaaaaaaaatcaagtgccatcactcccttcattcacc

SEQ ID NO: 280785 - DNA, 1127 bp, Cannabis indica
tattaatgcaggtggacaggtaaccttaacgacaccagaagcccagacaatttcagacaatgggcagacagctcaaggggttaacctcccctcctccggtgatggtagacagcccaccaccttggagcaacaggttacagcaactgaggcagcccgccagacggttagcgcatccccaattgcagatccgggtttggcccgcaagctagccgagatggaagccctcattcagcgtatccctggaatgcctgctcctatcaagaagagtgccgcaagctgctacgccgactcaccatttgtcgatgagatagctttagtggagatgcctaagaaatttagcttccccaacatgaagatgttcgacgggacatctgacccagacgaccacatcgcccaatatcgacaaaggatgttcaccgtggccattccacgtgacatgagggaagcatgcatgtgtaaggggtttggttcgagtctaatcggaccagccctccagtggtatactaatttgcctaataattctattaaaacttttgcacaactcactgatacttttgttgagcagtttgccagtagcaggaaattagagaagcaatcagaagacctttacgtcatcgtccaacgacgtggggaggcactgagagattacgtggggcgcttcaataaagaaaaagtgtctatcaccaattgtaaccaacacacagccatctcagctttccgcaaaggacttcgctacgactcagatttatacaaagaactcaccaagtacccctgtaagactatggaagacgtcctcgccaaggcatgggcccaaatcaagtgggaagaagatgaagtcaactactacagatcctctccaagaaaagagactcgcagagattctagagtagacagacggcacaacgacaaacggtctgagccatacccgacttctaacaagtcagagaaccgaagaagggattacaaccggcccactgacacatatcctcgaagtggaccgaagatgcccgagtacaacttgtccatctcacctgctgaggctgttcaagtacttaaggggcttggaagcaaagtaaagtggcctgagaagatgaggactccagctgagcagagggacagaagcaagt

SEQ ID NO: 280786 - DNA, 518 bp, Cannabis indica
gatatgggcactatgagtttctggtaatgtcattctgattgactaatgctcctgcggcttttatggatctcatgaatagggtattcaaggatttcctcgataactgcgttatagtgtttgtcgatgacatccttgtatactctcgatcagaagaggagcacgagcatcatctccgaatggtattgcagcgacttaaaaattacaagctgtatgcaaagtttaaaaagtgcaaattctgattgtctgaggtgtcctttctgggtcatattgttgggaagaatggattatggttaatccaaacaaggtggagtccgtgaagaattggccgaggcccaagtttgtaacggaagttcaaagttttctcggtttagcagggtattatcggcgtttcgtcgaaggattttctaaaatttctatgcccctaaccgaattgaccaagaaaaatcagaaatttgtgtggtcagataagtgtgaaacaagcttttaagagttgaagcaacgtttgataacagctccgg

SEQ ID NO: 280787 - DNA, 609 bp, Cannabis indica
ggtccccaagtcgaggatccacatcttaatcctcgccttgggaagtttcctacttgggaatgtttttcccttgtttgggctctggctggaggagatttccttcttagccttggccactgcaaggttgtaacattcccgagcagattgctggttccctctaagacaccctaccccattctttgttgggaacttcaggcacgagtgaaatattgatgtgacatcttttaagtcatacagggcttgtcggccaagcattacattaaaggctgaaggaacatccaatattaggaactgtgccatgatagttatgctcgtcgaagcttgttcaacagtgaggggttgccggatttgtcctagaggtgcaactccttgaccggaaaaaccataaacaggctggaggcatggatttagatccttgagttggagccccatcttctcgtaagcagtcttgaacaaaatgtttgaagaagcttcattatcgatcatcgttatagcaaccattttatttgctatctagacttccacgaccagcgggtcgttgtgtggaaatctaattttgacaacatctttatcgttgaaagttatggttggctctcctgcacgtggaac

SEQ ID NO: 280788 - DNA, 469 bp, Cannabis indica
caaagaacaacaacaacaataatcagcagtaacaatcaccaaaaacatcatgcatttcactcaatatttcatcatttttttcataatttcaaggaggaaatcaagagaagctaacctagcttggaaaaagcttagatttggatgagaatccacttgaaaatttgagcaaaacccagctccaagcacccacatgcacagccgaaaatggagaggaaaaagggagcttttctttttcaaagttttttctaatttttgttaagtgttgaaaatgaaagaaaataaaagaataaagccacttaactattttatttcagccactaaaacacataaaataactatttaaattcaaataatcaattcacataagacaaaacactaatggggcaaaaagaccattttgccccttcaccataaaatcatgaaaatcatactaaaggggtatttttgggaaattctaaattcccggcca

SEQ ID NO: 280789 - DNA, 1249 bp, Cannabis indica
gttctcatagggacgcttcttccttggcacaatatgcttgcaattacctagacagctactatagagtaagtgcacgaatgagaggactgatattagaaccaacctactcgatttacatcaaattccaactgttgatattccatggcagccactaatgggtaatgactttaagctaaacattgatgcatgcacccacaaaggtgttaagagttggaacagtcatttgagatgacaatgaaaaagtcatcactccaagtcggtgcaaggatatttttaagctcatgagattgaagcaaaggcgacgttttatagtctgaattgggtatctcaactacaaataccagtgacttatattgaaacggatgccttacgacttgctattgccttgcacaccccaacctctgaattatcttgttttctatgatttaatttttagtatgcaacaaagctgctcatgattgtttattgatttggtcaaaacaatactctaggattagacagtgatatgatttggttaaaaggtaatatttcctctctaatttatttgttgttataaataaactacgaaacggctcgcgcttcacgtgagattatttataatttttttaaaagggaaatttgacattatatacttaaaaaaagcataaattgtttttatatgcttcttaaaaaaatgtaaaaataataccctccaaacatctttaatcccaacaataccctcctcatttcaaacccccactctccctctaactctctcgtttctctctctttctctaactctccaaacccattcccaacaaaaccccaccggaccatccacgagaagcacccgacaacccacgaccaccgcaccacttccggcgaaacccattcgcttgttttctgcattttttttttctggtttttgacgatgtcgcgaaacatcgctaaatgtcgcgaaacatcgcgaaatcatgaaacatctctaaatgtctttaattcacaacagcgcttgttttctacattttttttttctgatttttgacgatgtcgcgaaacatcgctagatgtcgcgaacatgtcgcgaaacatcgcgaaatcgtgaaaacatctccaattcactatatcgcgaaacacatcgcgaatatcatcgctaaacatcgcgaaacatcgcgaaatatcgctaaatatcgcaaatcatcactaaacttcatccctgacctcagatttgttctatcattgcaaatacatcgctaaatatcgctaaata

SEQ ID NO: 280790 - DNA, 730 bp, Cannabis indica
tcactctctttttttcttcttttctttttatttttaattttatttcagtttttaatttttaatttttaattttatttcagtttttaatttttaatttttttacataacaattcttcttttctttttatttttaatttttaattgtaaagctagtttcttatatattcttacgaagaaacggaccttgataacatatggagcgactgtgtagagaataaagccagaaagagtatagacaacaaaagctaatacctgaagacaaaatcaaataataaagaatagtcgaagtcaaggaaagtgttctgagaaatgaaaaatattttcactggttttaggcacaatcttaggaaatcattgtgcttcttatgtatgtttgctcaacaaataatgcagagatttcattgtcaacgtttctgggaaaaaagctaatgttggtgctgatgttcgaaccgaggtttgttttcggtttctttttggttttctcccatatttgaaattttacaccttctgtatgtatttttttaatatgttttttatctagttgtttcctgtccatttttatatcatcaatgggtaacaatgagatttatcatggatgttgatgttcaaagagtttttcctgtattttagtttgtatacagttgttttgtagttttattatagttttgctacttgcatatgttatttcactataaaattaatatgcaactatttgcacaaaacttactat

SEQ ID NO: 280791 - DNA, 625 bp, Cannabis indica
gtgcagaactgttattcctagtctcttgcacaccaggcgcaattccagtaataggagctgttccaccattcaccacgtttcccgtctgtccgggattaacagcaggcggaacccttgaactccctgagtcctgtaatgcaggatccagcgtctgtgaacttgttgggtcagactgacctctacgagtttgcaccatcgtgttggcggttgaatatcgaatagagagcgatttgtgatccttctctcattgaaagcaccaaaatattgagttctcttttagcaaacgacaatgagtctattttataagcgataaacgatttgtagtaatatatatatatatatgatagagcaataataagacacaagaattttatagaggtttagccccgaacagttcggtaatagcctaatcctcgttatttgtattaacttaagatcaaggaagaagattccttttcttatagctcttacaacgatagctctgaatatataattcttagataataatacagtcttagcttagctgcattttgactgatccctccctttgcccagtgaatatgtattactatttatagagctgggaaacttgaggaggaagagtttcctctctcgttacaatgcg

SEQ ID NO: 280792 - DNA, 584 bp, Cannabis indica
tctagttcttatgaaacccagaattctcgacccccgctttaatgagtttagggggtatttatagtgtttttgtggggtgatccctagaattgaggtacatgtctttctgtatctatcagtaaagccacacattcccaatgaatatatcataggaaatgcacggtctaatccctaggctttgtaggggttttatggatgtagtcctttatcctttttgactgatgtgagtcttcataaagtagctgtcaataggctcactaatcatagtttagtagctgcagagtgggggttgtgccgtcagactttaagacatagtttcaatacgcctcctcccatgcgacattaaatgcgagatgactgttcagataggatctgacacctcccggagatgctttgttgcagtcttgctctccgggagtatatgagattgtcatgccttctccgggaggcatatttaaggttgatccctgcgcttaagaagacttagctaaattatttaaacgctaaattctttccacctacgtgtcattgtccggttggtccacgtatttcggacaaaatcaggggcaacatttaccccccaa

SEQ ID NO: 280793 - DNA, 577 bp, Cannabis indica
aatcacttcctggggacttaaactagaaactagaagtttccctatcgataaaaagcgtggcaataccctaaacaacataaaaaatgggaagaactagagttcccaatttttccccaaccagtagaccggttctacaaccggaattttggttctgggaattcctggaagccccatccgatagaccggatgctgcaggcttcactgaaccggaatttcggttcagtgcaggagacactcaaaaattcatatctcactcaattcgatcccaaaccatgcaaaactctccagcctattctaaataccccaataaacatttttaaagcaataacacaacccagaaaacacagaatcaaaaataaccatgtgagctccaagctttgagttcaaaactcaaacttggctaaagctcacctacatgcatcacaacctgatttaaaatacttaatcaagaatattataacctctgaaaacagcagcaaacatctacaacaagtacagcaacagatttcatcatttcactttaaaaatcatagttttgagtaaaaaatttcaatcttgaaccaaagcaagtaacatg

SEQ ID NO: 280794 - DNA, 614 bp, Cannabis indica
atggcaataccccctaaaacataaaaatgaggaaaacacggctttctgaaatttccccaaccggcagaccggttgcccaaccggaattccggttctgggaattttcgaagcccatccggaattccggatgcacaaccggaattccggttcctcgcagacagaatttcaaaaattcatatctcaaccaaatcaactccaaattgattcaaaccttccagacctactccatatatcccaaatcccaaataacatttctaaagcatcaaacctacccagaatgcacagaaacaaaaatcaccattggagctcaagctttgagttctaaactcaaacttgagcaaatctaaacaacatgcattcaaaccagcttaattctacttaatcaagcatagaataacttcagaaaacaataacaaacatcaacaacattccagcaacaaaacataactatttctttcaaaaatcacataatttacatagaaaaatcaaagctttactcaacctaactaacatgcttccaaaacaatttaaataaccctaatctaacaagcttacacctctgaaattaaggacaaattcacagcagcaacaacaactataactcatgcatgcat

SEQ ID NO: 280795 - DNA, 587 bp, Cannabis indica
actatacaaaatgtgataattcttttctgatagttgaaatcatcatcaatccaatgtgccgttatcaccatataattgagattctgaattgatgtccatgtgtcagtagtgatggacaccctttgactcttcaaaatatccttcaatttctctttttcttcacaaaaacacttgagaacatcccttgcaatagtgattctagaagggatttcaaatcttggttgcaaggtccgaacaaattctttgaaaccttccccctcgacatgtcggtagggcaactcatcagtcacaatatactttgccaaggcaactctacatgcttctttgttgaaagcaaccgcaactaaacttttttctccttctttaagcggctcgaaacttagcaccttctgcttatcctcatcatttctaaaagggctttgcttacaagtttttcgaaagtggttgtttaagtgactcgtcccgttgctagtagcacaattgaactcattaccacaataaatgcacatacacttaggagcttcattgggatccttaggattaacttttggcaacttttcaaagtgcttccaaacatgtgacgattt

SEQ ID NO: 280796 - DNA, 682 bp, Cannabis indica
gtatcctcgatactcacatatccgaatttaacctccgtaattaataaattatgcttaatataatcatttaattaaattctcactaattaccctaagtaagatcataatcttactccattaccaaaataattacatatttaataaaatatgtctatttaaatatcactttattttccaggatattacatctaaagctccaaaaccatccagaaaccacagaattaaaaatcaccattaaagctgcaagctttgagttcaaaactcaaacttggttaaacatcaataacatgcatccaaaccagctcaaatcttcctaaatatgcatataataatctcagaaaacatcagcaagcaacaacaacaagtgcagcaacagattcttcattttctttgaaaaacatagttttgagtaaaaatttcatatcttgataaaaccaactaatcaccaacctatcatgcttgaatcaacattttaaatcatattttaacttcagaaatcaacaacaacatacagcagcaagtacaacaacaaaactaagcatgcaaccaattcttacttgatttatcaagaaactaaagaggaaaagagtaagaataatacctaaagcataaattgcacacaaaattctgcttgaaaaccaaagaatcaccaagattcttgctgctcaaaggagggccgaaa

SEQ ID NO: 280797 - DNA, 824 bp, Cannabis indica
tgcatgctaaaggttgctgcacttgacaagaaattttggggagaagcattgaaaactgcatgctatctaattaataggtgtccatccacagccctgaaatttaaaacaccacaagaagtctggactggacatgttccaactgttgaccatctcaaagtgtttggttgtacagcctttgcacataccagacaagagaaactagagccaagagctctcaagtgtttgttccttggttaccctgaaggggtgaaaggatacaaactgtggtgtttagaagatggccacagaaaatgcattatcagcagggatgtagttttcaaagaacatgaaatggccatgaaaactggtgctgcaaatcataaacaaactgacagagaaacagcaggattagaaattcaaagcaacagggaaaatgaagacactacagatcaggtggatactcaagaacagtcacattcagaaattgatgaacatgcaactgaggaagagaacttaccagatgactcacaagaatacatgctggttagagacagagaaagaagacaaatcaagccaccagaaagatttggctttgctgattgcacagcttttgcttttgcatcagcagaagaaattgacactactactcctagttcataccaggaagctatcaactcaagaaataaaaggaaatggcttgctgcaatcaatgaagaaatgaattctctactcaagaacaagaccttgaaaactgtaactagaccaccagggcagaaattgataggctgcaagtggatttttagagaaaaggaaggtctacctggtgaagaaatcagatttaaggc

SEQ ID NO: 280798 - DNA, 686 bp, Cannabis indica
gaaaattgctggcttcgggaacctctgtgttatcaggtggtaaaggagtgttgggaggaaaataatctagcgggtatccaagagaaaatccagcgatgtggggaatctctttcggtttggggcaaagattattcaggtaattttgcttctcgtataaaattttggaagaaggaggtgaggcggtggaagcaaggtagagatcctgatgctatttctaaatataaggaagctgagacagaactttttgaagttcttactcagaaggaggtgttttggcgtcaacgatcgaaacaattgtggcttcaggagggggataaaaatagcaaatttttccatgcaacggcttcttctcggcgccgtatgaatgctattgataaactccaatgcgacgatggaagttgggttgactgggaatcgggtctatcagatgttatgtgttcttacttccagaatctgtttactagttccaactgtactatggaggatgttcttgatgggatttctgctactgtgacttcagctcagaatgactctcttttgcaacctctgactgatgaggaggtgaaagatgatctatttcaaatgcacccagataaatcccctggacccgatggcatgactccaggtttttatcaaaagtgttgggcaattgtgggtaatgacgtcatcaagcaggtccgctcttt

SEQ ID NO: 280799 - DNA, 365 bp, Cannabis indica
gtttagagatctgagcggaaggagtcatattattccgctacaatcaatgtaaggttttcttaaacccttatgtgtttatttcattgtttagagaattcatatttaggatgttaatccacatacatgctagtaagtctagatcctcgtaaaatacaatttcttcacaattaagccataacatagtgaaaattcataaattagacatagtctaattttagaattaaatttgattaatcaaaatcaattaactgagtcttacaagccgttttatgtggaccatgggcctatataaccgagcttccaataagcaagtctagaatttaccaagtaaattctctaacttattaattcctcgttgaaccact

SEQ ID NO: 280800 - DNA, 693 bp, Cannabis indica
agtaccaatcaatccatttaagctctcttcaactatgtagtcccgtacctacagagcctcagaatcatcacacttgatcttccccaggcaatgtgggattgtacagcttacccggtgtttccccttacggatcacgtgactactgacacgtggatttaatggcttaatatttaacggttaggtacccacagagtttcagaaatataactaagatattattactgccaaaaattaaacttacatatttatttacaactaaaaattatacttacttatttatacacaaattcctcatatctttatatattaaaagtgcatatctaacggtatttcttggtttaacagaatataccttaaaaataaaagaatattctgttaaatttaatgatgttaataggtttgatctcctgttaacaaataaacccaataattaaacccaaaaattaaacaatcttttttaaattaaaaaaatcatatttgccacatatctctctaacaaaccgtataaaataataccctttttttagtaaacataaagctacagactaaaactctattaatttatttatttaatattttttatattacttatttaaagtaacttgttgaattgtacttagtatttaaaaataaatagtattaaaaatagtaaataatagaaaatacgaactttgcgaagtaaaaacaaaacga

SEQ ID NO: 280801 - DNA, 599 bp, Cannabis indica
cttgatttaagactttgtgtactaggctgttaagctcttccttgaatctcttagctcttgccctagtcactggacccactggaattggatttgataattggtccttgatgtcctcatcactttggaatgttgggtcctgcaggatgaaatcgaggagctaattcgaagaggaaagttcgacaaatacaaaatgaacgaggaaggtcttccccgagaagatgacaaagaagaaaatcagaacgcgagtggttcgagaacaccgcacaatatattaacgatcattggagggccccatgttgcaggagactctcgcaaatctcaagagcgatatgccaaagaagctaaagagaagccgctcaccaatgtaaacaatctcagtgaacggccagaaaaattgtttaaaagagaatgcgacgacatcacctttatggagagtgatgcgagatgggtccatcacccgcattccgacacactagtcattgtatccaatattggcggagataatgtccaccatatactcgtggacaacagaagttcagtgaatctcttgaatttccaagcttttaaacaaatggggttgcatgagaaggacttgcgac

SEQ ID NO: 280802 - DNA, 1187 bp, Cannabis indica
aataggccaaagtctaacagttgggcaaaactattatctaagtaaaaatgctaaacagaagtcaaatcaattgtgtaaataacttaatgaaacaatgaatctgtcaaaatttaatttttgtgtgtgtttatttgtgtaagacttcaccacaaagtcaagaaaatgggttaaactttaacaagaaatcgtgacttgaataaattctaacataatcataattaaaattaattaaacataatatacataagatagttaatgtgaattttaccaatcctatgtagacaacttttcttttcttttctttttttttttttttaaaaaaagttcccgaacaaaaatcctccaaaataaagacaagtacataataattagacaaatgctatggacgtccaccatcccaagaaagactcatcgtattttgtttacttgtggacttgacaagaagataaacgacaaactacactatatacagtctacatgtttgcttttcttctgtccatcttacttttctgtttactgattcctcagtatgcactaaagtactcagtatgtacctacactaaagtcatccgtaagtaacaaacaactacttgatctttctatacaagttgagttggtatgtttacattttcagaatcagaaaggctccagcttgacttctgggctttgagaatctttagactcgacttcttctgggatactagttgccaccaagattccaccattgtaaccatccataagcaacttccctattttggatctccactctgaggtgtccttctcgttcttcctgtcgtgcactactctgtcgcggtaattgagcattgttccgaacccactatttggtatccaaccatattcgattagtaccttcgcctcaccttgagtcaagtcctttccaacctttaccagggattagcaagttttaagagaggaaacaacaaaaaatctattttgtatttattgtcatttatgtaaatacagccatgcttggagataaactcgaatgataaagtcaaaattgaaatttaaactagtagagacatcctccaaaaacagatacagcataggtgccgtttggtaacatttttgttttttaattttttaattacaaaatgaaagtaaaatttttgtttttaaaaaatttatttttaaaaaacaaaaatgcgttctgtaaccacttttgt

SEQ ID NO: 280803 - DNA, 519 bp, Cannabis indica
aaatcaaacatatgataatgaaaaaaagaaaatcaacgacaaaagcatgaagaagaaaatcaataataataataataataataataataataatagacgctgaggagtgatatctgtagagatccaaaacacaacccgatgaaacaacttataatttctctttcgttatgtgctttgcggcacaacaccacagtgggtcttacgcattcttgcactaccttcttcctccttcatctcctcatccaacaaaacaccctcttattttttgagcatatatatgttgacttagtttatttatttacatttaattagttcaaaaataataatcttttttgtcaaaaaagataacataattattcttttaaaaactaattagaaataataagcctacgttcatgtatattaggaatttgctaattactctatgttataaataaaatcaataataagcctacgtatataaatagacaaatctgtatattaattgtacgatgaatatggaagaatttcaaaaacaat

SEQ ID NO: 280804 - DNA, 652 bp, Cannabis indica
ggtaagctgtgcaatcccacaccgcttggggaaggtcaagtgtgatgattctgaggctgtgtaggtatgggactacacagttgaagagggcttaaatggattgattggtactaccagtagccagagtagcgtactcgtgtataagagtcattcattctgtgggtgtaagggcccaatggaggcttgaagcggggcgttacaaatggtatatgattaagcgagtaaaagaaaaatgtatatgagaattggattaagcgatttttgttctcgtgttattcttagaaagagtgattttgatagtaaattttattcctatttcattagttggatggattagtaaatgtttcttttatagtgatatgcatgtagctcattcctgagagtatgttaacttgtgtgcttctaagcctatatattggctagctcgcatgtgtaagaagacctttaacgatctttagcttacatgtagtttatgtaatttatagaagacatatggtctgtttgaatgacatcggtttgttgatgatatattggatcgttatgtgtagggcaacattcttaataattatgctacgaaactataataacggaattgtagctttatggaggaaattaagtaaaaaaaaattaacattcaatgaaagaatgggaa

SEQ ID NO: 280805 - DNA, 983 bp, Cannabis indica
gaaatttcacattataccaaaataatatttttgggccgaggccgtcaatacttcttgttatattttgaatcgtgttttcattaggcccaacatgaataaaaccccttatgagctttggaaaggaagaaaacccaacattggctattttaaagtttttggatgcaaatgttacattttaaacaccaaggacaaccttggaaaatttgatgcgaaatccgatgttggaatttttatagggtattcaacacatagtaaagcttatagaatttataacaaaagaactaatgttgttgaagaatctattcatgttgcttttgatgagactaacccgcctacaagcaaaagtttagatgatgatgttgtaggtttgggagatgaggttcaaaatctcgaaattggagagacttccaatgctccttcacaaactcccaaagaggaaccacccgtggaaaaggtaaatgaaagccaaggtatgaactctaaccttccacatgagtggaaattcaaaagtgctcatcctatagaccaaattctaggtgatccttctcaaggtgtcactactagaaactcccttagaaacttgtgtaatttcattgcttttatttctcaaattgaaccaaagaattttaaagaggccgaagttgatgaattttggcttctagctatgcaagaagaaataaatcaatttataagaaataatgtttgggagttagttccaagaccgtcacatcaatcggtgattggaacaaaatgggtctatagaaataaggtagatgagcatggggtcattgtgcgtaacaaggctagattagtggcccaaggttacaatcaagaagaaggaattgattatgaggaaacctttgccccggtagcaagacttgagtccattagaatgttgttagcttttgcatgccacaagaattttatcttgtatcaaatggatgtaaaaagcgcattcttaaatgggtacattatggaagagg

SEQ ID NO: 280806 - DNA, 597 bp, Cannabis indica
aaatctcactataacacatgcccctagtttcgcgatgtgacaggagcggtcactgagggaaactattactcgagagacaggtgaaaggttgtcacgaggaggtgaccttttggttgtcccatcgagggtttcgaaaaatgacggctgtaattattagtttttattacatttatggtgccacgtcacaaaactcctcggtttttgtgtaggcgtggccatcgttggccgttagattgggcgaccttaggcattctggctgccacgtgtcgtaatcccaattaataagggatatgggtatttaaatcctttgatacgaatcaaaaacttcccatttttccctcttgctcttaacttcctctttccctccattacagacacttcaaaaatccattcccagattttctaccatttttccacaacattctcaatctcagaagtgatcgagagcaatcgcagaaatcagaactaaaggttagttttcaagtcattgcattttcgttttctgtttggagaaaatatgctttactttctgggttcgggtatttaaagcccgcttagttaatttggaaactagcagttgtttatgtttaattatga

SEQ ID NO: 280807 - DNA, 744 bp, Cannabis indica
gaaatggtgggacaaccaggatctttgtatttaagcggtgtcttgcagtcgatcaccgcactagcttgttctgccaagaatgcagttttcttgacatggtgcttccttttgatagtgcatagatccttgataactttggcataagccggtacttgcttgattacatgaagtaatggcaagttaaccttaacttgtgtcaaaaagtcaaggatttcactatgactttccagtaccttcccagtggatttcaaagcctgaggaaagggcacctttactggaaggttctgtggcacatcagcatctggagcgggcattggtacactagtggtcttaggtaatggtgataccgtactttgaccacttcgggtagtaatagcattaacccctttgagattagactctgaaggagcggaggtttgtgccatatgttgccctttgggagtgattagaggctgagcgggaagcttaccacgctcttgaatgactgaagaatcatttaactttgttatttgaatctttatgtccttcaattcctctatcacctgagtgaaataagtcctgaactctagttgggattctgcgagaattttcatggaactctcaagagaatttttcagaaatttcttcaagatattccaaagcttcttcggtatctttctgtaggaagtcgccatcgcacatcatttgtacgaattatcttttgtcggctgtgagaccgtcatagaaatagctgacaagacgcca

SEQ ID NO: 280808 - DNA, 783 bp, Cannabis indica
tttgacctaactccactaaaagtgtaaacttcctcaacaaataatccgtagcattctattaattccagaaaacctaacctcagttgtaaacttgggttgaagtcaactctaaattgctttggaaatacccttctcttaaatcttcaactggtaataaccagatcgaagaccgatctcagaaaagaaaaaaaaatggtacttccctaacattaatcatcacgatttctatccttgacaaagaaatacttactcttcgtcatgagtttatttaatttccatcgatcaatacacttttgtaaagtttcattcttcttcttcacaaataaaactggcgtaccccaggatgggatacaaagtccaacaatttcaagtccaacatccagcatcccctgtaactgaaccttcaaccatctcaaataccattcgatacgaagtttaagatataactctgcccaagtaccagatttatttcaaaatcaatctcccatttaatagtaactccaataacttccctgaaaagacattcagaaattctcagaccactggaacgtattctggtcccataggtattcttcataatatataccttactagttaagaaacggatgcatccattccacattaaatctcttgccttaaatgctgaaattaatgaaattcaggactcttgaaccttgcccacgaacacgaatgggtcctcacctttaggtccaagagttaccatctttctttcacaatcgataattgcattaaactttacaaatcaatccattcctaattcat

SEQ ID NO: 280809 - DNA, 128 bp, Cannabis indica
ttcgaaattagaagaagaaaagagagagagagggggtcggctatagaaggatagtgagtggctaaatttttctgaaggcaaaaatttttgattttcaatctcttgttaagtgtgagccatcactatct

SEQ ID NO: 280810 - DNA, 530 bp, Cannabis indica
aaagagttttatttagggcataaaacctaacatcagtatgggtcatagtggaccgattcatgaaatcagctcattttctaccagtaaagattacttatacagtggatcagtacgttgagctgtatgtgaaggagatagttcgtcttcatggagctcctaaatccattgtttcagatagagatccaaagtttacattgaaattttttgaaggtctttagagagctatgggtacaaagctgaagtttagtacagctttccacccttagactaatgggcaatcagaaagaacaattcaaatattagaagatttactacgagcatgtgtcatggactttgagggttcatagagtaagtacttgtctttgattgaactctcctacaacaacaactaccaaaacataataaggatggctccttatgaaatgttgtatggtacaacatcaactaccaaagcacaataagcacaatacattgggacgaaattggagaaaggaagtactttggtccagaattagttcaaaagaccaatg

SEQ ID NO: 280811 - DNA, 908 bp, Cannabis indica
cttgtgagtagatctaagatgctggtaaaataatttccaacacaaaggcctagcctcagacccaaactgagattggaactcgggcccggacacggtcgtgtacccagaccggaactgggacccaaacctagacctaaatctaggactcgatcccaaacagagacttggacctagatagggatccggatacgaacctggactcggaccaagacccagactgggatggaaatgctggacctagatctggaccaagatcctgacccatacccaaacttggacccgcactcgggacccgaacatggacctggacctgaacctagaccaagatcggggtccagacgtagagacaaacctggacacagagtcggacccgaactggaacctagaccaggatcagaactaaggacttagacccagaactgaatctagactcagatcgggattggaacttgagactcggacccaacgtagaccaagacccaagacgcgagcccacacccggagcctaatctggacctagactgaaatctggacctgaacccaaacccaaactcgaactcagaatcgcaaatggaactacaaccgaactaggactaggaccaggacaaggacataaaccaaaacccgaacccagatcaaaaccaagacagagacctaaacaagaaccgagactaggactcgaacccgaaccaagaccgtgacccaaacccacacaataacaaggacatggacccagaatcaggataaggacctgggaaacaaagccaggatcgggacgtagtacccgacccaaacccgaacttgaacataggacccagctcgtgacccggcaccaaaatggaaccagactgggaaccgagattgggatttggatctggagccagggcttggacaaaacccgtagtcgg

SEQ ID NO: 280812 - DNA, 620 bp, Cannabis indica
aaatacattgaagggtgtaatggcaaattagtccctactcaatgtagatcatctatggaggactattgattattgcgataataaaaaatggataatctcatatcgtatctatattataaaacatatagagtgttctatataattgagagtacaattctaaatctatagtggtgcatggaggaattaataagttagagaacttacttgttaaattttagatctacttattagaagctcggttatataggcccatggtccccatactagttgagacaaactgcttgtaagactcaattaattgattttaattaattaattataattctaaagttagactatgtttagtttatgaattttcactaagttaaggcttgattgtgaagaaatagaattttagggcttatttgttaattaagagactttatggagtctaaataataaataatataaatgacaattttatttgattattaatttaactattaaataaatagttttggcatttataggattgaaagtgcaaaaagtagaatttgtgaaaaatggtaaaaatctatcttgatggacccacataggggccagccactaggtcctatttttactctatttttatcattttt

SEQ ID NO: 280813 - DNA, 703 bp, Cannabis indica
gcgcccttcagtgtttttattattttttctttttcctccggatctaggctctttcccagccggagtactttggtggagtcgaggtcgcacactgatatttcctcgacatcctccattggttccacaattttttcggaccccactcggggatccaactcatcttcttcagccatttctggctcaatggtttcccggaccatcagtacgggcaggtgggttgcaacattgtaacattgccttgcctccccctgatttcctctcaccgtccctattccagcttcctgggtagggaactttaagcacaggtgccgaatggatgtgactgcgccaaaatctaccagggccggtcggccgaggatcgcgttgtaagcggtcgggcagtccaccaccacaaaagtgcagtacttgaatgtgctctgggggtgtccgggcacaaggtgactggaagtctcacttttcccattgggataagcgtcgttccattaaaccccgtgagttgggaaccactgggtgagaggtctcggtccgtcaggcctattgcagtgaaggcctccttgaagagtaggttcacggaacttccgttgtcaatcaagactctggccaccactttattagcgtcttcttccgtgaacgtgatggattgatccatcagccggggcctttaagctgggagttgagtaacctcccaaacctcattgtgctt

SEQ ID NO: 280814 - DNA, 966 bp, Cannabis indica
gtattggttggtaatcggctgtgaaacagcctttgaatctttcatagaaaacttttctatgatcttgttgatatagtcttcctgatgtagcatgagtttccctttgcctctatcccttagaatgttgatccccaaaatcttagtagccacacctatgtccttcatttcaaattccgacttgagcaaatccttgaccttgttgacatttgacctctccttgctaattattagcatatcatccacataaagtagcaagtaagtgactttagtaatttccgaacctttaaaatacaaacagtggtcatagtagcttctattgaacccttgtttggtcataaaggtgtcaaaccgtttgttccattgtctcggggattgcttcaatccataaagagacttgtcaagcttgcaaacatggtcttccttgcctttaaccacaaacccctttggctgctccatatagatgtcttcttctaggtccccatgtagaaaagccgtggtcacatccatttggtcaatctccatgtcaaactgagtagctagtgcgagcatcaaccttatagtcttatatttcaccactggtgagaatatttctgtgaagtctatcccttctttctgtgtgaacccctttgccaccaatctcgctttgaaccttaccggttcatcctcggttctcccttccttgactttgaaaagccatttgcaagataccacactcttgccatcgggtctaagtacaactctccaagtcttattctttatgagagagtacatttcctccttcattgctttcaaccaagccttgtagtttcggtctttgagtgcttcttcataagattgtggctcatagatctcagctttaagcttgcacatataggcataggcaatactctcatcccacacattgtaactgtacttctggttcggtttagggactcttttagctctatctcttgtaagctgatattc

SEQ ID NO: 280815 - DNA, 743 bp, Cannabis indica
agaaggttcaagactttatagtgaagaacatcttatgccggttcggactaccatccaaaatagtttcggacaacggcaaatagttcgacagtcaatctttcactgatttctgtgcgaaccatggcatcatcaaaagcttctccgcaatggtacatccccaagcaaacggtcaagctgaagcagtcaacgaaaccttgaaggatacactaaagaagaaacttgaagatgccaaatgaaattggccggaagaactccccgaagttctatggtcataccgtacaacggaaaaaacaataaccggtcagacaccattttcaatggcgtacggttatgaagctatgctgcccgtcgaactcgagccaccatcccacagaaggttgacgtacgatcaaggtaccaatcacatactccttgcagaatcacttgatgaaatcgaagaaaaacgagcaactgcaaacttaaagttggtagctcatcaacaaaaggtagctcggtatttcaacaaacaagtgaaagctcgaaaattctttgtgggagatatggtcctaagaagggtattcctaaacaccaaagacagcacgtcaggcgtactaggacccaactggaaaggaccataccaggtggtcgaagttctcgagtccggagcatacaaacggtaagtatgacgaaaaatagcaactcattctagtaccatggtattggaatggagaacatttaaggaaatactaccaatagagtactca

SEQ ID NO: 280816 - DNA, 602 bp, Cannabis indica
ttttttttaatatattacgttattttttttttctaaatttggttatgttttaaaataataataagtttattaaataataatcaatgaaataatatatttaatttttatataatttgatatttttatatatatttgaatttttattttaatttttttttactaagggattctctgatgaagattaaaattaagggtagcactcacttcaaatgtgtgtaaaacatatttactacttataactagtcacatgtatgttagtactcaacctgttaaccaaattctattaacaatttaaaatgaatgcaatatatatctattctatataaagtgtgtctatataactaaaattcttggtttttgagaaatttatgggtgacttttaatttttatttgataaaataataataaaaaaaatctcattaatatttgaactgatatttgggtgacttttaatttttatttaataaaataataaaatattatttatatataataaaataataataaaacaaattccattaatatttgatgctaaatattcgagaatcacaacacatttaaaaaaaaaaacaacccgggatttgatactctgagactctcaa

SEQ ID NO: 280817 - DNA, 626 bp, Cannabis indica
aaaacataaacaaattcaaatgaatgaaataataacaaccaacaaaaaggataatagaacaaaaatcaatataactaaaaaaatataaatcctaaaaagaaatcaaaacaatatacacaagccaaaaaataaaataaaaatgaaaaagaatctgttgaccgaggttttcggcaaccaacttaataatatataaaaaaaagttgtaggaagattagtgcacgagatttttacgcggttggggcattaatgagtcttagtccacgagtcttttgtatttatgagagtatttattacagagaatgttcttggtaacttttctctctttggttcatatgaaacccagaattctcgacccctgccttaatgtgtttgggaggtagtttatagtatttttgtggggtgatccctagaaccgagctacatgtctttctgttattttttctaataggggcacacattccaaaccagtgtaacataggaaatgcatggtctataccctacggtattttaggggtttaggttggatgtaatccattatcccctctcgctgatgtgattcctcataaagtagttgtcactaggcttattgatcatgcgtaatagctgcagaggggggtaggtcagac

SEQ ID NO: 280818 - DNA, 561 bp, Cannabis indica
tttttacgacgataacaacttcggcaaatattctcatttcttatttttttacttttttttgctaactaatattttattttattggatatataatgactattttcggtagtgtagtgggttgatggttaagtcttagagcttttaagaagtttgtaactagttttattttggtattgtattcgatttgttcaatatttcatacagtatatagaatacaagcatgtataatttatttataatttttggtatctgtaactggtttttttcattaagataacaactctagtgaatatactcttattatattttctacttcttttgcggttaatattatgctttagtgaatagtgaatgttttggtagtgggttgatggtctagtagtagattttctaagaaatttgtagctggttttaatattagtattgtattaatgatcaaatttttgagcttataaaaaatatgtaaaatttatatgagcttagtattgtattaagtgatttaattttctgcaattatttttaggctaattagtaatttttcccccccgaactttgacatgt

SEQ ID NO: 280819 - DNA, 504 bp, Cannabis indica
atactcccaatataaaatttcattcataaattcatagccttcaaaaaaaattctatataaaatatatatatatattatttataatgtgaagaataagatcaaaagagaattatattgatagatggatctcatcatgtaatttatataagtacattatatacattgacggaggaggaagaagattcaataggtatttttgaaaaaaaaaacttttgaatttccttttttgtttaatttcccttactaagttaaaaatgtaaaatttaagtctaaaatacctattatagaaaaaatccctataaaaaatatatgtgttctttttcccactgttataatcacctagagacataggacaatcactgttacagtagtagggcttaggaaattgattttaatagattattaatttagtaggcataagtccttgattgatgataataaaatcatatatatcgatatgcatagttaactaaatgcatatatatatatattaaaattaattat

SEQ ID NO: 280820 - DNA, 528 bp, Cannabis indica
atatatatatatatgagtacgtacatattagctgtagtcattaatctcacaaaataatcacatttgtgttgtgcctttatgattttcattgtccatgaaatatgtgaaacaaattggatcgaaattatcgaattttaatacctttattatgatgattctttaaaaggtttacaatgcatgatcaatccaatgaaatagttttggctttgattataatagtaacaatctttatgttacaattatattacaacaagaatacttatagattggtactgtgggtgatcctggagcaaacaattcttctgatggttatggtatgtatattgaaattaaaaaaaaaatacatatacacataatttacataaatatgatcactaaatattcatatatttacatgtatatatttatatatacacactaaaaataacgcaacaaagaaaaagaaatatgagtttacaaaaataataatatagtagaacaccaaaacatggtgcacaaaagaaaaatatatgtatgtatttatataca

SEQ ID NO: 280821 - DNA, 504 bp, Cannabis indica
atcggcagaccccactgctattaatccgccggtattaatattattaccggccgaagaccattttcgtcactaatagtcacttatagcgaccaattaataccggtggataattaccggcagattccgccagtattaattattaccggcggtctgggctattaatatcggcgaatgtctccgccggtactacagaaaattgttgtagtatatgttttattactaagtagcagcctagaatttgtatccatttttcatgatattatgcatgaattagatataccatgaaattttcttcagaaaaaattctatcttccacaatggaatctgataagtgagatttcgagtttatgttcacataatcttcttctgtctaaaaaaatgattcatcaaaataatgattcacctagaacgaacaggatatctaattattttatatttaatattagaaataatatttaaaaataattttgataaataccccatcactttaggtagacataatat

SEQ ID NO: 280822 - DNA, 1147 bp, Cannabis indica
gtgccttttacaactggggcactctgggttagtgtatcaggtctcagaactaccctgacgactgcctcgaccctggttcccccggaacctcttgttctgacccgagccactggttgcagtggatgcctttcttttctggtccatggccgaaccactacctcccctgctaaaacctgatgcaggaggggtaggagtcccgccaaccaccggagtcccaccagactctatcatgcatcccactgcgccctcagctcgcaatgccttatccaccatttcagcataggtggttctatcgtcagtagtaatcatcaggtcatgtctgatcttcgcatttaatccatccagatatttttctttcttgctgaagtcagttggcacaattcccgaggccaacctcgccaatcggtcaaattgcgttgtatattcagtaacactcatattttctttctgagtcagatgagtgaattcctttctcttggcactcctaactgcttcattgtaatattttgcattaaaaagttcctggaacttttcccaggtcattgtcgtgacatcatgtatcatagacaccatgtcccaccagaccagtgcatcttcttgaaactggaaagtggcacagaccaccctgtcatttccggtgacgcccataaagttcaggattctagtaatcactgatagccattgctcggctttcatgacatcaggacctcccagaaaaactggaggtgcttgcttgcggaacctttcatacaggggttccatccgattcactgccaccactggttcggcctggacagcaggggcaggtgccactggaatttctggagcaggcattgcaggagcaccctgctgacgtaaccgttgaatctcattatcatgttcctcaatttgggcttgcattgctgcaaacctattttcccaattttgggcatcctgagcatcttaggcagcttgggcaacctatggtgggttaacatcaccccggccacgtgccctgcccctgagacctctacctcagccacggacatttgggggattttgagctccctgaccagcattagatccaaccgaattgccctggctcctggtatttcgcctggcgtccatactaatctgaacagcctgcgtaaccaagagctagcatggt

SEQ ID NO: 280823 - DNA, 293 bp, Cannabis indica
aaaattctacactgtgttatctatattccattgtggatagaattagagataagtcttctgtatattcagatgcactttataagcagtaaagaattcagtatcactaaatgagtaatgcatatagtaaataatgttgcataatgttttatgagcacaaaagaagtaatggtggagaaagtagtagcttaccacagacttacagttcctgaaatttaggttgagtcaaatatagtacacttgatctgaatatgaagacgataaattgattgaaatgcactacttgttttatgtta

SEQ ID NO: 280824 - DNA, 779 bp, Cannabis indica
catggcaataccccttaaaacataaaaacgaggaaaaacacgggttctgaaaattccccttctgggaattactggaccctcatccggaattccggttgcccaaccggaattccggttcctcgcaggaatttttcaaaaattcataactcgatcaattctaacccaaatcatacaagatcttccagacctgttctatatgccccaaataaccattcaaaggcaacaaaatcacccagaactcacagaatcacaaaacaccattaaagaccaagctttgagttccaaaactcaaacttggttaaatcccacaatcatgcaatcaaactagatcaaacctacttaattatgcataactaagcctctgaaaacaactaagaacatccagcaacttcacagcaacaatttgaaccatttcattcaaaaattcataactttttcacataaaaatctaaccaactagaacaagaacttaagcatgcaattcaatctcatcaaacctactgaattcaacactttaatcacagaaacaacaacaacaataaccagcagcaacaacaccaaaacatcatgcatgcatcaccattttcatcatttttttcaagaaattacaacaagaaaaggttagaaactttaccaaagatttgaagaacacttagattggatgaaactagcttgaaaattgaagaaaaaccagcccttgaaccccaagctttcagccgaaaaagagagagagaaaagagagaaaaagcttttccaatatttctaatttttaaacttag

SEQ ID NO: 280825 - DNA, 596 bp, Cannabis indica
aggtgtgttctgacaggttggcgcggtatagtcacacccgggaatttcgggccgaaccgggttcgggcccgaaatgtaaattgaattgattatttggcattttatttgatatgtgataatctgaaatttaattggtaatatttgggtgtgaaatggcatttatgcccttgaaaatgaatatgtatgttttaagccctaagggcaaaatggtcatttgaccataagtgatttacttgaaccaaaattgatttttgagagaaaatgaattatttttctggtttcatctctctctcacccgaaccctctctttccctaaagcccatttgattttcaaagttgattgttgagaattgcttgaagttgggtgtgaattggagctttggattgtggtttcttgagcttgaagtttaggtaatttcttgctgagtttttattgaattttaattagtggaatcttgctggaattgttatggaaaagcatgatttgagttgtatcttgccttgtgattgcatgttcttaagtgtggttataatcttgatgaattgatctttggatttaagttctttcgagataggctaccgaaaaataagatgca

SEQ ID NO: 280826 - DNA, 485 bp, Cannabis indica
atgaaactcaacccgaagaagtgcaccttcagggttaagtcaggaaagtttctaggcttcatcgtcagtcagaggggaattgaggcaaatccagaaaaaattcaagctctcctgagcatgccttccccaaagaaatacaaagacgtgcagagcctaaccggaaaggttgctgccctgagccgttttatctcccggtccacagacaaatgcattcccttcctcaacatcttgaggaagtgtcagaaatttgaatggtccgacgagtgcgaggaggcattcaaaaaactaaaagaacacatggccaagccaccaatcctatcaaagcccgttctcggagaagacttgttcctatacttggccgtctccgagaatgcggtcagcgcagccttagttcgggaagaggagaaaacttagcatcccgtgtactatgtcagcaagcgcatgagaggggcggagacgcgatacccagtgactgaaaaactagt

SEQ ID NO: 280827 - DNA, 465 bp, Cannabis indica
ttatcattatgtttaggatgtctgcgtccttagatagtcgccttttgtgaacatcgcatgacaaagttgatagaacctagacatgcgagtctatattggtttatcaaggctgcaggattcttaggaccaacccgcttttatagaaagttggtctcctggtttatgcacggacatggggaggatagtcgcacataattcgatatatgcgagctactctcttgtctcgaatgcgatcagactttggtcatgctcgctacctctcgctgattctatcttaagcgaggtctaaaacttcgaggagtccctcatggacatctcagctttcattggaaatctgagtatacgtgtcctctaaataggggtctggtctcgagtttctaggtgagagaaatctcactataacacatgcccctagtttcacgatgtgacaggtgcagtcacaagggaaactatactcgagagaca

SEQ ID NO: 280828 - DNA, 509 bp, Cannabis indica
gtaaaataatttccaacaaccatgggtctatataatcaagcttccaataagtagaactagaatttacaaagtaaattctctaacttattaattcctccttgtgccactatggattcataatttcactcttaattatatagaacgatctatataaaccaagatatggatacgttaagattatctattgttacaatcctaatagtcaaagatcctttatagaatataaatgatctatatcgagtagggacaaatttaccgctctatccttcgatgtattttatccttaaaacacttacctataaatgatatttcagtaaactaatataattactgaaataagatctcaatcatttatctctatcaagccaagctcaaagaaaatcatcgttccacttctaaatacttatagaagctatagatttcatatctatgattagtgctcccactcaattgaactaccatatccttaatctgtatgtcacaagaagatccaattggtcgattttaat

SEQ ID NO: 280829 - DNA, 791 bp, Cannabis indica
aatctttgtgttcacctactcgataaagtattattaggtggtccagttgcttcaagatggatgtttcggacaacaagccatatgggtttgtacaagaaatatgtgagaaacatgtctcaacctgatggtttaatagtagaagcttttgttgtagatgaagttgtaactttcttgtcaagatacgttctaacatagagacaagattctcaagatccgagcataattgggatttacctactccaaatcataagttagatattttcaactccaatttttcgttcattaagggcctctaccatctaaattgcttgaaaattcgagaaaagttgttcaatggtatatattgaacaattctatagatatatccaaaattttctcgagtaagtaataacttttttttttcttaaattatctcaactctatattattcactttttcatagaaataaatttaaatatagtgatcatataaagttgttagaagaaaaaggtctttctgattcagaagttgccttaaagcacaaagaacaatttccttaagaataagataaaagactatcattagtgaaaacttactaaattcttaaattgtgagatcattcatcataacataaattctttcatactataagtatctaaaatgcgagttcaaaactcacctcttgccaatggtgattgaagaaattacactttataccctttttatattgtcctctattatttttaccctcttttttaaagtctatcatttttttttttaattattgttccaattttgcccatgtcacttca

SEQ ID NO: 280830 - DNA, 515 bp, Cannabis indica
ggggcggcattgcaatcaagttccgttcataagctcgcaattctgcttctagcttattcatgtcagaagagttaaaattgttgatcatataagatacaacaaatccattatactcacgaggaagactagtaagtatgaactgaacccattgttctctagataattcaattccaagcaagtttgctttttggaattttagattcatcattaacaagtgtgagttaatgctctttccagggagcattttcacactatagacttcatttgcaaaggcatttattaggagtgggtctgggtgtgggttgttcattttgacactacaaatatcaataaacagaagtaaatcatttggttcaataaattcatacacaaatttaaaaaataaaaagtataacaaatatatttataaaaataccaaaaatgaaacatattctttattttccaaggttttcaacaaactgatacagtgtcccgtttaggcgatagtcaaagcatcatccattgaatagagtagt

SEQ ID NO: 280831 - DNA, 795 bp, Cannabis indica
atggttcacatgattttattttatgatttacatgtttaatgtataaaattctagtaagtaccagaacatatatttattcactaatcacagtattagtcaacacagtggaatacaatcatgatatatgtttaaaagtttaagtcccatgatttgtcaatacactaaatttagactgacatgatgatcagaaataaagtatacttacaccttggaaaagtgttatgtcctttctagggcattggaaaagtatgccagtatcggatgtatggcgtatacatcggattggaccgatattaaacttggataaaatattctaaacttattgttatatctttctaagtcaatatcattggttgatcttaggtctatagatcttaatcctgagatggttaggtttgatctcaattgtattatttatggtcttagagtcgttcgttaaagctcaatcggctgaatacatacattgtgggaacatgatagcgcaattaagtgaaacgataatttcttttagcttggcttaatagagataaatgattgaggcctcatttcagtgattatattagtttattgaaatatcatttataggtagctaagtgttttaaggataaaatacattgaagggcaaaacggtaaatttgtccctattcgatgtagatcatctgtagaagatctttgactatttagattgtaacaatggataattcataacgtatctatatcttggtacatatagagcgttctatataattaagagtgcaattccgaatctatagtggcgcaaggaggaattaataa

SEQ ID NO: 280832 - DNA, 793 bp, Cannabis indica
cttcattatgtttgtcaccacttactacatgacctccttatctaccttatggacccaacaaatatgtacttaacttttatcttattggtcaaactacaacacatataacatatacagtctaatttaagtattgttattcctttatacattacttaaataacaaaacatactccatcccaataacttacatatacgtgctttaaatacataagttttgcaataacatgctcgtaattttgtaaaaaattcttctcttattaacatccttacatgtcattaagagttaaactatttattctctaatgaacatccttatatgtcacttgagaacacattatacaatacaaaaataacaaacaacaaagagtatggtagaagaacttatgcaaacttctctttaattgttctcattctttgaatgttaatttttttttaaacttcctccataaagctataatttcgttattatagtttcgtagcataattattaagaatgttgccctacacataacgatccaatatatcatcaacaaaccgatgtcattcaaacagaccacatgtcttctataaattacatgaactacatgtaagctaaagatcgttaaaggtcttcttacacatgcgagctagccaatatataggcttagaagcacacaagttaatatactctcaggaatgagctacatgcatatcactataaaagaaacatttactagctagtccgtttaaaaccacttaagataaagacaataaaagacttctttaatgaaaaataactaagcatgagatctca

SEQ ID NO: 280833 - DNA, 579 bp, Cannabis indica
atgggtctcagagtacattaaattaatgagtatcagggtatgtttttactttttaaccttaattacccttagatcaatctcagctgtcagatcaaataactccctcatctgacgactgccgtacatcacggattactccgtgaaagtacaataacgggacaaaatcatatccctatatatatatactagcaaaaaattacgtgcgaggcacgtatactaaattttatgttagtttttttctacgttattaaaaagtgatacaattaaaaataaaatatatatatatatattattagttattaggttcaacatcattaccctgtgttcatttttaagaaaaaaaatatatatttatgaaataataatttgttgcaacgggtgtacaggaaaaattcggaaaatatagcatttattagtagagtattgacaatttcaacagtaaattaactgattgtatacttttttgtctgctaacattaagtatttgatatttgagtggtgaactcttatttgtccgcttttcaaatttttctaacactctcattttattcttccaactttctgtagttggagtgatgt

SEQ ID NO: 280834 - DNA, 795 bp, Cannabis indica
atatttcaaatattattatcagatttaaattaattaatttaaaatattagtagtttttaaactttaaaagtaggtaaaaatctgtctttttgcttagttaattatcttatttataaaatttaattattttatcttatttttaaatttaaggtcagatattttttattttaaattatttaattaattttataaaatgaccttatttaaaatttaaaataagattattttaatcaagaaattttaaattgtaacaagatattttgctctttcaaaatttgttattttatttaaattaaattataaaattcgataaatgatatttatttattattttattttattggatatttaattttattttaaataacataaaatttgaaaatttgtttgcatcttttgaatagatatttaggtttgttgaaaacttattttttttttcaaatttataggtttaattttgaaattaattatttaatttaaatttaatatttttcgaaaataatattttattatttagaatttttgaaattattgaattatttaattaatttaaattaaataaatcatatatccaactatccaatttggtgcatgtgtgtattttatattgtttattattaaaacaagtttttataaaacctattattgtttgatctaaattgccatggttaactcttgacagatccaatgatctaattttaactaatagttcaattgtcaataagtcaaataaataaatttgtagcaggtaaattttgcaatcttctttcaactgtgtataaacctagtaatatg

SEQ ID NO: 280835 - DNA, 523 bp, Cannabis indica
ctgaactatgaaagaatggagctaaagcaggacttgagttatgaagtgcgaccagttcgcattatagagagaggaacgaaggagttaaggtccaaaagtattcctctagtaaaagttctgtggagcaaccgttcagaaagggaggcaacgtgggaaatggagggagacatgaaagaacagtaccccgaactttttggtaagtctaatttcgaggacgaaatttcctttaaggagggtagaatgtaatatccagtttatatacatatattggtatttggtatattaagtgtgatacaattatattgttattattattattattattattattattattattattattgttatcattactattaatatcttttttttgttgatatatatatatatatattaaatagtgagatagataaatagtgaggcattagattagttagtttaaaatttaaaatttaaattatatcagcataatttatctgattagttagtttttatttttaaatttaaacctattatacga

SEQ ID NO: 280836 - DNA, 553 bp, Cannabis indica
agaagtcgaccgcctcctagcatgtggcttcatacaggagtcattctaccccaattggttaccaaatcccgtactcgtgcccaagcctaacggctcatggcgcacatgcgttgactttacagatttaaataaagcctgtcccaaagatagcttcccacttcctagcattgacgaacttgttgatgccactgcaggtcatgaacttctcagcttcatggacgcatactcgggatatagtcaaatctcgatgtatgaaccagatcaagagcatacctaattcattacagatcgaggtctgtattgttataaagtaatgccttttggtttgataaacgcaggtgcgacgtatcagagattggtaaatatgatgttcgtagatttgcttggggataccatggaagtgtatgttgacgatatgctcgtaaaatctcaacaggcgaaagaccatgtcaaccatttacaagcgatgtttgagatacttagacgatataaaatgcagctaaatccactaaaatgcgtctttggagtttgttcagggaaattcctcggattc

SEQ ID NO: 280837 - DNA, 539 bp, Cannabis indica
gactaattaatctattttctaattataatatattttagttcatttattttattaatcattaaaatgaaaaaattattgatttaagttggtctaaaattaattaaaataaatcattaattttaaactttaatctatttttcaaaaaaaaaatcaaattttctggatttaaataaaaaatccaatttcgaaaataaatgattaataaataaaattaaaatatattttgaaaattattcaaatttaaattgttttgaaattaaaatttccaactaaaaataattttccatttaattaaatattaagaaaattttcaaatacttaagtatcatgatgaaaatcaacttaaatattaaatttttaatttaattaaatatattaagtacaagaattaaataatcaagtataaaagaaatttaattattaattctaatttaatactaggaaaatattctttatttaagttgatccaaaattaattaaaaataattattaattttcaatttaaaatattttcctattaattattagaaaatataact

SEQ ID NO: 280838 - DNA, 452 bp, Cannabis indica
gttctttcgtgttatttgtttttattcattataacactgttatagaaccggttctattttaattataactggtttgagttattttatgttatttatatttatttattatgttatagaaccggttatatttcaattatatccggtttgagttattagtttttattcatataaccggttatatttttagttatatatgagacatttactttggtgaattttccagtgacttttccagcgacgttgacttttctgttgacttttccagcgacgttgactattccggcgacgttgacttttccggtgacttttccgacgactttttcggtggccgtgatttttccagtgacttttccagtgccggtgacttttccggcaaaacttattgttattttataaatatggaatttttacttttttttacaaaaatatggcataaaaaaaacctatataaa

SEQ ID NO: 280839 - DNA, 571 bp, Cannabis indica
aagtgggaagatatcacgatggatttcatggtcgggttacctagaaccacgagtttatttgactctatttgggttgtggtagaccgattcacaaagtctacacattttctaccagttaaaacaacctttttagtggattagtatgcggatttgtacgttaaagagatagtgaggttgcatggtgtaccaaagtccatagtttctgatagagatccgaagtttacctctaaattctggcaaagtttgcgacgggctatgggtaccaaactgaagtttagtacaaccttccatcctcagactgatggatagtgcgaaaggacaattcgaatactggaagatatgttacgagtatgtgttatggattctgagggctcctagagtaagtatctgccgttgatagagttctcgtacaataatagttatcagagtacaatagggatggctccctatgaactgttatatggtagaaagtgtagatctcccattcattgggatgaaacaggggagaagaaatacttgggtccagaatcagtgcaacggactaatgaagcaattgagaagattaaagcca

SEQ ID NO: 280840 - DNA, 1132 bp, Cannabis indica
tcgccgcacttagcagattcgtgtcaaaatcaacagataaatgtgttccattcttcaacatcctgcgaggaaacaaaaagttcgagtggacagaagaatgtgaaagagcttttcaagatctaaaggcacaactcgcaaaacctcccgtcctttctaaacctctggacggtgaggaactggggatatacctagcagtaacggagcatgtcgtgagtgccgtactgatcagagaagaagacagcgtgcagcatccagtctattacatcagtaaaagactcgtcgaggccgaaggccgatatccgttgatagaaaagctcgcctactgcctcattctagcaacaagaaagctgaggccttactttcaagctcatcctgttcgggtgtataccgaccaaccactacgacaaatactgcagaagccagatgcctctagacggttactcaagtgggcggtagaattgggtcagtacgaaatcaacttccaaccctgaacagctatcaaaggccaagccttggccgactttgtggtggaatgcacaggcaaaactgaaagcataccagaaagcgatctcgagccaataccacagccaagaaatattgaaaacaaaccgacttggaagctacatgtggatgggtcggcaacagatcaactatctggtgcaggaattgcccttgtcacacctggggagcaacacctgcacgcagcggtcaaattcggattcaaagcctctaacaacgaggccgaatacgaagccctaatcgctggacttaaactagcgaaggaaatgaaggccgagcacattgagatctgcagtgattcacagctagtggtaaatcatgtatctggcgaatacgaggctcggggagaaaaaatgatagcatatctgaccaaaatacatcatctgcttgcacaattcaaaagctacagcctcagacaaattccaagaaaagaaaatacaatggcaaatgcgttagcccgattggcgagcagcaatataagtgacaaggcaaacctggtccctatccagttccttgaagagcctagcatcactggcacggaagaaatcgaaatgattgacacatctacaaactgggtgacgccaatagcagcctatctcaactctggagaact

SEQ ID NO: 280841 - DNA, 818 bp, Cannabis indica
aacgtcgataataccctgctaacccgagaaaacttcgaacttccgtcacagacttgggcctcggccaattcttcactgattctaccttgtttggatcgaccataattccattcttcccaacaatatgacccagaaaagacacctcagacaaccagtatacctatacaatgcataaacaataatttccaaccaacaattcacagaacaaaccaacaatactcaacttgccattaaagaccaaagctttgaattcaaagctcaaggttgcacaaagctcaacccaatcaacaatatcagctgctaggaacttaatttaactcaaataacctatacaattcgaaccctaagcataaacaaacctaacagcccctatcaaaccaaaacaccatttcaacctaacttaaaggcttgaaaataaataaccaatagtctagggctttacctcacttccaatagcttaaatccttgctgaaaatccaaggaaatgaaaggaagaaatctggttttgcctttgatttgccccagccgaatgcaagaaagagagaggaaaggtttatgttgattttctattttcttctattttctctaaatgggaaaaagcttaaggaaaatccattttcccttgctgaaaatagctttgctaggtgtcaaccaaccaaaaagccacctatctcttatttctttcaaatgacaaaaatgccctttaaggtataacttaggtatttctaaagctaggggtaaaatggtcaatttccataaccccgctcaatcccgataatttattttctctaaaatatttcccactatgaaataaggtt

SEQ ID NO: 280842 - DNA, 828 bp, Cannabis indica
tgtcttgagctgcttgataaaatgccaaataatcatgagcttcttgttcaatggtctccggtcttgaaacttggttcctgaaaacagatgcatttcttgcattccaacacttccaaagcatacaaagaaataggttaaactcatctttggaaaaatttaactgcattaataaagaatatcgaaaatgttcatgtgtttggttgctttaaggatagagttgaaaatcgtacctgaccaagccttcttcatttccttgcactcgaacaaagcatgctgcactgactcaaaacagagagaacacctaggacaaataggggaactaatacaatgcctatgataaagattgtcagtagtgggaagggagtgttgagccaacctataaacaaaatgtctaattttagggggtattggaagactccagagggatttccaccaacgggtgagggtttccgtgtttgaggaagaaggttgaaccaggttaatggcttgtttagcaacatggtagcctgtcctaaccgagtagtgtccagaagtggagtgctgccagaagtaggtgtctggttgggtgggatcagggggagggagggacaaaatgtcattaatggtgtcctgctggaagtaggctcgaagaaggggaatattccaatccccattggggagaaggagggtggatacatgggtcagggaagatgggatttgagaaggaaaaattcgatggttgggaatccaaggatcaaagatactggtgttagccccgttaccaattcttttgcaaaggcccgatttgagaagggatttgccccaatgaatgctacgccaaacatacga

SEQ ID NO: 280843 - DNA, 555 bp, Cannabis indica
aaaatagaaagaaaaaacgaaaaaaaaaaaaaaaaacgcaagctgtacggacaatatgctgagcatactgcccgcgcacgcgtatgggattgcatgggcgaggaaacacggcgcagcaagggtgctgcatgatttccgcgcgcggatgggcatgatttagacaagcgctcggtcgagcagctgtctgaacgcgtgctgtccgagggtgtcaccctcgtccgcgcgcgtggccctgttgcacgaccctgattttttccgaaacttcaaaaaataataactaattcaaattaaatcgaaattgagttctgtaaaaaagtaaattgcttgattttttccatactatccaatcaaaataatttcagaaacagaatttcaataatttttcacgaaaattcactaacatcaatcaatcatcatataacactcaacacaacatgaaaccatccaaataacaaacaatagttttaaagttcaaatttcttgcaagcaaattaatgaccattgctctgaggccagttgttggaatttattttacaaggatcttagatctaatca

SEQ ID NO: 280844 - DNA, 635 bp, Cannabis indica
atcatcaaaatcggagctataacctaggagttatgcatgtttaaaacagtttctttaaaatcctggatcatgccgatttctgaatacagcctaaaaataaaagttttaaaaatagttacaccccgatctagacaatactttcttcaaaaaaatgtagctatttttctaagctttaaaacgagataaagatcttttaaaatggatcaaaagtgagagagatattgaatttttactgaagacactttttctgaaacaaaacttaaaacgaaataccataaccgagtaaagatcctaacttttgactggtaagaactccgaactagggaaaggtttcttcaaagaaaatatggattattgaattatctttctaacagtacaagaatcgctgtaaaataatagatatcgagagagatatcacacttttactaaggcaatatcggaaagaaattttaaaaaactgtaaatcgacagtcagtgtaaaacatgaattttttgacatcgaaataatcagaattaggaaagagtttcttcataaaaaatatagatcattaaattgatagttttatgaaagcctatttctctgaaaacgaaaataaaaacaactacgaattttacctgaagatttcgaagacacg

SEQ ID NO: 280845 - DNA, 636 bp, Cannabis indica
aattctagactttttcgaagatatgttaggggacattggttttcattttctaaaaaagacattgctcaagccttgcaacttccagagaatgtctccaatgcagtcatgtctatggatcgtgaattgatgctctctgaactcacgggtgcgcgatctgaattgaaatcaggggagagtcttcggattacacatctcacatttgctcatgcatctcttatgcggtttgctcttagcaattgggttccaaactccaacaagaccgtggtgtctcaagatgtggcctcattcctataccgcatcacctctggagcttcaattgacttggcctcccacattttgaaccaaattgtttcattccgaagaggtaaaaagccaaactttaagcttgtttttccaaatctaatctttaaggttttatcctctcagaaaaatgtggcccaatctcatgaaacacttgagccttcgatcactggaccaacattccaacccttggagtactttgatggtgtgtttcaaaagaggcctaaagctggagctgctgctgctgcaagttcaagttctgctactgcagaaatccaggaagtcaagaatgaagttcagctggtgaacaatcgtcttgctgccatggaggaactt

SEQ ID NO: 280846 - DNA, 483 bp, Cannabis indica
caatctggaggtcagcgccttgactaacatcaagcagctgcctacggagacactcaagaattatataaagatgttccgagaagaagcctcaaaaaccaagaaagtagatgacggacaacagcttgccctcctccaagcaggcatccgtacagggactccattctggaacaaattgcaacaagaaggagccgcaaaccttcaggacttccagaagagagtccaaaaatacattaacctcgaggaggcccaaatagtggcctatggaggatattatcccactggaatagcaggatatgtgcccggagcccagccctcaggcactgtgccagcagcagctccaccgatgagcggcatacagttctctgctactcccggatatagccagggccaggccctggcccccgcgtcttcccattttggaaatcctaacggactcccaagagcatgtgtactttgctactaggcaaaatacgcactaccgga

SEQ ID NO: 280847 - DNA, 490 bp, Cannabis indica
caagtaacacaggtttactggaatccactacaactgccagaaatccaacacatccactgcgtaacaaatccctagctttcaacgctgagattcttggaacacgagaaccttggaccgaaccaacaaagacaaaaggttcctcattctccggttcaaaagttaccattttccgtttacaatcaatactagcagaatatttggacaaaaagtccataccaagtataatgtcgaactcggccaatggtaactccacaagatcagcactcaattctctatcttcaattctaattaacactgatctaacccactttcttgaaataattaattccccattaggcaacagggttccaaaccccgtctcaaaaatatcactaggtctatcaagctgatcaagaactcttgatgacacataagatcgagtagcacccgaatcaaataaaacagtataaacaaaaccgttgattagaagctgacatgtaactactgaagg

SEQ ID NO: 280848 - DNA, 520 bp, Cannabis indica
aaaaaaaaacaaaaaaaaaaaaacaattatgaagtacaaactttgattttgaatactcttaaacaaaaaattaaaaaaaaaaacccaaatggtttcgaatcaaattagtaaattattaagtgaattagtttggttcgatttaaacatttagtggttctaatttaattttgaattgtaaaaaatatgcaataatattagttttgttcgaaaaagaaaatggaggtcaaacgcccaatccgtgaacagagtaagtttttcctttaatgttgtttctcatttatataattttatggcagtacatgattaattataaataatttatattttgttgctataatcaaatttaatattatcaaaactcaaaacacttaacagcacaaccattttctcataacaaaaaagaaaaggaaaaaacagccattcggaaactctttgccctcctcaaaaactggaatatatataaatatatatatatatttatatatattattgcattatcttcatggccacgttgagcaac

SEQ ID NO: 280849 - DNA, 746 bp, Cannabis indica
aattcctaataaggaaaaacaatccgcacctgcaaaagtatgttaagaccgaccaaggtcagaggaacgacaacaaccaagatttgctacctccaccagtagatggacatctgcaagtcattgttggaggccctcacattgctggagattcgggcaaagctcgggagaggtatgcccgaacagtgcagcacgagcaagaagaagtcatcctggccgtggaagaaaggaagcccaaagttccacgagcaggagagccgaccataaccttcaacgatgaagacgctgtcaaaattagattttcgcacaacgacccgctggtcgtggaagtccagatagccaataaaatggtggccagaaccatgatcgataatggagcctcttccaacattttgttcaagactgcttacgaaaagatgggactccaactcaaggatctaaccccatgcctccagcctgtctatggtttctccggtcaaggagttgcacctctaggacaaattcgtctaaccctcactgttggacaagctccgacgagcatgactatcatggcacagttcctaatattggatgttccttcagcttttaacgtaatgcttggccggccggccttgtatgacttaaaggctgtcacatcaatatttcactcgtgcctgaagttcccaaaaaagaatggggtagggtgtctgagaggaaaccaacagtctgcacgggaatgttataaccttacagtggccaaggctaagaag

SEQ ID NO: 280850 - DNA, 458 bp, Cannabis indica
taacccgggatttatgtatgattgattatgcttttcttactgagtctatcgactcacagtgctatgttcatgtgtaggtaaggcgaaggccaaggctgaggaaccgtgagaacgagccgatgaagattgtacatgtcggggcggttaggcctggagcgtacgatcctcgggacagcagtgcttatgtagttagtcgctaggcgacaagtatttcgtattagacagtaaacttttgtaaagtattttctaatcgggatcccgagtatttttgtataaaatatattataagtttaattaaaaagcaaattttttaattaatcacgactttcgtgaacctcgttgattagcaatgagctgcacagtatgtttaaaaatcacgtaatacgcctatgctagttagggtgttacaatttggtatcagagccgccaggttgtcttccgaagatcgtcacgacatg

SEQ ID NO: 280851 - DNA, 513 bp, Cannabis indica
atgaggaggaggaggacgaggaggagtccacacaattggggttatagtgtggtcatttgtggccgtataagtattatttaaatcacgaatttgataatataataaatattttatatttgaatacttattttagttgttttaatgttttaatgtgataatataagtatttttatttgagcacttaatttagtagttgtatttaattatttgaatgcttttattattttgattattgtaatttttatcagttttttttatgtatattttaaatataatataaattaattttaaatgacaaaattatatattttttaaaaaatataaaaaacattggccgcgacccttgtggtgccaactgctaaagacaattcgtgatgctgttggagcatccattgcatggccaacaatatttgtggtaagttcaatatgattttagaataatagtttactattcattaaatattattgtaaatgtgcaaaagtattacatgttttggttattttttttttttt

SEQ ID NO: 280852 - DNA, 696 bp, Cannabis indica
atacttcgtaaatttatctctatatagtcaccattggggagagtctaatacataagaaaacttagaaaatacttatctttcgacatctttatgatgctaaatgcttcaaagaataacaatctataaggaagacgaaatttagcgtctcaagattatattgaaaacaattaaccatgtaggaccaacaatggagattgaatatccttataactaaagctcattattttaaagagttgtattttcttttgatacttattttaatctcagtggaggacacgtgtcatgataaaggggaatatggattgatgcaatcgccttatatggaataactcattaattacgtgagtatcagtttatatttgtaacctgtagactgtaaggtcttaggcaaggaactaatatacaaactggtacttagcatattagcaagaaaccatatgtcgctgaatgcgaattgcgaggcatcaaggatagtacacattagaagacgaaagagacatatatcaattgcgaaagtccttagaatacaaactaagtgttacagacggatcgactcaagaacaagtaagagtggtgcccatctcgttatgggaagaccacatataacttcatcccattagcatcagcgagactcacaaccctcgcaagtcagaagctaacattcaaatgagtatcgaagaattctttgtaaataag

SEQ ID NO: 280853 - DNA, 969 bp, Cannabis indica
acacagaaaccgaagagttttgtgacgtggcaccataaatgcaataaaagtaatgattatagccgtcatttttcgaaaccctcgaagggacaaccaaaggtcacctcctcgtgacaacctttcacctgtctctcgagtatagtttcccttgtgaccgcacctgtcacatcgcgaaactaggggcatgtgttatagtgagatttctctcacctagaaactcgagaccagacccctatttagaggacacgtatactcagatttccaatgaaagctgagatgtccatgagggactcctcgaagttttaaacctcgcttaagatagaatcagcgagaggcagcgagcatgaccaaagtctgatcgcattcgagacaagagagtagctcgcatatatcgaattatgtgcgagtatcctccccatgtccgtgtataaaccaggagaccgactttctataaatgcgagttggtcctaagaaccctgcagccttgataaaccaatatagactcgcatgtctaggttctatcagctcatcatgcgatgtccacaaaaggcgactatctaaggacgcagacatcctaaacataatgataaacctgcgagtttaacatcggaatatgaacaagtcaactcgcagatttggaagacgcatacgttgatgaacttagtaactgccgttcatttattaatgttaacgttgtttagtttaattattgtaattcaatgtgtaaaaacggattgacaatgaatgcaatccttgtataactgatcggacacctgctttgtatataaaggggtgatccaccgtgaaatggcacctacgaaactcttgctacagtggactaagcagaccgtgatctgactgaaccactataattctttgtctcattgttatttccagctttctgttaatcatttctcattcccagtttgagtactcgccattctaggttgaatactcgcatttgttctt

SEQ ID NO: 280854 - DNA, 678 bp, Cannabis indica
tgggatcgacctcactcctagtgagtttactacttgaaacgatacgtacacttgtgtgtgcaaattatcgcaactattgagactacccataattcttatttttctttatctaaggcaactaaacaatttacttgggcatttttctctcttatgacttagttgatcttatactccttggatccttaaagttgttattcggactgcagagatgtaagattccacgtgttccccttggtctaatattctcataagacttggttgacaagtaattgtgaatcgttgaatacctctaggggtgagcaaaaaatccaagaaaccgaccaaaccgagtaatccgaccgtccgaacaccgaaaaaaccgacaccgaaaaaactgaaaatcgaaaaaaccgccttcggttaaaaccgctttaatatggtcggttttagtgtcaatcgcaaaccgaccgactaaaccgagaaccgaccaaacatatatattatacgtaatatatattatttttgtacatatttaatatacaattttataatctaagtttacttatatcttttttattaaagtctcaattattcattatattttatttataatttgatgcattttacatattatatactacacattcataaaataatactagtttttaatataactcattactatattagtagcacaaa

SEQ ID NO: 280855 - DNA, 266 bp, Cannabis indica
gaattagaaaattggcgtttttgagaaaatcagatgcagaattgagaaaactgcaaaataattcaaacctaaccctagttgaatgctataaatagatagtgaaggcttcaggaaatttacacaaaacttttcgactttttcattcagaaaaactgagtctctctctctgtaacaccctaactactgtaggcgtattacgtgatttttaaacttactgtacagtctcgttgctaatcaacgagggttatggaaaaaacgtgattaat

SEQ ID NO: 280856 - DNA, 741 bp, Cannabis indica
aaaacttattaaaaaaatctgattttttagaacatcataaactatgaagtttggaatattcttaatcattgtttgcaaaataacctttaggaatgaaattatgagaataattgaattgttagtatcatagaatatcttcagagaaaaatttatggcaccaacgcatagtcattagttttcctatatttgttagtatagatatctgttgaccgaggttttcggcaaccaatataataataattaagaaagctataaggaattaatgagagagatttttacgtggttggggcattaatgagtcgtaatccacgagtctgtgtatttatgatagtgttgcccctgattttgcccaatatacgtggaccaaccacacagggacacgtggacccgaagaccttaacattcaaattagtggctaagtctttgtaaagaaaggcgttatccgggacctacctctcggagaaggcatacaaagtcctccatgctcccggagacctaagtgatatcaaagcacctccgggagatgtcaggcttccactgagcagtcatctcgcatttaatgccgcatgggagaagcgtgttggaactgcctattggaaattattttgccaggatctagatttactaacaagtatgtttgattaacaacctaatatgaattctaaacaatgaaaataaacacatataagttagaaaaccttacagtggatgcagcggaatatatgactccttccgttcaga

SEQ ID NO: 280857 - DNA, 732 bp, Cannabis indica
cagattgcacaacactcaactcatgcttaaacttgcaatactcaaactcaagaacattgagcttcattctcaacaactcaaactattttccagcaattaaacaccctagaaacacataaatcaaagctcaaaacataccataaaatctcagcttaacctatcaaagaagcatacaacaataagaagcccaattccacaagattcatcaattctcatcatcaagcaacaagaaaattccaaacttaagaacatgctttttaccctaaaattcagcaagagaaatcaccaataatctttacacaaactcagcaagaaattacctaattccaagctcaagaatccacaattcaaaagctttaatccacacccaacttcaagcaatttctcaacaattcaattttgaaaatggaaagggttaaagggagagagagagttcgggtgagagagagataataccagaaaatacaattcattttctctcaaaatccattaaattcaatataactcaataatggtcaaatgaccattttgcccttaaggctataaaacatacatattcattttcaagggaaaatatgccatttcacactcaaatattgccaaataaatttcagatttcataatatcaaatataatgccaattaattcaatccaatttgcatttcaggcccgaacccgattcggcccgaaatacccggttgtgactataccgcgctaacctgtcagaacaca

SEQ ID NO: 280858 - DNA, 705 bp, Cannabis indica
tgacgcttgacttccacaacttcgttttcgaaaagacttatattgtggaaacaaacggcatggaagaagaacgcgtcaagaacatacgatataagctaagtgacgacagtgtggaggacataactgaatctgtgaacgtaactaatgaacgagatttggaagaatcagaaatgccagactattttgaagtgacagcagaaatgttggaacttgaactaaaaagcccacctcaaatagaagcagagaaaatagtagaagtaatagagattccttcagatgaagaatcctaagataaggaaatgccagaagggcccattgagccagattaccccccaatactgaagagcaaggactcagatctacccacagcaaccaacatcgatgaactagaggatgacataccggactatcattttgaagtagaaattgatgagtcagactcagaatccgaggacatgccagcaccaattccagcagatgtggaaatggaaataaacttcgaggaacacccagaagaggacctagaagaagaccctgaaggatctgaagccgagtcatgcgtggaggacgaataatagtctctttcaacttgtcaaattttatccaaagaagatatttttgttcctattccaataatctagtgactatgtaactagagatttagtacgcttttaaataaatatttttttttcttctctttcttct

SEQ ID NO: 280859 - DNA, 786 bp, Cannabis indica
gatgaaaacatgatagtgaaacttaccaaagtgccaaaatgtgatccccatcgtgtttcacatggacgcttaatcccattttcttgatttaagccttttccacttgaaagttttccacattttaaggcttcaatgacttgagcagcttgcttttctcgaagaatgtcacgacgcttagatgatgctccaacaatattcaccacattagataccacagtgagaaatgtacctattttttttcatacaatacaaatcattaaatggaaaaatggcttactaaataacaagtattgatatatatataataatgagcaacaaaagaaatacctattatatcatgtttttttgccacccccataagtgctaattgtagttgatgagcaaaacaatggacataaaaagcacattcattctccttcataataatactcttcaaaccattaaattctccactcatgttactagctccatcatatccctggcctcgcaatctagatatgctcaacccatgctttgaaaatagcttatcaatcgctatttttagtgagattgatgttgtactttcaacatgttcaatgcctatgaatcgttcaatcacataccctttcttgtccacataacgaaacattacaaccatttgctcttttatagatacatcacgagattcatcaactaaaatagaaaaaacaacatcttccatgtctttaataataacgctgattgtttcaacagcacatgcatttacaatatctttctgaatctttggagaagtcaatctaaggtttt

SEQ ID NO: 280860 - DNA, 566 bp, Cannabis indica
tagggctgggatttttctgctcaaatcttgtgattttcatctcctctttgtgtaatccaagtcaaggtttgatcacttataacttctctttgtgttttcttgtgttttaagaaagtatggtttgatgcatgcatgaatttgtggctgttgttactgctgtgttttattgttaatttctgtggtgtaagcatgttaaattgaggttaattaagctgttagaaatgcatgtatattaccttgttcaaagtttggaatttttggctcaaaactatgatttttgaaagaaattatataatctgttgctgggttgttgcttgatgtttttagttgttttcagaggttgtaatatgcttgtttaagtagatttaatcaggtttgaatgcatgtttgaggggtttgctcaagtttgagtttagaactcaaagcttgagctttaatggtgtttttcatatctgtgatttctgggtggttttggtgccttagaaatgttctaggggaggtatagaacaggtctggaaggtttcatgtgatttggggttgatttgtgcaagttatgaaaatttggg

SEQ ID NO: 280861 - DNA, 907 bp, Cannabis indica
ggttgtgtacttagtgtaaaccattactagattcatggatgtcctgatcgtgaccttaagaaaagctagaactttaactaaggtttacatgtttgatagctattctaagtgattaggggtggaccatcctattgtcattaagataagaaagtgtttgttttaacaaatactatttttctaagaaaatgactaagtctgaaaacaaagtagcaaagtagacgagatattttttcttgattccaaaagtgttctatcatcttatttgatataagatgatcccactgcctctgttgttttgacacaaccgaagaggacaataccattagtgttcttagacaaaaagtcatggtaccttatcgtagtgggagggtttcaaggaactcaccctgttatgacttggaagacacttgtgatgaaaatccattattagtttaaacaagtaatggattgtcagaataagaaactaagaagtaaagccaagagaactatggttaaaaccattcatatggagtaaccaaaaattttctattacaaggacaagaaaggaagtcttgttaattacgtctacttaatggacttaacaaaacttcctgttcctagtattataggtttgagattttctatacctatggcttgtggtatgcctggtaatttgcttactctagtgcaagcaacttactttagtaagatgctggagcatttttctaatggcaatctatagaagcttctcgacttttagacatagattttatctatccaaggaaaagtttcaactattccagaaaagataaaggccgatgaaagagttccctgaatcaacagtgagaggtctcagatatgctttgttatgcattagaccagacacctgctgttgagtgggagtaatgagttggtgtgagattaatcc

SEQ ID NO: 280862 - DNA, 451 bp, Cannabis indica
aaacctaattaagcttctgtaaacaacaattaaacacagcaacaatcagccatacaaactaacatgcaacctaccattttcacctcaaaaacttcaagaacattaagaaaggttgaggaaaacttactagcaactagggatcacaaaatctacacaagatgagcttgaatcaccaaggaaaatctcacttccttgctgctcaagaagggccgaaaaaggagagagagcttgagagagttttgcaattttctatcttttttctaagtgtaattgttgtaaaatgagaaaatgagtaaaggacacctagcatataaccattcagccaaataatcaaataaataacatttattttcaaataatcaagtcactaaaagacaaaacactaatggggcaaaaagaccattttgcccctccaccataaaaccacataaatcatactaaaggggtattt

SEQ ID NO: 280863 - DNA, 715 bp, Cannabis indica
tttgacttatgactaaggcttctacttttcttgctaatttttcaaaagatgttctcaaatcagtttcttctttaatttcatattttcctcctcttttaggtgaattatttgctctagacctaggctcagaataattccattgttgtgaattaacagacaattcttcaagagcttcccaagcctcttgcccttgtaatttcaaaaattttcggtgtgcatagattgaatcatttgtcggtctgaaggggttaaaccatcataaaaatattttacaagtctccatttttcaaaaccatggtggggacattttaataataaatctttaaatctttcccaacattcataaaattcttcattatctttttgataaaattcggagatttctcttcttaaattatcagttttggacatggggaaaaatttggcaagaaattggttatggttccggttggaagcgagtttaaccaagctttggctttatcttttaaagaaagaggaaacaacctaagcttaaccgattcatccgaaaaattttgaaaacgaaaagttgagcaaatatccaagaaatcttttacatgcatataaggatcttctctttctaaaccataaaaagaaggcaacaattgaatgattgaaggtttaagttcaaaatgagtggcattagtagtaggcaaaacaatgcatgatggagcattagatgaaataggtgaaaaat

SEQ ID NO: 280864 - DNA, 534 bp, Cannabis indica
ataaaggcaggaggtagagcccgataagctacctgacctactttctcaagaatctcaaatggaccaataaatctgggactcaactttcctttcttcccgaaccttcgaattcccttcattggggacacccgaagaaaaacaaaatccccaacttggaattcaacatctctacgctttggatctgcgtagcttttctgtctactttgggaagcaagcatacgagctcgaatcttttcaatagcctcgctcgttctttggacagcttcaggtccaaggtacctacgttcaccagcctcatcccagtgaataggtgatcgacatttccttccataaagcatctcatacggagccatgccaatggtactctgataactattgttataagaaaactcaatcagaggtaggtacttgttccaagaaccttcaaagtccattacacatgccctcaacatatcctcaagtatctggatagtcctttcagattgaccatcggtttgaggatgaaaagctgtactgaatttcaacttagtaccc

SEQ ID NO: 280865 - DNA, 508 bp, Cannabis indica
ctatatggtataacataatattttttaacatatcaaaaaaaatggtagagcataacatttttaaaaccgtcaaaaaaaaatggtagactatgtcattttattagtcataacaatatctacaacaacattgaacatgatattaaaacattgtggttgaaagtactagacttttcacggcacactatttaacctcatttcaaaaatatcattaaatcattattaaaacacacttgaaatgacattgaaacacatttttttatagtagatcctactattataattaaggataaagattcttacatatataattatggataaagaatatttagtgttgtgttattacaaaattgatttaaaacaatgattaattaatccgcgtttagtaatactatcaacacatgcattatgtacacttttaatttgtcaacatacttgaaaaaattcaaagttgaattgatataggacgaagatagaaataaaattgaagtgggatgattatgtatttttt

SEQ ID NO: 280866 - DNA, 759 bp, Cannabis indica
atatttttgggatcccaactattgtaaagtttaaattattacgagttttattttcattccgtttattgcaaaagtttaatttctgcgctattttgattagtaatcatgtttaggggattagggtttcgtaaataacttgggtagcgtgcctaattatttagggtgttagagagactttcttttccttttatactacttctcttagggttagggttgaattatttggaataaaaaaaatgacaaaaaatggaccaaaaatactcctagtggccggccatgatgttgcctaacactaattagagttttgtcatttttctcaacaatttgtctatttttcacaaataccactttttgcaatttcaaccctataaatgtcaaagctattaatttaataattaaaataattatcaaataaaattgtcatttataatatttattaattagactccataaaatctcttcattaataaattaaccctaaaattctatttcttcacaatcaagccataacatagtgaaaattcataaactatacatagtctaattttagaattaaaattgattaattaaaatcaattaactgagtcttacaagcagtttgtcacaactagtatggggaccatgggcctatataaccaagcttccaataagcagatctagaatctaccaagtaaattctctaacttattaattcctcgttaaaccactatagattttggaattgcactctcagttacataaaacgctctatatgttcca

SEQ ID NO: 280867 - DNA, 1337 bp, Cannabis indica
atgcatcaaaacgcatcccagaccctatttggatgcatcacagtaacaacaactcttcttggtctgatggcaaggttaacaccaatgttgtaatttgtcgttgcttgaactcctaaaaatttatttcacagatgttaagccatgcaaaccattggttcttttagttaactcagttagtggcattgagatttttagataatccttcgaaaaaatgcaaataatatcctactaacccgagaaaactttgcacctccatcactcttcttggcctcagccaacttttaactgactcgctttttccctgatcaaccatgattctatctttccgactatgtgccgtaaaaaggatacttccgacaccatttgaagatgttgctaatgttcattttttgtcaaagaatacacaaggatgtcgtcgataagcactataacacagttatcaaggaaatccttaattactctgttcatgaggcccataaaggtcgctggtgtgtttgtcaattcgaatgacattaccaaaaactcgtaatggccatattgtatttggaatgtagtgttcagaatattccacccccccccccaaattctcaactgatgatgaccagaccgcaagtcaatttttgaaaatacagtcttctcctgaagctgtgcgaacaaaccatcaatcctgggaatggatacttattttttgtttgtaagcttgcttaattcctgataatcatttcatattcaaagggaaccatcctttttttcacaataaaactggagctccttaagggaatacactgggtcgggtaaaacctatatctagcatcccatataattctatttttacattcttgaattctgttggagccatcctttatggcactttcggtacgagttctgccccaggtgccaggtcaattataaaatatatctctcgttgtggcagcaatcccgacaattcctcggggaaaacatcagtaaattctcttaccactctgactacctcaggcccaaatgtctcaggtctgctgaagtcaatcacaaccgcttaaaatcctatgcattaactatgtagtaaacccttaaaactggaatatccgggattcaagacccctgaacagatccaatataaacaaatggatcttcgccccccgattaaaaagttaccattttccacttgtaatcaatgcttgctgaatacttggacaaaaaatccatcccacgtatgatatcaaactttgttaattccagctctactaggtcaacactcaactcactattttcaaatccaactggcatagacctaaattgccctttggagacaaccaatttgcctgctaagcagtagg

SEQ ID NO: 280868 - DNA, 555 bp, Cannabis indica
ctagtaaaataatttccaacacggtgcccgttcccttggatcctttggcctatctttcttctagcgggttccgtccctcggacagctatctcggggatgatgcagccagtattaagattcggaactttgctagggccgaattagagagtcagggtaggactagcttgattgctttttaagtgtttactgctttcacagatattctaacacttaactcttttctcttgttgcagcagctaatcccatggaggcgatcttggccacccttgccggagctcacagtcctgatgcttcccttcctccaacttcttcccagatggtcacccccatgaaggcttcttccagtgcccctccaaacactattgacttagtggatgaggaggaggtacttcctgaggaagctaaagaaggtcaagaagagcaatgggctcttcctgaggaagttgaagaaagtgaagaagagcaagaggttgctctggtgcgcaagcgcaaaggcaaaatggtagctgaggagacacctaaacggccgcggagagtggacactccggcctcgag

SEQ ID NO: 280869 - DNA, 458 bp, Cannabis indica
agtacgatagggatggctccctacgagttgttatacggtaggaagtgtagatctgccatccactgggatgagacaggggagagaaagtacctaggtccggagtcagtgcagcggaccaatgaggcaattgagaaaattaaagctagaatgcttgcctcacagagtagacagaaaagttatgcagatccgaaacgcagagatgttgagttccaagtaggggaccatgtgtttttacgggtatctccaatgaaggggatcaaacgtttcgggaaaagaggcaagttatgccctaggtttacaggacctttcgagattctcgaaaaggttggtcaagtggcataccggttagcgttgcctaccgcgctttctgcagttcacaacatattccatgtctctatgttgagaaaatacgtttcagatccttctcatatacttagttatgagagtcttgaactgca

SEQ ID NO: 280870 - DNA, 640 bp, Cannabis indica
atactaagtaataatataatgtatattatatttttctggaaacccccaaacaggagcaatgaggtattcagaggaggaggatggttattatgatgatgtttgtaaagagaggagagagagagagacgaacaaagagagacgaacagggagagggagagagagagagacgaacagagagagaggagattgaccggcgctggcttggtggtccccgacgtcctcctccacaaccacgtcgaagctagttcgccggctttaatggcggatctgagatggaggagttagagccaacatgttatggggcttcgaagtcggcggaggaggacgaggccggaggaggtttttgttcagcggtggttgtggaggaggacgtcgacagaagaagaagaaagagaaagggatatgcgagagatagagagaggagatcgagtgagatctttcagagaaagaaaaagaaagaaaaagaaaaaaagaaaaaaaaaggaaaaaaaaaagaaaaaaaaaaaaaaaattattttatttttaatttttttaatttttttaaataattatttacgtggaccaataaaattgtgccacgtgtatattgtgtccacgtggacaatccaacgtgccagttaacagctaaatttggacggaa

SEQ ID NO: 280871 - DNA, 652 bp, Cannabis indica
atggagagcatatgacgatgtggtggtttttgaaagttccatggctataatatgagtgccatcttcttatctcttagacacccaaagaaaccatagaacaggccagagtgatgatcagtgatagtaacagggtaacaccctttccagtgaccaatcattttaatttgaaaagtctttcgattaatattttttgaaagataaaactactggcgaaaagagtattatcatcatgttcagtaactctcgtactaatagtggtcaatagttcaagaacctctttttaaagatctagtaagtgatatactaggcctagtggatgaaaaaaaatattatccattagagcagatgtgaggaaaaataagtagcaaggaaaatcagatagggatgtgttcgaaagatcataacaggggaagggaaggaaaggaataactcacaaaattaaaaaaatccagaacgaaaattgaaaaaaaaaaaaaaccaataaaaaactaaagaaaaaaattaaaaatagttaaaaagaaacaactgccacagagctttttaatggcacacttggtagtttaaagaatataatatattaaaaacaataatattacaatggtaaaggaaaaaatagaacaactaatgtatagtgcaatgtaaaaatttatat

SEQ ID NO: 280872 - DNA, 678 bp, Cannabis indica
tcaaaagaattttcaaatatctagctgggacagttaactaggtctttggtatagttgtgacacaaatacctctttggtaggatatagtgactctgattgggcagggtgtatagatgataggaaaagcacttcagggggttgcttttacattgggaataacctagtctcgtggtatagcaaaaaacagcagtccatctccctttccactgcagaagcagaatatattgcagctggtagctgctgcactcaattaatatggctgaataaaatgctcactgattatggatatcctcaacacacactgaccattttttgtgacagtacaagcgccataaacatctctaagaaccctgtgcagcactctcggactaaacacatcgacatcaggtaccactttatccgagaactagttgagtcaaatatgctgtcaatatctcatgtgcccacaacgaatcaattagcagatctgttcactaaagctttagatactcaaacttttactcacttaagaacatgtattggtctctgtactatctaaactgttcttagtgtcatctgatcaatcaattttgcctatgagtatgcttgtgtttcaaagttcctgagcaatgggttgttatgtctttccccaactactatgtgctactttggttgatactacgcttgaatcttccccag

SEQ ID NO: 280873 - DNA, 572 bp, Cannabis indica
acagtttgcttttggacttagatgcatatagaaagcccatttaagtttaattaattaaatagactagattgctaaaataaaatatcacattgatagctttatttaggcccaataagcattgcgcttatttaatgaataacaattatttaattaatggttaaatctctctcctttgggccttctgtgagagttagggggccatagtagtgggtacaacatactgaacctaaccctccctcacttgaaccaccccaattgtgaaggctcatttaccttatttaaataattatattagggtaattatattagtttagcctatttaaaattgaattagcaacataactaattttaaaataaataaaattaatttttcattagattattttaaaattaatttaaaaaaaaacacttagtttaatgagatatattctagatagttatttctagtaactaatcatattttctaatatttaattaattataaatatttattaagttgaaaattaatttaatttaattttggaccaacttaaattaaaatatttttttgatattaaattagaattaataat

SEQ ID NO: 280874 - DNA, 500 bp, Cannabis indica
ataaaatagattacattgaaatggagttttatttagggcataaaacctaacaagaagtctgccacatccctgaagtacttatgcaagggcatcagcgccccatactggccgtgagcccccgactaggtgcacattcccttatcaggatttgtggcacgattgtcgtgggcgggaatgtagtagtccagctcgcccaggtacccgtcttggtcgagagttcgaaggtgtgcctctgaaatcttggacagaggacttacccacctggcgtccaaggcaccctgcctcctatgaggaacagcctcagcaagctcctcactgacgtagtccacgccctcaaccagaacgtcttcgtcagcatcgactggctgcccaatctcgttctactccccaaagttagggggttcaacctcttcttctccctccgcctcggaaggactacccggacgtacctcgtccagctcctcagcctcctggacctcagcgtccccctcacgatcctc

SEQ ID NO: 280875 - DNA, 993 bp, Cannabis indica
taaataatcataataataaatttgactttatcaacaataaaaattgaattaaattataataaaactaaaaattcctactatcaatgctcaaaaacaataaaacatgcttcaaatgtggaaaatgatattataactatgaaaatttatttattaaatgagtatttatatgaatataattaccaaaaatatctagtacggtacaccaattactcaagttatatctctcctaaattcacaccggaagtgcgtggattcactgttccattcgccgccaccagctccgactagaactgaattcataagaactctacccaaaatgataatgaccacgacaaacaaaacaatattccatgaatttggccaccatatctatcaaattgttttcgaaaaaaaaaatccacatacaaaataaatgagatatactttaatggaaaagaaaagaagggaaactaagagcatgtttggtattgttttctgttttttgttttaaaaaattgtttatagaaacgagaacaaaaatagtttttgaagtttttaaaaaacacaagtcacgtttggttagtgatttttaaaacaatattgaccaaaagtgaattggtttttaaaatagaaaacaacatttttgttgttttcaaaattcttgttttttgtaactttattttttgaaaactgtttttaaaaaacaaggccaaacaagccaaattatttttaaaaataattttctgtttttaaaaacaaaaaaacagttttttagttatgatgttaaacatgcactaagagtgtgtttggaagtaagtgtgtgattactaggtacagtaattactaaggtagaaattacactatattttaaaatgaaatatttggatatgaggtgataattacatatgaatttctaatatcttgtttgacaaaatagttagtaattacatggaaaaataatattttttagtgtagctaatgtttaatatggaaagttttttagtaattacacag

SEQ ID NO: 280876 - DNA, 513 bp, Cannabis indica
tagttgaggaaccaatctgaaaaatacaagaaaaataaatgactataattttttttttttaaaaaaagtacaatcaaaacactagtaaaacaacaatagaatattatataaacacacattaaaaagaaaaaaaataaaacaaacctaattctccacagctttaacagcagatgcaattgttgcatcaacatcaatgttctcctccacaacttgatactgttcagactgacaacaaaaacaacattaagaaaatattaaaacaacatcaaaacacaaatacacaaaaacaacacagaaaggttggacaaacaagaaatacacctgtttgacctctgcaacagattccacaaggtcagtcttcttggcatcattaatgttggcttctttagaagaagaatccaccttgccagtatcatcatcctttgaaacaacttcgggggacaacaacaccctcatcattacgatcatccccagtatgagcctcatccttcccaacaccaactccagctccat

SEQ ID NO: 280877 - DNA, 840 bp, Cannabis indica
gtaggtaagggcaaggccaaggctgaggaactgtgaggacaagccgatgaagattgtacatgtcggggtggttaggcctggagcgtacgatcctcgggacaacaacgcttttgtagttagtcgctgggcgacaaatattttgtaaagaattaattaacttttgtaaagtattttgtaatcgggatctcgagtattttgtatgaaatattataagttttaattaaaaagcaaaattttaattaatcacgatttccgtaaacctcgttgattagcaacgagctgcacagtacgtttaaaaatcacgtaacacgcctagtcaagttagggttttacagaggaagtggaatcactttctctaatcttctcaactgagcttgaagcagtaggattgttggagttatgaactctttgctcttaagattgaactattcctaccttagctgctttgtggaatttcatgttcatcatgagcaagtgtgaagtattactctgaccaggagtcttattcacactttcaagttcattcctaaaggcaatttctagatgagtgttgggatgtgggttgtacattggcactacaaatatcaataaacagaagtaagcttttggttcaataaattcatacacaagttcaaaaaataacaagtaatcaaatatgtttgcaaaaataccaaaaactagacatatttattattttccaaggtttccaacataatgaaataagtgtcccggtaggcgagagtcaaagataacattagttgaatagagtagtcagctcatctaaaatggataccattttagcaaccttttattcgatcaaaatgagaatccaacgttgtc

SEQ ID NO: 280878 - DNA, 721 bp, Cannabis indica
aggtgtgttctgacaggttggcgcggtatagtcacaacgtggtatttcgggccgaactgggttcgagcccgaaatacaattgaattgaattaattggcattttaattgatatttgataatctgaaatttaattgggtttgaaattgtgtgttaatgccatttttgcccttgtatgtttaaagtggaagttatatggccctaagggcattttagtaatttggctttatgagataatctgaacctctctttctctctcttactctcttgtttttcaacttgatttggtgagaaattgatgagaaactagtttgattgttggggaaaaatttgtgttaaggcttggagttagcttgtgcaaggaattgaggtaatttttataactttgattctcttttgcttgctgaattttagttaaaaaaaaaagcatgaataggttgaagaagatgatatgtgcatgattgtgagttcttgttaatttgagcatgtggtacttgaatcttttgggttttgtgtttgttgagcatggaatgagattctagggtattttctgggtttgatttcatgttaaagttggtatgttgctgctagaaaatgtttggggttgaaggatttaaagctcaagttcatgagcttgaactttgttggtttaaatgcatgattttgaattgattgtgtaatttgaattttgagagttgttgttagctctctattgtgatgattt

SEQ ID NO: 280879 - DNA, 660 bp, Cannabis indica
atacttgtgagtagatctaagttcttggtaaaataacttccaacatattgaccatatttgttcttcttttgtagaggcacatacttctctcttgcctagtccttcgccgcctgtgaaggatagctggacgcctccacctctggattggataaaattaaactgtgatgttcgcgtgggtttggagagtatgtgcacagctgttgtggccaggaatcatctgggaagggtggtttctattcacacgtcccgattggatttctcggaagctctttgtggagaagcggcggcctgttgcttggcggtgtcggttgccttagatttgaagtataattatgtaattgtggagagtgactcgagactagtaatcaacgctctcaatgggaaggtgccccattgggctctagagaactatgtctccttttgttctaagtcttctccttctttaatgtgttgtaatttttctaatgctagtaggaaatgtaattatgcggcacacaatgtcgctaagtgggcttttacccaccaagtgtatggatcgatcccgatcaattctgttccggaaaatattttatgtaatgaccatgaggtctagttttattcaatataaatttacgtacttattttttttttaaaaaaaaaaaaaaaaaaaaaacgaaagta

SEQ ID NO: 280880 - DNA, 743 bp, Cannabis indica
tttaaagagatatgacagttttactgagacatgtttcattctgaaaaataaaaaaaggagacctacgaaaattctcctacgaaaataaatgtagagtttcttacctcaaatacatcaagctacttggatcgatagacataagatgatggtgatcaaagatgagagtgaagagtggtatagatttggctaaggatgtaatggaaagatgacttgaaaatttttagggttagtcttgctcagataggtgggaagaatagaacgatataattttagggttaatgaaacctatactattctgactcttattagctttagttttatgaataataataatattaacataataacaataataatatgataaattattaaataaacaaatatctaacttttaaatttaaattgtaagctctcaatctcgtaactttagggcttagttttgacctagaaaaattacgaattctgatatagttatttctacaaaatttatagatctttaaattatctttccaacgccactgaaatcacctcaatccgagctctagaactccagatatgatcattttagtaaaacagtttttaatcctgcgaatttatccaaacctacgaatttttaacattaattaattaaactcactaaatatattataaaaccctaatggaccttcatattgggctttaattaaacgattacttactctgtaaaaataccataatattttactttcgtagttaatacaact

SEQ ID NO: 280881 - DNA, 647 bp, Cannabis indica
caacaaataacttattttcaatgcataactgtaaaaatagagaaaataataataaaaaagatatgaaagtaaataaatatccactaataatattgtagattttagtctagattcaaaatccaccacgtatctatgatgatacacaatttcattaaatcggtgtaaaatctttacactattttactttaacagtctactaaattatgcaccaaattagtgtgcaccaaatcttacaccattaatagtgttggattttgatttaaaacactatcatatttaaaaatacaaaataacaataaaaaaaatactaagactaataaaataaaaaaataacataacaataagttataaaacgaataagaataacattaagtaaaataataatttaatagtcgaattgatcacttgtggagcttagccttgaagaatatcaaaatattggctatatggactttaagtatttttgagaatattgatattcttgatatgattgatattattggtgaggtgtttttttcatataattctttttttgctcatttttaaaatggtcgtgtatagtaggatcaactatagaacttcaataagatttttttttttaaaaaaaatgcatagtgtttaatcgatttaataaatattttatttta

SEQ ID NO: 280882 - DNA, 664 bp, Cannabis indica
taaagtcttactcgcaattatcctctttcattcactctccaccacacttacatcgaaaatgattgacaacgaaaacatagaacctatagcaaatttgtccgaagatgaagataatttttttcatttcatgagttttgtgaaaaaaaaatgtgaagaagatgtctctgacatgagtaacagtggaattgagcatgacactgaagatgttagccatgaatggattgatcctgatgtagctgtttggagtgattttttaaattttttgcagattgataaaaatttagaagactatataagtccatccacacctgtagattaggatgtgttagacaaatttctctcctcttatggacaactttaagcaaccaattattttagcattgcatttgggagacaaaccttttgggtagctgggacaaggaatattggaactttaacctttttgccctgtacataatgaaataccattcagccttgagcccgaatctttaatcaaaattacattgaaagacatcatcaatggaaactagttctagaaagaaagtgctagcagcagcaataacatttaaaattgactcccattcctatggcacattatcttgcaatcataaactgtacccaagctggatcgataaaaaaaaaatacttttcaagcacacatagt

SEQ ID NO: 280883 - DNA, 574 bp, Cannabis indica
aaacaaaaaaaaagaaagagaaaattccagcagttaggtcccataccaaaccctaagtcaagaaaaaagggaatgggggtcccctaaccgctggaaagaggccccctccggacacgtgtcacataggaaaccctagaaagattccctgaacaagtgtcgggtgcagtaaaatcgcagaaggtggttttacacagtaaggggaacagaaagaaaaagaccccattctatgccctaagcaaccgttgaacgaagaacatatggttttcttcaacgaaaatgcacgataataacagaggcataataatggcgatcctacaactaaagcagtaaacacaaaacagaatacatgaagaacctaaacacttgcatgcccagaaatctcaaaatgcgaacccagaaaaaacaaacaaagcaagtaaaagcatgtcattaccaaaggatgcaagaaacttacagtgaagtgttgaactgggggtcctgattttagtcgagtaaagacgagaaggactgataacagcaagcaaggaaaaactggaaaaaaatggcaaagtgttcagaaggttcgtgctgtttt

SEQ ID NO: 280884 - DNA, 567 bp, Cannabis indica
atctcaaaattggcaaaaactagggttctggaaattcccctaacaggcagaccggttcccaaccggaaatccggttctgggtcaccatccggtcgaccggttggtacaggtcccttagaaccggaattccggttctgtgctgggaacccaaaaatcaacccccttaactcaattcaatcccaaaccttaccaaactctccagtacacctatacaatgtataaacaaccatttccaaccaataattcacagaacaaaccaataaatcaaattatgccattaaagctcaaagcttgagtttcaaaactcaagcttgcttaaaactaacatcaagcatcaaaaccagctgctagggacttggattaactcaaactaaccctagaaattgaaccctaagcattttaaaacctaacagcccctcataagcaaaatcaccatttcaacctaactttaaaacttgaaaactaagaagggtttcattggaacttaccttagattgattttcttctctgaaatccttgctgaaatccaacaatcaacaacaaactcccttggtttgtcccagccga

SEQ ID NO: 280885 - DNA, 549 bp, Cannabis indica
actaatccaagttcatttggggttacaatttgagtagagctttagctctgtgctctcaaaaatatgttgcacgcttttacaaatgaatcttctgttagaattattattgtggactaatataatcatgaacttaataccataaacacaatcattaactatgtgctcaatatttgttcactaccataatgggatggttaataatcatatattatgttagaggcacatgagagcacccttaaaaactataattggcccattaaattatagtataccattattggaccacttaagcccaattggtaaataaccctttagggttagaggggcatgatatatatatatatatatatgtgtgtatgtcttaagtgaagtggtagagtgggtaaatggtaatgagtaaaaagagggttagctccacaaagtgttctctaggcttttgctcaaggatagagaatttggtggtgatttctttgaagacattgaaggataatcactctcatggatagcagtgggaggtatgtattttattgtctttgatgctctaaataa

SEQ ID NO: 280886 - DNA, 636 bp, Cannabis indica
agcgccttctctagcgccgtattcttcttcgcaagatcaaagttctgatcaatgtaataattcacttgagtctttctctcctccagccgggtctgcgcattattgagttccgtcagcctcctaccaagaatttccttaagttcatccttgtcacgctcatgctttgcgtccgaaagagcggagagtttcttctgctccttaagggctgcttctgcggcagctagtttctcttgtaaatttgaagactgaagattggagaccatgaattgagtcacaccctaaaaaaaaataagagaatgaaagggtgtcagcacaataaaaggatatgagatcatataaatatgagcgtgcacataagaagataggctattatcaatacagtttgataaataatccatcacgtacccgaaggatgtcttggactcctttagtgacagtatcaccttcgtagttggacatgtcacgcaccacctcaacggttgcagtttttcgaacaaggaggtcaatgttgtcatgcacagactctagcatctgaattgtggcatcatcgggacgaattatgggaaccacgatggaaggtctcctcatgcggccaccaatatttgggacagaaggagagacttgagcattctcctc

SEQ ID NO: 280887 - DNA, 564 bp, Cannabis indica
tacaaatttttcaacaaaacctatacaccacaaagctgtttttatgtttggtatactagaatcagcatatgtaaaaaagccaaaccaaattaaatattaatatacagctagaaattttttccaaaaaaaaaaacgaagaaagaaactaagctagaacaaaaaaaaaatggcagcagtagaatcagcataagtaaaaaaaaaacgaaatcaattgacatattaaaatgcaaattcaaaattcttcgaagaaaattattaacacagaaactcaccatctaaatgaattctttttttctgatttcacatgaaagcatatgaaagcaaaccacaaaccaactatttcacatcttaccttgtgccaatggcagagtataagtagaacaggggcaggcagtttaagaggtgctgagagtgggagtcgatcgtcggctgtcgactaaagagatggactgctctggttttgtcgaaaggtgaagagaagagcgggagagcagaaagaaaataacgagtgtttttggaaggaaattctgaaaacgtgatattctttttcgttttttttttttt

SEQ ID NO: 280888 - DNA, 570 bp, Cannabis indica
aaaaaaattgcatttggtgcggatgctatccgcgcgcgcagggggaggtgactggccgagatttgccaaacaaggatgctgcacgtagcatttccgcccgcggaatggggctattcaaacaccctgggcgtgtaccttcagaaatgccctgtctgaacgcgcgtgacacctgagtgatcactcgtgtctgtgcacgcacgtggtgcactcgattcttgtttttttttttctttcaaattttacaaaaaatcataactaattcaaataaaattgaaattgagttctataaaaaagtgaattgcttaatttttcccatactatccaataaaaataatttaagaacggaaatttaattattttacgtaaaaaatttacaaacatcaatcattcaccaataaacacatagatcaacatgaattacatccaaatcacacatacatcgtttaaatccatatttcttgaaagtaaatcaattaccatggctctgaggccagttattggaatatcttttatcgggatctacatttacttacagtatgtttttaacatcctaaatatgaatctctaaaa

SEQ ID NO: 280889 - DNA, 574 bp, Cannabis indica
ttgaggaagttgttgacactttttatgaccgagcaaccatcaatgatgctgcacgcttaaagtttttccccttctccttgaaggataaagctaaaagttggttgtattctttgagatctaggtctatcggaacatgggaagaaatgaccaaaacattttttgttaaatatttccctgtccataagaccaacagtttgaaaagacaaatctcaacattttcccaaaaagacaatgaaacgttctatcaagtctgggagagatttaaagatctcttaagtcagtgtccacaccacgggtacgagagttggcgcatcgtcagctacttctatgaaggcctcacaagtcgtgagcgccagttcgtagaaatgatgtgcaacggtgagttccttcaaaaggaacccgaagaagctcttgagtttctcattgagcttgctgaaaaatctcacacatggactggtccaagtgctgctgaaagcaccaacagaaatcgaccagctgggatttaccaacttcgggaagaggacagcttaaaggcccaagtcgaatctttaaaaaagcaaattgaaatccttac

SEQ ID NO: 280890 - DNA, 454 bp, Cannabis indica
aatgactctttcgctcagatctctaacccttgttcctttctgtcgcaaagtaataagatgatctgagcctggatctccttcactctttcaggttggttaccaccgtcttctgcactatgattgaggacttgactagctatgtgtgggcatgacactctatcactgtggttgaattggtgaagaacaatgaatgagggttccaaaacactatagaaagagtctctcatctactagttgtctgacagagttagaaaactagatttggtaggttgaaggtgttgaatgagaatggcagcattatgttccatttatagtatttcaactatgatttaggattgaattatatggattaaaaaagaataaaatattgggaaaaaatcaccctagtggccgaccacttaatgtgggcctcactagttacaattttgccattttatttcaaccatgtattctt

SEQ ID NO: 280891 - DNA, 500 bp, Cannabis indica
ttcttgattatgcatgttgttaaatttgatgtttgatcttggtaaattgggtgtgaataacttgaattgttgtaggttttaattattaagttgtggctgagattttagggttttctcttggttgaaatccttgttatttttggtatgtggctgctgtaaaatattggaaatatgttggttttaagctcaagttcaagagcttggattttatgagttaaagtcatgattttgtgtttaatcgtgggatttgtttttggtaaattcagaggcgtttttaggtttcattgagtttaaagtttgattgtaaattgagaatttggttgtgaaaagcaagcttgagttcatggaactcaagcttggagctttaatggcactttttgattcttagtgaaattattgtgtttgagctgtggaatatgtttattatgtcatataatgatgctctgaaaagtttggcggtatttggggaagatttgagtaggttatgggggcttaaagat

SEQ ID NO: 280892 - DNA, 626 bp, Cannabis indica
cacgagtcaatcctattagatttttgatagttcttcagggctcctttttttttatctaacttgccactatttataatcacatagtaggcagttaattacaaagttgattgtgatctttacaacgtttctcccctgaaatcatggggtttgattacatatcatgtagtataaatgcagttattattttaaaatcacacaactgtgattttcccactattactgggtcaaaatgatcgtgtgtttaaacatgtctttaattgtagtgttctgggatgtctcgacaataacttggttccaatggccttgatagcgagctagagcttttttttatctttctgaggtcgacaatgtatgcctcgttgcttctttatttgagagcttaacacttcattgtaacaattgtcgttcttattaacagagaatttctcgaggctcatttgaatgtttagcttctgactcgtcaagattgcaagtctcactgaaaagatgtctgaagttaactggtggatgttacaggaattagccttcctatagcaagataagcacctcgcttattgaatccactcgactgttatacttagtttgtgcattttacactaagtgttttcacagtcgatctgcgttat

SEQ ID NO: 280893 - DNA, 707 bp, Cannabis indica
aagaaattccaaaacacacacacacaaagctctctcctttcctctcttgttcggccaagcttggggagcagctagggctggatttccttgttgatttcaagttatttttagcaagatcatagtgattttaattgaggtaactcttggctttaattcttgcttgtttttcttgaagaaaatgtgtgaaaatgtgaaatgcatgttggttttttatgtgattcttgctgctgtgaattgaggtttatttcagaggttaatgcttgttagattaaggctatttaggttgttttgaagcatgatagttagattgagctaagctttgttgtttttatgtaaaaagtatgaattttggaaggaaagtgttgtgattatgttctgtgttgttgctgttgttcttgttagtttgcagaggttagtttatgcttagttatgttgaattaagcctatggattgcttgtttaagtggttttgctcaagcttgagtttggaactcaaagcttgagctccaatggtgaaatttgtgtatgtggtttctgggtaggtttgatgccttggaattgttatttggggcatatagaacaggtctggaaagtttgggatcaattggggttaaattggtcgagttatggaaattttggttgctgcctgcgaggaaccggaattccggttgagcatccggaattccggatgggggttcagaatttccc

SEQ ID NO: 280894 - DNA, 1378 bp, Cannabis indica
cgctaagaaggctgtgcaaacaagggggaggaaaccaaaggcagctgatgccaaggggaagaaagtggaggtggatgaggaagagggtgctcctgatagtgaagaagcatctgtgtacggtcgatgctccttcaaccgtttaatgaggatttgcaagaacctgaacctggagcagaaagatgtgatccaaaatgctggatttggatcattcatcagagaggatgcaccatacgttgacacccgactagtgagttggttaatcaaacatgttgacccaaccactagcatactggatttgtatgggaggaaaattcacttatctgccgcgatgttcggagatgttatgggggtggacgacggaggggatcctgtagtcaccgagggtgatagtgacactcgatatctggaggagatattgaacgttgtcgagtacaccgtgtccttgacaatgttggagaaatctttgttggagtgcgttgaggcagacagcctatttctcattaaattttctttggtggtcatagggacagtccttgcgccgaaaacgggggtcgatatcacttcggggtacttgcactcccttagggttaccagggacattcgccacaagaactgggcgactgcggggttcaggtatctgatgaactcaattttcagattccgaaataaggcgacgaagaatgtatctggctgcaccttattcctccaggtacattgattttgttatctttcaattatgtaaatgtgtttattcagtttataatataatattgtcatttattagtcgaatgtattaccaatacattgtttgtttgtgacagttggtgtacttgactcacgtggagtggaactttggatatgtcgaccgaacagtgctccccgttgatttttggggtagtaaacaatgtaagtccgcttacaaatttgtgaaagacaatgggggtcccaacagcgacaaggtacatcgaattttggttacaatgtggtaaagtgatttcagttgatattaattattttgggtttgaaaaattaaatttgttatgtttaacagataacgctcacttcgaatcccgtaatactgcccaactactactcggactcggaaggaagaaagagcagtgaccactttgtcagctctatcaacgagttgaaggagtacatctcgaatgagttaaagtctcagttgagatcattttctttgaaatttatggacaaaggagaaggtgtaggtggtattgaccgagagttggaggaggatgctgctgcggaaacggggaagaaggcagagtgcagccaggccgtggaggagtccccgttgaagtcccctgtccgttcgaagactaatgttgttggtctatccgacgaaaatgtggtggat

SEQ ID NO: 280895 - DNA, 689 bp, Cannabis indica
cactgtggtaaaccggggcatatcagaagagactgttatttttggaagagaagtaacagaggaagaacagatggtagcaatggtgactcaaaccagggagaaaatcatttctcaaaggaaaagggaaagaagcatgaagccaatctaagtgatggctatgagagtggagaagtttacattactgcaactaaattcaaagaagaatggattttagattcaggatgcacttttcacatgactaataatagatctttactttctgatttcagggaatctaaaggagggaaggtcatcttaggcaacaaccaaacatgccatattgaaggctcaggtaatgtgagctttaaaatgtatgatggtattgtaagaactcttacaggtgtaagatttgtgcctaacttagctagaaatttaatttctataagtatgctagatgaccttggtgttgtgagtaagattgagacaggtacaatgaaactaagcaaaggttcaatgaccataatgaaaggctacaaggaaggaggtttatactacctaaagggagaaccaatttcacattgtcacaacacaacagaaactcttgaagattctaaggcaatcttatggcatagaagacttgggcacatgagtgagaaaggtttgcaaattatgagtgaacaaaatcttttatgcaaggataaagtaagtaa

SEQ ID NO: 280896 - DNA, 591 bp, Cannabis indica
atcggacccgagtttgtttgtttttttttttctgtcgtacgcgatggagatcgtcgggtcgtaggcggtggtgagggggtgatgacgcggtggttgtgtgaggtggctggggttcgggcgaagtcggattgtgtgaggcggctgggatcgggcatgaatgaaagagggactgagagagagtttgagtggaagagagagaaagggattgggattttgacaaggctattttgggagtttttaaaaattggtcctatttttaaaattacctacactaagtgttctccaaaccaattttatattaaaacatgcataataattcaaatttcccaattattccatgtgtacacattgtccacgtaggatagtacaacatggcactgaacagttaaaaatgaacggaaagggctaattgctaacagaatatcaatttaggaggttttaccaccaaaattttagaattggaggttagttgcaaatacttgaccacttaaggaagttatgccgcaaataactcaattacatatacctcttttaaattaatgtctttgatttttatctcattttttaaaatctattatgtttatctctttt

SEQ ID NO: 280897 - DNA, 608 bp, Cannabis indica
agtcgagtactcgccattctaggttgaatactcgcacttgtcattacccataaaattctctttgatattaacaaaataatataatttggtgttgcgaaattcactcgacaacatttggcgccgtctgtgggaaatcgactaagatttcattcatttcaaagaacaatatcatcatggctggaaatcacgccaacggaggagctaacaacgggtccatcaacattgggatgatgaacgtaccattatctggagctggagcgccacctgtagacgtcattaacggcggagtagggagaagcaatatcagacctctcaacctattcccagaaacgactgaccctcaagtcggggacacatccacgccaccagcaaccatgcattttccccccgtcactccggcggtggtatccgagggaatgatccagctcaccactgatcagtatgctgcgattcaggatcaactgcgcgcactacaggccgaagtagatggacaaaaccgagcccgacgccctcctcgagttcctgctattcgcaccgataaccctcaggtaacgacttctagacgtcatactaaccgtgtacgcagggaacggagaaccaaccctgaa

SEQ ID NO: 280898 - DNA, 918 bp, Cannabis indica
agcgacagcatcatccgctccacaaaccttgaaagtcatcctcttataataacggtctgcaaggaaacgttcttcttccgttaaatgacgaatcaaagagaagggaccactaaccttctctaaagctcgggtcaacaaaaggatggggacgcgcttgacaacgttgagtgaaaaaatactaccttcttgacgttgcgcacctctccacaaatttccaacacaagatttatccaaaacaagaagcttgttatgggctctttgatcggaaggaatagagagcaagtcgttaactcgagcttcggaccaacacccccctcgaggacatcgagtgagccccttacctacaatgacaaagagaaataattagtattcatagacaaatcaagtatcaaataaaaaaaaaacgaacaaagaaaccaacactcctcactcacttaaggttctccatgaagtaggaaccacataatcactcgttccaaacaggtcacctttgacaaaacaatatttcctcctccaacccctcttgtcgctcaggaaccagctccgttacccaagcttttttagttcgctctaagagtgaatcgaaatcgacccttatctgtatcgtgttgtttaaagataataacttgacttgaaatctacaaggtcaaccctcttccccttcactctaactatgacttctataccccacaataacctccaagcatttggcatgagttggctaagagctaccccgataatagtccaacacttcttgtacaaatggagggaaagggaatcgaaagccaatcctaaaaggaaattcatacatacaaacccgaatctccactatcccaatcgggacgctcagcgatagttgggagtcgcatttgtatagacaatgaatctcatattgatgtcgcattcgtaggatatcac

SEQ ID NO: 280899 - DNA, 762 bp, Cannabis indica
tggccatttaccgaccaggccatgtagacgccatcatcaaagcgcttaatgcaacgcctgcaggaaacaagggagaggagctcatctctcttagccttttttaaggcttgatctctaaagtccttgagctccttcatctccacggctaagttagccctggactccaagtccgcctggtacaattcctctaaggacctcaccttggcggccatctcgtctagggcctccctggcctcccgaagctcgcgtttcgccttggcagtagcctcgccctccgccctcagcgcctcccggtgcctcgcctctagcctatccctctgaaggacctcctcttggagcatcgcctccgcctgggcttccctttgtttagcctcctcctcgaactttgccttagcgagagcctcctttcgctcagcctcctcttggaacgcccgcctttcagcagacaggtcctgcaggatcttcacgacctcgtctatgcccccaaattcggacaagacgaagccatgattaactatggttttggaaaggcggccggcctctgcagtaatctggaaaaagaagtaagagtgagtgaaggccttaagtaaaataatgaggaaagaaataaatcacaaagtacttaccgcagccaaggcatggctgatgtcctgaacctggtaaacggagttcaaggatgcacaagcagcagcctttttctgtttcatggcttttgcacgcttcttggtgctcttccacttcttcttcgatttgggtttcgaa

SEQ ID NO: 280900 - DNA, 558 bp, Cannabis indica
ataagacaatctagtgttttctaccaaaccctgcagtataaatacattaaaatgaaacttatattttggctctaaattatacaccatattgtagagctcattgcaagcttcgaagcggtatatagaatgttcaaaacggacaccgagtcaaaagttatgataaaaatacgatttctgatctcttaggaatttctaaaaactatgaaatacgaaaatctcaatttttgcactcaccgaaacactaccaaaacttatccaaatcactccaaacttcacagggttcatatatgccataaatattaccatccttatgtaacagaaattaaaattgagcccttaaatgaaaaatgccattgacgttcgaactaagctttaaaaagtccaaaactcgatttctaacttaaattacctcaaattcaacaaataaacatcagacctagtcccatgactacccgagaataatcctataaggtcagaactttcataactattctaattcacaaaacccctatacgaaaccaattgtttttaaacttaaaacgaaattaaaccatacct

SEQ ID NO: 280901 - DNA, 425 bp, Cannabis indica
tcttacaagtagtattgtctcaactagtatggggaccatgggcctatatatccaagcttccaataagcagaccaagaacttactaagtaaattcactgacttattaattccttgttccatacacgcatagaacatgaaattgcactctcagctatacagaacgctctatatgttccaccatatagatacactatcaattatccattgttataatcccaataatcaacgatcctctataaatgatttacattgtatagggattatattaccgttacaccttcaatgtatttatccttaaaaaacttagccccgtataatgatatttcagcgaactgaaatgagtactcaaccatttatctctatttagccaagctcgaaacgaaatcatcatttcagttttatttctagatagaagtctatagatt

SEQ ID NO: 280902 - DNA, 862 bp, Cannabis indica
ttaagcatataaaatcaaaaattccctattataatttgatttaaatctactgcaaaattactttttatatcaaatataacacaatttttatatatttaataaaagatggtctgatgattttaccaagcacataaagctaactactactttggcacctatcatctccaactttatactgctaaataggaattacaagattcaaaattatatacttgatgaaaaaagaaagcagctttttatgcatatctactaccaaaaatgttgtggccccattttaagtagtatatatatatgtgacgtcaaaatttatatcaaataatatattttttttttaacacacaaataatattttattcgaaaacaaaaaatgttacatcttgacttataactgattgtatattataattttctaattgtatattataataacaaaatcaaggataaaacaaatactatacagataattaattgactctcttttatgttaaaaaaagggaaaagatatcaaatgcatatgtgtcggcaaacacgaaatggtggtcaagtttttcatatataattaaattcaaagatatttattggttatccatcaggtttcttttctgttcatgtatgaaaatcagatcaatcaaactctaaataagaaaaataatagatatatgtacggagaagtgttaaaaagtaattgatataattaattatattagaccttatatcactaactaatcgtgagccgctacttataaaaatatactagactaataacattattcatatatttatatatatattaagataaatatcattttagacattgtgtttgtaatgttactattagatctctatttgttaaataacaaaa

SEQ ID NO: 280903 - DNA, 582 bp, Cannabis indica
agcttcatcaagtatctctttcttaagctcaccaacattaggaacacaaactcgagctttgtataacaacattccactgttcgagactgaaaagcctctaggccgaccagccattacttcgtctcgaaccttaactagctcgggatcctccagttgtacctttctaatcctctccaacagatcagactgaagtgttaaattatgtaatttcccgaccacgaactcaattcttgcactaaccatttcagaggctagttgaggggctatcataaccgtggtataaacttgcccgggaccttttctgcttaaagcatcggccacaacattggctttcccgggatgatacagtatttcacaatcgtagtccttaaccaattccagccatctcctctgtctcatgttcagatccttttgggtgaaaaagtatttgagactcttatgatcagtataaatctcgcacttctcaccgtaaagataatgtcgccatatctttagagcaaaaaccacagcagcaagctctaaatcatgagttggatagcgctgctcataatctttcagttgacgagaggcataggctatgac

SEQ ID NO: 280904 - DNA, 837 bp, Cannabis indica
ctctcatctcatccaactattgccttcaactaaatcaagcctagttttctctctcagacaactagtagatgagagacactttctatacagttttcaagcctctttcattgttcttcatagtcgacccttagtgatagagtgtcatgcccacacatagtaagtcaagtactcaatcatagtgcggaagacagtggtaaccaacccgaaggagagaaagagatcaaggctcagatcttgataatactgtgcgacagaaagaaacaagggttagaatctgagcggaaggagtcataatattccgctgcaatcaatgtaaggttttctaaactcttatgtgtttaatttcattattttagagatattatatttaggatattaattcaacatacttgttagtaaatctagatcttggtataatattcccaacaatcataccatacccactactagagcactactataaatatttcaaacgatgtggctgtcaattgctcaaacaacacaacctaaagctcaggcaaaggccctgactgccaacgaagaatgactgaccaaaagtctaacctacaccaaatcaggaccagcaaggggcagaaaactaaagcgtgcttcaaagtttcagttgcttcaccacgcgaacaacaaagagaaacatgtaccttcctttttattaattgagatgcaactggtatagcatgatgataaaatctccacacaaaagcctaacggcagtggtggacccatgatttaagttgaagggcgtagtttttttttttttttgtaagttggaggggacgtaactctttttttacatgatataacatattaaaaattgat

SEQ ID NO: 280905 - DNA, 524 bp, Cannabis indica
aagagaagaagctgaaacaataactggcagctttttatcttgacccaaaaattcatacctcaagtgactaggaagcaccttcaattcaagttctggaggcttttcagtagatggctttagctcttttggaactgctcccaattcctcaaaatatcttctgttcaagggcccataggaatcaagccacttcacataacccatgacctcttgtccctcttgctccgtcaattcatcttcagttaaacttagttcaagaggatcatctagcagctttttctcacccacaatttcatcaatcaagtcaatgaagaaacagttatcacttgcctttgggtacgtcatagcctttagcacattaaagaccacttcttctccttggactctcagctttaattcacccttctgaacatcgatcaaggcttggccagttgccaagaatggtctcccaagaatgattgggacattgctatcttcttccatatccaaaacgatgaagtcagctggaaagatgaacttgtcaactt

SEQ ID NO: 280906 - DNA, 780 bp, Cannabis indica
ataattgcattattttcttctttctcttgattattttttaaaaaactataaaaatttcaaaaaaaaataaaaaaaaaattataaattttacgagtttttatactatttaattgaaaaaaaaaaaattattttatggaagaaattaaaaataaatattattttcaggataatcatagcgataaataattacctcctttaggtaagaccttatccttgttgttccatattttccaacttttaaaaaaaaattcccataatttttttggaaaataaaacaaaaaaacataattttacaaaattgtaccttaaaatccataaaaacgaaaattctccaaataataatgataaaaagaaagagccatgagatatcaataaatatgatgtttaaagtatagtaacacatgtcactttcttgatatattggctatccttttacaataacacacatgtttctttgtttgtcttttttgacaagaatttatcttttgcttttataatattcaactttttttctttatgtgatttgtcattaagatggccctacctaggttatccatagtcttaagactctttttatttctaattctaactcttttttatttatggggtaaaatcaaaatgagaaaagctaaaaagggtattattagtaattttatattatttttttaaatattataccattattaatataattaagtaacatctcgcatataatttaataaaaaaaatttatataactataagaaaaataaagctagtttaaataaatataataaaaaa

SEQ ID NO: 280907 - DNA, 652 bp, Cannabis indica
tttatatagactagttagaagttacgtgctgaggcgcgtaaatattagtattatttaaagtttagtttctttttttttttatttagattgtatctaaaggtatgatcatgcgaatgatttgttttattaaagtaatatttgtgctattatatttggtttgtaaaatataattgggtatgcataagtcataacaaaataatatttattatttacttatagaaaatttagaggaacaagatataggttttgcaaaatttaaagcaaacattatgtaacaaaaattaaagaaaatgtgctatcttaaaatagaagaaaaagttattaaaaaagtcttaatatatggaatattatttgaaaaactaaaaagagtatagcgaaacttcttcctattcgtccattggttcagctgcttgaatggtgaattgattgtactttgaactcatcgttcgtgttggatctacatacaactgaattctccatttttgggtcgataatttctccgcaatttttttggacaaacaacctatgtttctgtaaaaataattaaaataagatttaatatacttctatttatgaaaatgtataaatttaatatatttatttttttatatatttacctcgttcgaattatgactttaattgtaactagtca

SEQ ID NO: 280908 - DNA, 567 bp, Cannabis indica
tttgccggcgcattattgcgctgatgttaaaaggttttaccggtgcaatattgaatatgccccggtaaaagttaccaaatgaagcgccaataggcgcgagaagtttgccgcctttcatttcatttattgtggcgcttgtttacttttaccggcgcataattgcgccggtaaaagtcccaaaaaaatagagggaaacttcccgcgtggatttccttggtaggtgggaatacttttaccggcacaccattgcgccggtaaaacgtgttataggaaacgtgtggatattgatgtgataagtgagaatactttagcggtgcaattgtgcgccggtaaagtattattgcgccggtaaagtatttcttaaacgctcattttggctactaggtcagattttaaaacactttacctagcgcaattggatgcgccggtaaaagtagtatatatgaatcaggagcacgaagccccgttctctcctccatttttccattttttgcctaggttttcagcgaaaactctcagccccctctctcatctctctatgattctctctcattctctatcatctct

SEQ ID NO: 280909 - DNA, 530 bp, Cannabis indica
gtatacccttgtcgcatgatttttagtgcaagggaattacctccggtatgattgccgcaaatccccccgtgtacctcacggagtatataatcgcaatcttccccactgatacatttgagtagcggttgactaaaaattctgcgatacaacctttgatcatacattacataacgggcggctcgttgtcgcagcttccttgcttctaccttgtcatcgggcaagacgcccttttctagatatgcgacgattggagtaatccaagtgacctcgtgaacggtatctatctatcggaattacatcgagcaattcggcttctctggttgaggccaaacgggccaatgcgtctgcgtgcgaattctgagcacgcggtattcgagacacaattacttttctgaacttctgcattagctcgcatacaatggctaaatacttaaccaatctcccgcctcttgccagatattctccattcacctgacacaccacgatttgggagtcgctaaaagcttgaagatactcgactttcatctcga

SEQ ID NO: 280910 - DNA, 522 bp, Cannabis indica
tttttttttattttttattttatatatttatatggtttttttatgccatatttttgtaaaaaaagtagaaatttcatatttgtaaaacaacaataaattttgccgaaaaagtcgtcgtcaccagaaaagttgccggaaaaatcattgccgccagaaaagtcgtcgtcgccgaaaaattcaccagaagtaaatgtctcatatgtaactaaaaatataactggttatacgaataaaaactaataactcaaactggttataattgaaatataacataataaataaatataaataacataaaataactcaaaccagttataattaaaatagaatcggttctataacagtgttataatgaataaaaataaataacacgaaagaactcaaactggttataactaaaatagaactggttatataacataatgaatacaaacaagtaacatgtaataactcaaaccgattacaattaaaaacaaaaaagaaatcaattcctaaaacactgaaatataaattaaaaacaaa

SEQ ID NO: 280911 - DNA, 504 bp, Cannabis indica
cacagcagttactctaatttgatagtgcaatactatcaactaagtcttcctccctagatctctaaatcagaagcagtttattttctctgattatcaaaaggtatacaattgtgatgagacaatatgtatttatagagttagggaggggacttagctacaaaaccctagttgggctgggcctgctcatcaaaggcttcagtcaactagaaaagcccacacttctgcttcacctagactttactcacagatgctaagcccattaacaattgatcaccaacaacatgggctaacacagcaaagaactatccaatcaacccaagttttaataaaaccaataaaatttaatgtaagcccaaataaaagtctaacataaaagtgatacatataaacattaaataagctttagtataatggtaaagtcatttcattcatctaaaggaggtcatgagttcaaaaacatgtttactttagtatttttattttattttttgaacctctaccaat

SEQ ID NO: 280912 - DNA, 573 bp, Cannabis indica
tcacatggtggattttgattctgagagtattagtttgttttacttgatttctacttattgtggtaataataggtgttctggaagttattgtatagtttggagttgatttgaggtgtttaggaggtttttggtgtttcctacactgaagcggtcgactagttcagtgggacctgtaggaactggaattccgatcggtccccaggaaaccccaccgaaccggtcttccggttggggaaccagtctgccagttggggcagtttagggaaccctagtttttcccaattttgtgatatatagggtattgccatgttatccatcaataggaaaacttttagttttgattttaagtccctcaaaagtgatttagcgtgtcactcatcagttttgcaaataatgtgatttaggggcctgtaaaccgtcgagcagtagttccactcaagttgaccggcacacctgaatttagaaacgaggtaagcttagtataatggttgcatatatgtatacatgtttagcgtgcatgttagttgccgttagaataacatatcaaggtatcagtgaggtgtacataaagtt

SEQ ID NO: 280913 - DNA, 656 bp, Cannabis indica
tgaggtacatgtctttctgtaatattcagtaaaggcacacattcccaatggatacatcataggaaatgcatggtctaatccctaggctttttaggggtttaatggacgtaatccattatcctttcttgactgatgtgatttctcataaagtagccgtcactaggctcattaatcatagcgtagtagctacagaaggggggttacgccgtcagactttaatacttatggcagtttcaatacgccttctcccatgcggcattaaatgcgaggtgactgttcagataggatttgatacctcccggaggtgcttcactgtagccttgctctccgggagtatgtgaaacatacatgccttctccgggaggcatgttaaatgctgatccctttgattaaagaaacttagtagaattatcccaaagtcttgcctcttcagtccacgtgtctcaatccggttggtccacgtattttggacaaaatcaggggcaacactaacattaacagttttattaaaattattattctaattcacaaaatgtctgatttatagttaacgaaattatgagttaacaataataaattaacatgagatattagcaaatttatataacacaactttataattatttaattttttcttaaaaaaattacataaaata

SEQ ID NO: 280914 - DNA, 710 bp, Cannabis indica
ttgattgtgaagaaatatgattttagggtttttttattaattaagagactttatggagtctaattaataaatattataaatgaaaattttatttgctaattattttaattattaaataaatagttttggcatttatagggttgaaagtgcaaaaaatggtatttgtgaaaaatagataaaatagttgagaaaaatagcaaaaaccaaactagtgtaggacccactatgtggccggccgctaggtggttattttactctatttttatcaatttttttattccaaataattcaaccctaaacctaggtgaaattactataaaaggaaagtgatggtctcattatccaactaatgcttctaatgctaaaaacctagttttctctctaggtttatgagacctcttccttcttcttcttctaatttcgaaaatcatatagcattcttcacaaactaaattcaagccttagtgatagagtacatggccacacataacaagttggtactcaattagtgtgtaagattgtgaagaatccaaatcaagtgaaggagaatcgggctcagatcttgatgatactctactacgtaaaggatacaagggttagagatctgagcagaaggagtcatttaattccactgcaatcaatgtaaggtttcttaaaatttatgtgtgtttaaattatattgttttagaaattcatatttaagatgttaa

SEQ ID NO: 280915 - DNA, 565 bp, Cannabis indica
aagttgaaaaaggtcaggcatacaaagacaaggaaacactgaagaaagtttacagctactacgcaatcaaaaacaacttccaatacagtttttgaaaacatatttaattgggtttcagtaagaagttttttaatatcttcaataacagagtaataaccagagtttataactctggaatggtagtattccgatcgggtgtacttggattttcaatcctataaaaaacataagaaaacactactaaaacaacacacacaaaaaataaagaacataaaaacaagcataaaaaaactctagaatggtagtattccgatcgggtgtacttggattcccaatcctataaaaaaaacataagaaaacactactaaaacaaaactaaaacaacacaaaaaaatatagaatataaaaaacaagcataaaaaaaacaataacaaaataagccataagagtcatcaaacgatacaaaaaaaaaactgaattagtgaaaacaacaaaaaccaagtaaagtttatgttgttctagaaaaaataaataaagaaaaaaagaaatttttttacttggaaag

SEQ ID NO: 280916 - DNA, 406 bp, Cannabis indica
catctatcctaacaggtatacccctaagccaatttctagagattacaacctccccagatggtaacatggtcccaaaccccacagtaaataactcacttagtgcatttatatgattaacaattgtgctagcaataaaagaatgagttgcaccagaatcaaacaaaactttacaagtggtgttggccataggaatctgacttgatacaaccgaaggactggcctcaacttctgcttgagtgatggcaaaaactctggctgggacatacttgtcgtctttcttgggttctgctttgttcccagtctgtccccacagtgggcaattgcgtttgatatgtccttcctttccacatttgtagcatgcttttgcgcgacactcgccgagatgacgtttggtacatttagggca

SEQ ID NO: 280917 - DNA, 556 bp, Cannabis indica
tagaaactcttattgcaactagtgatgcagcttaagcagtgacgaagccagaaatttagttgagtgagggcttgaataaatattaagtcaaaactaataaaaataatgataaatgtatctttcaaattttcatcttcaacaaaataaaataatactattgacaaaaataaaataaaatattgtcactggtattattttattttttaataaagtattattttttttattatttgtattggactacttttaaaatgggcttgattagaataagagtaggctcatgaatcatgattaagatattgagtgagggcttttgtgaattgtgttagaaatttatatatataaactgaaatgtatatgtttaagtattaagtgcggaattaatcaaacatatatacactatgaataaggatcgaaatacctccagccattgaatcttgaacttcaaacccacataagctttgatctgcaaaggaaattgactaccatgggtaatcgggcttcctcgctctctcaactctctttagatggaatttgctgttatgaacagaatgag

SEQ ID NO: 280918 - DNA, 541 bp, Cannabis indica
tgaatattgacataatgcctcccgtaagaaatgtgttatatttgggacaaataaaagatttttgatatatttgcaaataaaattataaaatttggggccccgatgatgttccgctcggtacggaggcgtgtcgtgtgtcgctccatcatcctccggctaatatatatctttacaaaagtaaattaaagaacacctaacttgtggcagttacaagtaattataatttgtcaaaaatattatttataaagggtaaattgcgacataaatactgtttcagattttatacatttaaatacttaatgtttattttttgaggcaaaaatacataatattacaattctcttacaccgttactaccacttttgttaaatcataaatatggacacgtaaagatttcagatgtattacatttatttttattttattttaaaacttaatattcttaatatcagaaactaaatgctattttaaaaaaaaaaaaaaaaaacatgttctcattaacaattttcacatgatattgacacttcaattcgataatcat

SEQ ID NO: 280919 - DNA, 555 bp, Cannabis indica
aacaaatactgaacaaagctctaatttgccacacaaaacatgacacttacaatctcccccttggcaaattatgatcaacgacaaaccacattgaaatcatcaacagtttagacatacgcaatactaaaacacagccagtatccacaatattaacacaaccccaaaaaaaaaactgtgtacaatgtttatatcaaaaggtaagaacaaagtttatatcaaaaggtaaaataactccccctcgatgatcataatcaatcactgctggaatatgagaccagaggagcaccaagaatccttgagtcaccaccatctggagcagagaccggagccacagtggaaggctccccctgaacagctgccacatttgagggctccccctggacagcagcagtgtgtgacgactccccctgaataccaggcccaataacctcggcttgttgaaaccaggaatcaatctctttgtcaatgccagctgatgaagagacaccctgagcaccttgaacatcagcagagaaagggacaggagtggcggcagacatttgtggctgactttgt

SEQ ID NO: 280920 - DNA, 608 bp, Cannabis indica
aaatcaatataatttttttaaaattaattataaattatttgttaaccattattattattattattattattatttgaataaacttcttattattaataatacataacaataaaataaaataaatacttaataatactcaatatacaatgtagttcctatataagagagaaggcttcatcaagactaatcataattgtcaaatacattaatcaccataccatattaatagattattttatttgagacttctaagtttttctttaattatttaatttctccctataccatattaattctttcatatatatacatatatcccatttagctaatttaacgctaaaaaaatgcagagataagaattcttcttttggtaattagtatgtctttggtggaggtcactttctaactaattggagctagcaagtatgaagataataactaattggagctaccatattaattctttcatatatatatatatatacatatatcccatttagctaatttcacgctaaaaaaaatgctagagatataattcttcttttggtaattagcatgtctttggtggaggtcactttctaactattggagctagcaagtatgaagat

SEQ ID NO: 280921 - DNA, 669 bp, Cannabis indica
ataacaatgctcataccatattttgatccttttgtgtcttatagcaatacctgtattatgttttgattcttttgtatctaataacaatactcgtactatgtttctttacataaggataagttttccttttttttaaaaaatatatttttaataatggtctaccctatcctaaagtttgggtacaggattcccataagaggaaaaaataataaagaaaaaagtagatgaccctttttagagaaaattcccaacaatatacaagggtctagtgttccattttcattcattattaagccctaaaaagaatgtattaagttaaatttcaagattaaaatatgtctaattaagaagattttaaaaaaattaacttcagcacccatagcatgaacaaccctttactaatcaaagggttattgtaattttttttagactaaaataaaaacaacatcacaatcttaaccaattttttattttaaaagaaaaacatgaaggtaagcttgttgaattaaaacatgaagtataattagaacatgccagtagtacctacggcgtcctattattgattagcgatatcctttaaaaattattatcttaaattatatgaaactccatttaaaaaataataataaattatatgaaactcaacacttaattgcgctaatagtaata

SEQ ID NO: 280922 - DNA, 364 bp, Cannabis indica
attttcatatttaattaaatttctaagaaaattatcgaatatttttaagcatcttgaataaaattaacttaaatttgaattttttatttaattaaatataactagaaaaatacttcatgcaaacagaaaataactatctagattttcactaactaattactttattttctaattaaaatatgatatattttagtctatttattataattaatccttaatgaaaaatttatttgatttaagttgatctaaaattaattaaaaaattaatttttgacttaaatttatttttttaaaaaaaaattcaaaattttctgcatttaaataatgcaatttcgaaattttgaaaaaaaaatattaataaaat

SEQ ID NO: 280923 - DNA, 671 bp, Cannabis indica
ccgcggtacttggagccttaaaggtgcgatctcctacctttctctcagctttcttttcatttcattctttctctcttttcttgctcaaatcagaagagtgtgcattatttatacatataatttttggaaaacatcattttacccatttttttttttgaaatcaatgaaagataaaatttgccgccttacatatatatatatatgtatatgagagagagctctctcttataaatttcagaacttcccatttctttcagtttcaggtggctgaagaacaattcacttcgctttcagccgtcggagaaaggctcgactccactcggtgctggtgagattctttactgttagtctacatgggtgtacgaacgtatcaatttgataattgattcttttttttcttccgaatctctgggctactttgctttcaatctgtactcatctaaagctttccacccgtattagtagccagttctttgggtttctacttaacctttttctttctttgttttggatttcttttaattttgatttctttcagtttcaggtcgctgttcccttcgcttcagtcgtcggagaaagggtccactccactcgctgctgttgtctggtgagacttttcttttttgctattatacttttcttgaatgtttattaataatctctctttctaa

SEQ ID NO: 280924 - DNA, 608 bp, Cannabis indica
catccagcaacttcacagaaacaaaatgaaccatttctttcaaaaattcataactttttcacataagcatttaaccaactagaacaaggattcaagcatgctatacaatctcattaaacctaattatttcaacatttaaacaaagaacaacaacaataataatcagcagcaacaacatcaaagattcaagcatgcaacacccattttcatcataaatttcaagaaaaacaaagtaagaaattaaagccaagaaatacctcaatgaaaattcactttgatctagctaaaccacttgaaatcaccaagcaaaacccagcccttgcacagccaagccttggccgaaaagagggagagagagagagcttgagtgttttgaaaattccttttaaatttgactaagtgttgaattttaagaaaagaagaatataaatcacattactcattttatttcagccatgtaataataaaataaacatttatttttccatttcataaagccacaaaagacaaaacactaatggggcaaaaagaccattttgcccctccaccataaaatcacataaatcatactaaaggggtatttttgggaaattctaaattcccggcca

SEQ ID NO: 280925 - DNA, 566 bp, Cannabis indica
ttcaaaatagtaggtttaattttattttatttttcgtaaataaatgattaaaattaaataaaatcctacatccaactatccaaatctaaccttgttgcaggagtatgtgttttagattgtttgtaagttttctaaaacctattattgcttgatctaaattgccttggttaacttgatgatagatcagatgatctagttttaaccaaaggttcaattgacgatagatcaagtaaataatttgtaacaggtaatttttacaaacttctttcatctttcattttaaggttaaattcctctcttttgggccttgtgtgagagttgggagccttagaagtgggtgcgacatactggacccagctccccctcacatgaacaaccccaattgtgaaggcccatttgcctgatttggataactgtgataggttaattatattagtttgacctaataaaagattgattagcaacataattaatttcattgttccttgaaattaatttaagaaaaacatagtttgaatagtcatattctggaaagctatatgtatttttcttgttttaattaaata

SEQ ID NO: 280926 - DNA, 589 bp, Cannabis indica
tttagttaaaaatctgaaattgtttcaccttatatattatttaacgtaagagactaaacattgctactagtaaatagttacccaatggaacggaggtgaccttgcaatatctttaattgagaaaaacgttacaagtcgcaaaactgaaaaagtaatttccaaatcccaaaggactgaaaggagacgtaccaatattgtggaactggaaatatgttattcaaaacagtactgtattatatctcatctcagccacactctctctcaagtctcaaacttaactttttctcactctttatcatacctttttattttatatcctaccttttatacccacaaaataaaaaaactcaaaaaataattaaataaacaatacaatacaatgtatttcttttattttatttttttcactcctttcctttttttttcatttctaaaaatgaaaaatagatagaaaggaaggaagaaagatggaaaaagggtgttgagagtcaaccggttcttttgggagtcgtatgtatttgtaaggcttcgatgagtccacatacaactccttttatcttaacttttttttttcttcttttttctctat

SEQ ID NO: 280927 - DNA, 514 bp, Cannabis indica
tttgcctagtaggaaagtacacacgctcttgggagtccgacaactccgtgttttgggtgtactggggagtgtacccccttttctggcgcttctcccccgtccgggtgctgcccttggaggatcttttactcctctagccctgggaagggcctgccaggctagcggtcggagcggagtgcgcaggagtctgtccattcgtcccggacggattgccgaaatgggatgacgctggcgccaaggcctggccctgactatatccgggggtggcagagaattgtatgccgcttgtctgtggagttgcggtcggggcagtacccgagggcggtactccgggcatgtaccctgctatcccggtgggatagtatcctccataagccactatttgggcttcttcgaggttgatatatttttggactctcttctggaagtcttgaaggctagcagctccttcttgctgtagctcattccagaaaggagtccccgtatggatgcctgcttggagaagcgcaagctg

SEQ ID NO: 280928 - DNA, 637 bp, Cannabis indica
aggtgccccccaagtgaccgagcagacttatgactcttggccacttgttactttttgcaagtatgcttttctgtctgttcagggttttgggttcgaccaaaccttttgtacgcattggatggtaaattaacaacatgctattagtttcgactcaatttgaattttgaaataaacatctttattcatttattgatcgaaaatgtgtttgttaccgtagtaacttgcatcagagctatttgatctaatctaatcttttagcttaacatgaaataaaacaaattgcaaaaattagaaattgtactttagatggtggtcatccgacctgagtacttttcaattatatccgaacctttgggcgtatttcgcccaacaggccattcacttaaaagtaaatgttctttcagtacttaatatggtcatccgaagtattttctttaatgttccccattccaataccgtggtactagaacaagttgtattttttcatcatacttacccaatttgtatgctcctgattcgagaacttcgaccacctgatatggtccctcccagttaggtttgagtacacctgtcgtactatctttggtgtttagaaatactcttcttaggaccatatctcccacaaagaatttctgag

SEQ ID NO: 280929 - DNA, 504 bp, Cannabis indica
gataaattacaataaaaccaattatataacataatgaataaaaacaagaaacacgcaataattcaaatcgattataattaaaaatagaaccgattctataacataataaataaaaactaataacacagaataacttaaaccgattttataacataatgaataaaaataaacacaaaataactcaaaccagttataattaaagtagatttccttctatgacaatgttataatgaataaaaacaaataacacaaaataactcaaactgaatataattaaaatagaaatggatctataacataatgaataaaaacaagttatacgcaataactcaaaccaattacaattaaaaaacaaaaaggaaatcagttcctaaaacactaaaatataaattaaaaataaaaatagcaacaaaatgagtaaaaacgaataacacataatacctcataaaaccggttataatttttttaaaaaaattaaggtggatcaattccaaaaatactaag

SEQ ID NO: 280930 - DNA, 792 bp, Cannabis indica
ttatactaaataacatattaattcttaatatgtgttaaattaaaaataaaaattgaatgaatgtaatttattgactaaattaacacaaaaaaggaaaataattaatattctaaataaataaaatttggaattttcccttttgttttttctttgaaaattactgccctgaaaacgacatatcattttttagctatatgaaaaacgagtacaaagaaggctgcccacaacgacgtaaaatgacacgtcgttttcaatgaatgctagctgctcacacgggaaagtgacacgttgttttccacaagaggaaaaatgacacgtcattttatgaatttgaaggctgcctcacaagacgaaaaacgacatgtcgtttgaacaaacgacagcagccacaaaaccttaaaaatgacacgtcattttccacaagggaaaagcgacatgttgttggctatattttcaacctccagccggatcaattttgacccgtttccagccacgcagacggacctggcccaaactcgatcggaaaagagaattttgacgaccaaattacgtgtttgtaatcccgaaatgatccaaatgaaaaaataaagagatctatgtgggttttatgcatctaaaatatgtaaaaaagtcgattttaattccaatgaaaatgagttgggtccaaacgtgttctcaaaatttttttccagattctgatgtttattcaaatcattttcatgcacgaaatcactctataattttatataaatgtgatattgcaataaagattcaaatacacactaaatatat

SEQ ID NO: 280931 - DNA, 523 bp, Cannabis indica
ttagcctcttactattggttctcagggacatcttgttgtgacatattatcttagtctgaaactatatgttccttctagactaagtcatcaacatagcaatctagtattaatattaatgtacaatacttgcttaagattaagtaatcattagagataccataaaaacatttcatgaggattaggtattttttcctaagtcattcgaatacactttgtaaattttcctatcttatcctcaaaattctgataagttatttctatcgatatgaatggttagatttactttctcagatatattctaaagttcatatcatgattataacatagtaatctatcactagtgtcttccaaataaagatgggcttagaattttaaaattttcccacttagataaggtactgtgatactacgtccaagaactttattagtatcaatttcaattacaacagtaacaagttaattggtaacaaaaatacaggatacaagaatgaagttctaataatttgctaatttgttcattata

SEQ ID NO: 280932 - DNA, 520 bp, Cannabis indica
caataattaaacccaagcaacgttaacattaataaatgaacgaaagttactaagtccatcaacgtgtgcgtcttctgcatctgcgagttgaccgtttatgttccgttattgagctcgcagggtcatcagtacgtttggaacgtctgcgcccttaggtaattgcctcttgtagacatcgcatgtcgagctgatagaacctagacatgcgagtctatatcggtttatcaaggctatttatcaaggctattggatcgtagggaccaaatcgcatcatagagagttgatctctatgctttcgcaggaatatagagaggatactcgcatatgtcctcacacatgggagttggatccatcctgtataatgtgagttaaagttatgcgattcgacttaggtcgtattcgcagtatctcgttggttttatcctgggcgaggttgaaacatcgagtagtctctcatggacaattcagctttcattggaaccctgaatacacgtgtcctttaaataggagtctggtctcg

SEQ ID NO: 280933 - DNA, 637 bp, Cannabis indica
caataaaagcttactgaaacgtggaatgagctatatgttgatgatgattgtacatgtcatgacgatcttcggaaaacaacctagcggctctgatacaaaattgtaacaccctaactagcataggcgtgttaacgagattttaaacgcattgtgcagcttgttgctaatcaaagaggttattgaaaatcgtgaaaaatttaaattttgcttaattatttaaaacataaaatattttatttataaaatttcgggatcccatttacaaaatactttacaaaagtttgctgtacatataatcaaaagtttgtcgcccaacaactatacagcaaaagcctcgatgtcccaaggatcgtacgctccaggcctaaccgccccgacatgtacaatcttcatctgctcgctctcacggctcctcaactttagctttacccttacctacacatagcaatagaactatgagtcgacaaactcggtaagaaaggcataatataaaacatgcaaataacccgggttataacctggcgcccatacacccgatcataaccctaatcgtcgtgtccaacacggtactgagtctggaatgttcataagacaatactatcgaccataatgtcagcctatactcaatatgctagtc

SEQ ID NO: 280934 - DNA, 779 bp, Cannabis indica
ctcaagtttttggggacttttgccgcaattatccctttaattaacctaagctagttagaattaagcataataactttaaaagtgcgcacatattaattttaaaattacagatgcaaaatatttaattttatcacaatctatataattatttatcactagagtactactataatttaataatttttgaaaactttaaaattgtatacgtacattaatttataataatacatatgttataaaattcaaaaccaaatcgtgtttaatatgtatatgtatttaaacaaatgcgtttagacatttgtagtcatataaagattgatccgacccattaaatcaatagttttatttaggtcctaaactcagtactactactccttttcaacagaatatattggacagtaatgattaatggtctagaaaataataataccacaaatttgttggctgttggggaagaaaaattgaggatacaaatttttttgaactgacgttgaatatttctttatttgattattgtaatataatcaaatgaagtctattgaatgattcaggagatcgatcaacactaacatctcattattatttgtatttgaagaagtcaaaaaggattatcattattcaacactatatatatcttttaagtcattagatcagaaggtcaatttcaaatcacaaacatgtttgccaatttattagagttagatatatggaatggataatatatctcatctcatataaattataatataaactttttttttttttattatatattattg

SEQ ID NO: 280935 - DNA, 565 bp, Cannabis indica
aataaggagaaagattccttttcttatagctcttacaacaatatctctgaatatgaattcttcgataatatctctagggtaaaatctctcgaccttttgtccagtgagcatgtgtcactatttatagagctatgagcttggagaggaagtatttcccttctcgttacaatggatataagcagaagattgcatgataaatgcagagtacacttatcgtgggatttggacagcttgccatatctctgtaacctgatccccaagttatagggatttctttgatgactcacgatgcaaaagttgaactcagtaagtgtttatcaatctgcgcagattgctgatcacttttcctcgggcatgcctatgaggcatcctgctcggactataccctccgagcagatactcaaagttgattccacgtgtcaccatcatgtgatgccacgtcagagtgcaaaaatcgggataacaagattaattgaaatacacttttagttttatattagtgcaagtgggagtttgttggggtttcatgccctaaataaaaaaccatttcaatataatcagattt

SEQ ID NO: 280936 - DNA, 483 bp, Cannabis indica
aaaaattaacattgaaattttacactttttttaagattggattgatacaatccaatctaatatatattggacctaaaatattagatggatacgatgagatccaaaaaaaaataaggtactgaaatattagataaatctaaattgaaccaataaatatataatactaatctaatccaacatccaatagatgttggattgattggatgattgacattagttggatcggatcgaatggtaaaatctaacatccaacatataattggatcgaatctggataggcttaaaaataattggatgtggtctaataaatacccctaacctttattgttcagaagatgtctcattacaagtttttattgacaatttaataaatttaagaacaccttttataattttttattattacctgttacaattttatagttatgaagaaactaaaatgtaaaaatagttaaactataatatataaaataaaaataaagc

SEQ ID NO: 280937 - DNA, 564 bp, Cannabis indica
cagatggaattttaatttatgaaagtatttttctgatacaaaagagatgtgttcttcccatcagttcaatcgcattatataggcgaatggattgaataaacataacgggaagaataacgttttctgaaacgtggggtgagttggttttgaacgtgtcccgttaactgatacgactaagtaatcagtttaattaaacacgtttcttaattaaattaataaataaaaaataattattttattaaataatttttctgtaaaaaataatatagtgtcacaccacaccaaccaacctggcccggctcggacggcgcgcgcgcgtgtggtgggtcaagtgtgtgtgtcctcacccattcgcacaaaactgggtaccccttggggcccaaacccaaatgccaaagttgcactctttatacccttgtcaatgagggttcatatcccatgtgggactctttccaactcacacacactaagacacttatatattttgttaaaatattcacaatatttccaacaatcccccacttgaatttttaaaaaatatttccatctactagtatcattcaa

SEQ ID NO: 280938 - DNA, 614 bp, Cannabis indica
tcttatttttttttacctttttattaagcatctcaaactgagacactcattactgtatccaacgttcacaagcaccccacaagtacaaaacccgagcgtcgacatgaatgggccgctcaccagcccacgatgaagactctgtgttgacttccagctaattatggtacacgtggcgcaaatcgaggcataaggtgcatttaagttggtgtacccgattatagaatagtaccgtgttgagataatgtgacaaaaaacggtcgagtttgtgggggcatcgtaatgcgtgaggttagtggggccacgtggtccgttcagcggctttaagccatttactcttggtaattggctgacaaagcgggtcccacttctactgaacactacaacaggtccctcgatcgactcattttcactcatctctttccataaatacccttcttctctaccatttaacacattcttatcacaccctctttcgctcacgctctttaactcgtccgtacatctttactcctctacttccattactctcttgctctggtttctttgtagaaaacagagacagagtatggagcgtttatcttttatttgttgttttctcttgctcatttctatct

SEQ ID NO: 280939 - DNA, 677 bp, Cannabis indica
ccccaggcggccccacgcgcccccacgcgccgcctgcgcgagtgggcttcgcggctgggagtcatcttcttcctcgggcgggtctgaaagcgggtcacgcgacccggttgcctccagttcgggtctggcgtgagttttgggcaaaaaacgacggaaaaaattggggattttgatgggttttgctcgggattgaatttctaattgatctacgctactaatttcgggtattaaaggttaaatctctagatttcaagacaataccaatccgaaaattgaagaacacaacaaaaaaaaatgtaatgctaatcttagtttaaatccgaaattaattatgtaggaacattcttaaacaattgataatgagttatctataatcaattttagatcaaaaacaataaaatcaaaatacacaaattataatttcatattataatcatataaaccctaaaactttaaatttaaaattctcttaatatacacaatgatttcatgcatataatatatcaatagaacgagaatttaatgataaacaaaacccctaaagttttaagatttaaaaacaaaaaattcaacataaaataataacgaaattaatatgaaattatggataattaacatatacaaattaattatactaattataggttctaaatcatatacaataggcaatctgatac

SEQ ID NO: 280940 - DNA, 692 bp, Cannabis indica
aagatcaaattaatggtattatgagaaatgagttgtttatagtgacatgtgattcttgagattatctataacgaaaggagtcaagaaggaatcagcacttagccaaaagaaagataaatatcatatcataaataatagtattggttggtttaggctagtcggcattaattttcaatgtttatacatcaaaattggctcaactactactactactactgttttgttttttacacatcaacttcgtaatcttacttccattataccttatatcagtttaatacatttttatgcatacgttatagaaaattatccatatttacaaatatacatgggaaaattaatacacattactctaatgcatatacatgtgcaataattttttttaaaaaaaaaactaataattgtttaacaaatattcatcaaattttagttttcctcgtgtattaaaagtaattttcgatataaatacataaatttaacttttagttgcagataaaaattaatttttatggtattaatactttatatatacataaagtgtaagataattatctattattttttttatttagtccgtaagtacttaagttctaaaaaaaaataaaatttaataacatcattgacttaacaattgacaataatgtaccgaaattttgaaaatataattactattaaaaattaaatttaaatat

SEQ ID NO: 280941 - DNA, 525 bp, Cannabis indica
tattttctgtttcaattttaattatgaatttgattatggatgttatgaactaaactcctatttagggaggatgatgaatgttgttttaagttttgcctagttaatgaataattgtcattccttcaatcttggtttgtgaaattatctatatttgtgtttaattccatgtgtaagattgatcaccttttacatgttttatgatctcaattcaaaatctgaaaagtgagaattgagaatgctaaaattggataatctaggttttgatgtgaaacgaaagtatttgcatagcctttgtgataattagattattgcttaatgctgatttcatgttagtttaattaagagattaattagagaacatgtgatttagaacctaaaagatctgaaaagagttaggttaatttataatctgtcattcacttcaagaaaaggatagcaattaggcattaacaattgggtaaacaaacaacaggattctcctccctattttctcatcttgattaatattcacttgtttctttaagt

SEQ ID NO: 280942 - DNA, 799 bp, Cannabis indica
ttacactgtgtaattactaaaaactttccatattaaacattagctactaaaaaatattattttcctatgtaattactaactattttgccaaacaggatattaagaattcatatgtaattaacacctcatatccaaacacactttgtattttaaaatatagtgtaattactaaactgtgtaattaccaccctagtaattaccctacctagtaatttcacagttacttccaaacacacccctaatattttatattatttattaatttttttttgacgaattagctgtaaaattcattactccaaacaacaatctttgtacaagctaagagcactccacgaaaggaggcctccatttccaaatatttaaaatatatctttaactaaaattacttcaaagcttcaaaccaaataacatccattcggtgtactttctttgacattacacataaaactttagttttaattaatgccttagcttgctgcactaacctactcgggttaacaacaagagtattctaattttttggctaattagtaatttttccgccgaactttgacaagtaccaaattatgtctcttgaacttttttggccgttaaaaattccccctgaactattgagattgttagatttaaggacttttttctaattttagtaaaaaaattctaacatggatgaaagttcaaggggcatgatttagtacatatcaaagtttgagggcatgatttggtagatatcaaagtctgtggagcatggtttgttagaaaaattaataatatacccaagatctatttgtatata

SEQ ID NO: 280943 - DNA, 617 bp, Cannabis indica
gttttcttaactttttatgtgtatacttgtatgtagatctaagatcttggtaaaataaattccaacagaattatcatcccaggacttgtaactgaagagcttgttttcaatgttgatcgatggggcacctcaggaaataacaaatatatgataaaacaataaaaagacacaggaattttatagaggttcagccccgagcagttcggtaatagcctaatcctcgttacttgtattgtcttaagatcaaggagaacgagtccttttcttatagctcttacaccagtatctctgaatatataattcttagataatatatttagggtatagtcttagctcaactgctttttgaccgatattttgcccagtgaatatgcatcactatttatagggctagcaagcttggggaggaagagtttcccctctctttacaatgcgtataaacagaaagatggtgggaacaatgctgaatgcaaggatcgtgggattgaggctgaatacactgatagtgggatcgtgtgtataccatatccacgtaaattgatccctgagttatagggattgtggtgatgactcacgatgcgaaagttgaattctgtaagtgtttggccattctgtgc

SEQ ID NO: 280944 - DNA, 362 bp, Cannabis indica
atcatataacacacaacacaacatgaaaccattcaaatcacaaacaatcttgtatcctttctgttgcagagcattatcaagatctgagcccgaatttccttctctttgtgtgtgatccttcacagtcttccaatctatgattgaggtaccacttgctgtgtgtgggcactactctatcactaaggtttcgaaattgagaagaggaaaagagagagggatagggtcggctatagagagagaagtggaaggctcagttttttctgaaaaaacaattttctgacagaaggcttgaaaaacttgtaaaacttgttatttgactgagccatcactttctatatataggcaactactaggtctaggtt

SEQ ID NO: 280945 - DNA, 624 bp, Cannabis indica
gtaagcatgcaagcatatgagttatcgggtagtggaatggttggaaagagtaaaaccattataacattgtttcgtttgtaaagtcatcttgtgtttgtgcagtatgtgacaaactgagcatctaaattaattgttagagttggtggaattgaaattctagtttgagcaatggaagagaacaacacatgagcagtagtattgtgattatcttatagcgtagttagtagtatttatcttactcgagggcgagtaagaatctagtttgggggaatttgttaggctaaaattagtctaagtttcgggtcgtattttcggttagttttcactctttgtttctagttttagggctattttacgcttgattcttttgtttcaggtcctcgggtgtttaaagaaagtatgtacaagaattgaggacaagtggtgaaagaatcgagaagaaaaaccaaaattcgtgtcgctgcctaatccagtcgcgacggggaacatgccagtcgcgacgggaactggcagagaagattttgaagaattcgaagtttaaccccgtcgcgacgggggcattgccagtcgcgacggggacccagagacgagatttttgggcagttttgtaatttcacgaatttt

SEQ ID NO: 280946 - DNA, 538 bp, Cannabis indica
gttggccgttggattgggtgaccttaggcattccggttgccacgtgtcgtgatcccaattagtgagggatatgggtatttaaaccctttgatacgaatcaaatcccccatttttacctcttgtttcttaacttccttcttccctcccttacaaagacttcaaaaccgttttcatactttgcccagatttctaccgttcttctaaagtatcctcaatctcagaagtgatcgagagcaaccgcaggaacaacttgccaaaactaaaggttagtttcgagttccattgtgctttttgctttctgtgtttgagaaagaatttttttttctgggttttggtattttgaggcttttaggaatgtatgtttgtaagggatatgtatgaggttacgttttttgggtaaaaactgggtaatcctatgaaaaatgacctgtaaattggaataaccgcatactgtataagaaatatttaaataggcgttgtttcatactttgaatactcgcgggtattcggatgaacagtttgaatactcgcacactga

SEQ ID NO: 280947 - DNA, 1068 bp, Cannabis indica
ctcaaggcaaaaaattcccagaaacttcgaacattaaacccagaaaaagcagatgcacagtaaagcatgccatgaacacaaacaataaagtaagggatgcgaaaaacttacataaagtgttagaactgggagttgttgttgatcgacggtgaagtgttgattaacaataacgaaggaaggttagtaagaaacctatggtgtttgaaggttttctggtttgagggattctttctctctgaaaaattcgaagaaatttggtgaaaggctgaaagtaaccaaatgaaggaagaatggtggcttttatagggcaaagtgcatgtggaacacgcacgatcacctaccaatcgtacggttgggaaggcacacgatttgaattcccaagatccaacgactagattggtttgtcatcaaggcggtggaaacgcttgagtgttcgtgtgacacccattaatgcgccgtatcaattaatggacgtgaaacgaatcgaggcctgcaaaaagtgaatcactgcagtaatgatgatcattaaatgcaccttcacgcgcccgaggcacgtgccaggaaattgaggagccaatcagaggcatctgaacaagccttgttcatttttcaattaaacaaggcttggggggtaaatgtttcccctgattttgcccaatatacgtggaccaaccagacagggacacgtggacacgaaggtcttaacgtttaaattaatggctaagtctttataaaaaaaggcgttattcgggatctacctcccggagaaggcatacgaagtcctctatgctcctggaggcctaagtggtatcaaagcacctccgggagatgtcaaacttcctcttagcagtcatcttgcatttaatgccgcatgggaggaggcgtgttggaactgccacacgcaataaagtctgacgacacaacccccgatctgcacctataaggttatgatcacttaagtctaatgacggctacactgtgaagaatcacatcaatcaaaaggcaataaggataatccacataaaatccctacagcacctagggatttgaccatgcattacccatggt

SEQ ID NO: 280948 - DNA, 699 bp, Cannabis indica
agtgccttatccaccatttcagcataagtggttttgtcgtcagtagtaatcattagatcatgcctgatctttgcatttaacccattaaggtatttttctttcttactgaagtcagttggcacaattcccaaggccaacctcgccaaacggtcaaattgcgttgtacactcagtaacactcatattttctttttgagtcaaatgagtgaattcttttctcttagcacttctaactgcttcattgtaatacttagcattgaaaagttcctgaaatttctcccaggtcattgttgtaacatcgtgaatcatggacaccatgtcccaccaaactaatgcatcttcttgaaattagaaagtggcacagaccactctatcattgcaactgacacctataaagttcaagatcctagtgatcacagttagccattgctcgactttcataacatcaggatctcccaaaaaaactggaggtgcctgcttacggaacctttcatacaggggttccatccggttcattgccacaacgggttccgcctgcacagcagggggcaggagctactggtatttctagtgtaggaattgcacgagcaccttgctgtcttaactgccgaatcacttcctcttgttcattgattctagtttgcagttctgcaaacctattttcccaattttaggcatcctaggcagcttgggcaacctg

SEQ ID NO: 280949 - DNA, 649 bp, Cannabis indica
cttcgatcttgtactagttttgtttatcgtttacatagcatgattttactgttcatctgctttttcgtggttggatgttgagttttctgggaatttctgttttgagtttctgtgtaacgcgttagattcctcttttcttttgtgtttgaactacttcttttcatcgtattttttgtcgaggacccatttttttcttcacgtaatgacattcaagggtttagagtagactttgtcttctcgattcttacccctttttccttttctttgcttattcgcaatgtcaccatctgtgggattcttgcacccgattcttgtcgaggaaaaccttctaaggctttctttttgacaagcgtccggagggggcctctttccagcggttaggggacccccattcccttttttgacttaaggtttggtttggggcctgactgctggatttttcaatctttttcagaactaagatgtctgcatccggttctaaatcttcaaagaaaggagggaaacgcttggccaccctggaggaagtcatgaggggtccggtggcccaggaagggcacaagtcccgtgctaacgggtgggaagcggctgagcttcactctaccctgacctaccctcaccagctggaacacatcgtggtggtggcaggtat

SEQ ID NO: 280950 - DNA, 594 bp, Cannabis indica
aaagtttttcttgaggtagggcataaaagttcatgaagcttgaaaaaagcagaatggaaaatagatgcaatgcagttctaaaacaagccttacggctgaaaggtaacacaaggacatggaaaagaagagtcgcagaagtgtcaaaccctagggtttcctacagtgttctttctacaggaaagttacattcaaagcacaagcatgcaaaggaaaaacataaagggaatcagaaacttactcaaagattcaagtgtccaggttcaagcaatccagaaatcgtctgtaaactcttcagcaactttgaagcctgaaagctttctctttttgctctgaagttcgcttaacaacgaagggtaatgaaatggggtaatatgtcagtactccaagtatttataggcaaaagggtaactgtacgtaaaggaaccttagatgcctcgacttcccgccttgaaagcaaatatgggaaatcaaaataatcgagtgcaaccgtcaaccgtggagagagaaattcgaatttcaaaatattaattgtcagagcataattagccgaaaaccgaaggacgccaactcagcttcacatcgagtctcgaacgg

SEQ ID NO: 280951 - DNA, 641 bp, Cannabis indica
aaaaaaaaaaaagaaagtaaagatatatattgtggatattgccctaaaaaaaatatacatatatatcatataaagagcaatatcttacatactatatatatatataaaaaaaaaatcaaacaagagcaacatttctctatcagcgtagcttggtcaaaattcaaaatataccaaagaaaattttgctacggtaaataattattgtggatattgcccttaaaaaaaatacatatatatcatataaagagcaatatcttagttttaatcatttagcaaagtaaaaaatatatatatatcggtaaaaatatatatgcatataatatatatatatagaaaaaaaataatatatcatcatcaatcaaaagagactttgctatagtttatttttcgtaaattttagtcaccaaataaaaaaaaaatcgttgtttatttctttattttggctctaggtattgtaatgaaatcccgaaagttaacttgtcatttgaatttcaaaatatttttggttagcctatctatgggtcaataattgtttacattgttcgtcctaaaaatctttatccatttgagcgtcaattaatatatctttccaactccaagagtgacaacccttcctcttttcaaatatttcaatacctgtg

SEQ ID NO: 280952 - DNA, 577 bp, Cannabis indica
gtcgggaatgttaaaaaaaaaagaaaaaagaatacagatttttctgccattaattagctttataattttatctaaattaaaataaaataactaattaatttcgttacaataacaactaactttaaaacacattaaatttatacaataacaaaataaataaacataataaataaaaaagtatataaataaataaatgtatttatagcgaactcagagagagagaaagagacagacgggatgtaaagaccgcatatgactaatactttgaattattaaataattagggtttatgtatgagattttattattattaataataatatgattatgggaatttatttgagttcatatatatttattatgctatttatgtaatttctcattttctgtgattgtgttcggaagctgtggacagcgacgttgggcctttagagagtcatattgtatatattttgatgtattttatttgtttggggtgttttgttaagtgttgaattagcgggtttagaaatgaccatttagcccttgagtggtggtaactaatctatttgttaaaggggtaattaggtcttttctt

SEQ ID NO: 280953 - DNA, 232 bp, Cannabis indica
ttgtatgttcttggtctggcagatgcattttgatttgattgtagcccgaataagcatccatgaagcttaatatttcgtgcccggctgttgcatcgacgagctgatcgattccgccatttcttgttcggcttaggtacgagtacggggttcgcgacccaagccgggtaaaaagcttcagtgatgaagttgttgttgtgcagcttttcaacttcatctttcagggctactgctc

SEQ ID NO: 280954 - DNA, 843 bp, Cannabis indica
aaaatagcaaaagaccgaaaccctccaggttgcactgccgcgatatatacaatcactgtcgagctccatctcactgttcctccagctttgcttttcccttacctacacaaggtagcaaactgatgagtcaatagactcagtaagatatgcaaaacataaataatgcgatgccgactttatgattaagccgccctgagctcaataattaagctcaccaaatggataagaacgttcttaagggaagtacgaccactgtaccaaatgcactaaagtaccaaccctgtactcgtgttggtagagccataactgtactcccgggaattactaagtgttgtaccacatgcacgacgtacccctggtactcgtgttggtaacaccgtaaccacactaatatacaacactatactaacactctataagtcacattcatattagtgctagtagtgcaaacatccaaaacaagcatacattcatatatatattcttatgctatcttacctcgttccgtgctcaagtgtgccggtcagcctgagtggaaacgcagctcgacgctttacagggccctaaaccataatgttcagaattcgatgagagacacgctaaaacacttatcggggatttaaaattgaaactaagaataaccctatcgataaataggatgctaataccctaaattacgcaaaaacgggaaaatctaaggctcgagaaaaagccccaaccagcagaccggtttccaaccggaagtccggttcctggcaccaaccggtcgaccggttgcaacgggctcccaggaaccggaactccggttctgagctgggaacccaaaaatctctccccttagtt

SEQ ID NO: 280955 - DNA, 105 bp, Cannabis indica
ggatgatgcccacccctacatttaagtatcgagtctcatatatatttttgaatgaatcaagtaatttaattaagggtaaatacaattttggaccttctgttttgc

SEQ ID NO: 280956 - DNA, 581 bp, Cannabis indica
aaagaaaaagctaacaagtggacgaaacccctagcaccagaaatagaggaggacttgacattgcattttgaaaaaggtcggtatttgaatgttgactcatgcagaccttacacgttgcaggttcatcctggaggaatagttctgaccggtggcgtagtggacttgcaggaacatacttgcacttgcgacttgttccagtgcatgaagtttccttgtcctcatgcatgtgctgcatctcaggagcgaagtattagcgcgtacacactatgctcgccatattacacgacagaatattggaggaggacatatgaaggaacaattatgccagttggtgacgaggatgattgggaatggcctgatgacataaagaacatgacagttagagtgcctgttgagaagcaaccagtagggcgacccaagaagcaaaaggttggaaaaatgaagaacaatcgaactacttgtaacggtgaaaggattatcaaatcacgaaattgtagcaagtgcggtgccaaggggcacaacagaagcacttgcacctaccgaggttaaaaatgaatttttagtttatttgtattgtgatg

SEQ ID NO: 280957 - DNA, 607 bp, Cannabis indica
gagtgatcgactttccaaagaaaattcttttgttttgtgcctgagaatacttttaaaatctttccaaccaggaggcaatttgtcaataataacagcaatttggaattgttcatctaaagacataccttcagaaattatttcgtgagcaattttctgaagttcatgagactgagcctccactgacttatcgtcagtcatctggaatttgaggtagcggctgacagcgtacttcttagttccagcctcctcagtgtcgtatttcttttgaagtgcgtcccagatttccttggcagttttgtcagaattatagtaatcatataaatcgtcagataaaccattgagaatataatttttgcacagaaaatcattctcgatccagcttgttaaatcagcagtttgcttctgcttttcatcatcctttgcagtatcagaaacaacaggtttatcagtcgtcagaacataagcaacctttttcgtagtgaggaaaaataacattttctgtttccatcttttaaaatggtttccctcaaaacgaaaaggtttgtttatatcaataacaccagaattctcatcggcagtcatggcagttgttagaaattattttacc

SEQ ID NO: 280958 - DNA, 581 bp, Cannabis indica
tccatttaaatattatttattttctgggatattacacattatctgaaactattttgtatggaaatccgaacaggcagattatgttcttcacaataaactcttgaaatttctttgatgtaacggttgcgagtggttcggcttccgtccacttagtgaagtaatcaatcgctatcattgcatactgcactcctcctttgcctttgggtaattgtccgatcaggtcaattccccaaatggcaaagggccacggactctgcatctgagttaattcgttaggtggagctcgaggtatctttgaaaatctctagaatttctcacatttcttaacataggcttttgaatcttcaatcatcgttggcttgaagtaaccttgccttagaattttcttagatacactttgcccggcggcatgatttccacagaatccgtcgtgcacctaaaataggagtcgtgcagcttcttcttgagtaacacatctgagcaatggcatcgagaatcctcttctgtatataattccctctactatgatataccgtgcagccttccttctcatttttcgagcttcattccgattatctagg

SEQ ID NO: 280959 - DNA, 993 bp, Cannabis indica
gaatttgtttgaagaatcgcttcatcacaaaatcccaaaatacaaatcgttgagcttggcgataaacttatacctatctatttgactttcgataaaattgttaaaacaaaaaaaaaaaatacctaatattattaatcttatttatttgaaaagattaaagtaataaaataattataattaattaaactaacagatcaacgaagaatttttttttctaataaggagttaacggagaaaattaaaagcaccgttaaactaaaaggaacaattaaatagtcacttttattatataaagataataattatatattatacaaaaataaaaacaggaaagaatgttggaattatactccataaatgtagaaataattttatggctcgatttcttaacatttatatagattcttcaaatttgcttaattaattcaatgaatacacattaattttgacttctatatatatacaatgtttatatatcaataatatacattttactttttcttatagtaaagggatttcgaattttaatttagacatctaagaagagatatatgaatataagtttgtgtgtattatatatatttaaataaaataaatttatgtatatttgtgtatataaatatatgttcatttgcttatttttgttttttttttttttttaaattagtttctcgtttttactccagcggattgctgctgcccactaaagtctctataataatctttttgtattttcaaaggtttgtaattatttttacattttcttatattagaaaatacatagtacttaaatatgtatatcatcatatagaagagtttgaatattttaaatattcattcgtcgtgaagtaagttctgtgattaaatgtactgcggtcggatgggtggattattttttttgttgctacatattgttctgcatgattggtcagtgtttttgtagtatttttaaattttggggttttatgtattttttaagctgttatgttgccg

SEQ ID NO: 280960 - DNA, 580 bp, Cannabis indica
atgatggggtgatgcgacacccggtcgatggtctcacttggaaagactttgatgcaaaacatcctgagtttgcaagcgaccgaagaaatgttcgactggggttagctactgatggatttaatccatttggcaacatgagtcttgcatacagtatgtggccagtggtgttggctaattataatctaccaccttggttatgtatgaaagataattattttttgctattggccctaattcctggtgcaaaatctccgggtaaagacatggatatatttttaagactgttggtggatgaattaaaggagttgtggaataatagggtaccaacgagagatatatagttcgacaaaatcgatgttcaccatgcatgttgcgcttttgtggacagtgaatgatttccctgctcgtagtagcttgtttgggtggagtggtcaaggttataaagcttgtcctacttgtaatgaagacacaacgtccattcgagggatcgggaagacatcatatgttggtcatagaaggttcttgccaagtaatcatgcaatgagaagggatactcgatttgatggtaaaagttgaaaga

SEQ ID NO: 280961 - DNA, 647 bp, Cannabis indica
gaagacttggaaagaatgactccattagtggaagcgtccaacaccatcctagaggtcgcattgagaccattgtaaaatgtctcaagttggatacaatggggaataccatggtgtgggaacttcgtcaacaactccttgaatctttcccatgcgtcactagtagtctcatcttccgattgttgaaaggacatgatctcacttcgaaactttgcatttcttgttggaaggaaatactttcttaagaatttttcaaccaagtcattccatgttgtcaccgaatcgggaggaagagcattaagccatgctctagcccgatgcctcaaagaaaatgggaacaacttcaatcttaaagcctcttcacttactccttgtagcttgaaagaatcactcacctccaaaaatgagcgaatatggaggtgaggatcttccgttggcgacccaccaaattgaccaaccgtttggagcatttgaacataggggctgcatactctcttattgcttggatttcgggtctcacaatacccggattaagctcattgaacataggagttgcatactctcttattgctcgagctctatcatcggccaaagcaataggattggcatcattatgagcaccccccacttcaaacccatcagccgtattg

SEQ ID NO: 280962 - DNA, 580 bp, Cannabis indica
tcctaaagaaacttacagtttcagactaagataataagtcacaactagatatccctcaaaacaatagtaagaggttaaaagtaattttaaccagacacctattattgagtgggagccatctgagatgtaatcaaatgaggaacattaggggacagtcaagaaagatttatgaaagtgacctatatgttagatattaaggaactatatattagttatcctaatatccacaccaactcattaagaatttgagatggtggttactcgggggtggaggagttattctagaagagtgtaaaaacccatctataataattcaagctccatcagagaagatatacataactttgtaaattcaaaattaccagaaagttattctactgaagaaaattctacactgcattatctcagttccaaattttaaaatatgagagatatgtcttctgtttgttcagatgtacttaataagcagtaaggatttcagtatcccttgatgagtaaagcatatagttaaggatgtttcataatgatttatgaacctagttccagaaatttgggtggattcaaatatactacacttgat

SEQ ID NO: 280963 - DNA, 686 bp, Cannabis indica
ctcttgctctcttcaccttcttcaacttcctcagaaaagccccattgcttttcttgactttctcccggcagcacctcctcgtcatccactaaatcaatagtgtcgggggagcgctggaagaaatctttagagcaggggccattggggaagaagtaaaggcaggaggagcctcaggagtgtgaaccccagcaagctgatccaagatggcgtccatggagatacctgctacaacaaaagaaagcaagtgttagaacatccgtgggaaaccaccaacacaagatatggcaaataagctagtcctacccggacttcctaattcggccctagcaaagttccgaatttttatgctggcagcatcatctccgagatagctgtccgaaggccggaaccagctggatgtaatgtaagctgaaggacctaagggaacgggctccggaggaccagaacccatccgggaccgacctaggaaatctcctaagtttgaaaaataaaattccttcaaatgatctccccaccgggtcgagggcatcctaaacctatacagacgctcgtcgaaccctacgggcctacgactggcatactcgccaacagaaggaacataatgaattaccaaaggagacttaccgccggcgccggaagtgctggcaccaggagccccagtgttcggctctggaaccaaaggctgt

SEQ ID NO: 280964 - DNA, 646 bp, Cannabis indica
tatagctcttacaatagtatctctgaatatataattcttagatagccttagcatacagcgtttcggcttacaatttctccgtcatttgtccagtgaacattcctcactatttatagggctggaaacttgaggaggaagagtttcctctctcgttacaatgcgaataaacagaatgatcgtgtgatcaatgctgaatgcaaggatcgtgggattgaggctgaatacaccgatagggggatcgtgtgtatgccacatccacgtaagttgatccctgagttgtagggattgagctggtgactcatgatgtgctaagctgaattcgctaagggcccgtttggttggtggtaatgggccagaaaggaatggaatggaatactaatgggcctgattattttgtttggttgaaaaataacaattttggaatagaattccatagtaatgctattcctccaaactaatggaattgctattccattttttatttggtggaattataattccattccagcatatatctctcctccatggcccaagcccaacaaaccctaaccctagaaaactgaagattaaccattgtgaccatcttcttcctcttcttcgatcgatcggacctgcaagtgccggggtagcgttgccagaggtaact

SEQ ID NO: 280965 - DNA, 565 bp, Cannabis indica
gaactgcttgccgttgtctgagactattttgtacggtagtccgaaccggcatatgatgttcttcactataaagtcttgaaccttctttgatgtgatggttgcgagtggttcggcttcagtccacttagtaaagtagtcgactgctaccactgcgtactgcaccccgcctttacctttaggtaactgtccgattaggtcaattccccagatggcaaagggccacggactttgcatctgtgtcagctcgttgggcggagctcttggtatctttgaaaatctctggcatttgtcgcacttcttgacataggctctcgaatcttcaatcatcgttggccagaagtagccttgccttagaattttctttgataagctctgtccggctgcatgatttccacaaaatccgtcgtgaacttcaaatagaagtcgtgcagcttcatctggtgtgacacatctgagtaatggcatcgagaatcctcttctgtacatgaccccttctactatgatgtaccgtgctgcctttcttctcattttccgagcttcatttcggttatctgggagttcccca

SEQ ID NO: 280966 - DNA, 997 bp, Cannabis indica
aatgcaaaatatgagaactactgaatgacataaatgcatcactgaattcaataaataacagtataaataaattatttaaatagctataaataattttcataattaatcctaattaactcttaatttccaaattaaactaagcgggctttacacttcagttttctggtgaaatctataggcaccagatcaccagcaaattttgacaaccgatcaaactccagagtatactccgccacagacatttttccctgagtcaacttcacaaaatcttcttgatgtgaagtcctcacagcaacattataaaacttttcctcaaaaagtttcttgaactcttcccatgtcatcacactgacatctcgagtctgattcactatatcccaccatacgcgggcatgatcttgaaacataaaggccgcacaattcaccctctcagttcccgtcacccccatattatcgaggatacgggtaacagtgctcatccattgatcggccttaataatatcaatgcctcccagaaaagccggaggttgcagcttcacaaaccgctcgaacacagagtcccggtgcggcataatatacccttggttacccaccactggcacaggagctggtggtaacccttgattcactggggcagcctgttgccttaaacgttgcaactcttcctcttgacgaagtatgacacttcgcatttcatgaaacatctgctgccagtcagcaggaggattagcattaacggcccccgcattatcccccggattttgcggaggtggaggcagtgctggtggatcggtttgggtaaccccgggctctacttgctcgccctgtggtctagatgattgcggagggtccattactagtacccctgtaatcaacaaccccagcgagttaagcaccaataccacacttacgcacttattgccttaaaccctaactcatctatttacctcatacatatttacataaacaaatagcatttatagcatggcatcacata

SEQ ID NO: 280967 - DNA, 588 bp, Cannabis indica
agagtttcataagtacattcaaagtgaaaaaagacgaatttacaaagaaagggcacaaacatccgaagttggagaacaaggagaaggatctcaatatgagggatctcaatatcagggatatccaaatcagggatctcaatatcagggatcacaatatgaggggtcacaatatcgagcatctcaagattcgggacatggcgttgaagatgaagatcaacgatctcaagatcaaggtgaaagagctgaaaatgactcacaagtttatagtccgtattatgactatcttggcggatcaagaaataatcttccacattattaaattgttgtatctcattttgtctttgaaggttcgtatctgtgttattacttttccgtttaatgtttggtgtgtttattttaatttttaaatgtatgtttaagtttgtaatgtttttattatgtattattgagtgtgctttaattttataatgttctgttgtgtaatataaaatatgtgtactattgattaataagaatatgatgtttagtgtgtttaattttaattttaatatgtgttcaattttaaaaattatttttattgtttaattt

SEQ ID NO: 280968 - DNA, 862 bp, Cannabis indica
tttattattaatttattttttgtgaattttggggtattggattatgtgggttctgaaaaatagggaatttttgaaatttctttttcaggggggcaatttataggtctgggtttaagtgcaagaaatgtgagaagacgtattcgagcaaagacatatatttggacttgactgtaactgctgcattgagagactatactgaggtgaaaccaactgggactgagttatttcggtattactctattcattcattttgttaccctttcgcatcaagatatcattcattaccatttgttaaatttttgggcaattgtttgttgatttctactgtaaacacatatgcaaactcgcctgtcaagtagaattttcttttagtttagtaagggtcccataatcccatttacgcaacattagtcatgtgggtcctattttgatgagatattgcctgcaattagcaatgaatgatttttgtagctttcttcttgtagaaaaagaacaatcaactcattgtttgtgtcatgaattgtatgatattagtcaaccctcaaaagagttactggatatatttgtttaagctagcgctgctcatttgttttccttctgttgctcaattcattaggagtccgctggtttcatttttatacgaaagagggtggcgtcagaacttcagccaaagcggttttcctggtcctgatgaagaggtgatatgctttctttgggaacttttttgtggtttaattttaatgccttgccccaatcttaatataaattacttcaagatgttccttatgggggttgtgttaactcccatatagtgttcttttttgatttacattgtatcaatatgtgatgtatattggtactt

SEQ ID NO: 280969 - DNA, 693 bp, Cannabis indica
ctaggttctgctatgctcttaatgggttattctaactctggaaatggggaaacacccatccgaggcatcgaaatggcaaaaattgagaaaatgaaaggcccggggaaccctgccaaaaccggctagccggtttttgtggcactgcaaaccggctagccggtttgcaccagtattccccaaacttttcatttgttgctcaattcttcaccaaatgcaatgaaaccttccagagtacctaataagggcatacacaatatattccaaccaataaaccaaagaaaaactcaatgaatcaagatatgccattaatgatcaaagctttgaactcaaagctcaaagttgcataaaacctataccaaccatcaaaaccagccacaagaagctaataccaactcaattgaaccctataaatcgaaccctaagcacacctaaacctaacagccaccaattctcaaattcactatttcaagctaactcaaaacttgaaaatacacatactcaagggttttagggtttaccttactttgattctccttgaaatcttgatagaaaccacaaattcagcaagaaatcccctggttcctagctggttcgaagagagagaggtgaagaaaagagagcttcctttgaattttttgatatttcctttattttttcctttttcttcaaatgagagaaatgcatttcctatgc

SEQ ID NO: 280970 - DNA, 496 bp, Cannabis indica
aaccgggacaaaggttttaaaaccaaacttaacctactataacttaatacaaaaataccccaaactagcagggaacaatctgcctgaaaacccaaaactagcacgaaacgacaagttgagaaaaactggtttcacaccctactgcaaaatctgggtaaccggtttcacgggcagtttaaaaccggttagccggttttacccagaaaaccaacaaagatcaaatccccaaccaaaacatttccagttcgcacacctgacccagaaggagaatatgagtgtgacagagtacactacccagtttgattggttggcgaggttggtctcgggaattgtgccaaccaatttaagtaataaggaaaaatatcttgatggattaaatgtgaagattaagcatgacctaatgatcactacagacgacaagaccacctatgttgagatggtggagaaagcactgcgagttgagggcgcagttggatgtatgtcggagtcgattagg

SEQ ID NO: 280971 - DNA, 729 bp, Cannabis indica
gcagccagagtgacgtactcgtgtataagagccattcattccgtgggtgtaagggcccaacggaggcttgaagcggggacgttacacgtactcagctactttgcaataaaacaacaatttcagtacaaggtgaaaaaatcttgcacaaagaaatttcaaattgagtgtttggataaagattgcaaatggtcactaagagcttcaaggaatgggacaacagagaatttcgtgataagaaaatacaatgaaaaacacacttgctcactaagcatcagatttggagatcaaaggcaagcatcagcaaaaataataggggactgtgttaaatacaagtttttgaacataaagacaacagctacaccaacagatatcagatttgagatgaatgacaaatatgggatacaaatgaattacatgaaggcatggaggagtagggaacatgctctaaacatagttagaggaaaagcaaaggagtcttatcagttgctgcctagctatttctatatgctccaaaaaacaaacccaggttttgtagtgcacattgaaactgaagaaaacaacaacttcttgttttgcttcatggcactaaatgcttcactgaaagcatgggaaaaatgcagacctataatagtagtcgacggaacatttcttaaagctacatatgggggaacactactaacagctagtgcacaagatgcatcaagtaaaatattcccattagctttttgt

SEQ ID NO: 280972 - DNA, 468 bp, Cannabis indica
gttattataataaatactataatcaataattaaaacttacagctttttgatcttgtatgtaacggttggggtttgcacgtgcgacgatgtcagtgatatatttcaaaacataaaaaccacattcttggcttttaggttgtcttggacagtttgcttgtgaaattccttgccacgggccaagatactcatgtgcgtcccctatatatctgaatgcactgttttgaaaaattatattagcatttcaattcgttagttaatttaaatttgttacataagaagtcattaaattattaccttccgatcatttgagtaatttcttcgggaattgggcggccacgtacagggtttaaatggataattttctttggcgtaaccaccactagcgtccaatgcgcactagaaaattatattggaatataagtaagatagtataaaaataatttgaagtcataatatagaaatgaacaa

SEQ ID NO: 280973 - DNA, 655 bp, Cannabis indica
agcattaagcctagtcgcgacctatttctcaagtcgcgacctcagtcgcgacttgctgattttccagaaaggcctgaattttcatcgttagctagtcgcgactagccttaggccaagtcgcgacttgctgaccagaatttctataaattcacactttccccctcattcaaccctacacaaaccaaattcaaatttcaaatcctctcagccgaccctaccctattttcatctcaaaaattcaatttttcatctccaatcttcaatcttttcatcttttctcaaattccttaaacccaatctaatcaaaaacccaatttcactcaacaatctacacatatcatcaaaacccacaccaaaaaaattacccaaatccaaaaatcaccattgttttcaccctcaacctcaagctttcaagaacattcaacaatggaggtggagtaaagctttttcgggtttgtaagtatcactttcttcattctttcaagaatttgattaattatttttagattttgagtgatataaatgtgtgtggtgcaaaaatattgatgatattgggtttgttattattgtattgtggtattgagtgtttgggaatattgtttgagtgaatttttatttttgggatagagaaaatttaaggggaggtgctgcccaa

SEQ ID NO: 280974 - DNA, 640 bp, Cannabis indica
aggacagttagtaattttacgagaataaaataagaaccttgaatgtgatgtgagaatattgagaaaatgatttttaaaaattaaacaagtaattaaaatgagaagtgatcagaaaatgattatggaagacacaagctttgtacatgcaattatattttcctaataaaattgattctttaacctcaactataattctacaccattaattatagttggaaaatgtgtataattaagctcactagaaaaatatgttctctaattaaattaatactacttctaaaaatactatcatattatataatttaaatcgacaaaataccaccggcagaatgcagtaaaaatcatataatataataaacaccctaataattaatagcctaacttacataagaaaagcatgactgaacttatataaaaggtactattaaatttaaagtgcaatttagaagaagagaaatttaatataataaatatggaaatgaagaacaaagagaatcaatatattagaaaaataaaaattacatgaacttacacttgagtcttgccaaagaaattagcctagaaaaggcattgtctttacaccaaaattaataaagtaaaataaagaagaaggaaagaaaaagataaaattttggtataa

SEQ ID NO: 280975 - DNA, 466 bp, Cannabis indica
ttaattttttaaaaattatttaagtttataatttttttaataatagggtgtatttataattttatggggtgcaaatataactcctctttagttaataccttggaaattacatgtttgccccacaccataaaacatgtgatttaataaaattttaaaggtaaatattagtcattaataaattacccacttaactccaattttttaatatcaactaaaacctcctggtatagcacaacattacacattaatactgttgtcacatttccgtccaataaattgagtttctactattcccaaatctagaactattttatttcacacatggcatgtatactacatacataatctaataaaattatcgtacctaattaataaagggaaagttgattttctatacttacatatacctaatattttatttctaaactaatacatatcatcattgaaaatatatgaccactttatc

SEQ ID NO: 280976 - DNA, 608 bp, Cannabis indica
acgggagtagaacttcatcgtcagatgatagatcgaggttatgatcttcatctccttcagaattggtcgaccaattacggcgttatacgctgagtattggtcgattactgcgaagtcggccatcgacttggctgttactggggcagttcccaaagtgattgggagcttgatcattcctttaattgctatgacatctcccgaaaagccatagatgcttgatgtcataggtcgcaaatccttctcttgcaaccccatttgcttgaaggcttggaaattcagcaaattcactgaactcccattgtcaaccagtatacgatggacattgtctccaccaatattggcgactatcaccagtgcatcagagtgcgggtgatggacccatctcgcgtcgctctccataaagatgatgtcgtcgcattctttcttaaagagcttctctggccgttcaccaagattgttcacattggtaagcggcctctccttggcttctctggcatacctttcttgcgatttgcgagagtcgcctgcgatgtgtggtcctccgattatagttaagatattgcgaggtgttctggagccactcgcgttctgggtttctcctttgccat

SEQ ID NO: 280977 - DNA, 556 bp, Cannabis indica
tgttaataaaacatacttgttagtaaatctagatcctggtaaaacatattccaacaactagtatcagagccatggtaattatttattgtaacgccccaactggcataagtgtattacgtgatttttaaacatactgtggagctcgttgctaatcaacgaggttttatgaaaatcgtgattaattaaaatttttgctttttcattaaacttatataatattctatacaaaatgctttgggatcccatttataaaatacttcacaaaaattttactattatttactaaatacttgtcgcccagcgactaattacaaaagcattgttgtcccgaggatcgtacgctccagtcctaaccgtcccgacatgtacaatcttcatcggctcgtcctcacggttcctcagccatggccttgcctttacctacacataaaaatagcactgtgagtcgacaaactcagtaagaaaagcataaatcataaaacatacataatcccgggttatgatcagatgcccatacccttgaccataaccctaacttccgtgtcccacacgatac

SEQ ID NO: 280978 - DNA, 500 bp, Cannabis indica
aatagtgatacatgttcactgggcaaggggaccgagagattcaaagtcgatacgcagctaagctaagactatattattatctaagaattatatattcagagattctgttgtaagagctataagaaaatgaatcttcttccttgttcttaagtcaatacaaataacgatgattagggtattaccgaactgctcagggctcaacctctataaaattcatgtgttttattatttctttattatatatatatcgttacgacacatcgtttatcacttataaaatagactcattgtcgttggctaaaagcgaagtcaaaaggtatataccaaccaaccactacaacaaatactgcaaaaaccagatgcttttggactgttactcaagtgggcggtagagttgtgtcagtacgaaatcactttccaaccccgaacaacaatcaaaggccaagtcttggccaactttgtcgtagaatgcacaggcaaaaaagaaagctgttgggttt

SEQ ID NO: 280979 - DNA, 570 bp, Cannabis indica
ccttctcggcttccttctttgttttctctgcttcctccttcactttctcggcttcttgcttgaggcgggtaatatcttattgggcattgtctcgttgctcgcacacaaccttgcattgggatactagtttgtgagtttcgccctccaaatactcgagtcgctcagagagtagtcgattggaagcaaaagaagtaaaagaagcctggagaatggcaaacagatgagtataaaagaggtataaaaagataatataattatagtaacaaagctgacataccatgaagtgacagtccaaggtccttgtaagcatctcctttgggctcctaagattgagaaaacccgaatctggaagaaggagagtttaaagtttgcgccgacaagcgaccccatatgcctgggcaaattcagagccagcttctccagctgcgaccgacacgctctcgatggcctaatacagagaggcagtagtgggggtcgtctcaagatgaggggcattggcattgggaacaactggaggaggaacttgctcttggatctccttgtccaaaacctcgagatcgataggctcga

SEQ ID NO: 280980 - DNA, 429 bp, Cannabis indica
gtcaatagatgctccagaggtgatacggtagaggaatgaggccacatcttaacacaccacagtcttgttggagtttggaacccaattgctaagagaaaatcacgtgagagatgcatgagcaaaagtaagatgggtaattcgaagactctcccccgattttagttcagaccttgcactagtgagttcagagagcatcaatgggcgatccatagacataatggcatttgggacattctctggaagttgcaaggcttgagtaatgtctttttcagagaatgaaaaccaatgtcctctaacatacacttttcgaaaaagtctagaattttcatcaagaaaatcatcagataggttagcatagaaatctttgacaatgttagcaatgtacccgttgaaaccagtgagagtgttttcccattgatgaaattgaat

SEQ ID NO: 280981 - DNA, 716 bp, Cannabis indica
ctcacatatttctgtttcctggtgaaatctgtgggcaccagatcaccagcaaacttggacagccgatcaaactctagagtgtattcggccacagacatcttcccctgagttaatttcacaaagtcttccatgtgtgaagtcctcacagcgatgttataaaatttttcttcaaacaaattcttaaactcatcccaagtcattacattgacatcacgagtctgtcccacaatatcccaccagacgcgggcatgatcttgtaacatgaaagctgcacaattcactctctctgttcccgtcactcccatattatcaaggatacgggtgattgtactcatccattgctcagctttaattatgtcagtacctcccagaaaagtaggaggttgcagcttcacaaaccgctcaaacacggaatctctatgcggcatcataaacccctggttacccaccactggcacaggcactggtggtaacacttgctcaacaggggcagccggtgccggttgccttaatcgacgcaactcttcctcttgacgaagtatgatacctcgcatttcatggaacatctgctgccagtcagcaggaggattagcattgccaacccccgcattatcccccggattctgcggaggtgcaggcggtgccggtggattggtttggtctacaccatgctctacttgctcgccctgtggtctagatgattgcggagggtccat

SEQ ID NO: 280982 - DNA, 919 bp, Cannabis indica
ggcggtggaggtggtggcgggtagaatccacctctcgcatccatgagggcctttgtgccaaacgaagaaaactgacctccaatgttgcaaattttaaagctttccttagattgagagtcaccttcatatttcccacacaacagtcttttcatacgtcgtcgaacagttcgaaatcgttctttagacttccctttcgtcttgttggtagtgacttctcgaccatcctttacaacttccagtcgacaacaagtaggaatttcagttgcagcaaatactttgaaagtctcttcttctttttgaacacgcaactttaactcccccttctgtacatcaattaatgctcttcccgttgctaggaatggtcttcccaagatgataggaatattctcatcttcttccatgtcaagtattaagaaatcagcagggaagatgaacttaccaacctttaccaagacatcttcaattataccccgaggatgagtcaaagaccgatctgccatttgtaaagtaactgttgtgggtttggcttcccctaattttaatcttttgaacattgataggggcattaagttgatactggctcccagatcacataaagcttttgtttgtatagaaccccctattgagcatgggatgttgaaactacccggatcttttagcttgggtggtagtttcttttgcaggaccgcactgcactcttcagtaagagccactgtctcatagtcttccatcttcctcttctttgacaaaatttccttcataaacttcacataacttggcatctgctctagagcttcagcaaaaggaatgttaatgtgaagtcttttgaagacttctagaaacttggtgaactgcttgtctagattggtctttcggagtctctgaggataaggtatcttcacatgatgatcaatactga

SEQ ID NO: 280983 - DNA, 557 bp, Cannabis indica
actactggcatctgccacgaataaacattagtatacagatatttggtaatacaaaaccattataccaataatggaattcatattcatttaatcatataaataatatatatgttacctcataaagcaaccatcttcatgacatcatgttgcctaatcaggcaagtcgatgctttaatctgatgatcttgtattgtatcgcctaatcaggcaagcccgtgccatagcctggcacccatatgtcgtataactgcataattataagatcataagatcataagatcataagatctcacaatacataattcataattatgtctttccattccttatatgggacctcctaagctgacctactgacttaacttaataacaggttaagtattcatttctaataggtattcaattaaagcatttcttatttccacccactaacataaactcatcttgataccttgtaaatctttacttcttaacacattctttcctcttagaaatctctagaacgactatcgattctgcatcctaatatgaatctttctagcgtactttgtcctcac

SEQ ID NO: 280984 - DNA, 562 bp, Cannabis indica
gccaggatcttagatctactcacaagtatgttgttaaacatcctaaatatgaactttctaaaacgataataaacacatataaagtttaggaaaccttagattggctccagcagaataatatgtctccttccacttagatctctaacccttgtatcctttctgtcgcagagtatcactaagatctgagtccgaatgtccttctcttcaagttggattcttcacgatcttccagactatgattgaggtaccacttgctgtgtgtgggcactactctatcacttagggtatttccattggaagatgaaaagagagagagaggggtcggctatagagagaaagtgagtggctcaattttctgaaaggcaatctcttgaattactgaataattcttattctggtgtgagccatcattttctatttataggcaaccactaggtttaggttagtaattatttggcattaaagtaatgaaaatattaattgaaaaaaccctcttctagtggccggccatggtgttaatgggccccacttggaattttgcagttttaacaattttcatttc

SEQ ID NO: 280985 - DNA, 715 bp, Cannabis indica
ttcttgtttggacaaattgggttattgctgttcatttggaaacaattgtttcagtttatctattaattcaaatactgttggaactggttctcttatggtttatgacaacttatatttgcttgacaccgatgcttcttataatgaaaccttgaatgttgaatcacgtggtactaagcgtaaaatggataatgaaaaatcaagttccttatggcacaaacggttaggtcacatctctagaaatagagttgagcgacttgtgtctgatgtaattttaaattcaattgatttttcagactttgatgtttgcattgaatgcatcaaaggaaaacagaccaaaactaagaaattgggtgcgaaaagaactatagatgtcttaaaattgatacatacagatatatgtgggccatttcctacaccttcttggaatggtcaacgatattttgtatcattcatagatgattactcaagatatgcgtacctatttctacttcatgaaaagtcccaagtgttggatgtgtttaaatcttttaaggctgaagttgagaatcaacttagcaaaagaataaagcaagtcaggtctgaccgtggtggtgagtactatggcagatatgacggctcaggtgaacaacgtccaggaccttttgccagatatctagaggagtgtggaattgtcccacagtacactatgccaggatctcctagcatgaatggtgtt

SEQ ID NO: 280986 - DNA, 368 bp, Cannabis indica
ttcaaaatatattttattaatcattttttcccaccaaaaatttcaaaatggcatttttttaaaatgtaaataattttgaatttttttgtttaaaaatagattaaagttgaaaattaatttttaatttattttagatcaacttaaatcatgtaaatttttcattaatgattaattaaaataaaaagactataatatattatattttaattagtaaaaaaaaagtaatatatttattcctagtgctgatcacctaatggtggctgctaagagtaagacttacagcagtatgaaacaatggtggaagctcataagatagaatggccttgactctcgcctaaacgagacaacacttgattctcatcttgatc

SEQ ID NO: 280987 - DNA, 599 bp, Cannabis indica
agcagtattatctcaactagtgaggggaccatgggcctatataattgagctttcaataagtagatgtagaattcaccaagtaaattctcaacttattaattccgccttacgccactatagatttagaattacatagcactctcaattatatagaacgttctatgtaccacgatatagataggtactatccattgttacaatcctaatagttaaagaacctctatagatgatttaaactaaatagggataaatttaccgttctacccttcaatgtattttatccttaaaatacttagcaacctataaatgatacttcagtaaactaatataattactgaaatgaggcctcaatcatttatctctattcagctaagctcgaaggaaatcatcgtttcactactaaatacttatagaagttatatattccatatccatgatcagcgctcccactcaattgaactacaatatccttaatctgtatgtcacgagaagatccaattggtcaactttaacgaataaattgagaacataaatactacaactaagttgaacctaaccatatcaggattaagatccatagacctaagatcaaccattga

SEQ ID NO: 280988 - DNA, 587 bp, Cannabis indica
tttgagttttgagaccattgcaagtaacaactaccaatggtccaacacaagagctccaacaagtagaaaagtggcgggagtccttgaggtagatgcaataacagctttgacagctcaaatggcttccatgacgaatgttttgaagaatttgagtattgggaacgctaaaaatattcaaccagctgctgccattcaaagtgatgatgtctcatgtgtgttttgtggagaagggcatgcgtttgagaagtgtccatctaatccggagtccgtttgttacatgggaaatcagaattttaatagaaacaatggggcattctcaaactcttacaatcaatcttggaagaatcatcctaatttgtcttggggaggtcaaggagcaagctcaagcaccgcaccagcccaaggaagacaagcatatccaccgggtttttcacaacaaccccgacattcacaacatgctcaaaattcccaaccaagttctttggagagtctaatgcgggattatatggccaaaaatgatgcggtgatacaaagtcaagctgcctctcttcgaaacttagagttgcaacttggacatttggccaatg

SEQ ID NO: 280989 - DNA, 590 bp, Cannabis indica
aaaagtggagcaatcttcgttctgcatcatgttcattatgtccagaattcctatgggaatgcgtggatcggtggagccacctgagaaggtgaaagactttatcaaagttatggatgagcagtttgacacttcagataaatctttgttcatcaacctcatccaagagttctcgtccacaaaactcaccggtgttaaaggagttcgagaacacatttctaaaatgagggacatcactgctcatttgaagaaactcgacgttatcattcctgataccttcctggttcattacatccttcacaatcttcctccacagtatgggcctttcaaaatttcctacaacacacataaagaaaaatggactatcaatgaattgatgaccatgtgtgttcaagaggaagccaggctcctacaggagcaaggagaaagtgttcacctgaccactcaacctaagaaacgcaagccattcaagaagaacaaagggaaaaagcccatggctcccaaggctgccataaagaaagattccatcaaatgtttcttttgtaaacaaaagggacatgcgaaaagggagtgcagccagttcaagaaatgga

SEQ ID NO: 280990 - DNA, 763 bp, Cannabis indica
ccgacaaaaactaaaaaattaacaaaataatcttgaagaggaagcatggccccagccatcagatgcgtctggctccaggccccgaagccgccgtaattgtgattgggcgtctccgcgtcgcgaggtggccgatggtaggtccctgatgtggaaggcttgattccagctacctccacaatgttctccaactgatggggacaggtcagagtggagtgaagctcggccgcttcccatccggtcgcccgagacttgtacccctcctgggcaacaggccccagggagacctcctcgagggtagccagacgcttaccacttttcttcgatgactttgagccagaagcagacatttttcgattctgtaaaaagagtaagattccagcagttaggccccataccaaaccctaaattaagaaaaagggaatgggggtcccctaaccgctggaaagaggccccctccggacacctgtcatacaggaaaccctaggaggattccctggacaagagtcgggtgcaataaattcacagaagacggccttacacgctaaagaaaacagaaagaaaaaagtctgtcctatgccctaagcaaccattatacgaagaacgtatggtcttctacaaaaaataacaacagaggcgtgacaacagcaatcctatcactagagcagtaaactcaaaccgattatataaaggatttaaacacttgcatgcccagaaacttcgaatgcaaacccagaagaaaaaacaaacagataagtaacaacat

SEQ ID NO: 280991 - DNA, 443 bp, Cannabis indica
ctaaaggtcaccctaagaaaaagactgctggcctgcaaaaacaactggcccaaagagttgccaagagtgttatgggcttatcgaacgacccccagaaccacgactggccactcgcctttctcaattgcgtacagttttgaagcgatggtcctggtagaaacgttatttccatcccataggagaacgacttacgatccggctacaaaccaagctttattacaagaagcgctggatcaagttgaagaactccgggacgagtcacaaatacgaatggcagcttatcaaaagaaagtgaccaaatattttaactctaaagttaaaaatagaaaatttcgctattggggacatggtcttaagaagagttttcccagccacccaagaacccggagtgggggtacttgggccaaattgggaagggccctatgaaatcgaggacgaaatcg

SEQ ID NO: 280992 - DNA, 609 bp, Cannabis indica
caatatccaaagcccatggccggccacacttaatggcttttatcatttattttttcattattttaatgccaaataattctaacctaaacctaggtggttctaaagactgcttagtttaatttggaaattagcagatgtttaaggtttaattataaaaattatttattgatatttaaataattatttatattgttatatttgaattctgaatgcatttttatgtcatatagtgaaatttcataactttgcatcttcggtgcccggcaacatggaacgcggtgtatggctcaggagaatcacaacttagtatttttagtttagtgggacaatttatttagacattgggaatgtcaggattagtcggaaatttagagtttttccaaaatacccttaagtgcttttaacccttttagtgtgggcggggcaaaatagtcatttttccacataagcctttgtccttttgtgaacttaatatttggtgataatgtgatttatgcaatgttattttggctgaaataaagaatagattatgcattttcatcatttattcaaaaattggaaatttggaaaaaataagaaagtttctctctcaagagctctctctctctc

SEQ ID NO: 280993 - DNA, 703 bp, Cannabis indica
atcaacccagaaatcccagaaatgaaaaacaccattggagctcaagctttgagttctaaactcaaacttgagcaaatctaaacaacatgcaatcaaactagcttagaaccacttaatcaagcataaataaccctctgaaaaagaaatctacccactacagcaaacaaattacagattcacatattttcttcaaaaatcacatttttgcatagaaaaatcataactttaaataatctaacaatcaagcattacaagaagcttaattaaactctaatcaacatgcttacaactcagaaaacaacaacaaaatcacagcagccacaatattacaaattcatgcatgcatcaccattttcatcatttttttcaagaaattaaagaaggaagaacaagagctaacctagcttgcaatggaccttaaaaggagatgaattaacaagcaaacatcaagggagaagaccagctccttgctgctccaaggcttggccgaaagtgagaggaaagaaagagagagtgttttgcaatgaaacttttctttaaattttctaagtgtaggaagtgaggctttgaagagtaaaatgaattaaagaggattcttttcagccaaataacatataaattaaacatttattttcaaataaataaatcactaaagacaaaataccattggggcaaaaagaccattttcccctccatactgaaa

SEQ ID NO: 280994 - DNA, 705 bp, Cannabis indica
aggtttactccctttcttcttgggtcctccaatcaaattttcatatgtctgaaggtcattgactaacgtgtgaaagtcttgttccttcttattcatgacataatttgatgtgtagggcagaaaagctggagtcagactattcaagataagactcacttgagttgtctgatccatttcagctccatgattctgggcttcctggaaataacttgccatctggagaaggtgatcacgcacattctgatggggttccatccgtgcattgatgaatttctttgtcgcatcaaagcgaaactgaattgatgccattctgaatagctcaattaactgtgtcatgatttctgcagccgtgacagtgtttgcaaaccttgttttcaaggtgtcaaccatgctggaaagcataaagtatcgagctttgttattagcattctgccaacgctcgtatttctcttttacagctttggttgcattgtcacccggctgtttaggagacggttcagttaacacaaacaaggcacttttacctatgagagcaatgttaatgttctctctccatttagggaagttagtccactcaacttattatcagtcaacagtgataacatgggattggtcatggtcatattggatactacaaataaaaataaatagaaagcaagtaaggtttaacacaaaatctcattcagaaattattagcacatagca

SEQ ID NO: 280995 - DNA, 610 bp, Cannabis indica
gcttagagtagttgtaccatttttttaaagaaagttaaagttgtattaactacgaaagtaaaatattatgatattttcataagtaggtaatcgtttaattaaagcccgatatgaaagtccgtttttataatatatttattagatttaattaattgtataagtggtattaaataatattattatttgattaatgttagaaaaatcgtaagtttagagaaattcgcaggtttagaaactgttttactaaaatgaccatatctggagttttataactccgattgaggtgattccagtggcgttggaaagataattcaaagatctataaattttgtagaaataaccatatcataattcgtaatttttttaggtgaaaactaagccctaaagttacgagatttagaggttacaatttaaatttaaaagtaagatatttgtttatttaataatttattatattattattgctattatgttaatattattattattcataaaactaaacgtataggttttattaaccctaaattatatcgttctattcttcccacctatctgagcaagactaaccctaaaattttcaaatcatctttccattacatccttagccaaa

SEQ ID NO: 280996 - DNA, 606 bp, Cannabis indica
tatttcaataagaaaatgaagaaaaggctctttaatgtcggtgatttggtgctgatgcgagtgtttggaaacacaagagatgcatctgcaggagtatttaacccaaactgggaagggccttatgtgatcgaagcaatagtaggaactggggtttataaattagctcgacttaatggctcgctaataaagaaccactggaatattgagaatttgcgaccctactactagtaaactaatgttgtaatctctctttttgatgtaatattttgaacttcaattattaataaagttgatttatttttcaagtaattacaaagtcttattctttaaaattacttgaggggcatatatatatgtgtatgatcaactagaaattatttgaaaatacataatatattgcaaaccctaaacctttatttttaaaatttgcaaagttttttaagtggttgattaaagtcatctatggacgacgaaaagtcaaaagtagaagttgtaaatgagatttaactcataaatacaacgataagctacatgcaaagttgaatatttaacgactcgcattttataggaatgtattaaaacgaggcaccaagatgccttaaaaaa

SEQ ID NO: 280997 - DNA, 644 bp, Cannabis indica
agtcccagatctagacaccgactactggtctgttctaggcccctttacccgaatcccgagtcaagatctggatcaatgtcacgggtctcggtctggttctggttcaggtcccaggtccaatttctgagttgggttcgggatcgagactggggtgcggttctaggtcccgaccctcgttctgtgtccctatctggttccatgtttgggtctgagttcaggtttgggttcgggtcctgagtccaggtttgggttgggatccgggtccggctcccaattcgggtctaggtcggatttggagtccgggttcttgtccggttacatttctggatctaggtcaaatttcagttatgattccaagtccaagtcctagttccagtcccggtcaacttccaattttggttccaattttgggtcacaggtagggatgcacatggggacggggcaatgcggggaatgcattccccgcccccgtacccgcctattatatttccccgtccccggatattccccatcgggaacggggcggggaatccccgtcggtgatggacaccataacggggacccgtttattgaaaaaaaatgtaaaaatacaaaattaatatttgcaaatattaaattaaaacaacaataacataaaactaaat

SEQ ID NO: 280998 - DNA, 1026 bp, Cannabis indica
aaaaaaggtagcaaattagtaatagataatactgaaaaataacaaaatattagatgaaaatctacaatagatagcgtctagtgaagagactgcaatgaaaaaggatttcaagatagattaaatgcatacctaaaagagtggtgtcatcaccagtgcgatcctacgccgatgtcatagctttaataataaaaactactaaattggtaagtatatgtatatatatatatatatatctataaaaaatagccacgcatataacaataaattaatatattacaaatgtatattatatacactactaatatatagtctattaaattttggaaattgtaggaaaaaattaaggaatatgggcaagaattacttatagcagccgaagcaacaaagggaatagacaaggctgtattgggcactttagaaagacaaacaagaaatggttttgtgaagttaatgagaaggtacaagctagatgcattggtggcttgtgctggaccttcttttcctccactcccaattatcagtacaatcttggccattgggggatttcctggcattactgtccccgcaggctatcttggagaggtgccatttggcattttctttgggggactaaaaggttatgaacccaaattgattgaaatcgcatatgggtttgagcaagccactaaaattagaaaccctccttcactttagggcttcatcaaagattagacacttcggaatccatgcttgtaatattatgctattaattatttgtatggtattatcaggaagttatataagccttataataaggattgtagtacgtacttttaatagcactcgagtcaccaaactataatgttgtgcttaggaaaagggattatttacaaatatgggaaacaatagatttggttcgatattaaaatatgataatcttaggaaaagaaaagttttaaaatgtgaatctcattaaaatataccatacataaacttaaataatttccaaaggaaaatttgatgttctatacttacatatacctaata

SEQ ID NO: 280999 - DNA, 458 bp, Cannabis indica
atagtaacccaaccgctttaattgagctaacaattttgggccagcttgatgggcgccacatgtaccgacatgagtctcttgaagtgcatgtgccgcctcttctatcgacagacatctcaacaatatcccatcgaatgaacgcttgtacaatgtgtcattaaagatcgcaaatcgaggccctcttcttcttacatccactcttttcttcaagtcttctagcaagactcccttttggatgtaatctttgattggttgacgccagtcattttcatttgcactatccaggaaagttatcaagtagactgtatttttttcttcaactctttctgtggattgggataatacatggcgttccccaatggtaatttggatatctctttcttcctgaagtgttagtgatgccgctaaattggctaatgcatcagctttaccattttttgatctggggatgtgattta

SEQ ID NO: 281000 - DNA, 653 bp, Cannabis indica
tcgcacactgatatttcctcgacatcctccattggttccacaatttttccggacccacccgggatccaactcatcttcttcagccatttctggctcaatggtttcccggaccatcagcgacgggcaggtgggttgcaacattgtaacattgccttgcttccccctggtttcctctcaccgtcccgattccagcttcctgggtagggaactttaggcacaggtgccgaatggacgtgaccgcgaccaaaatctaccaaggccggtcggccgaggatcgcgttgtaagcggtcgggcagtccaccaccacaaaagtgcagtacttgaatgtgctcgtggggggtgtccggacacaaggtgactggaagtcttacttttcccattgggataagcgtcgttccattaaaccctgtgagttgggacccactaggtgagaggtctcggtccgtcaggcctattgcagtgaaggcctccttgaagagtagattcacggagcttccgttgtcgatcaagactctggccaccactttattagcgatgggggtctcgataaccagcggatcatggtgagggaagcgcaccatcttggcatcttcttccgtgaacgtgatgggttggtccatcagccggggcctctgggctgggagttgagtaa

SEQ ID NO: 281001 - DNA, 679 bp, Cannabis indica
ctggatctttatgcaagtattgcaagtctcacccacaagacaaagaatttaatttgttatttcaatgttttaatgtttgttttttaatgtttgtttttttttaatgaactttttagtgtttgtttttttttttttgaatgactttcaatgttttaatgcttgttttttttttttttattttttatcttgaagtcgacaatatatcgacattccatcaatatattgtcgacaaacatggtcgacttaatgtcgaaaataaattatgttagttaatttacttttgaatcgacatgacatcgacaaactgtcgaaatcatgtcgataagggtcatccctgacctttcttcgcataatatcgacatagcatcgatattctatcaacaaactgtcgataacagctggaaaacccaaattttgacagaaaattagatctaccaaatctctaccattttaggctaaaaaacaccagttccaacaaatacgacacataacaaaagcaaactacataatgtctaacaaaatgcttaaaacacaacttacctattataattgtgtatgattatgagtgattggggtagtgctccggttttccaccaccgcccaccgacgagagagagagagagagagagagagagagagagagagagagagagagagagagagagagagagagagagag

SEQ ID NO: 281002 - DNA, 620 bp, Cannabis indica
tgtcaaaaacaaatgcttggtaggttctacttgttttaaaactgctgcttctaacatgtggtattttgatagtggttgttctagacacatgacaggtgaaaaagaatttcttgagaacattagaccaatgcagtgtgaagaagttacttttggtaacggtcttgttggaaaagtcatagggataggaaccctcaatttcgaagggcttcctagactgaagaatgtcatgttggttgatggactaaaagctaatcttcttagcattagtcaaatttgtgatcaggattatactgtgagctttgatagtaatcattgttatgtgtataatattcttgatgaaattgtcttgcaagggttcagatctaatgataactgttacaccatcactacctatgctacttgtcattctgttattgataacaccaccgatttatggcatgaaaaacttggtcatattcattttaaaaatctgaggagattgtctaatgcaggaattgttcgaggattacctaaattaggtaaggagtctttgggaaaatgtggaccatgtcagcttggtaagcaactgaaaatttctcataagagtgtttctgatgtgaatacttccagagttctcgaac

SEQ ID NO: 281003 - DNA, 502 bp, Cannabis indica
aagaagagtactgagtcagagggcgagttgctttatatgagagcgaggtttgaacgagtcgtggggagtcgtgactcggaggctttttacatgatgaaccctgatggtaatggtgggcctgaactcagtatttttctacttagattatgaggcccaagcccaaatttgagcccataatgaaaagctcatttgtaggtaaatttggagactgtttaattaagaattagtgatttgattatctctctgtattgtatctgttaattatttattttgttttttttttttttttttttttttatttttttttttctattattacgggttttcttttgtatgatgtaatactactataatgaattaattatcttgttaaaatatatattttagggcttaaaaaaaaagtttaaactttgtttaatagagaatgtttgtattatgttgttagttaataaattaattaactatatatatatgtgtttaagtatcagttaattattttttt

SEQ ID NO: 281004 - DNA, 589 bp, Cannabis indica
aaaactccctttgaagactaacagagagacaacggtgaaatgagcgccttgactgccgaagaaatacagaaacaaattttgattcgaaaagaaaaacttatgaactattagatacttatgaaatatagaaacaaatttaataattatatatatattatgtgtataaaaatggtccaaaggctatcagagttcacacggatcgggagccgaaagaataataataataaaaagaaataccccgatcaaggtttgagagtaatttgtaaacagtatattcagatcaggcaccgaaacacatgaagtctgaagccttacatggactagaataagtaaatatatatacaaaggcacgagacacgaaatataagcataaatgtaagagaaatcatatataagctttacctctctatctctatggccgctggtcatcttatctccatcaatcttacctcttccagaaacatttctcctttgaatggaggaaagagatggaatgtgtaaggaccgcttagttaatttggaaattagcagttaattatgtttaattatgaaaattattatagctatttaaataattattatgtctgtt

SEQ ID NO: 281005 - DNA, 479 bp, Cannabis indica
gggatgataattatatgtgagggttcaggtacttggctttaataggacgaggcgagagttgacttttaggagcgggggtatgggtttaaatattcatacccgagttgaaaatgcgataggagcggaagaatagatacccgtcctaaattcgtcccgatatgatgtatgtatatatttaaattataaaatcatatctactacaatctaaacaacttcatgctttagccttttttattgattatagtaatgagacattttaatttttatgaaaatatatgcggtgatgcatattaataatcatacttaactgctttaaaaagtgacgcttaaccatttattttcaattgtctaattttgtatgtactaactccatttattatacacactattctactcatgtttattgttttaataagtttttattgatttttttttaaaatttctcttttagacatttacatttttttaaaaaaaatata

SEQ ID NO: 281006 - DNA, 822 bp, Cannabis indica
accccaaaaagcatcctcaatagctttgtggtcaatggtttttacaccacggaaataaatttctaccaactgatttgattcctgtgaaaacaacaacttgttgcaatcaccagaacaatcaattccagtaatcaaataaaactcctcagcactaaaccgtatgcaacggccagcaaccttagcccaaaattctttaggattgggctggtaaacttccctcaataatagactatgaacaacttggggatggaaaacatactcaggcatatctagaaaatgaccaagttgagtctcacgaaacatagacagtaaattgacagataaagttttcttaatattgtcaataatagaaaaaaggctagtgcaaacacatttagatctgtaataatcagagagactaaatttgtagtcccagacctgcaagataacaaacatggcaacaataaatataaattgtcaataatcaagtatagaaactataataaaactataacaaaactaaaaacaaactcccaaacagaaacaactatacgaatataaactgcaaacatctgaaatcgtattgatacctaaaaactaacaccaaacaactatacctaataaaaatcccaaaacacatcaaacataaacagattaaactataaacaaactaagaggaaactacaacccactgattacacacactaaaacgaacacagaagtttcaaaatatctaacaataaattacaaacacatacagaacctaaaacacaaacgaacactgtaacgaaagtaataacaatcaaattaaaaagccaaacccacaaaagaacaaaataaaat

SEQ ID NO: 281007 - DNA, 1066 bp, Cannabis indica
aatacaaaatctccgccggactgggagagccccatccccgggcggagtaaaaaataaacaagcctgaaagcaggcggtaagcttggggaatcagttggtatggcgcaaggccgacaaatactaaaaaattaataaaatagtcttgaagaggaagcatggccccggccatcaggtgcgtctggctccaagccccgaagccgccatagttatggttgggcgtctccgcatctcggggcggccggtgatacgtcccggatgtcgagggtttaattccagccacctccacgatgttctccagctggtgggggcaggttagggtggaatgaagctcagccgcctcccatcctgtggcccgaggtttatacccctcctgggcaacgggacccagcgtgacgtcttcaagggtagccagacgcttaccactcttcttggacgattttgagccggacgcagacatgttttgattctgaaaaaagagttaagattccagcaattaggccccataccaaaccctaaatcaaaaaagggaatgggggtcccctaaccgctggaaagaggccccctccggacatctgtcaaccagaaaaccttagaaggatttcctggacaaaagtcgggtgcaaagaactcacagaaggcgacattgcgcgtaaaagaaaaagaaagggcagaaaatcgagaaaaacgaagtcttctctatgcccttgaaggccagtacacgaagagtgtatggtcctttgcaaaaaataacaacaagtacgtgacaagagtaaccctaacaccagagaaggtgaatctagacctgttacgtgaaaaactcaaaagaatacattcccagaaacttcaaataccaaacccagaaaaacaaacagataagtaaagcatgccataaacacgaacagtaaagcaagggatgcgagaaacttacagtgaagtgttgaaactgggggttctgttgtcgatcaaacaaaggaaatgtaggctgacagtggtgaatgaaggatagcagggaaatttgtagagtgttcgaaggttttttcttggtctggggattttgctctgagaa

SEQ ID NO: 281008 - DNA, 646 bp, Cannabis indica
ttttagttcttgaattgtaagaaaatggagttttgcatgaaatgttgttttacttgctgttcttattgctgttgttagattatgttttctgtagctatattatggtaatatagggtggtttgagcaggttttgatagctagtttattggatgagcaagctttgagtttttgaactcaagcttggctcatcaatggcatttcttctttttgagtttgggtattggttttgttgcttgtaattgatctttaggatgcttagaacaggtatggaaggtttcatgtggattggggttgttttggttgagttatagaatttctggtcattcctgcactgaaccgaaattccggttcagaggggcctgtaggaaccggaattccggttggctcccaggaatttttttccagaaccggaatttcggttggggcaattttgggaaccctagtttttgccatttttgtgttatgtagggtattgccatgttatttatcgatagggaaacttttagtttcaagtttaagtccccggaaagtgatttagcgtatcactcacctatgttacgattgatgtgatttaggagcctgtaagtcgccgagtagctgttccactcaggttaaccggcacacctgaattcggaatcgaggtaag

SEQ ID NO: 281009 - DNA, 555 bp, Cannabis indica
ttttgaccttgatactgatattttaatctttgttggtgtagggtaaaagagtaaaatcctacagtggtatcagagcctggtttggctaaggaagatcaacaaagattcaagggaaaatatcaggaaggaattggcaagaaaatcttgaaagaaagattgacaaaaagaacaacactcaaacagcaagaagatcaagattctgattcaaattcaaaattcagaaatacaaactgagaaattctaaaactctatctgtttctttttcaattttattaatatgagtaacataaaagttgatattgataaatttgatggtacaggggattacagaatttggagaaggaaaattaggtctctcctagctcaacagaaattactaagggtgctagatgaacctattgaatggccagaaggaacttctaaaatacaacaagaagaatacctagaaactgctactggaattctaatcttcaacctatcagatgcaatcataagattggtagataaagaagagactccatcaaagatctggaaaaagctagaagagcaatttca

SEQ ID NO: 281010 - DNA, 572 bp, Cannabis indica
attaaatgaataaaaattaatttttccatcttcttctagccatattatctttacacattaacattaaacttttttttaaaagagattaacaataaacttttttaaaaaggagattaacaataaactgttttttaaagaagattaacaataaactttgattctcgattcaaatgctatttttcaattctattttcatatattcaaaattctcattccataaattttctactaatatttttcaatcaatgaaacgaaaaggtaaattttaatccccgtatgaaaaattaaactttcaatcccaataattaacagaaacaacatcaaattttaagttctcaaaatctttgaaaataaataaataaataaaaatagatctcataaatacaaactcaaacattagaaccctggtaaaacactaaaactcaaacattaaaaatacacacaataaaatttgaacccagaacttaacacacacatcagaataaaaattaatccataaatgagaatttatgttgctattttttggaaatttcggtatttattagcaacaaatttaatattttaagtattta

SEQ ID NO: 281011 - DNA, 709 bp, Cannabis indica
catacatccaactgcgccctcagctcgcggtgctttctctaccatctcagcataggtggtcttgttgtctgtggtgatcataaggtcatgcttgatcttcacattaagtccatcaagatatgtttccttcttactaaaatcggttggcacaattcccgaggccaacctcgccaaccgatcaaactgagttgtgtactcggtcacactcataaaattcaataaccccataatcattgttagccactgctcggcttccatgacgtccggacctcccagaaaaatcagaggtgcctgctcgcggaacctttcatacagaggttccattctattcgccgctactactggttcggcttggacagcaggggcaggtgccactggaagttctggcacaggcactgcaggagcaccctactgtctcaatctttgaatttcattatcttgctcctctattctagcttgcatttcagcaaacctaatttcccaattctgggcttcctgattggcttgggcagactgggcagcctgtggcgggttatcaacatctcgaccacgagccctgcccgtgggacctctacaacggcccctaatatttgggggaaattgagctccttcaccctgatttgacctgactgagttgccctgactccttgtgttccacttggcgtccatctagtctgaacaacctcgaaaccaagagttggcacatcag

SEQ ID NO: 281012 - DNA, 380 bp, Cannabis indica
aacaaatcttaaacataagcaaataacaataaaaaagatgagatataaaacgttaacaagtttttgaatttaagtatgagtgcatatcaaattttactatttttagacgtatgtaagtaaaaaatttttgtaggttattatagggtaaatattattttggaccttgtattttgtaaaagttaccaattagaccctctattttgttaaatgaaaaaataaaccattgtatttcctaaaatggtactaaataggatcctgaattgtattatttgtcaaaattaaaatttaattataatctgatctaaaattgctatgagtactgtgtacattttctgtatctgttcgtattaggaattgtcttcaagttagttatattaaaa

SEQ ID NO: 281013 - DNA, 655 bp, Cannabis indica
gtgcttaaagcgaaatacctacggggtagacaattctttgattgtgatgttaagagttctgactcttggttttggaagaatgtggtgcgtacaaaagagatactaaaggaaggggcgtgcagactaatagctaatgggagtgatacaagcatttagaatgacccatgggttatacatgacagggatttttaccctaagcccaagcacaactaccagggaacacctgaatttgtgtcggatctgcttttacctgacgggaattgggacatccagaagctcaatgatctctttcacagggatacagttaatagtatcctgaggggcggtaaaccgagtggtcagggtagggatagatggatctggactaagaactctaatggtcgattctctaccaaatcggactatcttatccaagctatgaaacgggctccgttgtgtaatgtagctccgaatttgtggaacaagctgtggagttcaaaagttctggagcgtcacaaagtcctttggtggagtatcctctcgaatacgctacctgttagggctatcctttctaagagaatggttattgatgaaatcacctgcccttttgtggtaatggtgatgaaactatggagcattttttctctattgcgatctggcgtcccacctttggaga

SEQ ID NO: 281014 - DNA, 505 bp, Cannabis indica
catgtggtttatcgatagggaaacttttagtttcaagtttaagtcccggaaagtgatttagcgagtcactcatctgtgttacaattattgtgattagggcatccatctagcacgagatttccgttcaggtcggccagcacacttgaattcggaaaacaggtaagaactgtgtataatgtatgatgtgattatctgaatgtatgtatgtgttaatatgtatacatgcttatttgttgtgattcatacactaccaacacttgtatggttgcggtacaaagtgcattggtaaggtgtatgatgtttggaagtacgtcatggtgttaccagcacttgtacgggaaggtacaaggtgtctgtggtacaacactagatagtactcaaggtgcggtcataccctacctacactagtacgaaggtatactgagtgcatgtggtacatggtacatggtcgtatcctagttagaacgttcatactcatctgttaagctctgtaaataggtgtatg

SEQ ID NO: 281015 - DNA, 624 bp, Cannabis indica
gcaaaagtgcggattggatcgattattttggattgattactttttaatattaaattatttaatatttatgaaaaaaaaaattcgcataactagcaacaaaataaaacaaattattattattttgtgtctccaacaacaaattaaaataaataaaataacaaattcaaaagaagcaaaaaaaaattgtatgtataaagaaatatttttaaaatttgtatgtagaaaaaaaattatataaaaatagaatatacatttgatctattaagttttaaaatataattattattatttttctttgtattaaaatattatttgtatatataaatttttaattttttataaatatttatggattagattagatcgattacttttacagcatatattttatttaaaacgataaacatgtaggtagctatagggttacaataagagtagccaacaaggtctgtagttggtgttgcactaattaaatttggtatgggaacaccaaaaaagaaaatgtattgtgcgaagaacgaactcatatatgaatttatacttatagggaaatttacacagtttactgtgttttcccattttctttcttttatattgttacactcccaaaataacttttgtact

SEQ ID NO: 281016 - DNA, 503 bp, Cannabis indica
ataaaaaatctcgcaattgacctttgcgcaagagtccagccacttcatatcttaatgctatgcattctggagtggtatgtccgtggtcattatgaaattcacaccactttgtcgtgtcgcgcattgctgctggttttttaatcttttcaggccacttgacttggtttcccattcctttcattactgcaactatttcgacagggctaatgttcaggttgtattcaggaatcggtcccttgtctgattccctcatccgccgaggtagtgttgtctttgcaatgtaatctcttggtctgtgtgattgggtggagttctcgctatctctgtatgaccgtgatctgttggttggataaggttctgaataatggtaggactgtcgtcgctctaccctcttcggtactctactgtcgcgagagtaagagtaggatgttgtcgattgtctattggattcgtcttcctcccacttgatctgcgcccaagctttggcaagcacgtcctccatt

SEQ ID NO: 281017 - DNA, 843 bp, Cannabis indica
ctagtatggggaccatgggcctatataaccgagctttcaataagcaaatctagaatttaccaagtaaactctctaatttattaattcctccttggaccactatagatttggaattacactctcaattatatagaacgctctatatgttccacgatatagatacgctatgagattatccatttgtaattatcccattaatcaatgatcctctatagatgatttacattgagtggggattaatttaccgttgcacccttcaatgtattttatgcttaaaatacttcgctacctataaatgatattccaatgaactaatataatcactgaaatgagtactcaaccatttatctctgttaagccaagctcgaagaaaatcatcgtttgacttctatatccagatagaaggtctagattttatatctatgatatagcgctcccactcaattgaactaccatgtccttaacctatatgtcacgagaagaaccatttggtcgactttaacgaacagatttaagaacacaaataatgcaactgaactagaacctaaccatctcaggattgagatcacttgatctaggctcaactaggtgatattaaattgaatagatattacagtaagtttatcaaatctagttcaagtttaatatcagtcccgtccaatgcatcaataataatagaaatagtttatcaaatctaggtgatattagaattaacaattattaataaacatagaaatagtttctagtatttatttattataactctatgaagagttgtaaatataatagaatttgcatcaataataaaaacacttacacatacaaacatacaaatataatgtg

SEQ ID NO: 281018 - DNA, 800 bp, Cannabis indica
tgtatataaataccaattacttagataaataacaaaacatctcaacctagtcttaaatttatttcatagactagaattatattgtaacattatattgacagttcccaagcagtgaacacaatttttaatatttactctatctaaaactcaattaaatcattatttagtcacaaataattataataaatacctacagcaactaataaattataaaaacccttttaattcgtaccataggtagtaaatagcattacaaaaatatattttactgttttagcatcacttaactatttttcataattattttaagtattaactaaataaattcatgaaaaatacaaaaatgattgaaaacccaatctaaccattctaacacagtttatactctatactaagccctaaataattaacttttaattttctgaataatctaggtatttttcataattaactttagaaataacacaaataattcatgaaaaatacaaaatcgaccgaaaacctaatctatcaattttgtaacagtttataatccataaccaatcatagaaaataaacttagatttttctgagcaacctaagtatttttcataattaatttaataaataacacaaataattcatgaaaaatacaaaattaaccgaaattcgaatctaccaattttgcaatagtttatatctcataactaatcatataaaatatatttagatttttctgagtaatctaagtatttttcttaattaatttaacaaataaaccaaataattcataataaatcaaataattgcaagaaaattat

SEQ ID NO: 281019 - DNA, 556 bp, Cannabis indica
tcctaaatctttgtctattgatactcaacaatggggtgtacatatcgaatcgtgttctaaccaaagttgtttctcaaacatattttgagttgtgataaggttgaaaaccgacttgatgacatgtacacattttataaatacccatatatagttagagtacaattgtcaaagaaaagatctgggccctaaaccataaatgagcatatttcatttgaaaagctataaggtttaagggttacatattttattatccatctcacaacactagaattgtggaattaagaattgacttgatcagtgggagtgatcaatctaggaacctagtttccgagaaagatcattcatattttctcaaacttccacctcaagtgttagattaattatgattcacaacaacccttaagattaatggttattgagaattcataactaatcattaataatatacaagtcattggtaaaattctaataagttatgttatttagtaattgcttacaatttctaaaataacatgcatattgaaccatttgctcttttaagagtttgttggtccat

SEQ ID NO: 281020 - DNA, 655 bp, Cannabis indica
aagttaaaaattttagttattttagaacaacttaaattagatattttttaaaatatttatttcattatattttacaattttttgaaatttaatatattattttataatgattttccaaaattatatattgaaaattaaattaaagttgaaaattaatttttaattaattttggaccaactttaaattaattaattttcattattaaaatatatggattaaaataaatgattaattaaaaatacattattttaaataatgagctttaatcaaaaagatattcgatctccattgttggtcttacaaaagttaaatgttttcaatataacctcgagacgctagacttcgtccccctatggatggttattcgttgaacgcatttaacaccgtaagatttcatttgataagtgttttgtctctattagactctccctacggtaactacttagagataaatttaacaaaacatgaaaacaatggtggaaagctcaataaaaatgaagaataaaccttgactcttgcctaccaggacaacgttggattctcattttgatcgaataaaaggttgctaaaaatggtatccattttagatgagttgactactctattcaactaatgttatcttttgcttctcgcctaccgggacactgtattttt

SEQ ID NO: 281021 - DNA, 689 bp, Cannabis indica
ttggttacaataagtgcaattaagttcaaattactagatgatttgacaaagaaattcctaagaaatttttgtttcacactagtgttatatcctataccactttttgaaaaagcacatttttgactcccaagcatcatttcaaaattctcttttccttttgtaaaattgtaaaccaccttgtttaaatcatcaattttagctttcaagtttacaacatctttttcaaataaggaacaatttttgcattgggtttcaatcaaaaactcattttcttttactttcaaagcctcaacttcttcaagcaataaacttattttctttctttgagttgagttcttagcaagcaatttttcaaaatcaacaaacaaatcattaaaggattttgataattcatcataagacatatcaagtgcatcatcatcactttcactttcaaaatcacttgtatggttaggattacttaccttatcatcaatggccataaagcaagtgttggctatctcatgttgttcatcttcggaactttctttctcgctttcactccaagtagccaccattgcccttcttctattcctctttctcaagggacaatccgttttcatatgaccgggctttttgcattcatagcaagtaatttgatcatcttttcttgagctctcccttgagttactccctttgtaaaatctatt

SEQ ID NO: 281022 - DNA, 1080 bp, Cannabis indica
gcctcatgtaactctttatcagtcccaatgatatttaaatcatcaaaaatagacaaaataattacatatcctgattttgttttcttaatgaaaacacatggacaaattagatcattattgtatcccttctttaataaatattcacttaaacggttgtaccacatgcgtccagattgttttaagccataaagggatctctgtaactttatcgaacatatctctttaggcttaaaggttagtgcttcaggcatcttaaaaccttcagggaattttcatataaatatcattatcaagcgatccgtataagtaagttgtcactacatccataagatgcatttttaagttttcagaaactgttagactgatcaaatatcgaaatgtgattgcatccattacaggagagtatgtttcttcataatcaattccaggtctttgagaaaaaccttgagcaacaagcctagctttgtatcttacaatttcatttttctcatttcgttttcgaatgaagacccatttgaatcctactggtttcacatcttcaggtgtgagaacaataggtccaaaaacatttcttttgtttaatgactctaactcaacttgcatagcatctttccatttatcccaatcatgtctattttgacattcaaagacagattttggttcttgatcatctatttcattgactatattgcatgccacattataagaaaatgtctcatcaataactttcgaatcatttttatttgatgagtttttagtcctgacataatcaactgaaatctcttgacttacttcacttgctttctcttctagagtgtttccctcatcttgaatttttatatggttattttcatccatattggagtcatcatgcttatctgctccttttctttttcgagaatttttatctttggaaccaattggtctcccacgcttcaggcgtgacttagactcatttgcgactaaatcttcaagtttccttttggtatttcaattctagaaggagcatttgcagccggtatatatgatttagttactcttttagtgtcaacaaatgcatcaggtaattgattagctata

SEQ ID NO: 281023 - DNA, 531 bp, Cannabis indica
agttatatatatgaatcccattaatcaaaaaattcttttttaaagttattaaggtgtgtcatatattgaatttgttatagtgagatttctctcacctagaaactcgagaccagactcctatttaagggacacgtgtattcagatttccaatgaaagctgaaatgtccgtgagagacttctcgaagtttcaacctcgcccaggataaagccagcgagtatgacctaagtcggatcgcataaccgtaattcgcattatgcagggtagaccaactcgcatgtgccaggacatatgcgaatatcccctctatacttatgcgaaagcatagagaccaactctctatgatgcgatttggtcccaacgacccaatagccctgacaagccgatatagattcgcatgtctaggttctaccagctcgacatgcgatgtctacaagaggcaattacctaagggtacagacgttccaaacgtactggtgaccctgcgagctcaacaacggaacatgaacagtcaactcgcagatgtggaagac

SEQ ID NO: 281024 - DNA, 783 bp, Cannabis indica
actcctctttattaattattatagatttcaataattatttttgtatgagatatgtgtttatatttatattttacatttgaaatgaattaaatatattaaagttttaaaaaagtgaaattttgatgatatatttttaaaaaaactgatgtatagtataatataaaataaaataaataaaaaaaaaaggtagaattttaggaaatcatatttgtaaagaatacatcaaaaagttgttgagagtgcttttaaaaataataagaaatcaaaagatagatgtatggtaagaaatataagattttgtttaaaaaatttatggataatatgtggagtagctaatactattatatatgtattaagtttcgtttaagggattaatggtaaatatggtactttttttaagggtgagactttctaacacttatactagttaggtatcaaaaaattcaaattgtgactgcaaactactaacgttttgtaggttattcatttaggctacctccaaatggtttagacgtaaaaaagttataaagtatctaaataaaagtttaaactttgaccacaaactaactagaatagcttattaccatgatttaaaatggctcaactaaaatcaagtataaatacttgttcggccttttttttggggctttacattaatttttaattggtttttatttaactttgagtttgattggatagttctctgttgtgttagctcatattcttggtgatcatagttgatggacttagcatctgtgtgtgtaaagtctaggtgaagcgaga

SEQ ID NO: 281025 - DNA, 511 bp, Cannabis indica
aagtacttgaccacattcttcattatcaattctgctgccacatctgctggacacgcatgaggcgcaggaatgaatatgccatattttgaaaatcgatccaccaccaccaggatagaccgaaaccctttcacttctggaaatcccacaatgaaatccatacttatggactgccatggtttctctgggattggcagaggttgaagcaacccagcttcttgccttctttctgtcttgtcttgctgacacacaaggcatgtcctcacatacacttctatgtcttgctccatcttcggccaataataagactttgacagcaaagctagcatcctagccacacccgggtgaccagcccacttaggatcgtgggtttctttaagtaattcccttctcaaagttccactgttcggtacaaacaacctgccacccttggcatagagaagaccatcttcttcccagtaccgcaccaattctccctttcttgcttcctcaagaagcttcttgtaaccaggat

SEQ ID NO: 281026 - DNA, 419 bp, Cannabis indica
gtggcaatgggaagatatagctatagacttcgtggtaggtatgcctagaaccacgagacagtttgactctgtgtgggtcatagtggacaggtttacaaagtcagctcactttttacctgttcaaacgaatttctccattgaccagtgtgctgagttatatgtcagagaaattgttcgtcttcatgttgtcccaaagtccattggttcggataggggtccgaagtttacgtcaagattcttggagagtctgcatcgagctatgggtactcaattaaagttcagcacagctttgcatcctcagacggatggacaatccgagaggaccattcaggttttagaagacatgctacgagcatgtgtgcttgactttgaaggatcatgggtaaaagtaccttccccctgatcgagttttcttataa

SEQ ID NO: 281027 - DNA, 808 bp, Cannabis indica
tttttttttatgttgttttgtttttatgttcttctttatttattttttttttgttgttttagtagtgttttcttatgtttttttataggattgaaaatccaagtacacccgatcggaatactaccattccagagttataaactctggttattactctgttattgaagatattaaaaaacttcttactgaaacccaattaaatatgttttcaaaaactgtattggaagttgtttttgattgcgtagtagctgtaaactttcttcagtgtttccttgtctttgtatgcctgacctttttcaacttctggttggtgtttgtctgttattagcttcgcgttgttgatgtcgatttctggatctagttttttactgttgttttcaagtttttctaccatttttttagcaaccagcttcgcatagtcaactatgtcgaatttgtcgttttcaaattctcttgtttttgactctcctccttcttctaattggtgttccaatgtgtatgattctgttgttgctgtgttattttcaagtattgttgtgttgttttcgagcattgtcacattctcttgaaataattatgttctttttcccattgtccattgctctttatgagaactggtatagattccatgtcctgtcatttttcacaatatttcatttacgtggcatttttttcatattaaaacaacagtaaaataacactacaaaacagtaatttgttgttgatttagtaattttttctctttgccagattttatggttttttcctggtgtttctatgattccggtgttgatttgtccgtccccaa

SEQ ID NO: 281028 - DNA, 489 bp, Cannabis indica
cgataggttatcgatagtttatcgatggcatttatcgataggttatcgatagtatatcgatgacatttatcgataagttgtcgataggttatcgatgatttctgtttgcacacaaaaaagcagtgcgcagacaaaaccatcgataaagtatcgataacccatcgataatcccattttggccagaaaatcataccctccaccaccatctaatgtctcaaacaaatacgaattcaatgagcttctagttgggggagggttaagtgggtggtggcgaatggcgatgtggttgagagaagccgaggaggaggaagagagaaagatttgggtaggtgagatttgggggttattggattaagttttgggtagatgaggaggttcggtggtggaggagaagaggctcagtggtggtggttggtggtctcggtgcctgagtttgagtgtctcagtggtgcgagaaagaggaagagagagtgaggaagagaaagagac

SEQ ID NO: 281029 - DNA, 563 bp, Cannabis indica
gggaaagccaatgtagtggccgatgccctgagcagaaagggtcccgggcaggtagctagcatgattcaaatctcacctcagatagcagaggacatgatcagggctaacattgagtttgttgtaggcaagcttcacaacttgacgttgcaatctgatctgctagaacgaattaaagctgctcagtttactgatcccgagttagttaaagtcagagaggaagtttcggctggccaagccaaagactttacagtctcagatagtggaatgttgttatttaagactagagtctgtattcctaatagtatggaactcagaaatgaaattctcgaagaggctcataccactccctattctctgcatcccggcaccaccaagatgtatcaagatttgaaaccctacttctggtggagcggaatgaagaagaatgtggtagaattcgtatcgagatgcctaacttgccagcagattaaggctgaacatcaaagaccagcagggttgttacagcctttaaccctacctgagtggaagtgggaagatatcgcaatggactttgtggttggatt

SEQ ID NO: 281030 - DNA, 484 bp, Cannabis indica
attattattagggtaaataccattttggaccccatgttttgcaaaagttacagattggaccctgtattttgttaaatgacaaaatggaccctgtattttctaaaatagtaaaaataggaccctgagcttaatttttgacaacttttttttttaatacaaccaacttgaagacaatgcttaatacgaacagatacaaaaaatgtaaacagttttgtcatagcacttttagatcggattataattaaactttattttgacaaaaaatcaattcagggtcctatttgtactattttaaaaaatacagggtccattttgtcatttaacaaaacacagggtccaattggtaacttttgtaaaacagagggtccaaaatggtatttacccccctaataataataatataagaaacatttcagaatcacattaagcattgtttgtctaattaaagcacttttttgaaaacagacagaaatacaattaatat

SEQ ID NO: 281031 - DNA, 513 bp, Cannabis indica
tcatatttagggtgttaatcaaaatacttgtgagtagatctaagatcctggtaaaataattttcaacacttgtagtgtccgggcatgccacactgaaagcacccttgtcctttgcactcacccagatggtgccttttacaaacggagtactctgggtaggaataacgggtctcagcactaccctgacgaccgcctcgactctggttcccctggaagctcttgttctgccccgagccaccggttgcagtggatgtttttcttttctggtccatggccgaaccactacctccccttctaaagcctgatgcaggaggggtaggagccccgccactcactagagtcctagctgactcagtcatacaccgaactgcgccctcagctcgcagtgctttttccaccatctcagcataggtggtcttgtcgtctgtagtgatcatcaggtcatgtttaatcttcacattaagtccatccaaatacttttcctttttactgaaattggttggcacgattccc

SEQ ID NO: 281032 - DNA, 339 bp, Cannabis indica
gttttgtgtttttgtttttaaaattatgttctcaaaacaaaaaataaaaacagttttttgtagtttttaaaaagtggagttgtttggctaatgtttttaaaaacagttttccaaaaacaaaaaacaaaaaacatgtttggatgatgtaaaataatttgttttttgaaaacaattttttaattttaattttattagtttttttttcttatttttttttattatagcatcctaaaatattttttattattcaattttatataattaaaaaataaacatctccttccaaaaaaaaataaacaatctatatagtttaaatttttttaaaaaaaaactaaatag

SEQ ID NO: 281033 - DNA, 515 bp, Cannabis indica
cattttctaatcagtctagaaaattttttacacgttaccttagataaaaattggtgacagatatcttcttctcagcaccggaggtaaggttcattcggcattcttttatcttgttctctctataataagattagagttaagttctctttagtctttttgtcatttttttcatcaatgaaatcgtgtaggtttgttctgttataatcaatgtcattttgtccgaaaatttcttgttttgtaaagttgaattgttataatgggatatattataatctttttgttattggtttgttctatatttgcgccatttttatggctttggcgccttacaagtctatattgcctattatatggctggcccctaattatttagggtagtttgtttaaaattttcactgcttcttgtattgaaaatataataaaatgttagcacaataaaattgcaaaataaacaagttatgcactagacaaattttactagtttgaatataagggttatttaagttaaggtatga

SEQ ID NO: 281034 - DNA, 653 bp, Cannabis indica
tgaattctctaaaataatggaattaaacacatataaagtttagggaaccttacattaatgccagaggaataatatgtctccttccactcagatctctaacccttgttcctttctgtcgcagtgtattatcaaaatttgagcccgattctccttcaagtgttggctttttcacagtcttacacactatgattgagtgcttgacttgctatgggtgggcatgtactctttcactataagactcgaaaataatgaagaataaaagagaaggagattcgaattctatagaaggaggctctcaagtttctagttgtctgacaaagaataaaaactaggttaacttaggttggatagaatgagaaccatcttattccttatataggatttctgctagggttaaatttaaattatatgggattaaaaaaatataaaaaattggctaaaaattctcttaagtggccgaccatataatgtgggtcccactagttagaattttgccattttattcaacaatttatcttttctttcactaataccatatttttcaattttaattctttaaatatcaaaactatttatttaataattaaaattaattatcaaagaaaattttcatttaatttttttatcaattagacttaataaagtctcttaat

SEQ ID NO: 281035 - DNA, 537 bp, Cannabis indica
aggtgggcgaactctttcctcttggcgcttctgaccgcctcgttataatatttagcgctgaagagttcctaaaacctttcccaggtcatagtgatgacgtcatggatctgagacaccatgtcccaccagaccagagcgtctacttgaaactggaaagtggcacacaccactctgtcattaccggtgacacccatgaagttcaggatcttggtaatcaccgtcagccactgctcggctttcatcacgtccggacctcccaggaaaaccggaggtgcttgcttccggaaccgctcgtacaagggttccaatctattggccgccaccactatctcggcctgggcagcaggggcaggtgccactggaactacgggcactggaactgcgggagcaccctgctgtctcaacctctgaatctcgaggtcttgctcttcaatccgggcttgcatttcagcaaacctaacttcccaattctgggcttcctgattgacttgggcagcctgcggcgagttaacatcactccaaccgcgaaccctgccc

SEQ ID NO: 281036 - DNA, 557 bp, Cannabis indica
cagattgggcgtttttctgatgagtacttcatggtggatggcacgggcatcactcgcactcggttccagtagcttttgacatatcaccgccctcccctcactcttgctcttagggatagagctcaaaaacttgcctggatttcgggggaaaactgaaatattatccatttgaccaccgaagataactttgtaaggtacgggctctatcccaaggactttactcctaagtccgtgatggggaagaagaggaaatctggtgctggccggatcgaacgagctcatcaggagaatgaactcattcaacttaagtgtgaagctaagttaaagggaggtgtaagggccaagtagtatgctcaggagcccttgaatccttaagatgaggctgaggaagagaaagtgactccactgaaaaggaagaagaaactcccagccccccccaggcctgttgaacatgcgattcacataagggagcctatttcacatgttcggccatcccctcccgtgttcggaaaagggaaagctgttgataactctaagatttagagttattttcatat

SEQ ID NO: 281037 - DNA, 500 bp, Cannabis indica
taatttgtactcatttaattgttataaaataatgtagaaagaggatctcgatgttcaagatcccccatgccaccttctttggatcaaatctcgaaccaagagaacaaaacttgtcattgattatgacaaggacattgctgagaggatagtaagtatatattaatccttaattgacttctactaatgagttaatatatatataattcatatagtaagtacttgaatatatgcgtgcattaggctcaattagatgagcagcttactcagggaaaaattcaagtccagcggcaaaatgatatcctgacacaggcactcgggacactagagcatcttggacatgtcagggctactgagtaagctagtacttgaaatgttgtttctttagttataaaaaagatcgtagctaattcgtagtttatggtatgtaggttcctgaccagggcatctaaactgtttggtaggaagaaaagggaagtatctaatgttgtggctcggcaaca

SEQ ID NO: 281038 - DNA, 546 bp, Cannabis indica
aaaaaaaatcgtcgaaaacggacatcggacgaggccccacgcgccccacgcgccacctgccgcgagtgggcgttgctgctggcgtccatcttcttcctccagccgggtctgaaagcgggtcacgcgacccggttcctccgattcgggtctgcaacagttttccggccaaaaattcgtcgaaaggtggggattttggatgggttttgctcgggattgaatttctaattgatctacgctactaatttcgggtattaaaggttaaatctctagatttcatgacaaaagcaatccgaaaattgaagaacacaaaagaaaaaaaaattgtaatgctaaccttagttaaatccgaaattaattatgtaggaacattgataaacaattaattatgagaaatcgattatcaattttagatcaaaaacaataaaatcaaaatacacaaatataatttcacattataatcatataaaccctaaaactttaaaattaaaattctcttaatatagactatgaattcaaacacataatatatcaattgaaagagaattt

SEQ ID NO: 281039 - DNA, 1477 bp, Cannabis indica
ccggacggcctcgtccctgctattattttagtttttttttttttttttttttccaaaagtttggggttattataatgatattgcaacaactcgtttgttggtgttaatagatactataatacatataatttcaaaacttgaccaaactgaccccagtgatgaccactataaaattgggctccatggtaattttgtagagataaagacaccacccaaaaaaaattgtcctataagacctattccattattttattttattttattttaaaaaaaatgtaacttaagtttttcaataccatgtcttataatattatgcagtgaccataaacagaaagtaaaacgcttccataattctaatatttatttattttatatttttctttaaaaaaaaataaaaaatcttccataaggcttatccattatcactaccgagcaaaagatcaacatttaacaatcaaacaatttttatttctctctctttttttttttttatagaaaacatttttttatttctcatcactaaaaatagacccagttagatttttattttggaataattacataaaaataatttttatatttttttatatgcaaaagcctaatttttttttattatttttacgattgttctataaaaataacaataaaattaaataaaataaaaaaaaaaataacaatttaacaacaaaataacaagaatacaatataaaaaatataactaaaagactatatttttatattaaataaaaatcttaaaaaaaccaaatattaaaaactcggtacaaaacatattttttgaattttttttttttataattataaaatcccccatgcaaatcacatccacattcacattcaatacaccacggtagtacggtatgcttctttgtcttgtcacctttttttcctaagaacaacgccatatctcatactagaatggccagtgatgcaccgatgcagcacatatgacattattactcaatttggacattttgctctcctactaacccaacaaattggcacaataaccaataatttcgtttataaaataataatggccagtctagtctggactctcctgcaccaaacaatccagccgtaatccaccgctactaatgttaaatgctaaacattataaattaattaactaattcgatcacacaaactagtggggcttcaactattagactgctaatattttaaaggcttgaaccacaaagaatcaaaatcaaggttcaattcatacacggacagctcattgaactctgtctacactcttagaatctcatcatacttagtattactcttgacccaaccaaaccatccttttaaaaggtctcatttctatttttctttcctaccataaactcaaaagtctgcaactaaaaataaaaattgaaattaaaaattcatttattgtcaaagaaaaataataataataataattacgaattaattttggcatttcgaacatgct

SEQ ID NO: 281040 - DNA, 504 bp, Cannabis indica
acaaaagttgaatatgaaaaaaatttcaaaaatgggggaaaatctagaatagcacaaacgaaatacacaaaaacgagaaaaatgcaaaatacaacaaaatctagaaaaaggagaaaactaaaaagaaacggtaaacaaacctcagttcgaagaccaccaccaatattatcgttttttccagcaacatcttgagccattttttcttgggcacccaccttcgatttcttcttaggaggagctcgaccacgcttagataatggaggagcaaaatcagagtcatcctcctccataacaggtcgtttacccttgttcttattagctaaggatttcaaacccattttagagcttttcttttgaacgggggaaggagatgatgaagaacaggtaatagccatatatatacggattgagaaagaaatagaaagagggaaaacgattatgggattcggttactgggattttcaaaaaaaaaaaattgaagaacacaaagaggagggaaaatgg

SEQ ID NO: 281041 - DNA, 588 bp, Cannabis indica
aaattttgttttttaattaaaacttataatatttcatacaaaatactcgggatcccgattacaaaatactttacaaaagttaattaattcttttcaaaatatttgttgcccagggactaactacaaaagcgttgctatcccgaggatcgtacgctccaggcctaactgcgccgacatgaacaatcttcatcggctcgtctcacggttcctcagccttggcgttgcccttacctacacataaacatagcactgtgagtcgatagactcagtaagaaaagcataaacatacataaatcccgggttatggtcagacgcccatacccctgaccataaccctaattctcgtgtcccacacggtactgagtctcgaacgttcgtatgacagtacttttgacagagtaacagcctatactcggtacagtggtcatactcaagctgcaagtgatactctagccttactgatgtgttacaatatcagcctatactcggtacactagtcatactctagcttctagtcatactctagccttaccgatgtgatacagtctgttatctctcaaaaaatccaaaataatggtgcatgaattt

SEQ ID NO: 281042 - DNA, 580 bp, Cannabis indica
ttgtctttctatcacattttattgatttcaccaaggagaaaattgtcattacaattatcacattattatgacacttttataatagtaagatatatatatataaaaatagttacacaaaaattcaatatatgaatgaaaattttaggaaaagacaaaaaaaaaaaacatgagaagagtaaggaaaaaggcatgtctattaacacttgtatataaatagtaagatatataatcaaattttaaacgaaagataaagtttggttataataatttttaataaaaattttattattaggagttatcttattatttcttagctactaaaaaatatctatttttagggtattttgaaaacttcgaatatcctaaaatacctcaatatttctaaaatcaacttattccaataatcttgtcaatatttctaactaaaactgttgtgacattttcggcctccaatcaggtttccagggtcgccgaacctgaaaaatatttttatttcacaaataactcatattatattcacgtatttcaaataaatctccgtaattaacaaattacgcttagttatatccactaatcaggt

SEQ ID NO: 281043 - DNA, 693 bp, Cannabis indica
ttctactagcatagtagattgtgtgaaacactctgtcaactctttgacccaagaccgctccaatggcatagtcacttgcgtcgcacatcaactcaaacggcaactcccaatttggtgaagttactatcggtgctgaaatcaatctctcctttagaaccttgaaagcctttaagcaatcttctccaaactcaaatggaacaccattgacaagtaagctggacaaaggttttgagatcttggagaagtccttgataaatctgcggtagaagccagcatgtcctaggaaactcctcactccttttacagaaactggaggtggcaaattctctattgttgaaactttagccttatccacctcaattcctgcctttgaaattttgtgcccaagaacaattccttctgttaccataaagtggcacttctcccagtttagcaccaagttagacttctcgcacctagttagcactttttccaaattttccaaacaatgatcgaaggaggaaccaaaaaccgagaaatcatccataaagatttcaatacaagattcaatcaagtctgaaaagatagccatcatacacctttgaaaagtagcaggggcgttacacaaaccgaatggcattcttctgaaagcaaaggtaccgtagggacatgtgaaagtagtcttctcctgatcttcaggtgctatagctatct

SEQ ID NO: 281044 - DNA, 409 bp, Cannabis indica
tattagcaaacggcaccatagtatgcaatatgcttattttaatgctatagaaaaaaataaccaatcaatgcaaaatgttgtttaatttttggtgtaacaatgtgttataattatgcctgtattaatattttaattttactggttaaataatactttagataacaatgtacacattataattttatatacaattatattttacttaccaaatacaatgatatacaatttactttaataaaacacatcgttcatataattatacatttagttatcaacatctaaaaaacaaaaaaatacaaaagttttacataaaactaatatttacgtgcctcggcacgtaacttctaactagtaatatttaaatagtgtttctctacatgtaactaaacacaagaaactaatttttttt

SEQ ID NO: 281045 - DNA, 567 bp, Cannabis indica
tatgccacgctttctcacaatctgcggcggtgtttacaccaggcacttgttctgagcagctaagatcgaatttgacatagcttatctcaatcaaaccgaatctttctcattagaaatcgattatctgaaacccgaagttcgatctggaatagtgtgaaaacttgaaagaccgaaacgatatgatcacatgagaaatgtagcaatagtataactgtttggtagccgagaaaacgcaagatgggaaaagaaatggagagtttgaactttttttttttttttttgtcagagtgaagagtttgatttacctgagagagaagcgggaaatgatttttcacgaaatttggatcagagtagttcccgcttttttgcttcgcattctcgaaattacggcaaattaatgggcttacgttttgggcctttatttgggctcgatttcaaacattttgggtttactagtaaaactacaccctaaccaatcgtgaaaattacaatgaaatatgggattttgtaaaaaagttataaaaatatagtatttataggtttgccactcttttgtggcattttttc

SEQ ID NO: 281046 - DNA, 1100 bp, Cannabis indica
atattgcatttcgaaaaattaaagtatttaagaatacaattttcgaaaaatgcatattaaaataaaaaataaatcctggaaaaattattctaatttaatgttggcccaaaattaattaataaaattaatttacaacaaaaaatataattttcctatttaattaaatatataagaaaaatttcaaatatttaagtatgatgatgaaaatcaacttaaatattaattttctatttaattaaatacactagaaaaatacttcaagcaaaaatatcatctatctagattttcctttgactaattaattcaatttctaataatatactttaattcaatttattttaaattaatcaataaatgaaaaaatcattgatttaagttgatccaagaattaattaaaataaataattaatttacaacttaatctatttttcaagataaaattcgaaattctagcatttaagaaatgcaatttcgaaaattgattaataaaataaagaaaaaatatattttgaaaattatttaaaatttagttgaaaaaataaaatttcaactaaaaaaataaatttttctaattttaaataaaaaattctaaaaaataataaatatttaagtatcaagaatgaaaatcaacttaaatatttaattttaaatttaattaaatgtattaaatacaagaattaaataatcaagtataaaataaacttaattattaattctaatttaatactaggaaaaatattcttaatttaagttggtccaaaattaattaataaacaattaattttcaactttaaatattttcctaatttaatattagaaataataactagtactagaaataactatctagaatatatttcattaactaagtgtttttctaaaattaactttaaaatattaaatgaaaaataaatttcatatattttaaaagttaattatgttgctaattcaattttaattaggttagactaatataattaacctaatacaattatttaaataaggcaaatgggccttcacaattggggtagttcatgtgagggggagctgggttcagtatgtcgtacccacttctattggcccccaactctcacacaagg

SEQ ID NO: 281047 - DNA, 779 bp, Cannabis indica
cccaagaagaaagggagtaaacctcataattcttgaaatggtaatgggacgattaaagctaagacacacattgcctctacttccagacctaagacaaagaagaagtggaaaaatagcaagaagtctgttgaagctgtgaaaccagttaaaaagacaaaggttgctactcctggtgatacactaaaaggaaagtgtttctactgcaataaaaaaggccattggaaaccccaatgtcctaaacttcttgcaaagaaataaggtatttcttttcctataaactgatgagttttagtgaattattatccatttagattattaattctagacctactaaccatatttatttgtttttcttcttattacagcccaagctgcttgaactcggatgctatcttagcgagttgaatcagaaagttggacaaaggggtggaattcgtccaagataaagatgaagctcgttttttttatttttgaattaattgttttagtttcaaaatagtttggatttcaattattagtttgggattttattccccttttttttcatattgttgcaaacaattcctttaattttggaagattttataataaagttttttattttggaaataaattacaatttatgaattaagcttcatttactttattttgtgtaaccaataccaattatatttatatgttttaataattgtatgtgtatgtgtttttattattgatacaaattctatagtatcttaaactcttcacagagttaatactacataaacacttagaattac

SEQ ID NO: 281048 - DNA, 583 bp, Cannabis indica
agttgtttttaaatctgtacagttttatatgtcgataattgttgctaatatgtcgttttaatatcgaaaaatgttcaattttaaaatttttacttacatgtcattacaacatcgataacatgtcgtttaatgtcaaaaaaattagtttctgagtgtttggttacatgtcgataaagcatcgcgaatatgtcgttaaatgtcgataaaaaaatcatgttttgactgttcagttgatgtcgataacatatcgcaaatatgtcacttaatatcgataacaaaagacgtttccccattaaatggtaattaatttgtgacatttattatcccgactaaccaactacttcactatgtcgtgaacatgtcgcctggtgtcgcgacatgtcgcgaaaatacccgattcttactcctgaagagatcaagcaggagcctgattgtggggaaattacgcctcaaatgcaaaaagtgcttgacgacatgaaacgttttgaagatgaacgggttatgaacgagtggagattactaaaacttgaaaaaaaatttaacaaaacaggtgtacggccggctccaccaccagggttccccg

SEQ ID NO: 281049 - DNA, 501 bp, Cannabis indica
tttttatacatcttaatttaaattataaagaaaaaaaaatattaaccaccattgaaaatcgaggatgtcataaccctcatattttacaggcagttgaaaattagtatcaaataaaaaaagttgtttagtagttgttgtagagttgtaaacacgttgtatgcttttatttattgtaaaaatatattgctttcgtgttgtttttacgttaaattttagctgttaaaattcaaaaatttcttaaattttaactattacataactattgcaaaaaaatataaacaaacattaactattacaattaaactaatacttgatactaaaactttaataattctttgttataattgttaacatctatataaaaacatgaaaacaagagtatataaactttaaagattctacaaattttaactactgaagttcaacatataaacaacatgaaaacaacgtgtttaaaaaagtaatgaaattaaataacgtgattactgttgggttttatgc

SEQ ID NO: 281050 - DNA, 868 bp, Cannabis indica
attataaaaatactaatttttatatttatttaggtctaatatgtgaatgttcaacccaaagctctctaattattgtattattgaaacttattttttttttcatatttattttcaagccttatggtatttttgacaagtattgcttaagctttgttgtatttgtgatagtttaattattggtaatagttcaaactgcaaaaactgtaaaaatcacaccgcactattttttgcggtgcagttttcgcgattttttagtttcgcggtgcgagtgcagtttgaaaaattaaaaacaccacatgtacgagttagatttgaaaaaattgttaaaaaatcgtacaccacgaacactcatgaccgttgttcagtccaacatcaaaaaaatctacaaacttaccaaaattaattaaaaatacttttaccattttagaaaaatgacttaaaattaagaaagaaaaagaaaatacaatcgatttctacttctccattgccaaattgcttcaacccttatcgtctccaccatccaaatccaagaacaaatctctcacttcaatcctttcccaaaaggaaccaaacccacttcacaaacttttgtgccctcatccacttttgggtacttatgtcgatatttaccctttaattaataataattacttaataaaattatattaaaattttaactttattattaaaaaatttgtgacataaatcttaaaaatattaaatttgttgctaataaataccgaaattcaaaaatagtgacataagttctcatttatggtttaatttttattctgatgcgtgtgtaagttctgggtttcgaattttattgggtgtgtgtttttaatgttttgagtttttagtgttttta

SEQ ID NO: 281051 - DNA, 514 bp, Cannabis indica
ttgaagctttccaattgtgtttgaaattagagttgaaaaagattgtaacattggtaaaattgttaggattaggagtgatcatggaaaagaatttgaaaatactatatatgatgagttttgtaaatctaacggtatttctcatgaattttctgctcctaaaactcctgaacaaaatggagtggttgaaagaaagaatcgtactaacagaaatggctagagtaatgttgaatagcaagaagcttacgaggcgtctttgggccgaagcaatcaacactgcttgctataccatcaacagagtgttcttacgtccaggtactcacaaaacaccatatgaaatctggaaaggtaagaaaccaaatgtaagtcactttcatgtgtttggatgtgtttgttatattttaagagatcgtgattacattggaaaatttgatgctaaaagtgatgaaggtgttttcttaggatattccaccaatagtagggcatatcgtgtgtataacatgagaacccaaactgt

SEQ ID NO: 281052 - DNA, 540 bp, Cannabis indica
agagagagagagagagagaatgtgagcttgtagtgtggtgagagtaaataagaagcaaaatgtacttaagtgatagtgagtgatatagtgaatactgaatatatgtacttaagtgaaatataactttctttatgagtttggtaattttacctaagtaatattttttgttctgtttctctattatttcgttgtgcttatggttgatcatttttccccaacacaatcatagatgcaactactaatgatcgagaacaaaatcaattatcataaactagctagctttaataattaaaaaaacttaaaatgcatgaaactagggacaagaatataactttaaccctagtatcaatgctttatattataagaaagtagagaatgcttggtgaggtgaatatattatgtggcaaaatattgagatattataccattagagagaaaatgatgttattttagaaatttgcatgaatgttatgttctagcattaatgctattcattttttttaataaaaaattgaaaccaaaaagttattgtagctaaaa

SEQ ID NO: 281053 - DNA, 663 bp, Cannabis indica
accaatcaattcattcaagctctcttctactgtgcagtcctatacctacacaacctcaaaatcatcacactttccccaggtgatgtgggattgcacgaacttactcggtatttccccttgtgaatcacaagactagtgactgtcacaatcacccccccttacggggtccgacgtcctcgtcgaccacacttccggctgggtcaaggctctgataccatttgtaacgtccccgcttcaagcctccattgggcccttacacccacggaataatggctcttatacacgagtacgctactctgactacttcctggattgaggactagccctacagaccaacacgagtgtttccagcgtgttttgtcctcactcgcacacttcgtgggaaaacttctcaggaggtcacccatcctgaaattaccccaagtcaagaacgcttaactgtggagttctttcgtgatgggctaccgaaaaataagatgcaccttgttgatatatgtagtaccaatcagtccatttaagctctcttcaactgtgcagtcccatacctacacagcctcagaatcatcacacttgaccttccctaggtgatgtgggattgtacagattacccgatatttttccttacggatcacgggactactgactgtcacacctacggtagcc

SEQ ID NO: 281054 - DNA, 478 bp, Cannabis indica
taataattataattaattactaaataaaattgtcatttatgtaatttattaattagaacatacaaagtctctttattaacaaattgacccccaaacctcttttctttacaattaagcccttgcttagtgaaaattcataaataaaacatagtctaattttagaattataattgattaattaaaattaatcaactgaatctgcaagcagtattatctcaactagtgaggagaccatgggcctatataaccgagctttcaataagtaaacctaaaattcaccaagtgaattctctgacttattaattatgccttgtgccactatagatttgaatttgaatagcactctcaattatatagaatgctctatatgtaccacgatgtagatacgttatgattatccattgttacaatcttaaaagtcaaagatcctctatatatgatctatattaaatagggacaaatttactgttctaccctt

SEQ ID NO: 281055 - DNA, 556 bp, Cannabis indica
acacatatacaaaaatcaccattaaagaccaagctttgagttccaaaactcaaacttggttaaatccactaacatgcatccaaacctagttaattctacttaactaagcatgaataagcttctgaaaacatacaagaacaacagcaacaacatagtaacagattacacactatttcatcaaaatcacacattttgcatagaaaattttcaagctttgcacaacctatctagcatgctttccaacctaactaaacataattaatccagtattttgaacataaaaataacaacaatcacaagcagcagcaacaacattcaaattaacatgcatttactcatattttcatcaaaaactcaagaatttaaggaaggaagaagatgagctaacctagcttgcaaaggatcttaagaatggatgaaagttgcttggaaatcaaagagaaaatcagttcatgcaccccaaatgcttcagccgaaaatagagaggaaaagagagtgtttctttgaaattttctttcttttcaacacttagtcaaattttgtaaaaattggagaa

SEQ ID NO: 281056 - DNA, 843 bp, Cannabis indica
tataaaaataaaaaattatttattaaagaaatatatttattaattagtaaatataaattttattgtattttttattaattaatttgaatttattaatttaaaaatactatttaaattaatataatgaaaggtaataatttaatcctactctattttaaaatatcaatattagctctcttaaaagtagttatattattaaagaaataatattttaaatattttaaggctaaactcacaaaacaaacaattttagagctcgtttggtacgcaggattagactgaaaaagattggactagactggacaagattggattatgctgaaagtaatcctgtgtttggtttaagaatagactggactattttatttatttctttttagaaaaaaaaaacttaaattaaaataaaaatatataatattaaattaaaattaaaatatatataaacaaataaaaaatgaatgatccacagtaaaaaaaaaaatcaaaaaataattaaattataaaattaaataaaataatatatcctatataatcaagtatatatcataaatatataataaaatagtttagcatattttttatttaataaataaataaaatagtaaaataaaattacttgaataatataaaattgtttatgttaaacactaatttaatataaatattaattttttaaaatatttatataaattttctagtcatttaaaaataatatataattttattgtcatattgtttctcttagaatcaatttaagtaactattgtttaattaacaatattttaaattttgaaaacttatgtataataatttaaaattatacattttaactaattttaatga

SEQ ID NO: 281057 - DNA, 664 bp, Cannabis indica
tggagagtatttttttttttttttttacctagtatattaaaacaatatatgctatttttaagcatatattgtcaaatttccctatatttttgagtttggaagcaatcttggatacattggttagattttgagtttttgtagtctaatagacagcttaagtacgaggggctacacaattaaatcattggcaaatttgtctaggggcaacgagtggaataggaaggttgtactttaagtttttggagagggaatggggaataaaattctagatattcatagaattccatcttctcatcatgatcacatcatatggaaggataatagtaatgggaagttctctatgaagagtgcttattgcttggatcaagctctaagatttagaactccaagaaatttgtggaaatgaatttggcatgtggatgtttacccaagaatatcagttttacactactacaaaaatgagttttcccgacgtttttaaatagtcgtttaaagtattcccgtcggtttctataaccgttgcctatacgaccgtcgtaaaacgggcataataggcgacagttttgtgtgggtttcccgacggtttgcaaccgtcgcctataccctgttataggcgactgtttaaaacgtcgggaatgtaaaaaaaaaagggaaaaaatataga

SEQ ID NO: 281058 - DNA, 604 bp, Cannabis indica
ttccttattacttcttctctagttccttctaccacatagaaagaaattaattgagaatctatttcatccttatttagacttttctcttttctcaccctttgacctctcctaggttcaatgggttgttctacaactttagtagaattctcctcttgagatcctcttttagaagtagaagcttgagaattatttttatataaaatattctcacctagaggtgtagaattttgagagttgtcctcatacaacttattctcaaaaaattctacttctctagattcaattacaacattggattccacatccaatagcctatatgccttactattgttggcataaccaacaaatgcacattttatggcccttgaacccaacttggttctatttggttcggtcttcttacaataagcaagacacccccacaccttgaagtaaccaatatttggttttcttcctctccataactcatatggagacatgtcatttttcttcataggtattctattaagaatatgacatgcggttaaaagtgcctccccccataagttgttgttcaacttggagtacactatcatagaattgaccatttcaagaaatgttctat

SEQ ID NO: 281059 - DNA, 628 bp, Cannabis indica
acgaggtcaacctgaggtctgtgagtctccttagggacaaggagtttacttgtgattataaatatcccaagtattcttcttggtagcaggttcctgtcccagccgacgaggaagatcaggattatgtggctcgggcacattacctccaaaacgtcgcccctcgggaagccaaagaaggagcatcctgaggtaatcaatgtggttggtcacccacagtgcttagggccaagcgtaacaccttagtgtcatttcaagatagtcgttataatttctacacctggaatcccctcttcatagatcgcatcacacataggtttgatagttggtacccaaagttccacgtccaaattagttgtactgactcgtactacgggatagccgagcagtacggaaccatgctagatagggcaagtcatttagatgcaaactgggatttagaaccaattaattcctatgatgtattcaggatcacgagatgtaggaattttagtggatattatagtccttcctcttcgtcttcttatgattatggtaaatcccttaggcatgagattatgccccaatttccccttttacttatttttaaatgaatgctaacatactgttttatctcgcagaaatgaatctc

SEQ ID NO: 281060 - DNA, 538 bp, Cannabis indica
aaaaaaaaaagtgcctggacaaaaagtaaaaaaaaaaaatgtgcttggaaagtataaaagaaatttctgccatgtgacagtatttttgtaaagattagggaaaaaatcaggatttttgtaagtttcccaataggatagctgatagtaggtagatgtggacccatagttaatgttcttttatatttgacttgttcatatttttgctatattttaatttcagtttgagaatggctaaaataaatgaaatcaagtttcaagtaaattattttctgtgtaaaaaaaaactcaaattattttcaatataaaaattgtaatgaccgctttagtaatttggattagtaaatgcaattagcactaatttctgatatttttataattatttatgaatttaattattggtgggcccattattagcaatgggcattagagttataatttctcaattttagagattttactaaactctaggagtattatttgacttaattgtaatttttgctcggtgacaacggaaaatgcgatggatggctagtttgat

SEQ ID NO: 281061 - DNA, 968 bp, Cannabis indica
aaatcacgtaatacgcctaaggtagttagggtgttacactttatctggatatcaagacaatagattaattgaaatgcactacttgttttatgttagtgcaagtgggagtttgttgggattttatgccctaaataaaacacatttcaatataatctgatttgttatcaatagaagattagaaattatttatgtttacatgtagttttaatatttatgatttaatgtttacaatttctgttgagtctagaacatatagttattcacaattacagttatgtcaacacagtggaaggtaattgtgattatatgcttcaaaagataatgtccaatgattcatcagtgcactggatttacattgatgtgatagtcagcgataaagcttacttacaccttagataagtgttatgttctttccaaaacattggtaaagtatgctagtatcggatgtatggagtatacattggactgagaccgatattgatattagtaaagatattataatattaccgttgtatccttctaagtcaatatcactggttgatcttagatcaaaagatcttaatcctgacatggttaggtttgatctcaagagtgttatttgtgttcttaaagttgttagtcaaagcctaccatttggttcgggtcacacgtacaacttgggaacatgatagtacaattgagtgggagcgctaaacatagatatagaatctatagcttctatctggacatagaagtgaaatgatgatttccttcgagcttggcttaatagagataaatggaagagctcttatttcagtgattatattagtttactgaaatatcatttataggaagctaagtgttttaaggataaaatacattgaggggtgaaacggtaaatttgtccctactcgatgtaaatcatctatagaggatctttgattattgggattagaacgatggttaaattttcatagcgtatctatatc

SEQ ID NO: 281062 - DNA, 559 bp, Cannabis indica
gttacagaatacatttttattttacaaaaataaaaattttactttcattttgtgactaacaaatgagaaaacaagtgttactaaacaataccttagtttttgtatgattgtttaaagcttaagggatatatttgaagacatataaatataggaggcataaacttttagtcacaaagtttagggtacaaaataattttatattcttacaaaataaatgaaaggggtttttaccacttcgctatacatttagaattggaaattgcactctatactttttcttgttaatccatttcatttttacttttttttttctatatatttaatttataccctttattatttattatatcccgattatacttaattatgtaatgaaaaaagccttcctcacctccttgaacagtacccttatgtgggtataataataaacttataaaggggtacatttcaattaaatttaaataaggctattttggttaactaatgaaaaatgggtatatttcactatatacctcttttaggccaactccaatgggcctgcaaaacatcaattatggtg

SEQ ID NO: 281063 - DNA, 569 bp, Cannabis indica
cagcttccccaatattccagcaattcaagtggcaagcgttcaggcaacaaccacaagcaagggaacgggaagaagggaaagttcgccgaaaaacccggacagactccccgtgatcgcgccaaacacactgcattcactatcctaactgaggatatagaaagtgtgtatatagcgactcagtcgctaattccgtacaagaagcccgggcccatgaagaaagataccagcaaaagggacatgacaaaattttgtcggttccatggagactacggccacgacaccaacgaatgctacaacttgaagcgggaaatagaacttctgatcaagaagaacaacccgcacctacagaagtatgtcaaggccaaccaaggtcagaataaccaggatctgatgcctccaccaatagatggacacttgcaagtcatcattggaggcccgcacatcgctggagacacgggcaaagctcgggaacgatatgcccgcacagctcaatacgagcaagaagaagtcatcctggccgtggaagaaaggaagcccaaagttccacgagcaggagagccagccataac

SEQ ID NO: 281064 - DNA, 574 bp, Cannabis indica
ggtatctctacattcaacggccttaccccgtatcataccccaccatggcccctcatttgtacctgagacgttagcatacaacatacaacatacaacacaccacatacatcatacaacatacaacatacaaatcgtaccaaccataatatatatcgattcacaaactcatattgtgtccataccacacattctcagtactatatacacattcataataatacatcacaaataatatttcaatagacaaataatttaaattatgcagttcaacacataaaaactacttaatttccttacctcaaatcccgctgcttaagacttgttatctcgtcactactacctataataagacatgggtcaaggccctaatattaaaattcgtactcttacagtacagcagaaagatcactatttttgaccaacaactacactaattcagtaaaagttgtcttcataaaaattataggaaattccattatctttccaatgatataaagatcattaaaaatggattaaaactgagggagttatgattgttttactgaaactatttctgagaaggaatatggagtaa

SEQ ID NO: 281065 - DNA, 235 bp, Cannabis indica
aagcaaaggtggccggcctagcaattgtggaaacaagccttccacttttccaactttctttttccatcattcctagtttcccattttgtcaaaaactgccaattcttttatttaaccacataaattttattaataataaaactaatcaaagtttcccaattaataaatatacccttcaaattctctatttactgttttgcccttaataagtgataaattctcaaatagacatagt

SEQ ID NO: 281066 - DNA, 637 bp, Cannabis indica
agccagacaagttccttagcagcctctgcggtggctatgtgttcggcctccatggtagagtctgaaattgctgtttgtttaacacttctctaaaccactgctccacccccaagagtgaacaccatcccaaatgtagactttctgtcatcaagacaagcctggaaatctgagtcggtatagcctacggaatttaaagcaccaccttgtagactaacacataatgcctagtacttttcaaatatttcaaaatatgcttaacttcagtccaatgttcctctcctgggtttttctgatacatgctcacaattcctactacgtagcatatgtcaggtctagtgcataacatttcatacattagactcccaactactgaagcataaggaacccttctcatgtcctctatctcttaaggatcagtgggacgctgttccttagatagacaaataccaaatcaagagggcatttgtgtgcctttggcattcgtcattgagaatctctccaaaaccttatcaatgtaagatgtttgagagagagcaagggatctgttcttccgaattctgatgatctgaataccaagaacataagtagcttcacccatatctttcatttcgaattgagtgtcaagccattccttgat

SEQ ID NO: 281067 - DNA, 544 bp, Cannabis indica
caagtactttttcactcagaaggatctgaacatgagacagagaaggtggttagagttggtgaaagactatgactgtgaaatcctgtatcaccctggaaaggcaaatgttgtggctgatgccttaagccgaaaaggacctgatcagatatccaacatggtcatgatttctcctcagttagcctcagagatgactagggcaaacattgagttggtgactgagaaattatttaatctaacacttcagtcagatttgttggaaagaatcagagtggcccaattagaagatcctgaattggttaagattcgagaagatgtcttagcgggcaaagctaaggacttttcagcttctgacagtggaatgctgttgttaaaagcacgggtgtgtccctgatatcaatgggcttaagaaagaaattctggaagaagctcataataccccttactcattgcatccaggaaccaccaaaatgtatcaagacttgaaaccttatttttggtggtatgggatgaagagggatgtggtggactatgtcactaagtgctt

SEQ ID NO: 281068 - DNA, 522 bp, Cannabis indica
acctaatcgggcagttacctaaaaataaaggcggagtgcagtacacagtggtagcagtcgactccttccctaagtggactgaagccgaacaacttgcaactaccacatcaaagaaggttcaagactttatagtgaagaacattatatgacggttcagactatcgtacaaaatagtctcggacaatggcaaacagttcgacagccaatctttcactcatttctgtgcgaaccatggtatcatcaaaagtttctcagcagtggcacatcctcaagcaaacggtcaagttgaagcagtcaacaaaaccttgaaggatacactaaagaagaaattcgaagatgccaaaggaaattggccagaagaactccccgaagttctatggtcataccatacaacggaaaaatcagcaaccggtcagacaccatttgcaatggcgtacgattatgaagctatgctgcccgtcgaactcgagccaccctcccacagaagattgacgtacgatcaaggtaccaatcacatactcc

SEQ ID NO: 281069 - DNA, 679 bp, Cannabis indica
aaagttttttatggcattcctcatgactttttcccatatttgtaagttttttaaaaaaatatcatatttagtgtaattaagtttttatgccatatatatcaaaacttatttttattttcccatatttttgtaaatagcccatgttaatacttattgtgaaacccatttacggcccaatccaacccatcttttgtctccaaaaataatgtgagcctgatccgcttaggtttctagtgggtttctaattgcaactttcccattcttatacgtagcaactgcacaaaggtaatttgaagctgagaccataacattcacattgttttagcaaccctagactagactgcaacagtagttgatgacttaactaaggtgctgtttggtaacacttttgttttctaattttttaaacacaaaatgaaaagtaaaatttttgtttttaaaaattttatttttgaaaaacaaaaatgcgttctgtaatcacttttgtttttcaattttaaaaacagaaaacaagtgtgttctgtaaagttcatttttatttttatttttttattttatttaagtcgggtctaggtccggggtcgaattcggattcgggtcagaggtcgggttcagcacaagggccgtgggagaggatttgggtccgggtcttgttggagtccaaaatattgattaagaa

SEQ ID NO: 281070 - DNA, 510 bp, Cannabis indica
tttgttgtgtcctttttggcgacattgaccgcataccacttgtgcttttgcttcaagtccatttttgtatcgttgtttctttggtcttccggcagctctcttatgtttaggtgggaggactacaatattttttattaaatctggtatactccataatgttgcctcacctaatgggagtatactgtcttcatatgttgccataaaagcttctttcgtgtagtagtatgagcaatatttgtagcaagacaggttccttttgcttagtacaaccattgcatgagagcaaggcatttcatcatattcaaatcattggcagctgtatgttttgttctcaaagtttactatgtgagatctgttgttgtcgtgtacttggtataccagaagatttgatgtttcaacctgtattaatcaagtaaaccattattaagtttacaacaaagtaaatatgtttgtaagcaatttttatttttctgtatatataattaccttgtactttaaactcatatctct

SEQ ID NO: 281071 - DNA, 505 bp, Cannabis indica
atagtaaaatagacaacccattttacataaacaggttggtctgtgtatgcccaacacgtcacgaataatttatgcttatggattgggttgggtctcgcttttaaaatatgggtcaagcccagcacaacctttattattaaacagatcgtgtcaagctcaaataaaaaaaatacaaacgagtcaagttggaccggaccggggctactcgaaagttcaacttttccattaagtgtatacaaattaaaatgggttgtaaattacattaaggtaacatttggtaacaaaataaaaatagaataggaatgagaatgagaatgagaatatgaataggaatagaatagaatggaatttctattcttttgtttggcaaagactatggaatcaataactaaataagaattgtgatgtatggtatagtatggaatgaaatagaatttttattattttgaccaaaatgtcttttactctttttaaaataatttttgttttataaaattaccattat

SEQ ID NO: 281072 - DNA, 899 bp, Cannabis indica
caatgaggataaaggtatcaaaagtaaaaatggtttgcattatttttagaagtgaaagttgattaatgacacccaccaatccaatccaatccatcatcataactgcttgacataaaagcacttctatatagtgttcaatatcatttggggaataaataactaaagataagaatttatgatgaagaggataaaattgtgtggttcaacacctatgtcttgtttgtttcattacccctacttagtatttacttcatttgttctgttattattggtttcttttattgaaagattagttttatggtatattgatctccaaataataatttggttataaagtaagcaataacaatctctttaaaagccttaaatttttggtattaaccaaatgttcgtttgcacgagtgatttacttaggaactttaagcttttcttgttggagtcagtgtcaaaacttatctagtatatgaaatcaagggggttagtgtacaaaaggagaaaaaaaaagtaacttaaaatgtataaaatattagaacgaatgtaggaaagtaataattcattttaacaaaagtacaccagttaatgtagctgggtaattattgtcgtagctgggtaattatgtcattttttatattatttattcatttatttttgtaatataaggcatatattggaattaaatgcctcttaaggtaaagtgagactgaaagttattaccatttttttttaaaaaaaaataagtgtttatagattaataaagagtaaatactattttagaccctctgttttacaaaagttatcaattggaccctgtgttttgttaaatgacaaaatggaccctgtatttctaaaatagtacaaataggaccctgaattgattttttgtcaaaataaagtttaat

SEQ ID NO: 281073 - DNA, 355 bp, Cannabis indica
tttgagttcgggtcgagttcgagtcctggtttgagtttgggttcgggtccagatttcagtctaggtccagatcaggctccaggtgtgggtttacgtcctgggtctttgtctaggttgggtgcgagtccctagttccaatcctgatctgagtttggattcagttctgggtctaagtcctttgttctgatccttgtctgggttcgtgtttaggtccgggtcctggtctagctttggttctgattctaggtgtgggtttgagttcgtgtccgagtttgtgtccgggtttttgtccaggtctggactacgatctgggtctaggttcgggtccaggtcaaagttgttgggttttatgccc

SEQ ID NO: 281074 - DNA, 679 bp, Cannabis indica
aaagtttacattgaaatacaaattatagtgaacctgaagttcatgaattgaattttttgtacatgatcaatcatatgcaaataaattgttcaaagaattttgacttaaattttgttgaagaaccagaagattcttctcattgttaatttataaggctcaaaagaagaatgtgcatatatttgcacatagaaaatatttaaattatatttctttaacaatcttgagccattgttagatttttattgcatagtttcttatcgatgtgataagattatatgatcatgcatttacaaaatgtgtaaatttatgtatttctaattatacacgtatgactcattcttagaaatgaattaagttcataaggattgaacttgaaactgaagtttattgaacctgaagttcaatgtcatatagtatatatgagtttaaataaatattgattcattgtgatatattgaaatccctacaggtatattaatattattagatatcacaatttttaaaaattctctcgatcagggggagagaagcagttgggatcgatgataatttttgaaaaatgatccttgcacaaagtatataagaacaatatagttcaaaatgatatataccaactgcaaatcaatattattcaaagttgagatagaatgagttgaaaacgcctgaagcgtaaatgaaa

SEQ ID NO: 281075 - DNA, 197 bp, Cannabis indica
gtgttaagaataggtttcttccactagctagtagggccaacgaattctttttccatattctgatcaatcctccatacttgtgtgtccattccattgttttatataaccaagttcttgcatcaatggagtggttgttaaggataggtttcttccactagctagtagggccagcgaattcttagagaaccttccatgtc

SEQ ID NO: 281076 - DNA, 411 bp, Cannabis indica
gtaccgtgttggacacgacaagtagagggactcagtatcgtgttggacacggcagttagggttatggtcaggggtatgagcgtctgaccatgaccgtgatttatgtatgagtattattatgcttttcttactgagtctgttgacccagagtgctatgtttatgtgtaggtaagggcaaggctagggctgatggaccgtgaatgagcctatgaagattgtacatgtcagggcagttaggcctggagcgtacgatcatcgggacagcgaggctatttttgtaattagtcgctaggagacaagtattttgtataaacagtaaaattttgtaaatggtattgtaatcggtgtcccgagtattttgtataaatattttacaagtttaattaacaagcaaaatttttaattaatcac

SEQ ID NO: 281077 - DNA, 779 bp, Cannabis indica
aattttagttacgttttttaaaaataaaaaaaaaaaaaaaaagtttagaatcgggtcatacccgacccgcttattccgagttggttatacccgacccgctaattccaggttgggttataccctcctcggtatattagtgttaacgggtcaggtcagaacaggactaatccgacccgtttgctattcctagttgatatatgcttgaagtcttgcaagttaggtccacaatttcttgcttggctaaaaaaaagttgaatcgggtcagacccgagtcgcttattccgggttgggtggtatgttaatgttaacaggtcggggcaggccaatgcgttgacgggtcgggacggatccaacctgtttgccattcctagttgatatatggctgaggtcttgcaagttaggtccacaatttcctacttggttcaaaacttaaataaatatctttagtcttgatatttcacattctgaatttcttgctaattggcttttgagctgtcctttgaaatttctaaatctacctttgaatcaatttggtggtcctattacacctcataactcaaaaatctaatgtaaagacgcttctaaaaaaaaaaagtggtcctaaggaaggagggaagatgcaccccctcagcgcgcaggagggtctcgaggaccaagaacaataaccagcaaccccgacaaggtcgaatgatatctcaaaggaaaccatgtttgcattcaagtgttttctccattcccacctaaaaaccacaagtagagctatacataatcacatagag

SEQ ID NO: 281078 - DNA, 922 bp, Cannabis indica
gaagttggcttatatctactcccgggctaaatctgctacttccaagagtacggctctgtccgacaccttgagggcggaggcggacttggccaagaaggaagttgagaaggccacggcggagactgcagctgttcgccatgagttgggtgaggccaacaagaagctgtttgctgctgagaagaaggtcaccgtgctgacaaaggacctcgaggctactgatcgctttgaggaaaccatcgagaccttatctgctgaagttgatcgtcttcaggatgagaggacttctctgcggtaggtccttctgaggctgaaggacgataaggacgctcaggcggccgaggcggaccgcttgaaggagaaggttgatgctttggagacttccggcctcgagctcttctttgatttttggaaggctaatccccaggccaacttcgactacttgggcgacgccaaggacatgtaccttgagtactgcgcgacccaagttgcctatggtgggaaagaggtggctgcttcagcttccggctaagcttttgaccaggctgttgatgcttctcctgctcgaacaatagatcctcctactccagtcggctcagaagaaccaaatccagagcctgggactccagctgtttgaacattgatctttttatctctcctgtttatatatattatatatatggccttaaggcctttaagacatcatgaccggccaagcggtctttaaacttgaattaatttttatttttttggacaatgggctgaccgggcagcttttaatcccgagacttttatgctcttgttatccttaatgaatttcattctctgtttataattgcagtgcaattgtgattgttttatgtttaccagatgctttgtacgggtataggtgccccccaagtgaccgagcagacgtatgactctt

SEQ ID NO: 281079 - DNA, 59 bp, Cannabis indica
cctaaataaattctatcaaaaactatgataatttattttagcaacattaacctatatgc

SEQ ID NO: 281080 - DNA, 647 bp, Cannabis indica
ttttcttgttctcatctaaacactcctatatatatactatcatatatttatatattgactatacaatactatatatattatatatacatactatatatacactctttatttctctactacatatcatctattatttatattttctatatcatatatatatactctattatatatatacactattataaatatatgcttttatatagtttacattcacttgtatctttgagttttgagttgtaactcttttcttttatttgtattttgtactttaagattgtaactctttatttaatatatagtccttgtaatattttgtttagagttgtaattgtcttagtcttttattcatctaaatttattcttccattgtaatctctctattatttctaacaccatcaatgttacataagtgaagtaaatataaaattactttatttcaagttaattttttttttaaaaaaaaatatatgtaataataaattatgctatataaatttgttgctatttcatattaatttattataattacaaccaaataaatatattatattattaaacatatatatatacaacaataattgatatatcataacatataaaataaatatagtgtagtaataaattatatactacaaaaaaatacc

SEQ ID NO: 281081 - DNA, 642 bp, Cannabis indica
ctttggtttgataggtctagtagatcttcttaagacttcaccaacaggctcgttgggagcagtagctggtccagcaggttcagcaggttgttcaacagttgcaggcaactcttgaacattttgatctactggattatcattaccaacttgtggatcttcagtgattggtaatggttgttcaacattcgtttgaactacaggagtgttaaccattatcaatcttgcttttgaagtggaaggttctgaaggatctttctcaggacctaagtcctttgattgatcactcccactgatcaaggcattctcaagaaattttgcattccttgattccacaattcttgtgctatgagatggacaataaaacttgtaacctttagacttttcagcgtaccctataaagaatccgcttatggtccttgggtccaatttcttctcttgtggattatatattctgacttcagatggacatccccaaatgcgtacatgattcaaacttggtttccaacctttccataattcaaaaggagtttttgagactgcctttgttggaactcggtttaatatgtacacggatgtctttaatgcttcagtccacaaggatttaggaagattagagttgctactaagcatactccgcaccat

SEQ ID NO: 281082 - DNA, 880 bp, Cannabis indica
ctgaaatataaaaaaaaattaatttcaattacttctacttccatttcaataatacaaactaatatattcttgttctatcaactatgatagcagattatatttaatctatattctaattaagacatctaaattacacgacactattttacatttttgaggcataacacgcatataatcagcattaagcattaattcaaaagctacacaagccacacaaatactctcgttttgtgtcgaaacatatgtttatttaattacaatattctcaatactcgctttttaaattttgtattgaaatcataaatcaaacataatatggtcaatcaaacacatataataataagcacaaatataaataaattacatcaatagaagaaagaaatcaaaatagcattaatccctaggaagtttcaaacaatctccaataaaattcctaaattgaagtttaactaacaatctccatttaaacattcataatcaaatccataaaaaatatgtgtaattttaatcaacgcgtcaaaaaaatccatagaaaacataataaaaaaaaaagaagaagaaactagatttaaggttgcttgccacaatcgcaccaaaacttgatctccaatctccttttcatattttttaaattttaaaaggtctccctcactcaaattcgtgattttctcctttaaaagtgaagacgtaattctatttgttatattattttataatataataagtgtagattaaaatgtagtaatatatattattatgtgaataatatttattaagtgtttggtaaataaattgtgtagcatataatttatttaacctaaaattgtaacctacactttataacatggagaggagttacaaagttaattgcttttgtaac

SEQ ID NO: 281083 - DNA, 585 bp, Cannabis indica
gttagaccaacaatgaagattcgaaattaaactacaacttaataacagaaaataacatggttcaatataaattcatacacaattcagaaattattaaacatatagcaagtaggaatgacaagtgaaaatactaaaacatacaatcctaaataatttccaaggttttcaacaaactgatacagtgtcccggtaggcgagagtcaaagtatcattcattgaatagagttgtcagctcatctaaaatagaaaccattctagcaaccttttattcgatcaaaataagaatccaacgttgtcccggtaggcgagagtcaaggttattctcattttatgagcttccaccattgtttcatgttttataagtttatctctaagtagtcaccgtaggggagagtctaatagagacgaaaacttacaaaacacttatcaaatgagatcttacggtgttaaatgcgttcaacgaataaccatccatagggggacgaagtctagcgtctcgaggttatattgaaaacatttaactattgtaagaccaacaatggagatcgaatatcttaataataataaagctcattatttaaaatg

SEQ ID NO: 281084 - DNA, 265 bp, Cannabis indica
tgtgtgggcactaactcattcactcaaggattttgaaatttagagaagaaaagagaagggaagtggttcggcctatagaaaaaagaataggaggctcaaatttcatctgacagaattaagtgtgaatgagtgttgggtatttattttaccaggagcttagatctactcgcaagtattgtttaacactctaaatatgaactttctaaaacgataaaatcaacacatataaagttaagaaaaccttacattgatgcagcggaattaa

SEQ ID NO: 281085 - DNA, 775 bp, Cannabis indica
atccacgtaaattgatccctgagttgagttatagggattgagctgatgactcatgatgcgaaagctgaattcgctaagtgttgattgctctgcgcggatcgctgaatatcttactctggacatgccagcgaggcatcctgctcggcctatcttcccgagtagatgttccaagtggactccacgtgtcaccattcccgtgatgccacgtcagagtgcaaaattcgggataacatttgcccccaagtctgtacgggacctctgaggttgcgtgtagacttcatccgagctggttctgcctttggatggggacacgtgtcaagcgtgaccgttcgagactcgatgtgaagctgactaggcattcctttggtttttggctaataaatgctctgacaattaatatttcaaattccctttttctctctccacggcttatggttgcactcgattacttttgatttcccatattcgtttttgaggcgggaagctgaggcgtttgaggtttctttgagacaattacctcttttcgtgactttcctataaatacccacagcattggcagataaattcatttcatcacccttctttgctaagcaagctccagagcgaaaagaaaattttctggcttcaaagtcaccgaagtaccttcatacaactgctggttggatagacgttgcttgaacccagacactcgaatcttaagtaagtttttgatttcctttatgattatcttttgcatgtttacatttcaaattcaactttcactatgttgtagaaa

SEQ ID NO: 281086 - DNA, 680 bp, Cannabis indica
gggcataaaacccaacaccaacaccgtcggtcccggcatggaaagtgtttgtagacggagcctccaacaaaaatgtatccagagcaggggttgcaatgatatcttcgagtggacttcgactccagacagccctacggttcgacttctcggcttcaaataacgaggccgagtatgaagccttgatagcagggctgagattagcaaaggctgtgggggccaaaagagtagaagtctacagcgactcccaactggtcgtgaaccaggtgtcgggagagtatcagacgcgcggcgaaagaatggccgcgtatgtggcgatagtccgggaactgctccacgagttcacggattataaagtagaaagaatccccagggaaaagaacgctcacgcggactgtctggctaagttagcttcagacagtgagattgaggaactgggggtagtacccgtggaacgcttggcagagccaagcatcaaaataaaagaggccatagcaacggttgggcaagaacccaactggatggtccccatcatagaatacataacgaaaggtgagttgccccaagaaagggcactgtccagaaagattcagtatcaggctcaccgttatgtaatgatggataaaattctctaccgaagaggactcagcatgccttatttaaggtgtgtatcggaccctgaa

SEQ ID NO: 281087 - DNA, 518 bp, Cannabis indica
aacatacttagtttaaagaaaagattctagatagcgatttctagtgactgatttatattttctaatatttaattaagtagaaaagtatatttaagttgaaaattaatttgttaattaattttagaccaacttaaattggatatttttcttagaatttaaatagaattaataattaagttgattttattcaaaatacttaattaattgtttctatagtgaaaaacccatcaatagatgagactgagtagctcatttgcatcaattctcatatgagatacaccaattttaggttccttttcttctatttattaatttttatttaaaataaatatgggtgtactcttaatgggtattacccatgaatgggtaaaattagaaaattttgagtttttatacttagtctttctatctaattaaaaaaatttctcatttttatatcatatggactgagattattccatcggtaaaaaaaattaaaaaaaaaagttttttaagcaagaaaaataaaaaaagaaaaa

SEQ ID NO: 281088 - DNA, 709 bp, Cannabis indica
tatttttattattattatttttcgtatatatattttggtgaatggtatatgtattttttgttatacgatatataatttttttaaaataatatttaagttctattttttattggacttttgttgacatgatatataattctattggcatcctttatatttttatttttatttgttgttattattatatatatttctattgtaagatatatattttcagttatatggtatataaattttattgtatagtatattattttattttagataatgcatgtttagtttttattttattatacataaaggtgatacataattttgttaatatgaaatatacaatttttttaataatattatattagtttgttttattttttattggaggtatatacgttttcttgtatggtatattgaccgaggttttcggcaaccaatataataatagtatttaggaaagctgtaagaagttaatgcataagttttttacgtggttggggcattaatgacccttagtccacgagcctgtatatttatgagagtatttattacagagaatgttcttggtggtttttctctctagttcttatgaaacccagaattctcgacccctaccttaatgagtttggggggtagtttatagtgttttgtggggtgatccctagaattgaggtacatgtctttctgtaatgttcagtaaaggcacacattccca

SEQ ID NO: 281089 - DNA, 763 bp, Cannabis indica
gttgtagtgtgggaaacttatcagaataatctttctttattattagtttatattctaaatgggtcattttccgtctttaacgttatactatcattctatcatacgtacattatttttgaacatgaaatgtcaattcaattcctatttaaatattaaataaaaacacatgttaatataatgaggcatttgtaagttaaatttaccaagaagtttgtttgtgtatctaacatcctacttaaattgacggttgctaattacccctccaaagttgaattggtaatttaagcaccttttaactctattccctcgattattcttaaaaaaataaaaaaaaaaaactctattccctcgaaattaaaccttgtatatgatcctttgattatgaaatcaatatttccttgttgaaccttgtaaaaaaaaaatatgaattgcatgaaacttaaattcgagactcgagagtaaccttggtccttgatcttctccctagatgccctaagttttaccatgtttatttgttaacgaaagcttgtgattgaaatgtttaattcgtcatcacaagaagttaaaacggactaccattcacaataagtcaaagtcttaaagtacaataaaccaaaatgattacgaaagctagcaaaaaaatactagtttaatgtgtgaaagaaaagtatttcagcaatgacatagatggaagaaattaaagtaataacaagtgtcatatattaaaggataaatactattttggaccttatgttttgcaaaa

SEQ ID NO: 281090 - DNA, 284 bp, Cannabis indica
taattccacaatcaatgatattttcctatttaatattagaaataataactagtatagaaataactatctagaatatatatcattaactaagtatcttttcaagatttggaaaatatctaatttaagttgttatagaaagaatactaaaataagcaacttaaaattttccaaataaaatgtaattaaatatcaaaattaagtggtaactacctaatttgaaaaatattccattttaagtttaaaactaacttaaaaaaatatcttaagaatcttcaataactaat

SEQ ID NO: 281091 - DNA, 566 bp, Cannabis indica
caacttggtgttgaatttgaaatgaaagacttggggccagccaagaagattctaggcattgaaataaagagaaataggcctcatactataagtctatctcaagaacattacctcaagaaggtaattgacaagcttggcatgaaagatgctaaacccgtgacaactcctcttgcccaacacttcaaattatctcaagatcagtcacctaaaactgaaaatgagagaaaatacatggaaagtataccctatgctactggtgtaggttgccttatgtatgctatggtgtgtactagacccgatttggctcatagcatgagtgttgtgagtaggtttattagtgatcctggtgaagaacattggaaaggattaaaatggatactgaggtatctaaagggcacactcaaaactggtttactgctgggaaatgacagcaagtataatgacaatgttactggttttgtagattcagattatgcaggaaacttagatactaggaggtctctatcaggctttgttttcactgtgtttgggggctgtgttagttggaaagcaaacctacaaaaggt

SEQ ID NO: 281092 - DNA, 734 bp, Cannabis indica
gtattaatttagtattgttataatatctttgtggtatataattttattactacaatatattaattttcagtgatacgatttatcaaatactgttatatatatatttaatgatctaatatatttatttattttgttacaatataataatatataatactaaaaaaattatacaacctaatttaatgattatatatatcgaagaacgagttagttgtttttgggtaggatggtagaatttatcttcgccactagtggcaacgaagttcttggtaattaacaaacaagaaaacatatgcgctaacaagtaacggctttcacgttagggtgctcatccgcaaggaagatctccactcatttcattttaataaaataatatataataaatatatttttttataatctttatcacctaatttattatatttcatcattttttttaattttttttttagaaaaagacatttactaatttaattttaaaatttaaagtcattttagacctttacattttgataaaacacataacacaaaattattgtcgtttggatttaataaagggaaatttacacagtttactgtgttttcccattttctttcttttatactgttacactccaaaaataacttttgtactgtttttttttttttttttttgtaatcaacaatatagacttttttgtgtacaagttttttaattacttttacttactagtatctctataagattttctcac

SEQ ID NO: 281093 - DNA, 567 bp, Cannabis indica
aacaggatgctgatatggattaccaagtcactgtggacttttatccaagccttcatcgtgttttagcagagaaaaaggccaataacaattttttctttcatggacatgctgtatttgcgacatatcttattgaatggacagaccttattttgcgcacaaatcgagatactttgaatcatgctggaatttatggagctgtttatatatcaagatatccattcaactatgagagatctgtatggcgagctttttctgaactctggggtcctctgtctaacacatttcatcatagcagcggtgagatgggaatatctctgtatgatttgaaggttattggagggttacctattttaggaattccttatgaagagttcatacctcttaacaaaaaattggttggtggcactccatatcattctactactgcagagcttttaaggttccacactcaaatttataactatttgaagagtgtcaaagtttgtgccaaatcaaatgatataaatgtatcttgggagcagtggatagaatttttctatagagggaaaaagatgtttcaaggtgtga

SEQ ID NO: 281094 - DNA, 451 bp, Cannabis indica
gaaactctcccactacgacaacgtagtggaattatcctctttgtctttgtgttcaagtacaacagaggcagtgggaccatcttatacagaataagatgattagaacacttttggaatcaagaaaaatatctcctttatttgctactttgttttcagacttagttcctatctgttggatttgttttactaggaccttagatctactcacaagtatgttattttaacatcctaaacaagaacttctaaaacgatatgaaataaacacatataatgtataagaaaccttacagtggtaggcaacggtaatataatgtctccgttctagctacagatcctcttcagtttagattcttcacaatcctctagactatgattgaggtaccacttgatgtgtgtgggcagtaatctatcactaagggtttcgaaaacttgaagaagcaaagagagagag

SEQ ID NO: 281095 - DNA, 189 bp, Cannabis indica
cttattggaagcttggatatatagacccatggtccccacactagttgagacaatactacttgtaagactcatgtaattggttttgattaatcaattataattatcaaatacagcaaaattgcaaaagtgaggcccaaatccactaagccatggccagccacttatgtaggctttatcatttaatatttt

SEQ ID NO: 281096 - DNA, 694 bp, Cannabis indica
ttggaaatttgaggtatacgtgtcctctaaaacgagggggtctgggtctcgagttttctagggtgagagaaatctcactataacacatgcccctagtttcgcgatgtgacagatgcggtaacaagggaaactatactcgagagacaggtgaaaggttgtcacgaggaggtgacctttggtagtcccttcgagggtttcgaaaaatgacggctataatcattacttttattgcatttatggtgccacgtcacaaaactcttaagtttctgtgtaggcgtggccatctttggccgttggattgggcgactctaggcattccaattgccacgtgtcgtgatcccaattaatgagggatttgggtatttaaaccctctgattcgaatcaaaaattcccattttccctcattttctttaactcccttaacttctttgttccctctctttcagagaaaccatcaaaaaacttccataaattgtccagattttcgcttttctttgtgggtttttcctcgattctccagtgctgtcaagggcaattcgtgggaacagatttaccagaagtaaatgttagttttcaaaaattcgctgcatttcattttctgtttgagagggaacactgttttctgggttttaatatgcatgagagagtttaagaataaatgtttatagggaatatgtatgaggctacgttttt

SEQ ID NO: 281097 - DNA, 631 bp, Cannabis indica
ggtgttcgcaataactgaggctgatgtagaagtccagcccttcagtggtaacaggtcagctctcggtcaacaactcttatttctctgtgttgtttgactctggggccactcattcctatgtggcagccagaatttttattaaattggatagaccgcatgatagttacgaaatagggtttggaaccctactacctggcagagagttagtcatctccacaaggtggattaggtctatgccgaccagaatagaggatatagagttgagtatttatttaatagaaatgaatttagcggattttgatattatactgggaatagatttcttgtccaagtactcagccattattgattgtaaaaggaagatggtgatcttccaactagaaggcgaagaatcgtttgtttttgtcggatcggtttggggatctcagatccgggtaatttcaatactaacagctagggaattgttatgaaagggatgtctagggtttatggccatggtattggataccacttggcctgactctgttcggccagaagacatcatggtggttcgggaatttctagatgttattcttgatgaacttccgagtttaccacctcagagagaaattgattttgttattgatctggc

SEQ ID NO: 281098 - DNA, 513 bp, Cannabis indica
cataaccttaaaaaatgactgcaattgagaagtggttgttctaaccatcataaaataatgatgacgacattcgaaatggttgtcgattcctcgaatttataggcataactaactaatccaactccttttcaagtaaatagttggaattatacatatgatattgtggtgttaattggcttttcaaaactacaccaatagggttataaaatagtaaagctagctttccaaattcaatggtgcttacatgagagctatcctagatgtagcgagtgtaatcatatgataatgatatggtacggattaggttgtttattgtgcgtgggaaccattataaattatatatatatatatatatatttatattatatatgcttcattggagcaattttttacctacaaacgtttttaccaccaaaagtggacgtcaataggttgttgtggagatgacctataataagcaataactatacatcatctatagttgtatctattacaatgatttttttttttttt

SEQ ID NO: 281099 - DNA, 598 bp, Cannabis indica
atttattttcaagccttatggtagttttgacaagtgttgttcaagctttattatatttgtgatagtttaattatttggtgatagtccaaactgcagaaaccgcataaaccgcactgcaccgcacaattttttacggggaggtttatttggttttttagtttcgtggtgcaggtgtggtttgagaaattgaaaaaatcacatgtgcgggttggtttgaaaaaatagtcaaaaatcgcaccacccgtaccgcgaacacccctaatatagattatatatatgttatctcataaagtaaccatcttcataacatcacgttgcctaatcaggcaagtctatgctataatttaataatcctatattgcattgcctaatcaagcaagcctgtgccacaacttggcacccatatatcgcataactacatcacctaatcaggtgagcttgtgccaaagacctgcacccatatatcagataattgcatcacctaatcaggtgagcccgtgccacaatctggcaccaatatattgcatcgtctaatcatgagcccgtacctacgcctggtactaatcatatgtcattgacgcccgtacttacgcccagt

SEQ ID NO: 281100 - DNA, 435 bp, Cannabis indica
ctgggttgtcaacctgggtgttaagtcctgaactgttaggatttatgccttaaataaaacccatttcaatataatcttatttgttatcaatagaagattagaagtcattttatgtttacatgtattattcatgtttatggtttaatatacaatttctgttaaatctagaacatattataattcacaattatagtgatgtcaacacagtggaaggtaattgtaattatatgcttcaaaagtttatgtttcattattcatcagtgcactggatttacactaatgtgatagttagcgataaagttcacttacaccttagataagtgttatgttctttccaggacattgtcaaagtatgctagtatcggatgtatggagtatacattggactgagatcgatattgaacttggtaaaaatattataatcttaccgttgta

SEQ ID NO: 281101 - DNA, 625 bp, Cannabis indica
ccgtttgtgccattaggaacttgatttttcattatccattttacgcttagtaccacgtgattccacattcaaggtttcattataagaagcaacagtgtcaagcaaatataagttgtcataaaccataagagaaccagttccaacagtatttgaattaatagataaactaaaacaattgtttctaaatgaacaacaataacccaatttgtccaaacaagaaacagaaaccaaattccgtctaaatgacagtacaacaaaagtatctattaagtccaaatagtaaccagtacttaacaacaacctaaaatccctattgcttccacattcaccgacttgccatctcccacataaatgcttctttcagcatcatttggctttcggtaactcaggcaaccctgcatagaaacactgatgttagtagtagcaccggaatctaaccaccaagtgtttcttggtactgaagctaaatttacctcagaacagaccaaagtaagaaatgtacctttctttgctcgccatgcaatatacttagcacattctttcttcatgtgtcctttcatgttacaaaagaaacaagcatcatcattgttggcttgagtttgtttcttatgtgcaggacctttat

SEQ ID NO: 281102 - DNA, 410 bp, Cannabis indica
gtttgaaatcacatgcttgttatgcgttaatgcaacatctacttccaatttccattagatcatgcttgccaaaaaatgttcgagagtgtttgacacatgtttgcattttctttaataggctgtgcgggaaggaattagaattggataagttagatgcattacatgaacatgtagtcaaaacattgtgcaacctggaaaagttttttctgccatctttttttgacatcttgatccatttaatggttcatctagtgagagaagcaaggctgtgtgggccggtatgggcgagatggatgtatccatttgaaagaaatatgaaggtacttaaaagttatgtgcgtaaccactattgcccagaagcatgtatggttgactgctacatatctaaagaggttgtggaattttgttca

SEQ ID NO: 281103 - DNA, 190 bp, Cannabis indica
cttcacaatcatccacactatgattgagataccacttgatgtgggtgggcactcactcaatcactcaaggctcaaataatatgaagaagaaaagagaggaagagggtggcggctagggtataggtagaaggcttagaatttttcactgaaggaatgagatgcatcatcattctttttcctgaagccatca

SEQ ID NO: 281104 - DNA, 341 bp, Cannabis indica
gtcgaaaaaagcagcgtgattataatttacctacagtgtgtacaaaaggtttggtcaaaccccaaaacaccgaacatataagcaatatatttacgaaagacaagtgaccaagagtcatacgtctgctcggtcacttgggggacacatatacctatacaaagaatttggtgaaaataaaaaaatcacaattgcacgacaattataaatagagaatgaaattcattaaggatgacaaaagcacgtaataccgggattaaaagctgcccggtcagcccattgtccaaaaaaaaatgaaaaataattccaagtttaaagaccgcttggccggtcatgatgtctta

SEQ ID NO: 281105 - DNA, 694 bp, Cannabis indica
cccaaaacttcgatgtgaactttggattcctgtctgacacaataaatttagggggctctatggagacgaatgatccccttacatacaactcagcatactgatccactgaatatgtagctttcactggtagaaagtgagctgattttgtgaatccgtctactatgtcccttactgaatcatacattcccgtagttctaggtattccagttacaaaatccattgcaatgtcctcccacttccactcaggaaggactaaagattgcagtaaccctgccggcctctggtgttcagctttaatttgctggcaggttaaacacttggacacataatccaccacttctcttttcatcccaaatcaccaaaaatagggttttaaattctgatacattttggtggttcctggatgcaataagtaagtgtggaatgagcttcatcaaatacctccttcttgatctcttcagcattagaagtataaactcaagcttgaaataacaatattccactgctcgagactaaaaagtctttagactgaccgaccattacatcgtctcgaacctcaactaattcaagatattccaattgcgcttttctgattctttctaatcgatcagattgaagtgttaaactgtgtaactttccaactacgaattcaatctctgcgttaaccattccaaaggctagttaaggggctaac

SEQ ID NO: 281106 - DNA, 592 bp, Cannabis indica
tccaaattactagagcggtcattacattatgaatctgaggcagaacaatctcactgtcacggagtatgctaggcaatttgaccgtctggcaaagtttgcacaagagatcgtaccaaccgaggcccttcgggtcaaaaggttcttgaaggggatgaaccccatgattaaaaaagatgtgaaaatcatggtggggaccaacacagtttatgctgaggtgttagaaaaagctcttgaagctgagttgctcgaaaatgatataaagaaggagaatgctgctaagtgggaagcccgaagaaacaatggaggaaatcaagagaataagagaaaacacgagggaaatcacagtaatgatcgtgataaaaaggggaaagcagtggtccaaaataacaacaatggggtgaaaaggtcctatgtagaattcccaatttgccccacatgcaataggaaacatcttggggagtgtaagatgaagtcaggggtgtgctacaattgcgggcagccaggccatctgaagaaaaattgcccaaagggacaaaagaaggagaaccaagtcgctcctgctcgagtgtttgctctcaccagaggagaagcg

SEQ ID NO: 281107 - DNA, 907 bp, Cannabis indica
tctcgccgcggcgagatggaattttctgcttcgatctgttttagtaaaatgagcataactttctcatccaaactccaaatgagctgattcaagatgcgttggaaagataaaaaagagatctaaaacttttatgttttgactttttccaaaatatgatcagaacatagtcgaatttaggcttgaagtttcagctttattctctttcaaaattttctctattttatagatcactgttttccgaaatttgtccaatttatacattccaagtgtagaaacctgaaaccaaagaaaacaagcgtaattctattccaaaaataataataaagaagaaaaacaactataaaatgtgacccaaaacttaggctaaaaatagcctaacaaattcccccaaactgaatctttactcgcccccgagtaaagctaaaactcaactaaactaaaaaaaacaatgtaatagataactaaaccttccaatgattgaactaccactaccacctgcacaacttcaagcaatcaataaccagaatttcaactcgataactctaagaactaacttggatgtacaatttagaagtatttgacgttcatatcacaaccattctacacttcccgacattccactaacacatgatcaataagtttggatgacatacctctctccactaatgttgacaaatttttctttggaatcaataggtctttttcggttatcacaacgtggcttaggtacatgggtaggtgacaagtcatttaagctacgttataccataagcacaattaaccaagcaagcacccacacttatctatttttttcatcccaaagaagatagtaagagattgcatattttttcctatgtgcctacctcattgttcacaatttgattctcaagaagaaattatcacattt

SEQ ID NO: 281108 - DNA, 828 bp, Cannabis indica
cttcaaaggctgcggtccctggccctataaaccctccaccgccgcccgcacatgtggctactcctgccaccatgcctactgaattaccaccaccaccagcggttcttcctgctcctacaagtgaacccaacatcaccacaacatctggtcgaacggtcattcgcccaccccatctccaagactacatttgtgagtattctacctcacatcccatttcaaatttcatctcttatgacaaattttctcctaagtttcgtgctgccattttaagtgcttatttgctttctgaaccaacttcttattctcaagcttctaaatttcccgtttgggtaaaagctatggatacagaaactgttgcacttattgcaaacaaaacttggactgttgtctctcttcctgctggccatcatttcattggctgcaaatgggtatataaaataaaatataatgcccaaggtgaaattgaaagatttaaagctcgcttagtagctaaagggtactcccaacaatttgggatagattaccttgaaacttttgctcctgtagcaaagtttaataccctcaaagtcctccttgctcttgctgccattaataattggcaactataccaaatggacattaacaatgccttccttcatggtgatctcaatgaggaagtttatatggcacttccgcccggttacaaacatcaaggagaccttcctcccaatgctgtatgcaagttacataaaagcatctatggcctcaaacaagcctctcgacaatggtatgccaaacttagttctactttggtaagtcaaggattcaaacaatcctcttccgatcact

SEQ ID NO: 281109 - DNA, 244 bp, Cannabis indica
taaccaatctcaggattgagatcatttgatctaggatcaactaggtgatattgattgaatagatattacagtaaaattatcatatctagttcaagttcaatatcggtcccttccgatgcatactccatacatccaacccaagcttactttaaccaatgccctggaaaagacataacacttatccaaggtgcaagtaaactacattgtagattatcatatcagttaaacactgtatactgataaa

SEQ ID NO: 281110 - DNA, 522 bp, Cannabis indica
agacatcctacaaaattttaaaaattttgaaaaagtttaacacgccgaaaactacattcaaacagtgttgcacgcatgacttttttattttatatgcgtgtaaaatagactgtttgaacattgttttttatattgtaaattatttggaatttctcaaaattttataggttatcttaaatatttataacgtacatgaatatgaaaaaaaaaattagactaaattttttttctgaatgtcgaaacaagtcaagggtgtatcaataaatcccttttgagggggtgcattgtagaatcaccataaatgcattgtagaatcaccataaattatatataataagtataaataaaaattaaattaaaaaagttaaataaatacacatttacattactttaagtgtttgtatataagtgtttttttgttaaaattttttattttataatatgtgtttgtaatttttttactatcttttttataattttttaaagttatgtttgtataataattagtatattgaataataa

SEQ ID NO: 281111 - DNA, 848 bp, Cannabis indica
ctcttccttcagataaggaaaagtttgtggtttactgtgatgcctcgagacagggtctcggctgtgtgcttatgcaagctgaaaggtaatagcctatgcttctcggtagttaaaagaaaacgaacagaggtaccctactcacgatctagaactcgcagcagtagtatttgcactaaagatttggcggcattacctatatggcgagaaatgtgagatatacactgatcacaagagtctgaaatatttctttacccagaaagacctgaatatgagacagagacgttggctagagttggtgaaggactatgactgtgagatccttttatcaccctggtaaggccaacgtggttgctggcaccttaagtcgaaagggtcagagtcagttgagcactgtgaagcaaatctcccaacagttagcaaatgagatgactcgagctaagattgagttggttgtggggtaattggctaatattactctgcaatccactcttttagagcgaattaaagaagcacaaatgcaagattcggaatcggtaaaaaccagagctagggtttcgactaggaaggctagtgatttctcagtggatgaaacgggaatgttgagattcgagaatcgtgtgtgtgtgcccttggatgagagtatcaagaaagggctcatgaatgagtctcacacgactccttattcaattcatccagggtcaacgaagatgtatcaagacctaaaagccatgttctggtggccaggcatgaagatggcattgctgaatatgttgcaaagtgccttatgtgtcagcaagtgaaggctgagcatcagcgacctgcagggttgctgcagccactgaacatac

SEQ ID NO: 281112 - DNA, 428 bp, Cannabis indica
ttacttggcattaaaataataaaaatattaattggaaaaacctcattaagtggccgaccatgggttaatgggccccacttgagtattttgcaattttgacaattttcatttttactttctgaaaaatgccaattttccaattctaacaatttaaatgccaaaactaattatttaataactaaaataaattattatatgatattgccatttaatatatttattaattagacataataaagtcttccaattaataaataaaacctagaagctcttttcttcacaatttagcccttgcttagtgaaaattcataaactagacatagtctaattttagaattataactgaataactaaaatcaaatatttgagtcttacaagtagtatggtctcaactagaatggggaccatgggcctatataattgagctt

SEQ ID NO: 281113 - DNA, 559 bp, Cannabis indica
tgcttttcttatgtaagttaggctattaatattttggtatatttattatattgtatgttgtttactgcattctgccaatagtggtattttgtcgatttatgatatataatatgatattttgttaagttagaggtgagattcaatttatgcaagattatttaatttgcgcttttattatatatatctttcagttgtaattaatggtgtagaattgcaactgcgttttagattaatatcggtattagaataagatttgcataactacatttctaccttaccaagctttttatctgatcacaccctttcactcaccattttattatttttaattcattcacatttctatcattttctacttactaaactaatctttagtggtaatttacctccctgaggatacgacatatagcccgtttactaccgcgaccgcaatgtaactaattaggcgacatcaagaaccataccatctgatgtataaatagcctaaatcccaaggaaacaattcatgacaccaagatctttcagtgcaaatttgaagcttagagcagcaattaaagag

SEQ ID NO: 281114 - DNA, 828 bp, Cannabis indica
ggaaacacccaaccaaggcaccgcaaagacgaaaattgagaaaacgaaaggcctggggaaccctgccaaaaccggctagccggttttagaggctctgcaaaccggctagccggtttgcaccagtgttcccaaaacctttcattccttgctcaattctccaccaaatgcaatgaaaccttccagagtacctaataagggtatacacaatatattccagccagaaatcacagaacaaaccattgaaactcaacttgccattaatgatcaaagctttgaactcaaagcttaaacttgcataaaaccaacaacacccattaaaaccagctgctaggagttaaaatcaactcaaaagaaccctaaaattcgaaccctaaacctacctaaacctaacaaccactatatcacaaattcaccatttcaaactaactcaaaacttgaaaatacacatactcaagggttctagggtttaccttagtttgattctccttgaaatcttggtagaaatcacaaattcagtaagaaatcccctggttcctagctggttcgaagagagagaggtgaaggaaagagagcttctcttgaatttttggtattttcctattttcttcaaatgtgagaaatgcatttcctatgcattgattcagcccacaaagagggcagctgtcacaccctcacacagccacacaatcctcaaaaaggaaaagactaaaatgcccctaatgcaaaattctaggttattttcaacttaggggtaaaattgtcaaattccataaccccgctcaaacccgataatttattttctctaaaatatttcccactaagaaataa

SEQ ID NO: 281115 - DNA, 190 bp, Cannabis indica
aggaggaagttaagaacaagagggaaaaatggaagttttgattcgtatcaaagggtttaaatacccatatccctcattaattgggattacgacacgtggcaaccagaatgcctaaggtcgcccaatctaacggccaacgatggccacgcctacacaaaaaccgaagagtttcgtgacgtggcaccctaaa

SEQ ID NO: 281116 - DNA, 587 bp, Cannabis indica
ccctttcctgcacagtagagcacccatgagccaagcctagcaagacagtataaaacatatcaacaatatgctcatcatataatacaaacaacaatgtcatttagatttgtctgtgtgacacagacctgcatgttgcgctcacatgcctctttatgtttacgtggcgtaaacctacgtgttgctctcacacgtttatttacaataagggcttagaatggttattcttggttttaattaccgagtccaacctgattatgccttaatcgcataatctctaaatctcaatataatcatacacttagcatggcataacatttattcaactcatatcactagggtaataaccctaggctattaaccactcatattagggtaataaccctaatcctagttacaattactcacatatatcaatctcaatataagcgccaccacgcatactctacgtgctaactacaatcttacctgttgtcctgcaaaggcagagattccaaatccctgggtgctcctgaccaggtgccggtaatcctagtcacacaatccaggattttcacaaatacggttaacccctgatttcacattcataa

SEQ ID NO: 281117 - DNA, 504 bp, Cannabis indica
aaatggattggaatttatttgtaaaaatttatttatatgtttatgtatgtataatactcttaatttttttaagcaataaacttgtttgactgaagtggtaattggtacaagccactaagactagtttagtggtgagggaaggatgggaaaaagggagaggttataggttcctaacctaagacttttaaactattaattgattgtaatactattacgctatactaaaaaagaatatgaatcccgcatttgaaaatgttatatatatatatgaagtgcactcttaatgaatattactcatgaatgggtaaattttaattttctatctaattattttaattttaattttacattatatgggttgaggttgttccatcaactgaaaaataattaagaaaaaagttattcggcaaaaagaagataaaaaaaaaaatgagtttgacttaaatattttgtatctaaatatattttaaatatagtgtaaaaaatatttttagatattttttt

SEQ ID NO: 281118 - DNA, 615 bp, Cannabis indica
tacaatgtacattcattcaacaactcaacagattcattcctcttttatttatttatttataattctataatttttttttaaaaaaaaaaaaagaaaaatgttcccaaaatattcatttatgtaaattttttccataaagaaaaaaatcatatagaatattagaatttttttccataaattttttgaccgagttgactgggttaatccgcgacctgccaaccccatgacccgctaacatgaccctctcacgggctgggtccgagttcattcttttggaccgaaaacctacaaacacgaaacccgatcaacccactcgatatttagccccaactaaaaccaccaccatcatcactgtcaccttcactatgcaagtatctaccacagtcacaccatatccaccaccattacactaccactatccccaccaatatcaccaccatattaccattaccattagcacatatttcctctaataattttgttttgcacaaaaacaaatctaactctgaaaaatcaatacaacaataccaataccatatactatcgatctgctcctcaaagtcccaaatttgagagttgagatattcaattcgaacttgttacttagggttccac

SEQ ID NO: 281119 - DNA, 508 bp, Cannabis indica
atctttattagtaagtaaatttgattatattgaaatgagtttatttagggcataaaacccaacactgttgtcttaacacaactgaagaggaaaattccacttatgttcttagacaaaagtcacggtaccttgtcgtagtgggagggttcaaggaactcaccctgttatgacttggaagacaccggtgattaaaatccattgttagtttaaacaagtaatggattgtcagaataagaaactaagaagcaaagccaagggaactatggttaaaaccattcatatggagttaccaaaggttttctattacaaggacatgaaaggaaatttcattagtaagtctattcaatagactttaaaaaacttcatgttcctagtattataggtttgagcttatcgaaacctatagcttgtggtatacatgataatttgcttactctagtgcaagcaacttactttcgtaagatgctggagcatttttcaaatggcaatctatagaagcttctcgact

SEQ ID NO: 281120 - DNA, 672 bp, Cannabis indica
acccggttcggccccaggcgggtctggacgaaatccggccaaaaaacaccacgaaaacttcggcaaatcgaggggttttgatcgggaatcaatttctactcttaagatcggttcaattcggtttggaaaggactaaaaccgagcatattttactgattataatccgaaaaaaataaaaaaaaataaaaacaaactatcaacccgattctacaatgttatacaattcgaaaaattaaacgtgtagaaacattgtaaattagttggtaatgagatttgcaccatcaattttagtgtataaactatagaatcaaaaatcccaaattgaatttcataaagaagaaaaaaaaaagaaaaaagaaaaaaatacataaaccctaaaagtttaatctttaaattctcctaatttactcaatgattttatgcaagtaatatatcaaaagaaagagaatttaatgaggaataaaacccctaaacttttaagatcgaaaaataaaaaattcaacataaaataataacgaaattaatatgtaattggaaaaaaaaaaaataacatatacatattaattgttataaaaattataggttctaaatcatatacaattggcaatctgataccacatgttagaaaaattaataataaacccaagatctatttgtatataacatagaaca

SEQ ID NO: 281121 - DNA, 636 bp, Cannabis indica
cgctctaatcttgtcaactgcctcacttgttctctgaacaactttgggacccaagaacttcctttcacacacttcatcccagtgaatgggcgatttacactttcttccatataaaagttcataaggagccatcccgattgttgcctgatacttgttattataagagaactcgatcaggggaaggtattttacccatgatccttcaaagtcaagcacacatgcccgtagcatgtcctctaaaatctgaatggtcctctcgaattgcccatccgcatggggatgaaaagctgtgctgaactttaactgagttcccatagctcgatgcagactctcccagaatcttgatgtaaacttcggatccctatccaaaacaatggactttgggacaccatgcagatgaacaatttctctaacatataactcagcatactgatcaatggagaaattcgtccgaacaggtaaaaagtgagcagactttgtaaacctgtccactatgacccacacagagtcaaattgtccatggttctaggcatacctaccacaaaatccatggctatatcttcccatttccactctggtatattcagtggttgcagcaaccctgcaggtcgctggtgctcagctttcacttgctga

SEQ ID NO: 281122 - DNA, 340 bp, Cannabis indica
atatatacaatttttttaataatattatattattttattttattttttattgtttgtatatacgttttcttgtatggtatataattttttctttatctatagtatatcatttatttaagatgatatttattttatattttattatatatacatttttcggtatgtattcacattttaatagtggtatatataattttgttagcatgatatatattttttgagcattaatttagtgttgttataatttctttgtggtatataattttattactacggtatattaattttcagtaacacgatatatcaaatactgctgtatatatttaatgatttaatatat

SEQ ID NO: 281123 - DNA, 514 bp, Cannabis indica
aattaaaaattaaaagacataaaaatttaaaaaaaaactcaaaataaaaattaagtcactcctccccccaaactaaagtgacacattgtccccaatgtgacattaaagaaaaaggaaaggaaacttacctgggtgccacatcaataagcggttgacgcccataataagcgtcatgcaagacaacttgaaaattgttgttgtacttgccttcaagcttggcaagcgatgagtttgaatcaaagtcagtaccaacaacataagactttggatgatgagcttggggagaagcctttcgtagctcgcagaggatgtaatatggtgttgatgaaatatatggattcattggtggtttattagtcaatatcattgatgaagtcgaatcaatgatgtcatgttcttcctcatcctccaatgtcacagtatctactctttcatctaacaaaccttcttcttgttgctcactctccacgtggctattcataccctcacttgtgatttcatattcaatgagttc

SEQ ID NO: 281124 - DNA, 625 bp, Cannabis indica
agtcttagcaactaagttgcctacgtatccttttataggaatcaagtcaaacgtagttccgaaattttaattttttatgaggtgaatgacctctttttctttggaatgccatttaatttgttatggctttgaattttagtgcaccttttttaatttttaggtaaaattaccacttttgagatttttgtgaggttaagacctctttgaaatttggtgaggtgaatgacctctttaatattccaagattaattttagtgagctcatttggaattttgtgccattttgtatggatttagaaatttaccactttttggtgataaatttgagtttggagatctttttattatcttttataaactttagaattttaccacttttttttgtgatgaaattcagttttgcaatctttttattattttagaaataaaaagataatttgactgatatttaattatttattccaaaatttagggaataacaatttatcttttatcatatactatcttaaatttaaatttaaatggtctattaaaatttaagataatatctaagatatttactttataattcaattcatatttgaattaggtaatagatacatgatatatatgacctctgcgtgttt

SEQ ID NO: 281125 - DNA, 391 bp, Cannabis indica
tacacaaaattctacaaaaaattggcttttgtttcaatgaaaaatgatttttgaatcaaaagttatgaagaaaacaagtttggtgcacatgggtacaaggatgcgtgcagcctctgtggccgagaaacatgggcgggacaggggcaagctttggacacgcctcttgtctgaagcgattttgtccgagcgagcctcacttgtgcccatgcgcgcgcgcgtgtgcatcccgaaaccagatattttcattcaaattcaaaaaatcataactaattcataaaaaatccaaattaggttctgtaaaagcctaaatttattaattttttgtctactttccagaaaaaataattccagatcgaaataaaaaatatttcagtaacatatattgcgattt

SEQ ID NO: 281126 - DNA, 137 bp, Cannabis indica
agtgattttggagaagtgtaaaaacctatctgaagtctctaagtctactagagagagactgaatgttaaagttgcaggaaaggtacttattttccaacatttcttaactacaagtgttacttcctgattaacacaaa

SEQ ID NO: 281127 - DNA, 516 bp, Cannabis indica
aaattgattataaaataaataagtttaagaaaaaaataaataaaagatggagagattgtgttgtttggtaacacttttgttttttaattttttaatcataaaatgaaagtaaaatttttgtttttaaaaattttatttttgaaaaacaaaaatacgttctgtaaccacttttgttttttaattttaaaaacagaaaacaaaagtgtgttttgtaaagtttattttcactttcattttttgattttatttacatcaagtctaggtctagggtcggatttgggttaagatcagagaacgggttcagcgccaaggccgtgggaggatttgggtccgggtctgatcgaagtccaaaatattaattaagaaaaaaaagtatttaaaaaaatattgaaagtgattttcttttgtttttaaaattttgattctcaattaaaaaaatgaaaagtaaaaacagttttatagaacatgtttttgaaaaatattttcactttttcaattttaaaaatagaaaactga

SEQ ID NO: 281128 - DNA, 600 bp, Cannabis indica
tccttattctcttcccttacacacaagcatctcgttcatcaattttcttcttacacacaaccatcccgtctcatcaatttcttcttacacataaccatcccgtctcatcaattctcttcctacacacaaccatcccatcacctctgccaagaaccaggctgcctatttagcaagctcctataaaaaccaggctgctcatttagcaagctcctataaaaaccaggctgcttatttagcaagctcctataaaaatcaggctgcctatttagcgagctcctataaaaaccaggctgcttatttagcaagctcctataaaaaccaggctgcttatttagcaagctcctataaaaacaaggctgcttatttcataacctttataaaaaccaaaccgttcacactaccttccaacacatcagctcaccaaggtcaccacgtatgcccgagattgatcattttttaagaatatagacatcatttgctattgatccttgtaatatttcacattaataaagatgcacaactgactgtttgctaccgtagacgtaggcaaatacaatttgctgaactacgtaaatttgtgtcttatttttatttaaagca

SEQ ID NO: 281129 - DNA, 796 bp, Cannabis indica
ctattttgttgttttacggttgttttataaaaagataaaatttttataaaaattctgtatcatagtataattataaactattcttcaaaatttaatatttttatcaaaaaaccccccttataataacctcatgggtctaactttttcttagtataatcaaggcattttcttaaaaaaaaaaaaaaaaccttaaaataatctcttatattacaataacatcagtcttttaacattctagccttggggaaatgtataatatagttttatgtttattaaattcacgttgatttaacggatattatttgttatacataattaaaatatctataatacaaaaaaaaaaatgtttcaaattaccttaaaaaaaaaaaaatcgatttccttagaaagtttggattattttttttttcttaaaaaatataacaatagaaaaatatagaagtttttttaattaaatgatagccaatatctaatcattacatacacatactcctatattcctaaagtcattttttaaattaaataattccaactatactaagataggaaaaacaaaacaaaagaagataaagatttggatctataagttcaaagttgtaattttctttttatatattttcaccctaaaaaataattttttaataaaaatataatttaattttaaatattgtgccccaatatacaatataaaaaaaaatgaaaaaaatactttcaatagtttttttaagtctattctttaaaaatcaattatcaaaacttctactttatctattttaccttaaaattttttacactt

SEQ ID NO: 281130 - DNA, 487 bp, Cannabis indica
tcacactttttgaactttgcatacaacttgtgatccctaagtcgctacaataccattcgaagatgacgctcatgctcctcttctgactcagagtatacaaggatgtcatcgataaacactatgacgcagttatcgaggaaatccttgaataccctattcatgagatccataaaggtcgcaggagcattagtcaattcgaatgacattgccagaaactcatagtgcccatatctggttcggaacgtagtctttggtatatcttcttcccaaattctaagttgatgatagccgaattgcaggttaatctctaaaaatactatctttcccagaagctaatcgaacaaatcgtcaattttgggcaacagatacttgttcttgatggtcaacttgtttaattcccgatagtgaatacacatttttagggaaccatctttctttttcacaaacagaaccggagctcccagggcgatacattgggtcgggtaaa

SEQ ID NO: 281131 - DNA, 529 bp, Cannabis indica
ctctgcggggcatatgaagttccccagttagagtatgacaacacggtgttgccacttcgcaagatggacatcgcctttgtcaacaggctgaaagagccacacccctatggccagccaccacctgatgcaccgcaagggcgtaggcggcaacgtgagcctagtgttgaagaagaagaggagcaaccactacaattgcctgggcccatcgatcctacaacacaatacactcatgcacagctgagttatataattcagcagaacaaccacatgcaacaatacatggtgcagaggagtatctatgatgagggacaagttcagcaactcaactctcttatcaacagaatgaacattgggattgatgacccgaactatttggcacaacctcctcggttctatccctatgaccagccgccaccacccaaccctttctgaaagggtctcaggtaagtttcttctctctgcatattactgtatacattggggacaatgtaatatttagtttggggggagagacttaaaaattttaaat

SEQ ID NO: 281132 - DNA, 571 bp, Cannabis indica
tagatatagatagacaaaaaagaaaataaataaaaaaataaattaaaaaaattagtcaactataagaaaaaaaaaaagtaaaatgaatgaaagaaatgtgccacttaatctaacagtgacgatagaaagtgaatagcatctatatttgtttatatatgcggtacaagtaccgcttattgtgccatttaaataattaatggtatatttgttaattattttataattaagtatataaccaaaatctccctttttttttgtccaatccaacgaattaaaagggagaaaaggctaaaccaaatccgaggtggaaagcagtaatctgatcaaaaatcacaaaaatctttacctgcaagctaagagatcattatctctcccctccaatatataataaagttaaatgactttatatatatatatggggatgctcttaatgggtattacggtattttattcttgacaattggatcaaatatctaatggttgatatttatagtcattaattaaatatttataaattaatatttcctattttgttattctctatatttctaaaatacataaaactattaat

SEQ ID NO: 281133 - DNA, 631 bp, Cannabis indica
tttgcaactcgcttgtttatcatgaaagagaagagagagatgtttgtttcattggaagaacctgagttgatgcttacttggctcaagaatgagtatactctggaatacttataatgcttaaatcgctctgaatagtagtatttattttctaaactttgtgttatgactttaatatatgtttgttatgttatttcttcaattgtatttgctctcaagacttggtgttatcactatttaaaataaatatgctttattattttttttacttgtatttgctatgaagactctatggctatttgatatctatttcatatatatatatatttaatatttacaggtttattttaaattaaaaataatggcagacaccgatgacgagattgagttacaatcggtgtatgtagctacataccttgttcaacattattatacaacatacattgaaaagactccttgtatgaattcttctcaaactggtcatatgtggttgatggaaatattacaaggaaatgaaagtagatgttatagaatgtttaggatggagaaatatgtttttattaaattatgcaatgaatttgtaacgccccgatattttgccttattttacaaaaatactattttcatgcataat

SEQ ID NO: 281134 - DNA, 513 bp, Cannabis indica
tggtgggggaggcaccgtcgattcagtttgagggattgattctttcctttgcccttgagccttttacccacgcctctttgatagtcagatctttcgcctagaactgtttccaaaacgtcaaactgataaccagtatcagattcagtaccagacgtatcgctctgggattgtcgttcaagtcttttcctatcaagctccttgatcagttcctcctatttatataaaaattattagaatatataattaatataaaatataaattttaataataaatcattttattcacttacataatcttttgcagctaattcattaacgaaagtgccagacgactttttcacatgaatctccttccatgcttcaactacatgctctccaggaggacccccctatacgaacatagacaattaagttactttattataagggaaaaacattattaacaattaaagaattaatacataccattccgtggcgtatggaagctaacgattttgtgccttgcgttgttgg

SEQ ID NO: 281135 - DNA, 651 bp, Cannabis indica
tagaacgctctatatgtaccaagatatagatacgttatgattatccattgttacaatcctaatagttaaagatcctctatagatgatctacatcgaataaggacaaatttaccgagacctcttactattgacctttaaggaattcctttaatgactttatcttttttggaatagttgaaactattccttagataaataaaatctacatctaggagtcaaatgacttcctttagatatccattaaaaaaatgctccagcatcttactaaagtaagttgcttgcaccagagtaagtattaggtataccataagccacatgtttagataatctcaaacctatgatactagaattgggaagttttattaagttcattgaatagacttattatcgaaatttctcttcttgtccttgtaatagaaaactttttgttactccatatgaatggtttttaccatagttctcttggttttgcttcttaattccttattctgactatccattacttgtttaaactaacaatgtatttttatcacaagtgtctcccaagtcatcatagggtgagtttcttgaaaccctcccactacgacaaggtaccatgactttttatctaggaacattaatggtattgtcctcattggttgtgtcaagaca

SEQ ID NO: 281136 - DNA, 579 bp, Cannabis indica
tcttgatttcttgacagcatcagttccctcgttcttaatctttagcttctcccaagcttccttagcaatttcacaattggctataaccttcaactggttagtggagacagcgttgaacaaggcatgaagagcctttgagttgaaatttgctctttccatttcaacagtggtccattgactcattggtttgggtatgacgatttcattctccatcatcgttggtttccaccacccttcttctatggacatccagactctttcatcaacagctctcaagaaagcacgcatcttggttttccagtatggataattggctccttccagcataggaggtctcgaggtggagcctccttctctgaacatttccatcctgcacacagaagtgataaacagacacacaaatgttctgtagttctttgagagagaactcagaggaagttagttgcaacagaatcgatcgtcaaggttgattcaagaatcaacaatcaagaatcatacagcagtaggatctaacacaaatttttataaaatttcaagctctgataccaattgaaagtgcaactagtagattttaatgat

SEQ ID NO: 281137 - DNA, 570 bp, Cannabis indica
tcctttagtggacttagaaatggaaaataaatgttaattgatgttatgttggctgaaataaagagttttattttgcatgttctctctcatttattcaaaatttcaaaacttagaaaaattagaaattctcaaagctcttttcctctctctctcactctcggctggtgtggtgtgctagggctgggattccttttgatttttcaagcactttttcattcaatctaagtgttcttcaagtgcttagtaagaccctcgtatcttgctcttttagtttcttgaattttattgaaagaaaatggtttgcatgcttagtttgattcttagttgctgctgtgttttgatgttgttttctgtagcttaatcttgattatttgagtaggttagagctgttatgatgcatgattgttgctttgattcaagcttggaacttttactcaaaactatggttttcaaagagaaattgttgaaatctgttggtgttgttttgttgatgtttgttgtagtttttcagaggatataatatgcatgtttaagtaggtttgaactgatttggatgcatgttagttagat

SEQ ID NO: 281138 - DNA, 841 bp, Cannabis indica
ttgctaaacagaatgagatcatctgcaaagcacaagctaatcaactggaggcttttgcacatagggtggaatttgaatgtcttctccgaagcttcttttagtaatctccttgaaagatattccattattagcacaaataagagaggagacatcggatccccttgtcgaagcccttttctcccttgaaagttaccatgcaatcttccattcaacataatcgaatatgaagttccccttagacacttcatgatccaatcaacaaacttggaaggaaaatttaagcctacaagtaagtcctcaacaaagccccaatccacagtatcataggctttactgagatctattttaatggcacaccttggcgaaacattcttcctcccatagttcttgatcaaatcctggaatatcaaaatattatgagcaatggatctcttctttataaaagcaccctgattttgatgaaccagccacggtagaacttcagctagtcttttgctcatgagcttagtaatgcatttgtataaagttgagcaacaagctatagggcgatagtctatggctctcataggattctccaccttaggaatgagagaaattaccgtttcattgaactgcttaggaatcttacccgtattaaagaaatctttgatcgctaggcacacttcagccccaatttctttccacatgaccttgaaaaattcagagttatacccgtccggccctggactcttcgaactagggatactgaacaaagcttccttaatctccttattagaaaaagattggactaatctcaactgttgggacaacgacagccaattgccaagctccatggactctt

SEQ ID NO: 281139 - DNA, 504 bp, Cannabis indica
tactttggtggagtcgtcgtcgcacactggtatttcttcgacgtcctccattggttccacgaccctttcggatcctatgcgaggatccaactcatcctcttcagccttctctatctcaggggactcccggaccataagtacgggtaggtgggtggcaacattgtaacattgcctggcttccccttgatttcccctcacagttccgactccggcttcctgggtagggaattttaggcacaagtgtcggattgaagtgattgcaccaaagtccactagggccggccggccgaggatcgcgttgtaggctgtcggacagtctaccaccacgaaggtgcaatatttaaatgtgctctggggggtatccgggcacagagtaaccgggagccttacttttcccatcgggataagcgtcgtcccgttaaaccccgtgagctgcgacccactaggcgagaggtcccggtcggtcaaccctatcgcagtgaaggcttctttgaagagcaggtt

SEQ ID NO: 281140 - DNA, 605 bp, Cannabis indica
tgtccctgattcttcttggtcatctttcggtcacttcctcttcctctgaatcaccaagggttgatcaacaacaccaggatatgcataagcggatagctctacaaacttcatgtaaaattcattcacagtcatatccctttgtcttagaccatcaaatactccaataagagccctcctgtgagatggactaaaatattgttccctgaaaacttcctcaaattctcgccaagtcatcccatcagtttccattgtcctggacaaggtctcccaccaatctgctgcaccaccctctaacttggacacagcaaaagtaacttgatattcctcaggtgttcctattgtgttgaaatttttctttatctgcctcaaccacctttcaactaccatgggatcttgtccaccctcaaactcaggcacttggatccgatgaaagatctaaaaaatgatgactttgtcgagcggcaggatccatttgttgagcggcaggatccatttgtcgagaagggcgttcatagggaattcagcttgtggaggttggacattagcttgaggggcgtcttctccaaccgttctccttgtcttctttccttttggaggcattttct

SEQ ID NO: 281141 - DNA, 485 bp, Cannabis indica
atcctagagaggatgtaggcgtctggagggatcgagatggtctgaatgttggaacaagacgtcgttgagccagttagtcttttaaagaggatcagtaggctgagatggagttaagacttggttgcttctattcatgggaatactggacatcctaaggaggagacctggatggttgcttcaagtcaagttcagggatgctagaaagacaactacaacatgcaactgtagagggacgcaacaaaatgtttgaaactcgttggcataggacaaggttgaggggatagtccatgttgtatgcttggtacactaggccaagtttgcctgagaaacattgtaagccgcaggaggcgcttttgttgaaaaggaagcttgctggcaggagtgtggaagtagtgcagggaccgtcagattcttgttagtcacgacaaaggtcgagagttgataaccgagatggttcagatggggacagacatggaatgcttcag

SEQ ID NO: 281142 - DNA, 553 bp, Cannabis indica
caacaaaaagtagctaggtatttcaacaaacaagtgaaagctcgaaaattctttgtgggagatatggtcctaagaagggtattcctaaacaccaaagacagcatgtcaggcgtacaaggacccagctgggaaggaccataccaggtggtcaaagttctcaactccagagcatacaaactgggtaagtatgacgaaaaaatgcaactcattctagtaccacgatattggaatggagaacatttaaggaaatactaccaatagagtactcaggtcgggtagacaacttcaaagtactcaggtcgaatagaacatttcaaagtactcaggtcgggtagaccacttcaaagtactcaggtcgaatagaccatttcaaagtactcaggtcgggtagaccacttcaaagtactcaggtcgaatagaccatttcaaagtactcaggtcgggtagaccacttcaaagtactcaagtcgaatggaccatttcaaagtactaaggtcgggtagaccacattaaagtactattgaacattcgcttctaagggaatggcctcttg

SEQ ID NO: 281143 - DNA, 594 bp, Cannabis indica
atatatgggtgccaggctatggcacgggcttgcctgattaggcaatacaataccggattgtcctatttaagcatcgacttgccagattagacaacgtgatgttatgaagatggttactttatgaggtaacatatatataatttatattattaaatgaaaataaattctattattagtataatggtttcgtattaccaaatatctgtatactaatgtttattcgtagtagatgccagtagtaatttggatttcatcttatgaacaatgtgtgatggtttgattcttattgtgtagaaatgacaattttcgactaataagctatatgattattattattattacttttcttgttgagtccttgtgacttacgggtgctatgtggtgaaggtaaaggcaaataaaagctagatcaaccatggggtgacagtcttctccagcaatgtacatattgacctcaccggcctgcgcgccgagttgccaggagttgttttgggctggctgtatctattttgtactttgattttgtgtttaaatggttgtcatatatatttctttagcaaaactttttataacagggatccccggaacacactt

SEQ ID NO: 281144 - DNA, 669 bp, Cannabis indica
agcaaggctgatttttgtaactggtcgttagacgacctttattttgtgtatcagttaaacagttaaactttttgtaaataattttataatcgggatcccgagtcttttgtaatattattttataagtttaattaaaaagcaaaattttaattaatcacgtttttccataaacctcgttgattagcaacgagctgcacagtatgtttaaaaaatcacgtaatacgcctatgttagttagggtgttacagtatctcacttgtagttgctaccatatacactcaaaaccgatgtcatcacaatatttcacttgtaatcactactatattgaatgtcgttgtcatcaccgtattaacaattgagaacaaaataataaaataaaaatttaaaaacaaagatgaccatgtaagctatgagatgatagttagatcttatggcatatagtatatatatacacataaatatacttttaacttaatacttaaaattgatgctttttttttattattttttggacataataatatatttaggacaggtctacagtaagcaccttacttttgtctctatggtaggcatttttttaatagccataaatatttaatctaagtgtaataaattgatgagtgtatatagatagttaatactaagaatgtattagattattcctaa

SEQ ID NO: 281145 - DNA, 950 bp, Cannabis indica
ctttcggattccagctggcaggtacaaatgtttactgagtttcaatcttttgccaaacgctataagaaggatcaaaagcgtcagcttgcctttgaggcctcaatgtatcaaatggtttgctctatcaagtccactcttttgcaccattttcctggggattctctgcctgacatctctctgcctgagtttcatcgtgattcgtttggcgcatcatcagacacatctgggaataatgcacatatgcagggggagccttcagcctttgatcctgtcactagttcagcacaacctgatctagatcctccagctgacactgcaacaccctttgtgtcgacaggaccaccttcccagggggagtctggcacagcacaggaacccacagatcatattcaatgaagggggagatatatgtaattcgtttcgcttttgtagtggctttgtttatattcctaaagacttttatatctggtttattaatattttttggtctttagttttgtgtgttagtcattgaacataacctgtcaagggggagaatgttagtgttattattttgtgacagtgtttgttctgttcaatgtctagtcgtatctggatttttagtctgttatatctgcactaacgtttgtttacgagagtctcatttaagtgttagttagtgccagctggacttattttgtggatatatatatagtcagtttctgttagtaaagtggttatccattaaatcgttcagacagttatttcggttgtttttggagagatagtcgtatcttgtttcttgttgttgtgattacaggttagatcttggagcttgagagtgttcatcaatggcggaatgatctgaatctggaattgttgagttcaaactgaagggatttcagtgtcatcttcatcatcagatctgaagggatttcagattgaagacatgttgaagaggagctcaattg

SEQ ID NO: 281146 - DNA, 677 bp, Cannabis indica
aaaactcccattttatttgtttttttattataaattttgagataattatatataactattatatatagactaaattaaattaatgcagtattcactttgaaaatatactatcacgtatacataaaatatacacaataattatccaattaatatttaacgataatattaaattaacactttaaatttaaaaaaaaaaaaaataataaacacacttaagaaaattttgccaaaataaaattaaaacataacaaaattttgccaccaattaccttttagaataaaataagtaacataaagtaatgttaggtatcataataccccatacaaaattacaaatgctcaacatatcttctatgaagtagcaaaaatcattgataggattctacaatataaattcaaaccaaactaactatgcctaatggttgattttgtacatgactattttataccaattgtcactaaaaaataatattatactaaataatttctttcaaaccaacatacaaggctaatcctaatcctaatcctaatcctaatcctaatcctaatcctaatcctaatcctaatcaaccactaatctagtgccatataatcgataatgtcgacttccccatttatcagatttatccaaataataagatttcaggcaacattgcaaccatggtggatttctagca

SEQ ID NO: 281147 - DNA, 476 bp, Cannabis indica
atgcacaatggaaaaattcaaatcatcttagtctcattgctatgaaagttcaattccataacattcatttaatggtttgccaaacacctcaaatgccaaagagcttttcaatgctgtagaaaaactatatggcactggtgaaaacgctgaagctggacatcttatggatgaaatgacaaccattaagtatgatgaatcaaaaggagtgcgagattttattctgaaattattaatgtttagtccaagttgaaagatcataatattcctcttcccaacttttacaccattcttcaagttcttcatgaacttcctacttcttttagctttaccaagacaacctaaacacttatagtaaaatatggtgtgttagtaaccttatctctcagtatatagttaagaaaagcaagctgtaaaaagagaagaatacatcttctcactatgtttctcaactcaagcccaacaaaggataaagaaaa

SEQ ID NO: 281148 - DNA, 540 bp, Cannabis indica
tattgatatataaagaatatataactatagatgtcctgacataaaataaaatataatggagttgtgaatataaaggagtaaactcaacctcgtaactctcaaaaagaaaatttggatgtctatacaaattaatatatatacaatagccatacattgggacacataatggaatggtggcagtttatagatgtttaaaaaaaaaaagaaaccaaaacaatgtatatacactcatatttattaccagccgaagcctatgtgtcagtatgtatgtttatgtatttcataaatacatgtatatcatgaagtgaagtaataaaagatagagtgacttactgtgtacgccgaattgtatatgcagaatggtttcacaattatgaactgctaacagcgattgaggatgatatatcaataagtttacaagtgtttcaatcgtaaaataaacagtcaagaggctatatatatatcatgtgtccattatataattcaaataggaattgaattataataaatatcttatatactatctttaattttaattga

SEQ ID NO: 281149 - DNA, 925 bp, Cannabis indica
gttcgggttcgggtcctgagtccaggtttggtttgggatccagagccggatcccaatctcgggtcccagtctggttccatttctggtgccgggtcacgagctaggtcctaggttcaagatcgcatctgggtcgggtactaggtcccggtcctagttttgtttcccaggtccctatccttattctgggtctaggtcccggttattgtgtgggtttgggtcctggtctaggttcgggttcaaatcctagtctcggttcatgtcctttctccatcaattcttcaatttgcctttgcaattcctttgtttcatcaggattgcttctgtaggctggtcggtttgggatggaagcacctggaacaaaatcaatttgatgttctattcctctaataggtggtaacccatgtggtacctgctcaggaaatacatcatcgaattcctgcaaaagagacacaatggtacttggcagcgaagaatcaagttggttagcatttaaaagagcctccttatacactagtaaaatcatgggctgttttgtgcacaatgctctcttaatctcacttttgtttgcacaaaagtgttgttttctctcacttgattccacacttttctctctttttctctcaatctgcttcctctcactcagtcatcttccacactctcttttgctcactcaagttccttttgtcactcaaattttgccaacctcgcttggtatcttcaatacacgttgtttttggtgtcaaaggtcgctagagtgatttgcccgctgacggaaagtaaatgagtacttgttggtgaagccatcatgttgtactcgtcgatcaaattgccaaggccttcctagaaggaggtgtccagcttgcactggaacgacgtcacacagcacctcatcttcatacttgcctatgcgaaatgaaacaagtac

SEQ ID NO: 281150 - DNA, 899 bp, Cannabis indica
tctcttttctgatgtggaaacagatagattgctcaggtactacgggcgcacaacaaggctattgcatggacactgggtgatgtcaagggaatcagtccctcaactgtgatgcatcgaattctaatggaagaaaatgctaaaccaacaattgatgctcaacgcagactcaatccacctatgaaggaagttgtcagaaaggaagtggtcaagtggttagatgctggagtggcttacccaatctcagatagtaaatgggttagtccggtacaagtagttccaaagaaaggggggatgacagtaatcaagaatgagaagaatgagttgattcccacaagaacagtcactggttggaggatttgtattgactatagaaaactcaacaaagcaacccgcaaagatcactttcccttgcccttcattgatcagatgttagacagattagcagggcaagagtattactgttttcttgatggctactctggataccaccaaatagccatagcaccggaggatcaggaaaagactactttcacatgtccttatggtacttttgcttttagaagaatgccattcgggttatgcaacgctcctgctacatttcaaaggtgtatgatggctatcttttcggacttaattgaatcttgcattgagatttttatggatgatttctcagtctttggttcttcattcgatcattgcctagagaatctggagaaggtgctaatcagatgcgaaaagtcaaacttggttctgaattgggagaagtgccactttatggtgaaagaagggatagttctgggacacaaaatttcaaaagcagggatcgaggtggacaaggctaaagtgtcaacaatagagaatttgccacccccagtttctgtgaaaggagtaaggagttt

SEQ ID NO: 281151 - DNA, 615 bp, Cannabis indica
attggatttaatcggcgagttacccaaaggaaaaggcggagtcaaatatgctgtagtcgcagttgattacttcacgaagtgggccgaagccaaagcactcgcaaccatcacagcaacgaaattgcgcgagtttgtctatacctccatcatttgtcgttttggcattccgcataaactcatttcagacaatggaaaacagtttgactgtaaagagatgcgacagctatgcgacgatttggggattaaaaaggctttttccgcagttgcttacccgcagagtaacggacaaactgaagccattaataaaataatcaaacacaccataaaagggaaactagaagatcgcaaaggagcttggccagacgagttatcgcaagtcctatggtcttataatacgacccctcgatctacaactggcgaaacacccttctcactttcttacgggtgcgaggccatgttgccagttgaagttggggcaggttccctacgcagggatattttcaacatctcgcagaacaacgagaatcagctattctgccttgatcttttggaggaaaagcgtgacaaagcgcacctaaaaaatgcggcttaccaacagcgaactgcaagatactt

SEQ ID NO: 281152 - DNA, 630 bp, Cannabis indica
ttcacaattttaagcactgagcgttcaggggcctaaggcgcatgcctagctcgcttacgctcaaggtcgaccataccgatacttagactaataatgatatcgacacgtagaaatatctttagtatttctcctataatttttaagaaatattaagtgttacctataaaaagtatttggcattacttagcaccaaattattatatatttaaatggcaaattattttgggtttaacaagtaagtcaaccgtattttagtccttggatttaggaagaaaatttatttttgttatccaatgttgactaatgcctagcgattggttaggaatattttatataagttatgattagtgttgtaaatacggactgaactttctgatacggtacgagtatgattaggtacgaaaaataatacaaatttgagcacgacacaacacgatattaataattagcacgatacgaaaaatatatctttaagcacgatgcgacacgagaaacaggaaaagtataaatagactagaccgaaaaacacgacacgcgacaaagttgaaaaacacaatatcacatattaaaaaactatataatttaatattttttttttgattgaatcagcaaatttgtattgctctaaac

SEQ ID NO: 281153 - DNA, 816 bp, Cannabis indica
accaaatgacactaaagtaccaaccctgtactcgtgtggtagagccataactgacttcccgggaattactaagtgttgtaccacatgcacgacgtacccctggtactcgtgttggtaacaccgtaaccacactaatatacaacactatactaacactctataagtcacattcatactagtgctagtagtgcaaacatccaaaacaagcatacattcatatatatacattcttatgctatcttacctcgttccgtgctcaagtgtaccggtcagcctgagtggaaacgctgctcgacgctttacagggccctaaaccataatattcagaattcgatgagagacacgctaaaacacttatcggggatttaaaattgaaactaataataaccctatcgataaataggatgctaataccctagattacgcaaaaatgggaaaatctaaggctcgggaaaaagccccaaccggcagaccggtttccaaccggaagtccggttcctggcaccaaccggtcgaccggttgcaacaggcccccaggaaccggaattccggttctgagctgggaacccaaaaatctctccccttagttcaattcaaacccaaatctttccaaaacttccagaatacctgtatgcactataataaaccaatttcaagccatagaactcaacaattcacacaaaatctcaatccaccattagagagctaagtttgagttcataaactcaaactttgcccaaacctcaattcaacccataatttcagtttaaattagctcacacaacatcaaataatctccagaataccaaatcaaac

SEQ ID NO: 281154 - DNA, 413 bp, Cannabis indica
gaatgaattaatccctactagaacggttactggttggaggatctgcatagactacaaaaagctcaacaaggcaacccggtaggaccatttttgtaaagaccgcatatgattaataccttgaattatcagataattaaggtttatgtatgagattaaattagtatttatgaaatgcatattttggaaatatatttaatatcatataggttattatgctattttatgtaaattactcaatttctgtgattgtgttcggaagccgtggaaagcgacgttgggcctttagaaaattatatcttatgtaacttagaatattatcggggtattattgttggctataagaggcgttagaattttcgggatttagtatttgaccattttgcccttggggggttataattattttatttagg

SEQ ID NO: 281155 - DNA, 497 bp, Cannabis indica
aagacaattttttattcaatttattcaactctctattttcagaagtaacctgaatccatttttcatacatgactttgtatgattcagcaagagactcttcacagatttcagactcatctgaatctgattcctcttgtttagtggtattattcaaacataccaatctagctttcacctgtgaatcacacaacacattagtcataacagaagttagggcaacattttcagaattatcttcatcactttcggtttcatcatcactccaagtgacattgaaacttttcttattctttttcaaagtgtttgcacactcagattgaatatgcccaaaaccttcacattccctgcactgaattccctttttgttagaaacagatggtttaataagagtattaccctttgaaaatttcgaaatattctttttatttcccatctttttcatatatttctgaaaattctttgttaataaagcaatctcatcatcacattcactatca

SEQ ID NO: 281156 - DNA, 150 bp, Cannabis indica
agtatctattcaattcaatatcacctagttgatggataattaatagcgtatctatatcgtggaacatatagagcattctatataactgagagtgcaattccaagttctatgcgtcgatgcaacaaggaattaagaagtcagtgaatttac

SEQ ID NO: 281157 - DNA, 316 bp, Cannabis indica
tgttaatcaacatacttgtgaatagatctaagatcatggtaaaataatttccaacaaaatcatctatagaggatctttgattattgagattagaacgatggttaaatgttgatagcgtatctatatcgtggaacatatagagcgttctatatgactgagagtgcaattccaagttctatgagtggatgcaataagaaattaataagttagggaatttacttggtaaattctagttcggcttattggaagctcggttgtataggcccatggtccccatactagttgagaccatactgcttgtaagactcagataatt

SEQ ID NO: 281158 - DNA, 349 bp, Cannabis indica
gagaaaaagtatcacaatagtccactccataggtttgagcataacccttggcaacaagacgggcctttaagcgagcaactgtgccgtctggattgaatttaaccgtgaacacccatttacacccgatggcctgttttccggaaggtaaatcaaccaagacccaagtaccattcgcaaccaaagcattcatctcttctatcattgcagcaagccaaccaggatgagacatcgcttctcgaacagttttaggaatagtgatagaatcaagagaagcaataaaagaacaagaagaagatgagagatgattataagacacaaaagaagtaataggaaaagtacattggcgttt

SEQ ID NO: 281159 - DNA, 646 bp, Cannabis indica
aattcctctggaaacacatccaggaattccttaaccactttaacttcttcaggtccaagtaacacaggtttactggaatccactaccactgccagaaatccaacacatccatctcgtaataaatccctagctttcaacgctgagattcttgggacacgagaaccttggaccgaaccaacaaaaacaaaaggttcctcattttccggttcaaaagtcaccattttccgtttacaatcaatactagcagagtatttggacaaaaagtccataccaagtataatatcgaattcggccaatggtaactccacgagatcagcactcaattctctatcttcaattctaattattactgacctaatccactttcttgaaataattaattctccattaggcaacagggttccaaaccccgtctcgagaatatcactaggtctatcaaactgatcaagaagtcttgatgacacataagaccgagtagcacccgaatcaaataaaacagtataagcaaaaccattgattagaagctgacctgtaactactgaaggactggcagcagcatcagcctgagttatagcaaagacacgagcaggtgcaggcacaggtttgacctcaggcttcggttcctctttcttcaactgaggacagt

SEQ ID NO: 281160 - DNA, 534 bp, Cannabis indica
tattgctcagatcattaccaatgacatatcaagagttaaagcagaaatcaagtatggaagggatgtgatctcgttggagggtggttcatgcaacattaaaatcaaaagactttaaatcgcaactcgagaaggagactagaaaagatgaagcctatcttgcaagaggaagaagtccaaagagaggatcatcaaggaacagccagtgaccatcaagatcgaagtcaaagatcaaagacaatcgacaatattatcaatgtggaaagattggccacattaaaagattctgcagtcaattaaagacgcaatctggtttcagatccaactatgatgacaaaagatgcaacagaaaccagaaccagtattcaaaatctaatggtcatggaaatcaaagaaaagactatgcagccatggctgagagcaatggaaatggaagtttagatggggaattattttttattttagaaaataataacagtaaagagtggatcattgatttaggatgcacttatcatatgtgtcccaacttagaatctt

SEQ ID NO: 281161 - DNA, 529 bp, Cannabis indica
gttgtttagagttgtggaattttctattcaaaaacttaagtttcaatgagaaattttcaaaattggtggctgtagttgttgcatgagttagagattgttttcggcagctttgttatgcatgaatatgtgattttaatcaaggtttgatgcttgtaggtgagctttagccaagtttgagtttgaaactcaagcttggagctcacatggcatctttagtttgtgttctgggctgtttttgtgctttggatttgttgtttagggtatttagaacaggcctggaagttttggtatggtttggaattgatttgagcaaagtatgaatttttgaatgtttcttgcgagaaactggaattccggttgtgcatccggaatttcggatggggttcaggaatttccagaactggaattccggttgtgcaaccggtttgccggttgggaaattttcaggaaccctagatttcctcatttttatgttatttgggttattgccatgctttttatcgataggaaaacttttagttcctagttt

SEQ ID NO: 281162 - DNA, 760 bp, Cannabis indica
atattggatatcacccccacactttctcacatttcactatcaagataatatcttgattttataatatagatgaccactttgtctttataatttctctttaatttccttcttgaaattattttaactaaaatttgacaccaaaatatgtcaaaatttctcatatgcacatagccaaaattgatttagaatttgaattccaaatcaaataaactaatcaacaatgtcttatcacattttgtttaagtttgtggctcacccccacatttctattataaagtgtatataaaatatcactttttgtgtattttcctcttgaaatgactctttaaggtcactttaaaaaataccatttgacatttttaattttctcaacaaaacttaaaatatcaaactcacacatcaccacttaaaaaataatgtgattatttttacccataattttaaggttatctcctcattgagattaacccaaatattacaccaaagttaacaaaattctcatcaattttgttcaccactttggttatttaagattcaaaattgcttctccaattttgttatattttcacaatttttgaatccactatgattcactttgatttgagtctaaaattgctcttccaattatgactcattttacaagtttagatccactttgatctatttattctttggcaagataatcccaaaaaagagtaactctcacaattcactttctcatctcataaaatgagataaaaaccactaatagaaaattaat

SEQ ID NO: 281163 - DNA, 797 bp, Cannabis indica
atttctgaaataaaatattttcatgttcggcgatcttagagacttgattggaggccaaaaatgtcacaacaattttagttagaaatattgatgggattattgggataagttgattttagaaataccagggtattttaggatactcgaagttggccaaataccatagaaataaagatttcgttagtagctaaaaaaataataagataactatcaataataaaatttttattaatattattttattatattatatcatattatattattattaatatttttttttattattatattatatatataagaaaaaaaacttatcgatttttatctatattatatattttaaaacatatcagtaactggagaacgaatgaacgaacgaaatccttgttctctcctttcgataaaactttctcctcctatattcattttcttcaattttcaacccaaaacctagcgatctaagctctgatagttgcgagatggcaaatccttgaagagggaaagcttaaggtatggtttaattacgttttaagctaaaaacgattgattttctatagggattttgtgaattagaatagttatggcgattctgacttcgtagaatcattttttggtacttatgggactaatatcgatgtttacttgttgaattttaggtgattttcagttagaaatcaagttttgaacttttcaaagcttaatccaaacgttaatggcatttttaactcaagggtctcgattttatttattgttatgcaaggatggtaatatttatggtatatatgcgccttgtg

SEQ ID NO: 281164 - DNA, 513 bp, Cannabis indica
gattaaccaaagtagaatttaatctaatttttgtaatatcaatttttaaacaattccccggcaacggcgccaaaaacttgttacgaaaaatatgaacaatacgcaagtgtacgtaatcaagtagtaaactcacacaggtgaggtcgaaccacagggaattgaactgaataccactaaactagatttatgattctatttggcagataaaaataattttaataaagtttgaaataaagataatcaagaaaattaaagaaagcagtaaagttgtttaatcaaggatgagaaattagggaaaagaatcatgttgatttaattacccaattgttaatgctaattactactctctttctcaatgtgaatgacagattataaaattaacctaactcttttcagatcttttaggccctaaattacatgttatctaatcatctctgaattagactaacatataatcagcattacgcaataatctaattgtcactaaggctatgtaaatactttcgtttcaca

SEQ ID NO: 281165 - DNA, 620 bp, Cannabis indica
gaggtgtacatagagttgcaccgggataccaacagatatatgttaggcaaatctatagccatcagattagcatatcaaggaattggtgaggtgtacatagagttgcaccgatatgcatacaaatatatgctaggctatcagatagtatgagttatctgctgccacatcagtacgactagagtactgagtataggctggattcgcagttagttatacttttttgagaacgttcctgactcagctagggttatggttgggtgtatgggtgcttgattataatctgaattattgctatgatattatttatgcttttcttactgagtctgttgactcacagttgttatttccatgtgtaggtaagggcaaggctaaagctgagcagccgtgagagcgagcagatgaagattgtacatgtcggggcagttaggcctggagcgtactatctttgggacatcaagtcttattttatatagtcgctaggcgacaaacttttgtatatgcacagttaaacttttgtaaacgggatcccagatttttatatgtatgatattttatgttttaattaaataagcaaaatttaattaatcacgattttcaataaacttgttgattagcaacga

SEQ ID NO: 281166 - DNA, 893 bp, Cannabis indica
ggatgtgccactgtggagaaacttttgatgataccatggttcggacagaaatcagtgaaggattgactgtcgaactgcttgttgttgtctgagactattttgtatggtagtctgaatcggcgtatgatgttcttaagaataaagtcttgaactttctttgatgtaatggttgcgagtggtttgacttcagtccacttattaaagtagtcaactggtaccactgcgtactgcactccacctttacctttaggtaattgtctgatcaggttaattccccaaatgggaaagggccacgaactttgcatctgtgttagctcgttgggcggagctcttggtatctttgaaaatctctggcatttgtcgcacttcttaacataggctctcaaatcttcaatcatcgttggctagaagtaaccttgccttagaattttcttggataagctctgtccagcggcgtgatttccatagaattagtcgtgaacttcagataggagtcgtgcagcttcatcttgagtgacacatctgagtaatgtcatcgagaatcctcttctgtacatgactccctctactatgacatactgtgctgcaatttttctcattttttgagcttcatttcgggtatctgggagttccccagagttgaggtaggctgctattggcatcatcaagtttggggatgtatcaatcatttcaatttcttccgtgccagtgatgctaggctcttcgaggaactggataggaaccaagttcgccttgtcacttacattgctgcttgccaatcgagctaatgcgtctgcagttgtattttcttctcttagaatttgtctgagaccgtagcttttgaattgtgcgagcaaatcatgtatttttctcagatatgccatcatcttttc

SEQ ID NO: 281167 - DNA, 186 bp, Cannabis indica
agtgattagtggttaaaaatacacttttatttattttaaatgataaaataaattgagttttaattgatattttcatgaaattattgtaatatattttataaatgaaaatatttgattttgattcaatttatgtctttcttgtaggaattaaagtgtatttttgttgaaagaaagaggaaggagcaa

SEQ ID NO: 281168 - DNA, 743 bp, Cannabis indica
attaagaactctcgatgatacataagattgtgtagcacccgaatcaaataaaacaataaaaacaaaatcattaatatgtagctgacctgtaaccactgaagggctggcggcagcatctgcctaagtgatggcaaatacacgcgctggtgcgcgcttggcttcaggcttaggttcctctttcttcaactggggacaatctttcttgaggtgcccaactaatccacactgaaagcaagccctccggttacaagtcccgggatgatgtttcttgcagcgtggccactcaggataggagtaagtctgacgtcaccctttaccctgatttcctcgaaaccttttactttggcctgaactccccaatgatgggaaagttcttttcttttgctcgaaagtggaatcaccactctcttttccagggctagaaatagggagagtagtggtcccaccagcacaaatagtctctcgagtttcttgtaagaacttgactaccccttcagctcgaagagccttgtcaaccatttcagcataagttgtggtatcatttgttgtagtaaccagatcgtgcttaatcttggcattcaaccctgccaagtacttctcctttttactaaagttgttggtacaatcctgaaggctaacttagccaagcgatcaaacttggtcgtgtattcagtcactgacataccctcgccttgtaccaactcaacaaaactctttccgctttgcactgcggaccgcctcat

SEQ ID NO: 281169 - DNA, 462 bp, Cannabis indica
cgtgacaagtgcaatgaatacatggataaaggatatcaagaagtgaatgttagacaaaaaggtggtcgaaatggatcattaaatatttatatatagaagaccttttaaagagcttaaatgtttatttccaagtgtcatggaacaagtgtctatcgatgagtgagtaacatctatgaaattgaaagaatgacattgtagccttatagtagaaaatcaagtagagaagtaagatttttataggtaataacattcaactaaagaatgggaatgattaaagacaagtttgcataaggtcttctaccctactctttgtgtttgttatttggtattttataatgtgttctcaagtgacatgtaaggatgttcatttagagaataaatactgtgactctaaatggcatgtaaggatgctcatagaagaataaataatttcactcttaatggcatgtaaggatgctcata

SEQ ID NO: 281170 - DNA, 840 bp, Cannabis indica
atggatggctagattgatcacatgggtaagtttagaaccctatttcatagtggggaatattttagagaaaataaattatcgggattgatcggggttatgggatttgaccattttacccctagttttagaaatacccaagttataaccttaagggcattttagtcattttatttggtaaaggtttaggtggctgcctaaaggagtgacacctagcaaatgattcagctgagattaattcttttaatcttcctttttcatttaaggacaaaatcaagaaaataggaaaataaggaaaatgacattttctcttgaattctctttctttctttccttcggctgaggcaaccagggcaagaacctaccttttcatcttgtttttctggaattcaactagggaatcaagcactcttgaagctaaggtaaaaccctagaaccctagaacatgtttttaaagttttcttcttagtttgagcttgtgtttttgagtattggtggctgttttgatttgaaatgcttagggatcaaattctaggtttagtttgggttaattaagagttatatcagctggtttggttggttgatttaggtgttgtgttaatttgagcataaaaaccttaacttaggtctttaatggcataatttgaattattggtttgttctgtgatttgttggttggaaatggatgtttatacattgtataggtatactggagagtttggtaaggtttgggattgaattgaattaagggggatgatttttggttcccagcagtagaaccggaattccggttctgggtggccagtaccaaccggtcgaccggttggtgacccagaaccggga

SEQ ID NO: 281171 - DNA, 717 bp, Cannabis indica
aataatacattaaggagttgttgataagaagctaacctttcaccatagaaggactggatgcaacatcagcctgagtgataacaaatgtctgagcaagtacaggctttacttccagcttctgcttatctttctttgcctgagggcaatttctcttaaagtgcccaaccatgccacacaggaagcatgcttttcggttgcactctccgggatgatgtttcttgcatcgcgggcactcagggtaagaataatccttgcgtacacccttgccttgatttcctcggaaccgcttgttccgttttaaacccaccactgacgacgtaggtttactcttctgctcaaccatggagcccctaccacctctgccataactagaaatatggcaagcggtatcccgatttcgtggcataatctcttgaggtcctaaaatacattctttagggctcccagtccagagagcattcttcatatctgaatctccctgaaggactgtaggttcatttatccaaattttctcatgcaatgatcccacttggttatcagccatactatgctctgctggtaataccgaattgagaatgcctggcatacgaggtaaaggtagtacaggaaacctttgttgtttcaacctctgaatctcctcatcgtgtcgttgaatcatagcttccatttctgcgaatctttgctccaactcccacggagcctgtgacgaacgaccat

SEQ ID NO: 281172 - DNA, 560 bp, Cannabis indica
caggttagggtggaatgaagctccctccccatcctgtggcccgagatttatacccctcctgggcaacgggacccagcgagacgtcttcgagggtagccagacgcttaccgctcttcttggacgactttgaaccggacgcagacatgttttgattctgaaaaaagagttaagattccatcagttaggccccataccaaaccctaaatcaaaaaaagggaatgggagtccctaaccgctggaaagaggccccctccggacatctgtcaaccagaaaaccctagaaggatttcctggacaaaagtcgggtgcaaagaactcacagaaggcaacattgcgcgtaaaagaaaaagaaaaggcagaatatcgagaaaaacaaagtcttctctatgccctagaagaccagtacacaaagagcgtatggtcctttgcaaaaaataacaagtatgtaacaagagtaaccctaacaccagagatggtgaaactagacttgttgcgtgaaaaactcgaaagaatacattcaaataccaaacccagaaaaaacaaacagataagtaaagcat

SEQ ID NO: 281173 - DNA, 962 bp, Cannabis indica
agtttgtaacccaacttgggttttttcttatcttaaaagccttgtactattttcatttgaacttaatacaatcgtgtttgggtgcgtttttactcacaatgtaaacaactacattttgataaaatgtacagtacttttggatttttccattgctcgtaatcttcctatttaagtatttagtgatctaccaaactgtttaattttcgagcagttgtcagttctgccttgctatagcagttataatatgccttaagcaaaattaaatatactttaaggattttatcactttgtgtattcttaattttcttgtatgaatagttatattatctatctattttctaggttcaagtacttttatcaaggcatcatgatgcctcgtttagtactttcctagctcgcgagaaccgtttgtattcagttttatatgcgagttataacttttgattttcctttcccgccggataggttttaaatcaaaaattatagttgtttgatcccttcttcgtcaaaaaggtttgatcaaggtgttataacgattcgacccctttctcgtcaaaaaagtttggtcagggagttataacggttcgactccactttcgtcaaagaggtttagtcgagaacctttcaattttaaaaagaaatttgaaatgacaggtttgcattatacaatgtatttttagatgaattccgattaatcatatataaatgccccttatgtaatttttaatgaacaaaactttataattacttaatataaatgaatctctttattcataactaaagtttaaagtttacatcagtaatgcaagttacatcatttatttattggtagtagggtggcaaatagttctacgttccagtagttctttattagcgagccatcaagtcgagccaatttatagactccctccaactattgcttcgatgtacatatggaccctcccaacttcaggttgaacact

SEQ ID NO: 281174 - DNA, 645 bp, Cannabis indica
acttagacccataactgaatccaaactcagatcggaattagaatttgggactcagacccaacctagacaaagaccgacgacgcgaacccacactgggagcctaatttggacctagactaaaatccgtaccagaaccgaaacttagaccaagactcgaactacgacccggactcagacccaaactcgaataagaatcgcaaatggaactagaaccgaactaggactaggactagtgcgaggacctaaacccaaacccgaaccaagataaaaaccccaacagagacctaatcccgaaccgagactaggactcgaaccagaaccaagaccgggatcgaaacccacacaataaccgggacctggaccaagaatcaggatagggacctgggaaacagaactaggaccgggacctagtactcgatccagacccgaacttgaacctaggaaccagctcgtgacccgccaccagaaatggaacaacactgggacccgagattgggattcggatctggacccagggcatggacaaaacccattgtcggtttcatgatttgggacccagccctggtcccgaaccctgataaggactcgaacccacacacggacctgaacccagtcctaaacccaaaagtggacccgaacccgtac

SEQ ID NO: 281175 - DNA, 647 bp, Cannabis indica
ataggtttgtaaaaaaaatttgaataaataattaaataatcaaacaatacaaaccaaaacaagtaacagataatctggaaagtaggctaagatatctctattttaaaatttaaaatatatcttaactagaatttaaaatttaggttgttagagaatatttaaaaaaaattgaaaaaaactaacaaatctcctaaatatcctaaattctaacttaaattcaaatatctaaccaatttttcaaatttcaagtttattcaaaatttaaattatttaaatttctaataagataatataatatcttgaattttaaaattttgatattcctaatattatattcttaatcttataatttaataaattaaatattataaaatagacaatttgaaaaataagacatttcatggttaggatattaccaattttattaaaaataataaaataaaataagtttgaaaaattttatggttagaaaccctaaaatttctattcaaacctaaactaactaatttttcaaatttcatgttatttttgccaaaactaatttttaattaaaatatatctaataagataaaatgttaaacctaacatttatcaaatcttatagttttaattaataaaatatattttaaaaataacaaatttgaaaa

SEQ ID NO: 281176 - DNA, 477 bp, Cannabis indica
ttcaaatactacacatttgtggtggtggactgcccaacaacttataatgcaatcctcggccgaccggccttggtagattttggtgcagtcacgtcaatacggcacttatgcctgaaattccacacccaagaggctgggatagggactgtgaggggaaaccaaggggaggccaggtagtgttataacgttgctgcccacctacccatcttgatggtctgagaaattattgagccagaaatggcgtaagaggatgacttggatccccgtgtgggatctgaaaaaattgtagaaccaatggaggacatcgaggaagtgtcggtgtgcgacctctactccactagagtcctccggctaggaaagagcctagaaccggaggaaaaagaaaaaataataaagacattgaggggcgccacggacattttcgtgtggtgccaagaagacatgactggcataagtccccacgtcatcacccatgtc

SEQ ID NO: 281177 - DNA, 657 bp, Cannabis indica
gaagaagctattcaacgagcgaaaggtgagcaaaagcctggaaagtcaaaggctccttccactggaacatccgcccaacttccccactacccaaacaattaaagctcaagtggtaagcgttccagcaacaaccacaagcaagggaatgggaagaaaggaaagtttactggcaaattcgaacaagctccccgggagaatcatgccaaatacactgcattcacttttttgactagagatatagaaagtgtatacatggcaactcagtcgctggccccgtataagaagctcgggcccatgaagaaagataccaataaaagggacatgacaaagttttgtcggttccacggagactacgaccacgacactaatgaatgttacaacttgaagcggaaaattgaattcctaataagaaaaaacaatccacacctgcaaaagtatattaagaccgaccaaggtcagaggaacgacaacaaccaagatttgctacctccaccggtagatggacatctgcaagtcattgttggaggcccgtacattgctggagattcaaacaaagcccgacaaaggtatgcccgaacagtgcatcacgagcaagaagaagttatcctggtcgtggaagaaaggaagcccaaagttccacgagcaggagagccgacc

SEQ ID NO: 281178 - DNA, 535 bp, Cannabis indica
agtatatttggagatggtctctttcaaacaacaaatttagggaccaaagctatcaaatataaatattaattggatggatgataaataattttgtatataaaattaaaattaattaataatttataaatcataccttttcaaaataaaactacacaaatatctaaaagcacacttattacaatagatattgtggtctataacttatcttcatcttcatcattttgaagatgtataatagttaagtacacttacatggctcaaatttagtcaaattttgaagatatctgaatattaattagcacgtgctgatatatatgtatagatatagatcagtatatgtatatatattccactagcactgctgagcatcatcatcacaatgacatatattttaatttttttttaaggaatatatttagttattatggacacttaattagttatatgtatacagagccagccataagggggcaaatttttttttatatatatatatatatggaagaagtttcaatggttacagttttattgtaac

SEQ ID NO: 281179 - DNA, 662 bp, Cannabis indica
tttggaaaactctctctcttttcctctctcttttcggcctcttggtgcagcaagggacttgggattttttcttgtgatttcaactctctttggtgttcaattcaagctaggttagcttctaagcatttcttctttaagtttgttgaattttgatgaaaatggtataatgcatgcttgattttgatgtgttcttgctgctgtgatttgttgtagtttacagaggtttaatcttgctattttaagtagattagagctagtttaatgcatgatatttgctttgattcaagattggaagtttttagttcaaagtttggttttcaaagagaattttcgaaatttgtggctgtgagtgttgcatggatttgttttggttttctgcagctttagtatgcatgtttaggtagtttgaatcatggtttgatgcttgttggtgagctttagccaagtttgagtatgaaactcaaagcttggagctcacatggcactttttgtttctgtgctttctgggtagttttattgccttagaaatgttctataggatgtttagaacaggtctggaaggttttgtgtaatttggatttgatttggttgagttatgaatttttgagtttctgcctgcgaggaaccggaattccggttgtgcatccggaattctggatggg

SEQ ID NO: 281180 - DNA, 495 bp, Cannabis indica
gcccatacgtctgaggatgaaatgccgtgccgacttttaactgagtacccatagctcgatgcagactctcccagaatcttgatgtaaacttcggatatttctatccgaaacaatttcctttgggacaccatgaagacgaacaatttctctgacatataactcagcatactagttaatggagaaattcgtccgaacaggtaggaagtgcgctgactttataaacctgtccactatgacccacacaaagtcaaattgtctcgtggctctaggcaaacctaccacgaagtccatagcaatatcttcccatttccactctggtatattcaatggctacaataactctgcaggcccctaatactcagccttcacttgctgacacgtaaggcactttgcaacatattcaacgatgtcatttttcatgcctggtcaccagaacatggctttcaggtcttgatacatctttgtcgaccctggatgaactgaataaggagtcgt

SEQ ID NO: 281181 - DNA, 828 bp, Cannabis indica
ttgtatgtgtatattggtgtatgcatatatatatgtatgtatgtaaatatgtatgcatatatgtgtgtatgtatgtgtatatgtgtgtgtaaatatatatgtatatgtgtgtgtatgtgtgtgtataagtgtatgtgagtgtgtgtgagtgtatgtgtatgtgtgtatatgtttaagtttagggtaatggatatgtgataaaatttttaaatttttataggtattaaatttttaatttggttttacttttttatggaattaggtccgtgttcgaccgctcgggattaccgctagctgcctgcagttgtcatttttgcactcgattcaggtatgtttttttgctttcgcttagtacgtagcagtgtttgttattagttaatatgtatatgcatgttagagaagtaggttctgtgataaaattgactgctgttggatgggtggattatttgtttgtgtatatattgtatggaaatatttgtttgtgttatttataggtattaaaaattttgggtttacactttttaagccgttatgctgccgaaattttagtagaaaaaatgtaaaattaattgaatgttgaaattgaaataaaattgaaattgaaattgaaaatatgtaattaaaaagttagtaaaataatactttttttaaaaaaaaaaatattttcaatgtaaataataaataattaggaaaatatttaattatgaaatgtaatatataattttaaatataataaaatgatattattagttttaataagttactaattttaatttaattaataaattattaaaaattaataaatgaattgacaaaaaaattaaagaa

SEQ ID NO: 281182 - DNA, 661 bp, Cannabis indica
aatcttaccataaaaaggaaaattattttgtcacctaacttgccaaaaaaagactttacaggatggtttcgccaattaggattgtatgtgtttgaaaatgggctatcatttggtttaccatatgaatgtaatgcattagcctcttcggaaaatgtttcaagaaaagaaggacatgattgatcattatgacaagtactagcaaaaacatctttttttggttgaacatgagaattcatattttgacttatgaataaggcttctacttttcttgctaatttttcaaaagatgttctcaaatcagtttcttcttttatttcatattttcctcctcttttaggtgaattatttgctctagacctaggctcagaataattccattgttgtgaattaacagataattcttcaagagcttcccaagcctcttgcccttgtaatttcaaaaattttccggtatgcatagattgaatcatttgtcggtttgaaggggttaaaccatcataaaaatattttacaagtctccatttttcaaaaccatggtgggggcattttaataataaatctttaaatctttcccaacattcataaaattcttcattatctttttgataaaattcggagatttctcttcttaaattatcagttttggacatggggaaaaatt

SEQ ID NO: 281183 - DNA, 547 bp, Cannabis indica
agacctagacctgggacccaaaattagaacctgaacaagagtcgacgaaccaggaccttagaacaagactaggaccgtgaccaggaccctgacccagacctataaccgaacaaatacctagcctcatacccaaattgagactggaactcgggctcagacacggtcgtgtacccagactggaactgagacccggacctggacctaaatctgggacgcgatcccaaacgtagacttggacctagatagggattcggatacgaacttggactcggaccaagtcccacgcatgaatcaaaatgttggacctagatttggaccgggatcttgacccagacgcaaaacttggaaccgcactcgggaccccaacttggacttggacctgaacctagacccaaataggggtcgagacccggaaacaaaccaagacacagtctcggacccgaactcaaatccacaactagaatcagacccaaagctaaacctggacccggacccaaacccgaacctacaccaagatcagaactaaggacttagacctagaactgaa

SEQ ID NO: 281184 - DNA, 757 bp, Cannabis indica
tctctggacgagattgaagaaattagagagaaatctcactacaagaaatgtaacttttgccaatatatttggccgaatgtgctggcaaaatttgtcggcattaagtggctcaaccaatgccaacaatttttagtgggcagttttgccagcacacaattataccgggtaaaaattacctataccagcacaattcatgaatcgcgccggcaaaagtgttgaaataaatcgccttaaggcatgaatcatttccaatgattcatgaactttttgttggcgcaattatgcactagataaaggtttgaaacaatttagaaataattttttcgcgtaaaaaaatgtgtagggggagatttttgccagtgcatatttgtgttgacaaaaatatatgaggaaaacatgttaaatttcttaaaatggaaactatacttttattgttagggtaaaattacaagtgataataaattgtaactactacaatacataagttacaaagtataagttaaatacatatcatattacacaatttatttactatatacttaatgtatattatttatataataatatatattatcacatcatgtacacatattatattatcatataatataataattgtttgtaaatttatttaattatttttttaaaaagtatatgttctatttatataaatctatattaactacggtggcgtttggtaacaattttgtttttataattttaaaaacagaaaagtgaaagtagattttttgttttt

SEQ ID NO: 281185 - DNA, 733 bp, Cannabis indica
ccattttacccctagcttttggtttatcctagttttatgtgtaagggcattttggtcatttagtaaaatggttaatgtgggttaggtggcagccttgggtgatgacacctactttattttcagcctaattgaatgaaagaaggactttactttggaggaaatcaaactaagaaaagaaaaatcaaattagagaaaatatcacttctcttttctctctcttggtgttcggccctcccaaaccagaaggaaaacccagccaactcttcatttttattgtgttttcagccaaggattcaaaggagaacattcaaggtaaaccctagctcctttccttttaagtttatgaagttgtattttagttttaagaggtgattttgggttataggagctgttaaggtttgatgtttgtttagttcgaattctagggttagtatgagttaattttagttcatagcagctggtgtagtgattgattgtaagttttatgcaactttgagctttgagttcaaagctttgggctttaatggcaacttgggttttgatggcttgttctgtgaattactggctggaaattattgtttatgccctaattaggtactctggaaggtttcattgcatttggtggaagattgggcattgaatgaaaggttttgggaaacctggtgcaaaccggctagccggtttgcagggccacaaaaaccggctagccggttttggcagggttccccgggcc

SEQ ID NO: 281186 - DNA, 629 bp, Cannabis indica
gttcaaacagtgtgttgcacgagtaactattttattttatacgcgtgtaaaatagactgtttgaacattgttttctatattgtaaattattctgaatttctcaaaattttgtaggttatcttaaatagctataacgtacatgaatatgaaaaaaaaattagactaaaaaattcttctggatgccgaaacaagtcaagggtgtatcaatacatcccttttaagggggtgcattgtagaatcacccaaagttatctaaagaaagttattatagttgtacgttaggaaaaatgtatttttttattacataaattaaatttgttatttataataattattattatatttgggtgtattaatttttctctaacaaatttagtattatttatctttattattatagatatatgtaaactcccaaatgtcatttgtttcacatttactctcaaccatttcgttgggctttatctttttttggcctttacttatttgggctttatctttggtgactaatttcttcttacaggtaatggaaaaaaaatctgtgtccaatgggggcatataattttatgaaatgtattttttattttttattaaaattactaagagagtgagaaaatatacattaatag

SEQ ID NO: 281187 - DNA, 656 bp, Cannabis indica
tacccttttattaaaaaaaattgttaaaactaaaaaacttccctctctcttccctctctcttcctctctctcttgcctctcgtgcacccctctctctctagaaaaaattgaaaaaacttccctctctctcttccctgtcgaatgtttatttctcggtgggcggtggtagaaaaccggagcacaccccaatcactcaagaatcttacaccattataatggataaattgtgttttaagcattttgttagattttatgtagtttgctttcgttatatgtgtcgtatttattggaactggtattttttggtctgaaatggtagagatcttgcagatctagttttctgtcgaaatctgggttttccagatgttatcgacagtttatcgatagaatatcgatgctatgtcgatatcctgctaagaaaggtcagggatgaccattatcgacatgttgtcgacagtttgtcgatatcatgtcgattaaaaagcaaattaaccctaaaattgaaagtagtttgaccaataaaattgtctgtgttgttaatgtatatcgataggatgtcgtaggtgtatcgataggatgtcgacacaatgagaaaaaaaaaaatttgacctaaaatgtcgataatttgtcgacggtatgtcgatattttgtcgaca

SEQ ID NO: 281188 - DNA, 1053 bp, Cannabis indica
tgagaggtctgatgttgctcctccctactccgccattaacgacgtccacaagcggcataccagctccggataatggtacgttcatcatcccaatgttgatggacccgttgttagctcctccgtttgtttgatttccagccatgatggtatttttcttgaaatgaataaaatcttagttctcgttcctacagacggtgccaaatgttgtcgagtgcatttcgcaacaccaaattatatgatattattagtaacaagaagcaatttacgtgaaagaacaagtgcgagtattcaacctagaatggcgagtactcaactgggaatgagaaataattaacaaaaaactggaaaataataatgagacaaagaattatagtggttcagtcagatcacggtggatcacccctttatatacaaagcaggtgtccaattagttatacagggattgcattcattgtcaatccgtttttacacattgaattacaataattaactaaacaacgttaacattaattaatgaacggtagttactaagtttatcaacgtatgcgtattctatatctgcgagttggctgtccatattctggtgataaacttgcgggttcatcgattatgctcgggatgtctgcgtccttaggtagtcgcctcttgtggacatcgcatgacgggctgatagggcctagttatgcaagcctatattacattataaaggctgcagggttcttaagaccaactcatatttatagagaatcgttctcctggttgatataaggacacggggaggatgctcgcatatatttgatatatgcgagctactctcttgtctcggatgcgattagacttcggtcatgctcgccacctctcgctgattctatcttaagcgaggtttaaaacttcgaggagtccctcagggacgtctcagctttctttggaaaatctgagtatacgtgtcctctaagtaggggtctggtctcgagtttctaggtaagagaaatctcactataacactgacgacactataatcatgaacatatatatattttggacttaatagaa

SEQ ID NO: 281189 - DNA, 542 bp, Cannabis indica
tgatctcaatcctgagatgataaggttcgatctcgagagtgttatttgtgttctttgatttgttagttaagcctaccttttggtccgggtgatacgtacattttgggaaaatgatagtacaattgagtgggtgcgctaatcatagatatggaatctataacctttccagacatagaagtgaaacgatgatttccttcgagcttggcaaaatagagataaatgatagggcgctcattttagtgattatattagtgcactataatatcgtttaaaggtgactaagttttttaaggataaaatacattgaaagggtgtagcggtaattttatccatatgcaatgttaatcatctatagaggatcattgattattgggattataacaatgaacaattaatagcgtatctatatcatggaacatatagagtgttctatataactgagagtgcaattcaaagttctatagtggttcaatgagcaattaataagttagagaatttacttagtaaattctaaatgttcttattggaagctcgattatata

SEQ ID NO: 281190 - DNA, 810 bp, Cannabis indica
gataaaataacaagtttattgcaaacccctgatggtgctcggtacttttaatactagcacatcgtatatatggccaaatctatgccttatttggacgattcatgaaaaaattgcctctccgtcctaacggacagtacagactccaaagagttctgctgacagggcatcttgaaaatataaatgatgatcgatagtcattatgaaaacctcgataaggtaaaactaaagaacacctgcaaagtgacagatcaaatgtccctcaagaaaagttcaacgattagacagcaacatgtcatcgcaagaactaggggcatgataagggagcaattcccacagtatttccttgcatgatcaaaacttgcgagaaggtgcgaccgagatatggtctagtcgcacactatgcatcgcatagtaaaaataataaaagcgggatgtagagagaagttagcacagtcgcgacatatatcgagtatatgcgatgatccggtgtttctccctcaagcttatgtaaagactgcatctttaccagcatttggtccggatgaccaatgtgcacgacaacttgatcggaacccgcgagttctatgttgtcagtatacgaatgcccgatatgcgacccgtttagtcgcatgcattccatgaattaagaaccccgagaggttcatacatgaatgcccgatacgcgacccgtttagtcgcaggcattccatgaattaagaaccccgagaggttcatacatggatgctcgatacgcgacccgtttagtcgcaggcattccatgaaataagaaccccgagaggttcatacacg

SEQ ID NO: 281191 - DNA, 548 bp, Cannabis indica
caacaaaaacaaactataagaaactataatgcaactaaaatattaaacatgtcattacattttctgtcaatgagtccacaaagttgtcgactaatttcttctctgctgtaggtgttaaaaatgttgttgttttctgtgcttttttcctgtttgtgtatgtccattgttgaatcaatgctctcaatgactccatcagtgttgtgattggtagctctctagctgccaagtttgctgcatttagagattcagcaatgtttgaagtcatagttgaatacctgttgtttttgcagtggtatcttgaccatttgtggtatccaacttgttgtaaatatggtcttacacggatgtccaagctgtccaactcgctcatatggtattcaaatttcctctctgtgtatgctctggctgcagcgaagaatggtttatccagcttgcttgcattcttcttgaaggttgcttttaggttgcttaacaggtggtatacacaatagcaatgcgtgatttctggaaatacttgagcagctgccgtaattatgttctcgtgtctg

SEQ ID NO: 281192 - DNA, 880 bp, Cannabis indica
ccagtagccaaacgggtgaaatcaagttaatatggaaccagtcaggaagacggttactactccctaataattagggaaataaccaatttgaatgagtccaacgggtgacgtggacagagggcaacgacactgagaacacacgataaaagaaaccatacgatagacgctagacagaacacattcgatactcacactactcactggctcaagcagacagtcgccttttctaagcttttctcttaagcctcaccatcggagatactcctttagtccgtctgtccgcttgtccactcatccgttcgactaccatttatattacatttattttccgttattattattttttactataatcgtactgacttgagcttcggagtccctttggctgacaacccaccgatgctcccaattgaatttttgtctctctctttgtttttgacaggttgctggtgcccaaatttcgtaattgtagatttcaccctctacaaatatactatccatgtgactcctttatgtcagggtattttaggtacaatatatataaaaagatatatgtttcaattaattataaaattagaggtagatttagttaattaataaataaagggaaattttcatgggccaccttattttggcaattattttaaaaaataacgttgtttttgttatgttaagtttttgtatatataattgccgtttttttggtaattttctatttttaggattaacagttgtgtttatgtttgcaggtaatcgtggaggagatgatgacgtgtcacgtcattttgtgtgtgatacattattaacgttatttttgtaaaaacttacctaatatagtatattcctaaaaaaatcccataaataaaagagttatttttca

SEQ ID NO: 281193 - DNA, 561 bp, Cannabis indica
cgcgatcggcgcgatgggcgggttgttaactgtgttgacaccctgatcgcccgtatggggatcatggagcgtctccgtgttatgcgggccgcgggagcgcgccctaaagactgcattgagatgatcacgcagatcacctcggtgtacacggtagcgtcctccttgctgtgtttgcacagagccagacctcgtatacctgcttggagtacggtcatgcgaggatgaagaggctgactctgcgtcgttatcccgagggtgacgactgcgagggttgcggcgctcaggatcctcgtcggtttgtgcgctctggttaggcaaccttgcgtattggtctcttgacgtcgggtgattcaagtccaagacttcaggatcagttcttcgttccctgcgtgcatggttagtttgacgtcgagaaaccgttacctgagggttttcgttacgaacggcagggacccgaggagggcgtcgagctcggctctgtccatccacctcggcttgtagtgctcgcagctgatcctggattgcggcgtattgatcagtcgtgagctggaccactccttc

SEQ ID NO: 281194 - DNA, 709 bp, Cannabis indica
attaggtgtactaatataagtgtatcacgtgtataagagtgtacacataaacagtccatgttgataattagttaaactaaatgaatgataacttaaatttgttaatagtctaataatttagagagttttactaataaaatttgagcttaaagagttaaatgtaaataaaatgataattaaaaagatttagccctccaaaactcttaaaagtatactttacaagaacattttcgttctcgtttttcaaattttgtggttcttgttaagcatgtgaatcaagcagctcatagtttggcaaaataaatattagtgttggataataattatatttagttagggcaaattctctaccactactacaaaaacaccctttagaggcggtttttaagccctttaggcgtcggttttcgcgaaattcgctaccgacgcctatcagggcgacgctaaagggtttatttgaaccgacgccatatatacccctatggcgtcggttcttagctaggaaccgacgccataggggtacatatggcgtcggttcctagccaataaccgacgccatatgtggcgtaggaaccgacgccaaaactcctcagatttcagtttttttcatttttttttaatttaattatattattttaattttatatttattaatttatatacatatttatttaatttaaattacatatttatttaaattttaaattac

SEQ ID NO: 281195 - DNA, 924 bp, Cannabis indica
gtagcacacacaaccaaatactcgaaagtgacttactgcaggtttacaaccccacagtttttcaaagggtgaaacgaaccctaacttagcctggggaagcctattgattacatgagcggctgtcttcataccttcagcccaaaatctccctggaacattctttgcatgtagcatgcttcgacatgtttctgcaagatggcgattcttcctctcggctactccattctgttgtggcgtatttgcacatgtgaattgatggcgtatgcggcattctcgaagatactcagaaaattcatctgaggtatattcgccaccgttgtctgttcggagacattggattttcttgccgacttctccttctactatttctttaaactctttaaattttgaaaaagtttcagatttttctttcataaagaaaacccatacgtaccttgagaagtcgtcgatgaatgtaaccatgtatcgcataccgctgattgatggttgtttgactcgcccaaacacgtcagaatggaccagctccaatggtgctttagctttgaactttgaatcttcatacggtaattgatgcgccttaccgtattggcagccagcacatacagtctctgttctgacctcgagttgaggaagacccttcagcatagacttcttcatcatcaccttgagtttatgataactgacatgtcctagccttgcatgccacaaatctgttgtttcattcttccgagtcttgtctacataagcggactctgctgacattacatagacagactctaagcgtcgtcctttcatcatcggtgttccagagatttcaagatcttggtagatcttgacatcttgagggccgaatacgacatggtggcctgtcgccgtaagttgcgccactgatagtaagtttttcttcatcccaggtacatggta

SEQ ID NO: 281196 - DNA, 652 bp, Cannabis indica
aagggatcccagaatcagggccaggggccggagtgtccactctccgctgtcgtttaggcacttcctcggctatcatcttgcccttgcgtttgcggatcagagcaacctcttgctcttcttcacctttttcaacttcctcaggaagagcccattgctcttcttgaccttctttagcttcctcaggaagcgcctcctcctcatccactaagtcaatagagtctggaggggcactggaagaagctttcatgggagtggccacttgggaagaagttagaagaaggggagcgtcgagagtgtgagctccggcaagggcggccaaaattgcgtccatggaattagctgctacaacaaaagaaaagagtcaagtgttagaatatatgtgaaagtagtaaacacttaaaaaagcaatcaagctagtcctaccctgactctctaatttggccctagcaaagtttcgaatcttaatgctggctgcatcatccccgagatagctgtccgagggccggaaccagctagaaggaagataggccgaagggtccaagggaacgggctccggaggtccagaacccatccgggactgacctaggtaatctcctaagttggaaaaataataatccttggcatgatctccccatcgggtcgaaggcatcct

SEQ ID NO: 281197 - DNA, 593 bp, Cannabis indica
aggtatagctcttacccttccctctttagtttcttgaaaattaagaaaaggtgatagttgcatgtttagtttttgtgatgttgttgctgctgtagttatatgttgttttctgtgattttatatgtttgaattgattggatttgagtaggtttgatgcatgtttggttggttttaaactagtttagaattttggctctaaaactatgattttcaagtgaaatgatgaaatctgttgctgcacttgttgttgatgcttgctgttgttttcagaggttattatatgcatatttgagtagtttaaaccaggtttggatgcatgttagtggtgtttaaccaagtttgagttttgaactcaaagcttgggctttaatggtggtttttgattttatgcatgaagcttggtgttgttgctttagaaatgttccttagggtctaaatagcaggtctggaagttttggtgtggtttgggatcgttttgagtgagttatgaatttttattcatttcctgctcagaaccggaattccggttgtgcaaccggaattctggatggtgttccaggattcccaaaactggaattccggttgcagaaccg

SEQ ID NO: 281198 - DNA, 555 bp, Cannabis indica
tatgtggatgacttgctaatttttggatctaatattcatgtcgtgaacaatgtgaaatctttgttatgtgaaaattttgacatgaaagatctaggtgaagcgaatgtaatccttggtatacagatcactaggactgaaaagggaatttctttggatcaatctcactacattgagaagatcttaaagaaatataattactttaactgtaaacctgcttgtacaccatatgatcccagtgtaaaattatttaagaacactggtgatggtgtaaggcaatctgaatatgcgagcatcattggcagtcttcggtatgccactgattgtactagacccgacattgcctatgtcgtgggattactatgcaggtttactagtagacctagtgcagagcattggaatgctatagagagggtcatgagatacctcaaaagaacattgactcttggattacattatcaaaagtttccagctgtacttgaggggtacagtgatgctgactggaacactttatcagatgactccaaggcaaccagtggctatatttttagcatagtt

SEQ ID NO: 281199 - DNA, 446 bp, Cannabis indica
aaactgcaaaattgcaaaagtgaggcccaaatccatatagccatggccggccacttttataggcattatcatctgatatttttaaccctatgttgaatgctatatatagatagtgaaggcttcaggaaattcacacttttacttctagtttccttcagagaaaaacctgagccttctctttctaaaccctagctgccacattcacactcttcttcttccttgcaaataaattctaacaactggcatcagagccatggcaattgatttgcttgcaagaaatttggacttaaaacgatttgtttgtgttttggatggtttcatgttgtgttgtgtgttatatgatgattgattgatgtttgtgaatttttgtgaaaaataattgaatatctgtttctggaattatttttattggatagtatggaaaaaattaagcaagttactttttt

SEQ ID NO: 281200 - DNA, 677 bp, Cannabis indica
gggtttattttatgcaacaaaagtcgcaagtcttcgatattttcaaaaaattcaaatcccgtgtcgaaaaacaaagcggtcactacatcaagacaattagaagtgatagaggcaaagaatacacttctaatgaattcaacaagttctgtgaagatgaagggatggagcaccaactcactgttggatacgcaccagaacagaatggtgtatctgaaaggaaaaacaggactgttatggaggcagcaagagccatgctgctagagaaaggtctcccaaaacgattttgggcagaggcagtaagcactgcagtctacttgctcaaccgatgtccaaccaaagccgtgcagaataagacaccgatcgaagcttggagcggacgtaagccatcagcaaagcatctcaaagtcttcggctgcatatgctacagtcacattccaaaagagaaaagaggcaagcttgatgagaaggcagagaaaggaatcttcttaggctatagtactcaatcaaaaggttatcgagtctatagcttagaaacaaataagctaataatcagtcgagacgtaaaatttgacgaagatgctgcatacaactgggagacacaagaagttgaaagaaagacagtcaatattcctctaccgccaagacaagaaactaatcaaaatgaagttcttactcaa

SEQ ID NO: 281201 - DNA, 843 bp, Cannabis indica
gctgtccgtgggatggccctcatgcacgcgcgtggctagttgctctaccaattgagttctgtaaaaaaaagtaaattgcttaattttttccatactatccaataagaataattgaatgtccttctttgttgaatctggattcttcacagtcttccacactatgattgaggtactacttgatgtgtgtgggcactactctatcacttagggatttcgaaacaaagaagagaagaaagagagagagagggtggctcaggaaaatttctgtgaaaggaatgagatgcaattgtgttgtgtttgtttcctgaagcctttactttctatttatagaataccacacagggttagggttgaattacttggcattaaaataatgaaaaaaattaaatgataaaacccatgcatgtggccggccaaggcatatggaaataggcctcacttttgcaactttcctgttttatcatttctgtttcccattttctcaaaaactgccaattttcacattcaaccatataaatgtcaattctaactatttaataactataattaattattaaataatattgtcatttattatatttattaattagactaaccaaagtctcttaattaataaatataccctataaactctttctttacagtttcgcccttaataagtgataaattcacaaatagacatagtctaacttgagaattataattgattaattaaaaccaattaaatgagtcttacaagtagtattgtctcaactagtgtggggaccatgggcctatatatctgagcttccaataagcagatcaagaatttacctaatcatatcaggattaagatcatttgat

SEQ ID NO: 281202 - DNA, 505 bp, Cannabis indica
aaaatggtgtccagaaccatgatcgataatggggcttcttcaaatattttgtttaagactgcttacgagaagatggggctccagctcaaggatttaactccatgccttcagcccgtctatggtttctccggccaaggagttgtgcctctaggacaaatctggctacccctcacagttggacaagctccgacgagcataactatcatggcacaattcctgatattggatgttccttcagcctttaatgtaatgctaggccgaccagccttgtatgacttaaaagctgtcacatcaatattccactcgtgcctgaagtttccaaccaaaaatggggtagggtgtcttagagggaaccagcaatctgctcgggaatgttacaaccttgcagtggccaaggctaagaaggaagtatcctccagccagagcccagacaagggaataaatattcccaagtaggaaacttaccaaggcgaggatgaagatgtagatcctcgacttggggacc

SEQ ID NO: 281203 - DNA, 839 bp, Cannabis indica
caaatgcaagtaaactctgttgtagattgtcatatcagtaaaacccagtgttctgataaatctaggaatcctttattcacatagtcatgtttactttccactgtgttgacaacacaataaacatgatcaagtatgtgaaaggggtttggatgaatttataaatcaaatagacaaacaattgataaagtgaaccaaaacatacacaaatgaatgaaaaatacttctgttactttattgatattgaataatctggattacattgaaatggagttttatttagggcataaaacccaacagaaacttcagaagtaacccgtgaagagaagcaaaaaagcctttgaagatttactcgatcctccaacatagcctcgtaaacaccctgagagggcgagtaaggcaaaagttcatgatcgttatttctaaccacgccaaaattcctcaatcattaccttttggaacttcgtcagaaggtggcccaagtcatccataatccaattccaagtttataatgagctatttggggtggcagatgactctatttggcttgttaaaagtgacattcagaaattgtgcaccatgcaatactttggagcccaaccaataggagtttggtgcaagtatgatttctaactcttaataataaacttgataatgttcttttgacagcgacagttattattttgactttttattaggtacatgaaagaagattgttggacattagtgggctgaatcgagtatatgaatatataaatccgagtgtcgattgccacagatgcaggggctgatataagttgtcgtcaacgcacgtagtcactcgaatgactaggatgactaat

SEQ ID NO: 281204 - DNA, 634 bp, Cannabis indica
tcgggcccgaaatgtaaattggattgagatatttggcattttatttgataatgagaaatctgaattttatttggaaattaatgagcatgaaatgactaaattgcccatgtgagtgtatatgcatgttttatagccctaggggcaaaatggtcttttgacctttattttctacaattaataaaagatgaatttttagaaaaaaaaaagggaaaattctggttgtttcaccccctaacccgtacccctctctctcaaaccctctcttgaaatgcaatttgaattggtgaggaatttgcttgggttttagcttggattgaagctttgtgattgagaaactttgtgcttgcatttggattgaacttgaggtaatccttgcagctgtgattgtggttgtgtctattgaattttgattgttagaaatgcatgattatggtgttgatgaagatgataattacatgttacatgagatgatgttcttttgttaatttaagtgagttttgcttgaattctttgtgtgttggttgtttgagctctagatggagttctagggtttcttccttatcttgaattcaaagtatttgatgatgattgttgctggaaaatagttgggatgcatggttttgaagctctagtt

SEQ ID NO: 281205 - DNA, 596 bp, Cannabis indica
aaaatcaagaaaagaattaaaaaggaaaaaaaatcaaaattagagagagtttttctctctttccttctttcggctgaagcaaccagaggagatcaccccttttcttcaccatttttctggaattcaactagggaatcaagcactcttgaagctaaggtaaaaccctagaaccctagagcatgttttttaagctttttctttggtttgagtatgtgaaattgtaaatcaggggctgttagggttagagttatttagggttcaaattttagggttcatttgagttaatttaagttcctagcagctggtttggttgattggtttaagttttgtgcaactttgaacattgagttcaaagctttgagctttaatggcaaattgagatttagtgatttgttctgtgaaatactggctggattatattgtttatgcattgtataggagctctggaaggtttcattgcatttggaggagaatggagcaagaaatgaaggttttgggaaacctggtgcaaaccggctaaaccaactagccggttttggtagggttccctgggcctttcttttctcaattttttccatttcgatgcctcagttggg

SEQ ID NO: 281206 - DNA, 799 bp, Cannabis indica
tttaaaaaaatcgtgtcaaacgtgtcacattcgtgttgagccggtcgtgtcgtgtttgacctcatttttatttccgtgttaagtcgtgtcgactcgttttcgacccgcatctaatattcccgaccctacccgtaaattcgtgccgtgttcgtgttcgtgtgccgtgttgaaaaccccgttttgccacccctacatattaataaagaaaaatatcaaaggacatattaaaaagccaagcactacaaaaagtagcatactgctattggtgcattttaatatcagcttccatagattttaatttaataaataatttagaaaactgctaacaaattattgggtatcacatcactatgatattgagcaccttaaagtgtcatataacaataatagtagaaagatcgtacctaaaaaataaaataaaacacaattgaaactaataaaaatatgtacatatcaataaagaaaatgttataaggcatattaaggtgccaagtaccacaaaaggtagcatatccttattagtgtactttaatatcagttcctacaacttttaatttaataaatgatttagaaaactgctaaactgctaatgaattattgggtaccacattagtatggtattgaacatgttaaggtgcaacatattaataatagtacaaaaaattatttacaaaaaaaaaaaatggtacaaaaatcattcataacaaaataataaaaaaaaaaacacaaatttttaggattagctttggattaagttagttaaggatagttttgtttgttacaacttgtcattacagct

SEQ ID NO: 281207 - DNA, 673 bp, Cannabis indica
actaaccgaaaatacacccagactaattttagcctaacaaccgcttcaattctttgcgggtagttcctccaatatggggtcctcctgagatcatggccactctcccattaggtctgggtggcagaccgaggatgtgctgggcatctccggtaggagcaactggagccaatactcctgttgcaccccctggtgctccctgcgatacaacccctgtcgcttgacccggattaaggtgaggctgccgattcttgatccactcatagaggtgccccaatcggattaggttttcaatctcatccttgagatttttgcattcattggtgctgtgcccaatgtcgttgtggtattcgcatcttttgttggggtccctccgggagctatctttgtacgagggaggtggtctccggtagtgcgtattttgcctagtagtaaagtacacacgcttctgggagtccgtcaactccgtgtactgggtgtactgtggagtgtacccccttttttgtcgcttctcctccgtccgggtgctgcctttggaggattgtttactcctcgaaccttgggaaggaccagcccggctggcggttggagtggagtgcgagggaacttgtccatttatccctgagggatttccaaaatgggacaatgcgggggccaaggcctggccctggctgta

SEQ ID NO: 281208 - DNA, 102 bp, Cannabis indica
tgttaataaacataacttgtgagtagtattaatccaagctcgaaggaaatcatcgtttcacttctatgtcctaatattactatagattccatatctatgttt

SEQ ID NO: 281209 - DNA, 1203 bp, Cannabis indica
ttttttcagggtaaagatcacttgaggaattcattattggtgaaaaatagctggtgaatattttcatttcttgattattctatcagcacccacacctgttttacgatcagcaagatacacctctgcatcaacatttaattttaaacccaaaccagcaggcagcttccaagttccttgagcagtagggacagcagcagcgggaatcaaaactgggtctggtggcgcacaagctgctatatattggagcacgtaagaggcggcaaagaatgcaagagcagccgctggccttcctcatcgaccatgagcagcccattctgttctgtccagatataccacattataatagattccaattcagctttgaaaaatgaagacaaatgtaccaagtagtcctcatgaaccattgagtttgccttgtgaaaatcaaaatgatagtctgaatgatttcaaagcaattatttatatattaatgaaagatagtgtaaatatatctttggcctggtacatacaaatttgtccttagaatgccatttgttgctagtgtacgtattgagaagattgttctcaaaattcgtatttatttaatatgaaaccatcattaattgtgaaagtagaactactggtcaatgttgtcatctactatgaaattttagctatgctcaaaaatgttatgctgaacatttcataagagaattagaggcagaaaagagaaatacattataactgtagactttatctcatttcttactttcttttttctcaaacaattccaaggaaatacaaagacaactacaaaatttcacaattacaagcaattcactcaaataacttcaacctacttgggtggtcaaacccagaagattttacttcacttgatcttttctcccctctttgtgcttcatttcatacaacatttcctttttgtgttttctcgttacttttcttgaatattcacaagagaactaacagatcttcgagttcactaactcgaaattttatgatgaacttgaaaagaatgacaatataattttttttcctttttcttttttcttttttcccttcttttttactaagctataggagacaactcacaatttttaaaaaagtcagatattatgttggtgaagataagtatgtttatgtaaggcacatggctaagagagagatcagaggatacttgatcattgatcttattattgggtt

SEQ ID NO: 281210 - DNA, 899 bp, Cannabis indica
aggtgatacacacaatatccatgttgtatttcagggaagacttgttgagctgcctttattatactttcatgtctatcagatataacacactgttcttgtctaacaccaaatgttgctcttaatttttcaaagaaccattcccatgatagatcattttctgaatctgccacacaaaaagctaatgggaatattttacttgctgcatcttgtgcactagctgttagtagtgttcccccatatgtagctttaagaaatgttccgtctactactattatagtctgcatttttcccatgctttcagtgaagcatttagtgccatgaagcaaaacaagaagttgttgttttcttcagtttcaatgtgcactacagatcctgggtttgttttttggagcatatagaaatagctaggcagcaactgataagactcctttgcttttcctctaactatgtttagagcatgttccctactcctccatgccttcatgtaattcatttgtatcccatatttgtcattcatctcaaatctgatatctgttggtgtagctgttgtctttatgttcaaaaacttgtatttaacacagtcccctattatttttgctgatgcttgcctttgatctccaaatctgatgcttagtgagcaagtgtgtttttcattgtattttcttattatgaaattctctgttgccccattccttgaagctcttagtgaccatttgcaatctttatccaaacactcaatttgaaattcctttgtgcaagattttttcaccttgtactgaaattgttgttttattgcaaagtagctgagtacgttcttcaaagtttccttatctttgtacatttgccctttctcaatttctggatgatgtttatctgtgatgacaagtgcttcttcatcg

SEQ ID NO: 281211 - DNA, 530 bp, Cannabis indica
gtgtatatatatatatatatatatataactatatctgtaaagtctgtgttgtcgacgagctttcaccggaggtctctgttttgatgagtgattttaatctctgttattcagtacccaaaatatggcatttaataagtaccttagcgtatgtatagtatagaagttgtatgttattcttgttaaactaaaattaggaaattgaggcatttagtccagtggtgctgttttctcttaattaacatgttattagaaaataaagattggaacctttcattcaatcaattttatgatacaaaaattattatataggagtatattattggaaatgtatatataggtatggttgttaatggtaaaacaatgtattttggttcaaaaagtcacaactgattctttgatatagttgttttttctttctttcttcatctttttttataatctaagataataactccatcttgtttccatgtcacctacataagtatcagttgtaccaagtaagtgataatgcttagttttttttttttttt

SEQ ID NO: 281212 - DNA, 671 bp, Cannabis indica
caaagaacatgaataacactcttcagatcgaacctaatcatgtcaggattaagatcatttgatctaggatcaacaaggtgatattgaattgaatagatattacggtaaatttatcatatctaatgaaacttcaatatcggtcccttccaatgtatactccatacatcctgttatcccaattttcgcactctaacgtggcatcacatgaatggtgacacgtgtagtcaacttggagcatgtgctcgggaagcatagtctgagctggatgcctcgctggcatgcccagagcaaagcaatcagcaatccgcacagagcaaccaacacttagcagattcagctttcacattgtgagtcatcaacaaaatccctataactcagggatcagattactgggatatgccatacacacgatcccactatcagtgtatccagcatcaatcccacgatctttgtattcagcattgatcccacgatctttctatttatacgaattgtgacaagaggggaaactcttcctctccaagcttactagccctataaatagtgatgcatgttcactgggcaataggtcaaaaacagttgagctgagactataccctaaatatattatctaagaattatacattcagagataatgttgtaagagctataagaaaaggaacctttctcct

SEQ ID NO: 281213 - DNA, 856 bp, Cannabis indica
  modified_base (74)..(74): a, c, t, g, unknown or other
attgaaggttcatgtaaaaaaccgtactataaatttttaccatatatatttgatgattcatctttcttaatacncaaaaaaaaaaaaaaatatgtggatgatcattgcaactagtgctgtaaatacgagtttggcttttttgacacgacacgaaatcggtatgagtccaaaaagcatgagcacgactagacacaaaaaaaatatggacttaggcacgacacaacacgatggtacaaattcgcacgacacgacaccaaaaatatgctttaagcacaacacaacacgagaagcacgatacgtaagcacgaatagactagctcgaaaagcacgacatataacaagcccgaaaacacagcaagacatattaaaaaacttaaaatatagggcttttttcataaatgtacaacaaaaataaaataattacaaaaaatgtgcaaaaaaaaattatttgaaaaacttatacattttgaaaatttattacataaaaccatacattttaatcattaaataatataaatcattaataattaaactaattaccataaatagaaaactgtaattaatgtttctaatattattttgtaatattttatccttatgtttattatattaatgttttaaaaattattataataaaacatgtttattaaaattcaaaacaaagaattctgtaaaattaattaaataaataataaacagttttataaaaataaacaaattaaatatttttttattaaagaaaaaatgtttattatctattttagtatgaattattataatttaataagttttttttcaataaaatacaatatcaaaattataaacattaatgtatataaatataaatcaatgctta

SEQ ID NO: 281214 - DNA, 109 bp, Cannabis indica
cgttctatatgactgagagtgcgttcgatgcgtgtattcaacaaggaattaataagttagtggatttacttggtaaattttttatctgcttattggaagcttagttata

SEQ ID NO: 281215 - DNA, 887 bp, Cannabis indica
tagggtttatgtatgagattttatttttattgataataagacaactatgtgaatttatttgagttcgtatgtatttattatgctatttaatgtttaattacccaatttctgtgtttgtgttcggaagcggtggaaagcggcgttggggcctttagagaattgtattatatgatttagaatatttttcgggatatcattgttaagttttaacggtgttggtattttcggggtttggtttgaccattttgcccttcatgcatatggatattttggttttattaccttggggtatttaggtcttttgatagggggttttgtcttgttgtgggatgttactagctgaatataatttaaatattatgtaaaggggtttgtttttattcttttgataagtattaaagaaactcatcttttcttcatcaatctccttctttctttctttttcgaaacatcaagaaacctagcctaggtttgattttgcttgctgatttttggaattcctagcagtgttggtgaagctttgatccaaggtagtgtaccctagctctcttcttttgatttctttagttgaaacttaagttggataaattcttgaactttgatattggggagctgtgttgaagtctataatttgaaatgaaattctgaagtttaattaaggttacctgagttattttatgttgttttgttcattgtagtaaggttttatcaaggtttgggtttgagaactcaaaccttgacctttaatggtgtttttggaatatgagtgaattgttgtgatttgtcacttgggattggtttaatataatatatacaggtgttctggaagttttgaaaagatttgggattgttttgaattaaggggaagaatttttgggttcccagct

SEQ ID NO: 281216 - DNA, 402 bp, Cannabis indica
catgtttccaatatgtaaatatccgccggaactattagttagaattcacgaacaacttgaagaacataaataatacaactaagcttagcctaaccatatcaggattaagatctataaacctaagatcaacaattgatattgacttagaaaggtataacggtaagtttatgatatcttatccaagttcaatatcggtcccttccaatgcatactccatacatccgatactggtaaactttgccaatgccctggaaagaacataacatttatctaaggtgtaagtataccttaggggtgttcattagatcacatccaatggatttggatccatccaatccaatccaattatttattggatattcaatttttttatccgatccaatccaattgaattgagtcatc

SEQ ID NO: 281217 - DNA, 496 bp, Cannabis indica
attagggcactgttgtcgacattgtgtcgacatactatcgacatacagtcgacaaccacaccaagcatgctcgccatcgacataatatcgacataccatcgacattcaatcgacaattaacaacggttgcacatttaatgttaataaattttacctacgttcccaacaacccttcccaactgacacgttgcatgtcagacacgtgtcctatcgacaacatgtcgacatgacgtcgacatggcatcgacaaatgtgttagcagtgacactaaattggcatgttgtcgacatgatgtcgacatagtatcgacattcagtcgacaaatacaccatttcatgcgttttacctgtacagttacgcatttaatgaccattaaattttcatacattcccaacatgtttactgctctataaaagcaaatccctttcttattcataagtgctcttgtcttctacttctctcttactcttaaaaatttctcttattctcttaagtt

SEQ ID NO: 281218 - DNA, 527 bp, Cannabis indica
attgaagaagggtgttacatggacgtggtcggagaagtgcgaagaaccttttcgaagtctgaaggaagccatggtcgaagattctgtattagccttgcctgatgtatgcaagccctttgaagtacagactggtgcatcagattatgctttaggagaggtactcgtgcaggagggccaccccgtggcatttgagagccgcaagctttccgaagcagagaggcggtacactgcgcaagagaaagagctcttggaagttattcattgtttacggatgtagaggcattacttactagggtcaaattttgttgtgaagacggacaatacggctgttagtcatttcctcacgcagccaaaactgactcccaagcaggccagattgcaggaattcttggtagaattcgacttctacttcgagcacaaggctggacgtcttaatcaggcagctgatgccctcagtcgtaaagctgaattggcggcgctaaaggtgttagcgggcatgtcagctagccaagtgggtacaccaatca

SEQ ID NO: 281219 - DNA, 606 bp, Cannabis indica
actgtgcaggaaagggtaaggcattagctgatcaaccatgagtttcagaagcaggacgaagaatgtacatgttcgagccatatcagaccaatcgggttaagggtctacttgtgatgaacttttgaattccattttgccgtttaggtcggctagaaagaaatgacttgtaatagagtttctaaagatttttgggatcccaactattttaaaagtttaaatatattacaagtttattttcattccgtttaatttaaaagtttaaattctgcgctattttggttagtaatcccgattaggggattagggttccataagtatttgggtagcatgcctaattatttagggcgttacactaacaattaattaggatgctcattttatcacacaatgcagagattcaaactaacttcagtatcgaaataatgtcataatggtttcactccatcaaactagtccacaaacaaatagccaatatgcttgcatgcttacctctctccactgatgttgacaacattatttttggaatccaaaggactttttaaggttagaatttatggcttagatatttggaaaatgaaagacaattttggctaaagatatcataag

SEQ ID NO: 281220 - DNA, 577 bp, Cannabis indica
atgttctggacttaatagaaattgtatacataaaccagtaaacatgaaaaatacatgtaatcataaatgacttctaatcttctattgagaacaaatcaaattagattaaaatgggttatatttagggcataaaatcccaacaaactctcacttgcactaacataaaataagtagtgcattttagtcaatctattgtcttgatatccagatcaagtgtagtatatttgactaaacccaaattacaggaattgtaagtttgtggtaagcaactgctttctccaccattactttctttgtgttcataaaacattatgcaacatcattttatatatgcattactcatctagggatattgaattctttattacttattaagtgcatctgaatatacagtagacatatctctaattctatccaaatggaatatagataaaccagttaagaactttcttcagtttgaataactttccagtgcttttcaaaagcaacaaagttatttagcttcattgatggagctaaaattattataaatgggtttttacatccttctagaataattcctccacccccagagtaa

SEQ ID NO: 281221 - DNA, 740 bp, Cannabis indica
tagtcacgcgtgcaacacactgtttaaacgtaatttcgacgtgttaaacttttcgaattttttgaaattttgtaagatgtcttaaataactataacgtacatgactataattatttcggatgctaaaatagataagagtgcattaatatatctattttaaaaaggtgtaaaattttccttattattattatattgttattttgaattctattcaattttaagaaattaactttttttgttagtggaaataaacttgcatttctaaaaagaggtgaagaagtgaaaaaaaatggcaatctctttaaatttactccaaattcttgtacgaaaaaataagtggacctcgtacggaactcccaccaataaaaaaaaatagaacatttttgtatacccacttgatttttctgatatatcttctaaacaatcaaatcaaaccaaagatttattctcgatggtggattataatggccacgtggagaaactataaaattattcctttgattatttttttgttttaaactttcctttggttgaagtacgtataaatatacttataaatatactgtagtttaagttattctagatttttaattttgaccattattatgaggaaatagaggaaattacacttagtatgagattttaaaagttcttatgataaatatagcacatttaagtttgaccaatttatatggtatttttttatttttagggatttttatagtatttgatatgtcata

SEQ ID NO: 281222 - DNA, 494 bp, Cannabis indica
aaattcggccaaggcttggcctttgatagctgttcgggctggaagttgatttcgtactgacccaattctaccgcccacttcgagtaaccgtccagaggcatctagcttttgtagtatttgtggtagttgttggtcggtgtacacccgaacaggatgagcttgaaagtaaggtctctactttcttgttgctagaatgaggcagtaggcgagctattctatcaatggatatcagccttcgggctcgacaagtcttttaatgatgtaatagactgcatgttgcacgccatcttcttctctgatcagtacggcactcacggcatgctccattactgctaggtatatccccagttcctcaccgtccagaggtttagaaaggacgggagattttgcgagctgtgcttttagatcttgaaaagctctttcacattcttccatccattcgaactttttgtttcctcgcaggatgttgaagaatgggacacatttatccgttg

SEQ ID NO: 281223 - DNA, 191 bp, Cannabis indica
aacttttacactctgacgtggcatcacatgaatggtgacacgtggaatccacttggaacatctgctcgggaagcatagttcgagcaggttgcctcgctggcctacccaaaggaaagtattcagaaatccgcacagagcgaccaacacttagcaaattcagctttcgtatcgtgagtcatcagcacaatccc

SEQ ID NO: 281224 - DNA, 708 bp, Cannabis indica
tgaatttagaattaaaaaaaaatatcatagtagaaaagaaaaaaaaaattagaaaacagatcatcaccgtatcgcatttgaataaaaaatgcaattgataattaatttaaagaaaaaaaaacttatgagatgattttaaaattgatgtcatcactgtatgtcacttttagtcaccactgcgttacaaaataattatagttaagaaaatattagcaattaaaaaattctcacataaaatagagatctataagaaaaaataattgataaatctaataaaaaaaacttatcatatgaatttaaaaattattgtcaccactatatcttagtagtagtatcatcatcttatctcactcgtagttgtaattatatatctatctaataagtttgttgtaaatcaaacaaataaacaatactactaaaatttttgaaaagaaaataaaaactatataggaataggattgtcaatgaatatattaacttctaatatatattaaaataaaaaaaactttaaaacacatttgatatgaacaaaaaaaaaaaacaaaaaaaaaaaaattgcttgatatttttttaaaaaaatcttacatatattttttgtaattataggatgatttaatttttaaaaataaaaactattatatatatattttgatagatttattattttttttaaaaaaaaaaaaggaaaaaaaaacagaaaaatacaaa

SEQ ID NO: 281225 - DNA, 559 bp, Cannabis indica
cctagttcggttctagttccatttgcgattcttagttcgagtttgggtttatgttcgggtcggagttcgagtcctagtctgagttttggtttgggtccggatttcaatctcggtccacatcaggctccgggtgtgggttcgcgtcttgggtcttggtctaggttgggtccgagtcccaagttccaatcttgatctaagtctggattcagttttgggtataagtccttggttctgatcctggtctgggttcgagtttgggtacaggtcctggtctagcttttggtctaattctaggtgtaggtttgaattcgggtcggagtctgtgtccatgtttgtgtccaagtttgaaccgcgatctgggactaggttagggtccaggtcaaagttcgggtcccgagtgcgtgtccaagtttgagtcttggtcaggatctcgatccagatctaggtccagcatttcgatctcagtctgggtcttggtccgagtctaggttcgtatcggaatccctatctaggtccaagtctgtgtttgggatcgtgtccaaaatttaagtccaggtcc

SEQ ID NO: 281226 - DNA, 670 bp, Cannabis indica
gaggttaggagagagagagagatggcgaccaagaggaagcaaaagccagcattttcaatttcattcccccaaaattcacttttcattcaagtaaatcaaataaggtcaaaagaccaaaatgcccctagggccaattctcacctatccatacatacaagggtagtttagtcatctcatgcccataaattctcaaataaattcaagtttctcattattaataaatgccaatatcatcaaattcatttcgggcccgaacccggttcggcccgaaatacccggttatgactataccgcgccaacatgtcagaactcacctgaaaaagacaacataggcatactatataataatatagtcctagaagcacgtaattaaattgatttcatcaatttacctttctcgggtcataattactaaaatgcccctggctcaccaacggactcttaacatataattaatcaaataaatactcatatattgaattatataataatataattcctcaattattcataattatctaattagagttttgctaatctatttcttaactgtattacaataataaatttattgtttaaattttttttttagattttaaagataaaaatataaattgaaaattgaaaatgacaataaaatacaaactagtacctctttagatgaaactcc

SEQ ID NO: 281227 - DNA, 602 bp, Cannabis indica
cccgcgaggatagaaatttgtccaaaagataaagtaaatttgtccaagtacagaagtgcgagtacccatgtaccgcatatatataaaaaaaaagaagaagtgaaattaaacaacaacataaattagaagataatcaagcgtctggagcagcaggagtagtctcatcaggagcagcctcgtccgcgaccttgctgacgacctcattctcgacttcttcagcctgtacgccctcgacctcgtccagaaggttgcctcccccaccttgagtctgggtaggcgacatggcgcgaaaggcctcagccatctcagcagcttcagctccaagaagcgagaagtcgaagtcggggactttggaaagagtggtatagatataatcagacacagcctgatcgtactgtttcttcccattctctttctcagcctccaagtcgcgagccatctcaacgatcgttgtctgcgacttcttgacctcgagctccgcctgttctttcgccctgctgagttcctcgagctccttctccttggccttgttgagttcctcaagctctttctccatcctcgccacatcctgcttcagcttttttatattttcctgaaaatgg

SEQ ID NO: 281228 - DNA, 690 bp, Cannabis indica
taccaatgattttgtgatttttaatttgataataaatattaaaagaaagcaaataaatgtgtaatcaatagtaaaagagagaaaggcttcaagaatcatccatatgcttgtttagctattttgtacctttgattcacaaagttgacacaaatgatataacattaaagttcattatattttgagtatacaagttcttgaaaataaaagaaataatttaatcttatgtagaacctagaaatgacattatacatcaagcaataatgcaataaaagattaaacataaaactaaacataaatattatttttactaaatggaaacacatagaaagagcatgactaatcctatatatctttagtaaaaataatgacaaagaaaatagaaatagagatggtggtgatagtgaaggaaatgaacattaatattacttttcttaatttttaagcacataggaagagcatgactaaacctatatgtttaataaaagtaaataaaaatgaacataaaagatagaacaagataaatactactattactacaatcactaaataaaaatatatagaaagagcatgactaagtctatatatatatttagtatataatagcatatatagtagtatagatggatgaagaacaagaaaataaaagtgaaataaaaacttgcattactcaaataaatattacatgtgaat

SEQ ID NO: 281229 - DNA, 471 bp, Cannabis indica
ctgggactgaatctgaatctgatactggttatcagtttgacgttttggaaacagttctaggccaaagatctgactatcaaagaggcgtgggtaaaaggctcaagggcaaaggaaagaaaccaatccctcaaactcaatcaacggtgcctccccaaccaactactgaaatgatgagcactgtggcagaaatattctcagctatgcgtgccacttgggggggtaatttgacgcctgaacaacgtgctcatatatttaacccacgctttgacaattttattcaaacgtatagtcagtcgcagtcgcctggtggttcgtcttctcagagttatgccgctcctccggaacagcaacaacaacctcctcaaccacaacagccgtcttcgcaacaacaattccaaagtttgtcacagcagcaatttgaaaattttttgcagcagcaaccccaatcttttcctcagcagcaacaacagt

SEQ ID NO: 281230 - DNA, 663 bp, Cannabis indica
gattgcccccttttttttgcctcttgagataaaacattgtcatgcaccaattacacaccaaggaagagtgtttccacgagccaacgtccctgagttgctcccaagaagcccctcgcaaacttctcttagattcccacatagaacccccgaagacgccactccccaaacatcagtaggccgcacctccacatccacaaaattcgtggcatagttcaacactttgacttcttccttatttctccatagtaaacgcaacccccccaactcctaccacatgcatcaaccacaaacataccttcaaacttcaacttagctcgaactcgctccaacacatccttacgacacaaagtttcacataaaaagatataatctggttttctatgggctacagtatcatataggaattgtatcgcccgtgggttgcccatcccacgacaattccaacttaatgtactcataatgcccggtgggcctggaaaccagaacccacctcgaactcgttttttgagagtccattaacatccatactttttaaaattaaataaacctaaattaattgttttattaaaacaaatattattatttagaaattcattttacatattaaactataaactaatatattacatcttctaattttttaaattttttcatcattctaaa

SEQ ID NO: 281231 - DNA, 601 bp, Cannabis indica
tccttctcttgaattggattcttcagagtcttacacactatgattgagtaccacttgatgtgtgtgggcacgtactctatcactatagggttcgaaatattgaagagagaaagagagaggaaggattcgaatgagatagaaaagattggctacaaaaattttgactgaaggtaagtgcattcatcattcttttaatttgaggccatcactatctatttataggaatccaactaggtttaggtttgaattatttagcaattaaaaaattgaataaaataaattgtaaaatagggcataagtggtcggccatggatgtgggccccactttgcaattttgctattttttaacatttatcaattatcaaataaaattgccatctaacatatttattaattagatttaataaagtctcttaagtaacaaataaaccatagaatttcttttcttcacaattaagtcctagcttagtgaaaattcataaattagacatagtctaattttagaattacaattgattaataaaatcaattaactgagtcttacaagcaatatggtctcaactagtatggggaccatgggcctatacaaccaagcttccaa

SEQ ID NO: 281232 - DNA, 239 bp, Cannabis indica
agctcttgtttcagtgattatatgttagttcactaaaacatcatttgcaggtagctaagtgttttaaggggccaaatacattgaggggtgaaacggtaaatttatcccttctcggtgtaaatcatctatataaaggatctttgatcacattaagattataacgatggttaaatgtgatagcatatctatatcgtggaacatatagagcgctctatataaatctgagagtgcaattccaa

SEQ ID NO: 281233 - DNA, 537 bp, Cannabis indica
tttttttcttttgtttttttgatttgtttgagtgttgttttacggttattttgtcataatttatttatttgatgtcgattttactgttcttgctctatgtcgccggaattaatggttattttccagttgttctcgttttacagtggtggatctgtccgtaggtgtggaagatgtaggctataaatatatttcttcttctttctctatggttatttttgtggttttttttactttgattctcctataaatacatttgacgagctcactggcaaaaaagttttgaggtgtgtggttcttttatgtttttctaagtggttatcattgcttcattgtttgacatttgttttgtgttggtttaggtttgttttagtattttttttatcactactacaaaattcactattcacgtctgtttttaagtgacacttaaagaatttacgtcagttttctaaaccgacgtatatcccgtagtcgcaaatagtttttattagtgtcattttccaaacgacgcaaaaaacaattttcgacatttataaa

SEQ ID NO: 281234 - DNA, 554 bp, Cannabis indica
agtatgcgcagtggcgcttatatattggaagtgatatatgtgagtactagtaaccgggattaatagcctagggttattaccataacatgggcagtttaatagcctagggttattaccttagtgaatatattgtgtaaatactatgccatgttggatatatgtatatattgagattatgattatgtgcttaaggcataattaagctagactcggtaagctagtaccttgagttaattttaatgcggtctagggttattaccctagaaaattatgaatccagtgaaagcatgtgttagggttaacgcgcttagtaaatgttatctaagtatatagaagtgtattgtatgagtggttacttagtatgtaagttagggttattaccctaagattatatatgttgtagtaaatgttgaatacacgcatgtatgttaaaagttatgtgtatgagacataattgggttagacctggtatatatcaccaggataaaccatcgaaagaacgtaatgtatggattacgtatatataagaatagggttatgcaagcaaggcataa

SEQ ID NO: 281235 - DNA, 530 bp, Cannabis indica
gggtaatactagaaaattttgagtttttatgattaatttttctatttaattagaaaaatttctcacttttacattatatgggatgagattgttccatcagctgaaaaaaaaattttaaaaaaatttttttggcaaaaaaatgataaaaaaaagttgaattcgacttaaatattttacatataaatgtattttttatatagtgtaaaaaagaggtattttttatatattttttttaattaagtagctaaattaagcatagaaattcaaatttctcttttattattcgctatcagaccaagacctaatggtttaatatttttaaaattaatatttatagttaaatttgtttattacccattaatggataatacccattaagaagtattccatatatatatatatatatgatattaattaatatgaaaaaaagacaaaaagaataaggtagaataaaaccgttttagagtgtcatgtcactcaatgaggaaattatactatatacttttttaacttgatgcctttatttttta

SEQ ID NO: 281236 - DNA, 549 bp, Cannabis indica
gtggcgtactcgtgtataagagtcattcattccgtgggtgtaaggacccaatgtaggcttaaagcggggacgttacacctatgctgttttcatactacataattttaagcaatgtaaccaatgattagtgtaataattcaaattggggaagtaactggaagtaggttctttgtttgaccgatccaactaggataaaacctttgtctcttttattttcaagttttgaacttaatttttttggttttgatttgcttgattatttctcatataagtttgtgctatcaaaataatatttttcaaacagaaaaaaatagaaaacttactatcatatatatattttgtttaatatgttaacatttagtttttataactctaaataagtggatctgttcaaacacctagaacttttctctccctctctctcgactccttgcagcaactgctggagccatggcgaagacaagaggaagagggcgtgggaaaggaaatctgatgaagccggtgaagaagaaaggtcctaactctgtttctgatgttaggaaaaccaaa

SEQ ID NO: 281237 - DNA, 446 bp, Cannabis indica
acatatttgttagtaaatctaaaatcctattaaaatatttccaacagtttggatgtgaagtattaatgtaatgcatctgtaaattatttaacaacaatattagcaacaatttttttagtaatatagttgagaatggaatgaataaatctacaaaatcctacaacaccgattaggtgataacatcaaatcctttacaaataaggaggttgactaataccacataagtagttgtttaagactataatagtaaaggtaacaggctaattgcaaaacaacaaaatttacaatctaattgtgaaacaacacataattctatcctaacaaactcaaagaaatcataactaattacaaaaataaaattgttaaaaccacaaaattctaattgcaaactaattataaaaataagggatattggcggctaaaccacctgaactttacggtttgta

SEQ ID NO: 281238 - DNA, 667 bp, Cannabis indica
tcgcttatcaaaaagactcattgtcgttggctaaaagcgaagttaacattttggtgctttcattgagagaagaatcacaaatcgctcttttcaatactcgacacgatggtacaaacttgtagaggcctgtccgaccaaccacagtcacagacgctggatccgacgttgcaggacctagggagttcaagggttccacccgttgtcaatcctggacagacaggaagcgtggtgaatggtgggagaactcctattattgaaactgcgcctggtgtgcaagagaccggaaacaacggttccgcacacagccagggcgttcataacacaactgttccaccaggcatcaacgcccagacgaccatcgaagacgcaaccgaattgcaaaacctccgcgctacgcttggactcatgcagggtcacaacaataccctgcatcacgatcaagaggaattacgtgccgcagtaaacctcgcgtttgacgaacagaggcgtatgttcgccgagtggagggacaaagagatggaggcattaagggctcaccatgcagaaatcgaagatcgtagtcggcaagccactgtgctgatgcgaagagcctatcagactgtaggccagcaaacgccgaacgtcattcccctaggagaaaccgagaatgatccaacggtgaatgctt

SEQ ID NO: 281239 - DNA, 594 bp, Cannabis indica
aagaagagtttctctctaaaaatctcagttttcatcattgctctctattttcttcccttacacacaaccatcccgtctcatcaattctcttcttacacacaaccatcccgtctcatcaattctcttcctacacacaaccatcccatcacctctgccaagaaccaagctgcttatttagcaagctcctataaaaaccaggctgcctatttagcaagctcctacaaaaaccaggctgcctatttagcaagctcctataaaaaccaggctgcttatttagcaagctcctataaaacaaggctgcctatttagtaagctcctataaaaaccaagctgcctatttagcaagctcctacaaaaatcaggctgcctatttagcaagctcctataaaaaattaggctgcttatttagcaagctcctataaaaaccaggctgcctatttagcaagctcctataaaaacaaggctgcttatttaataacctttataaaaaccaaactgttcacactaccttccaactacatcaagtccccaaaggtcaccacgtatgcccgagattgattcattttttttttaagaatatagacatcatttgct

SEQ ID NO: 281240 - DNA, 454 bp, Cannabis indica
tgctactgtatattgtagaaaacaattcatttaatagtatattagtttaagttggtgatatatgtatattggcgtaaggtatattgtatgtatatcatacgatatattaataaaaaactaattatatgcttaaataacatattagacacagcaacaacaacaacaaaatctaaaagaataaaacatacaataccttttatataatgaaaaattagttgacaaaaattcagtagagaggttttgatctattgtttttcataatttctattaaaagaatagaaatagagtgtttggtacgaggtgttcaaaataatttgattatagggaatattatgaaggagaatatgattatagggaaatgtgtaaactgtgtttagttgtgtagggtaatatgaaatcatattcctattaattaaattagactgttggttgagtacaggaatcttatatatta

SEQ ID NO: 281241 - DNA, 598 bp, Cannabis indica
tctctctcttgctttcggctgggaattcaaaggcaaaaccagatttcttcctttaatttccttgaattttcagcaaggattcaagctattgctagtgagataagccctagaccattggttatttattttcaagcttttaagttaggttgaaatggtgttttggagtaataggagctgttaggttttcatatgcctagggttcgaattttagggtcttgttgagttgattttaactccttgcagctggttttaattggtgttgatggttttatgcaattttaagtttagagttcaaagctttgagctttaatggcaagttgagatttgttggtttgttctgtgaaatactgcctggattttgttgcttatgcattgtataggtgctctggaaagtttcatggcaattggtggaagattgagcaacaaatgagaggttttgggaaacctggtgcaaaccggctagccggtttgcagtgccacaaaaaccggctagccggttttggcagggttccccgagcctttcattttctcaatttttgccatttcgatgcctcggttgggtgtttccccatttccagagttagaataacccattaag

SEQ ID NO: 281242 - DNA, 570 bp, Cannabis indica
tcagtttgggggaatttgttaggctatttttagcctatattttggatcaattttacgttcgcttttcgttgttttaggatagaattatccgtgttttctatgttttcaagttcttcggagtaatagaggcctcgggatgcagaagtgcaataaaaggcaagcggagccaagaaaaatgccattttcagcttgacgcacttctggccgcggctagatcattgtggccgcggctataactagaggacagaatgaatgatttttgaagccccagtcgccgcggcgagatacactttgccgcagccataaagtcaagacagaaccgtggttttcataagctcatctagccgcggcgaggcatcttgtggccgcggcgagagtccgtacgattgagggtatttttatccgacggaccctaaaaatcagatataaatagaaaactacgattggaaatcaggggaagcgatttggagacctaaaacactgtagaaagcggcaagaagagcggaggaaatcaaagtgaagatccagagtcattccaccaacagtttctttctctattcctttttaatt

SEQ ID NO: 281243 - DNA, 520 bp, Cannabis indica
caaccaaacaaaaaaatagaatgaagatggtttctttttcattttattacttctaatcaaatgccacctaaatgctacatatctctctagccatctctcttttgcagtcgcctctcgaagctctaatccattttcttcttacttctctgggttgaactatcgacaaagcttcctttggcggtgatgctctgacccaaaaggctctgtctctcccacaaacacttggtcatctctttgatggtgttctcctctcctttttcgatgagaggttgtcactttccatcaagtgtttcctctattaatggttcttcagtgaagtgtctttcggctaaacaggtaagtactcttatgagtaccactttgaaattaacaaaagatgagaatagagtcaaggttgacactactctttatcatagtatgattggtagtctattgtatttaactgctagtcgtcctgatattagttatagtgtgggagtttgtgctagatatcaaagtaatcctatggaatctcatgtat

SEQ ID NO: 281244 - DNA, 636 bp, Cannabis indica
atggacgcatcagaagtagtgtttttgcttacagcatcttcgtacgtactatagataccttcatttggtccattgaaaataacccagtgtggacctgaactcatacttgatatattgtaatgctaataactaagttacaaattaatttctctataaacttgatgctggattggaaaacgtctcaagtgtcttatataagtcgtggagaataaccctatagtacgttttttagttagctgtactccattgggatgtactccattgggcaaatgtgatgtgtcaaaagaggggtgcttaaatctctgaattacacaattaaatacacgtgtaggcgtacgtagtatggtcaaatgtcaacattattcatcaatcccgtttttccaaaaaacctaatgtcctacggtactgttctaacgtacgacgatggtttaacttataagaagatgtaggtgaagggcccattaatatcagcccaacataaataaatccccaacatatataaatcagtaaaactacccattctactaaaaaaagtcatcactttaatacacgtgtacacgcatggggttttcataatagtactgcgttatctttgtaaagtacaggaatggttgaattcattaaaagatgttggta

SEQ ID NO: 281245 - DNA, 627 bp, Cannabis indica
atacttatatatagcaagagaaagttaaattaaaaaaaaaatgcatactaatataccttgtgagctaattcccccaccccaaacttacaacccaacattgtccccaatgtggctaaaagtataatcttgaattagctcgccacaaattacactcaccgcactcaccccaaacttaatgtgaaacttggctcttgacaagtgagcaattaagttaggacatatgtggaaatgcaatttaggatggatgtgatatgtgtgattgggttgcacaacaaaacgaggctaacggctcaaacttgggtgactagggaaaaattgattgatagggagggttagaaaggctcaaacgtccaaggaaggcctaaatcatttctaagggacaagtctaactaggatttcgcttcaaggagatgcactaaccaattctagatgctaaaattacatgtgaaataatcgtatgagaaaggcaaagcatggtggaataaatacaagtataaactagtgaggagagactaaagggaaacatccataatatccaacaatgcagcatgataaggcaacaagtaaaattaggcagcaacaataatggaatgggcggaaagtatcatcatcgagcagaacactagg

SEQ ID NO: 281246 - DNA, 639 bp, Cannabis indica
taattattttaagagtgattattataaaattattataagttgaatatgttataggtttttataagtataattattgttttaaaaataaatttaattaaaatatttttttatgtaaatttgaaataaaaaaaatatataattaaaactaaattttaaatagaaataaaataaaaagataaaaacattaggtttggagtttgttagttgaacctaccattaataatattaaaaattaattataaataaaaaatatattaattttggtgtagttttcaagagttgatttaaaccaatggattaaatcaaggactataaattaatatccctattgatagttaaaaattacaatacatattgtattagcttccattatattaattaattttatttttcaagattataatgttcaatgtatttcaaatttttagatataaaattaattatttacattaattatattatttataaaatcatgcatgaactagtaaataatatacattcatagtatgcttattcttcaacttagtttaaggtaaatgttcaatgtatttaaactatactaaatccatttcaagcaatagaacacatcaaatagctcagaaaattaaaaacaccattagagagccaacttaagctctc

SEQ ID NO: 281247 - DNA, 783 bp, Cannabis indica
tgtatgaatttatttgaaccaaatcatttacttctgtttattgatatttgtagtgccaaaatgaataacccacaccccgacccactcctagtcaatgcctttgctaatgaactctatagtgtaaaaatgcaccctggaagttgcattaactcacacctgttgatgatgaatctgaagtttcaaaaagcaaacttgcttggaattgaattatcaaaagaacagtgggttcagttcatacttaatagtcttcctccagagtataatggatttgttgtatcttatatgatcaacaattttaactcttccgacatggataagctagaagcagaattgcgagctcatgaacggaattggattgcaatgccgcctcccggttttgcaaacttttgtcagaggaaaagaattaagaatgaagcttctaacaatgctgcttcttcaactacaattgatggtagtactcttcaatgttcaaattgtaatgagaagggacatcaggaagaacgatgtcccagacttctaaacaattcgaatgaaggtaatgcgtttttctttgagtcatgtgttttaaagaatgacaaatccttctggattgttgattctggatctactaaccatgtttgttcttcattgcagctgcttgaaacttgggattatcttaacccagaggagttgaagctcaaagttggaaatggcgagttagtatcggtccaagccaaaggaagagcccgcctcaagtttcaaaagaaatttttagttttagacaatgttttgtttattcctaat

SEQ ID NO: 281248 - DNA, 576 bp, Cannabis indica
aacatgtagttattttttatttatatatttttgaagggcatatttgtcttttttatttttaattaataaaaatataattaatataaagtaagttaaggaaagggaaaggtattccttatgaaaatagggggagaacttttccctttgttttctccttaatttgtgtggggcccactaatttttcccattccaaaatttagtaaacaaatgaatgggaatgaatcctatacaattgattcccattcccctttagtaaacatgccataaattatatgagattcaatatttaattagatcaataacaatattaatatatagaagagtgctaagcactaacaatatatttttctttcttatatatatatgtatatgatcaaactttcatgcaaaaaggtaatttctcaattatttaattggttaattatttgtttcagtggtgtatagaatctaaattatatgccattattatatttttcaattgggctttgactaatataaaaaaaaaaggaaatttttaagtaaaatggtccccaaattataggactatgttagtttatgtccttattttaaaaaaat

SEQ ID NO: 281249 - DNA, 831 bp, Cannabis indica
tcggatactatcttcatgggaattccaaacctacaataatgttcttgacgacaaaatcaaggactttcttacaggttatggaaacaaggggctcagcctccgtccatttagtgaagaagtcaactgccactaccgcatacttagctcctcctcgcccagtgggtaatgccccaattaggtcaatcccccatatagcaaatgggtaaggcaaggtcatcattctaagttctgttggcggtacgtgaggtatatgtgaaaacctctaacacttatcacatttcttcacaaactcgtgtgtgtccttattgatcatttggccagtaatatccttgtctaatgatatttttagacagactttgccagcccgcatgatccccacagaagccttcatgaatttctctgatgatttcatttgcttctgcggagagaacacaccgaacaaggggcattgagtaccctcttctatagtttgccttcgatcatagtgtagcgaggcactgaatacaatagtttttgttcctcgtttttgtcatttggaagttgtccgtcgagtaaataattgataataggagtcatccatgtaggagagctatctatcatctcgacgtcttcagtttcacatatacttggctcgctcaacatctctaccgaaactaaattcaattcatccaagtcattctgcgaggccagttttgctaaggcgtcggcgttggagttttgttctcttggaatttgttcgattttaaagtaatcaaatctttccaagttcttctgaactttctctaaataatttgccatttttaagcctttggcctggtattccctgaggac

SEQ ID NO: 281250 - DNA, 798 bp, Cannabis indica
ccatttacagcttgacctactgtgcgaaacaaattcttgcttaccgtcaaatgctttcttccaagtgcgaaacacatgttcttttggcaaaaaccttcggtgtcccatgtaacacatcttcttcgagtgttttaaatacatagaacatgttctctcctcacaaataggacatgctttgtaccctttcacactgtatccagaaagatttccgaaagctggaaaatcattaatggtccacagtaatatggctttaagattgaactcttctttcctaaaggcatcgtaagcagaaacaccctcatgccacaatcgactcaagtcatcaactagaggggctaagtacacatcaatgtcattaccaggctgtgaagggcctgatatcaacagtgtaagcatagtgaacttcctcttcattaccaaccaaggcggcaagttatacatcacaagcaaaactggccagcaactatacttactgctaaggctggtatgtggattgattccgtcggcagaaagaccaagacggatattcctaggttcattgccaaattcaggccacctagcatcgattgatttccaagcgggtgagtcagctggatgtctcatcttaccatctacctttctatcgctggcatgccaaattaaattttttgcatgattggcattttgaaaaaaccgaaccaaacgaggtattgggggtaagtaccataatacttttgcagggacaccaacctttacctcgtcagaattcttttttttttgccacctagactcaccacaagtgggacaccatattgcatc

SEQ ID NO: 281251 - DNA, 502 bp, Cannabis indica
gtgtaagttgtgggagaatgagaattttggctttttgtatggtactttatttggctgagatgtaacaaatttaaacagccattttttcctttttgtttttcttctgcaggtacacttggcgtggcttgaatggaggaggggttgacggagagcttgcgtggcgcttgctggttcgttgggcgctgacggaagtggggaccaggggcttcgtgggtcccgtgcggaaggaggagaggctggcaggtggaaagcaggtgaagccagctccactctctcttgtttgggtgtgcttcacacgcatagtgctggaccgtttgatcaggacgtggacggcttcgattggagcttgcagttgaccgagagtgggtctctttgttaggttatatttagcctatgtttcgggtctgaaaagtaagcattttctcatctattggtgtcttttggagcggttttacgcttgatttttattgtttcaggttcccggggtatcaaagttcaaatt

SEQ ID NO: 281252 - DNA, 668 bp, Cannabis indica
tcataattttttgaatttatttagaattattgtgaattaattagtttattttataaattaattatgaaaaatacttagggtgctgagaaaaatcttagtttattttatatgatgggctatgatatataaactattataaaattaatagaatgaattttctggcgattttgtatttttcatgaattattgctgttatttcttatttaaattatgaaaaatacctaggttgcttagaaaattcaaagtaaattatttgtggcttagtaaaaaatacaaactatgttagaagagttagattcagtttttaatcaattttggtatttttcatgaatttacttaattaatgcttaagttaattatgaaaaatagataagtgttgttaaaatagtaaaatgtatttttgtaataccatttactgtctatgatataaaatggaataggttttattatttattagttgttgtaggtatttattataattattggtgattaattaactatttatttgggttttaattagaataaatagtattttagtaaaattttacgtaaaagggtgttgtatgaattcatgttttatgttaaaaatatttatttgagtacatgcaatatgtttgtgtgaatcaaaataataaatgcttgagtatggtgtgtcatgcaagtgaaat

SEQ ID NO: 281253 - DNA, 689 bp, Cannabis indica
gacaaaatatacacataagtatagaaaataagatgaagagaagattataaaatacaatataaatagtagtatatatatagatgtgagaacaatctcaacaacactaacaccaagtgtcaagtaggggaatcacaaaacttgaacaaggttttacacctttgtccaaaagcttatttccccctaccacaagcacttagggaagaaagaaatggaaatagctttctggaattatcaagcttatagtttctagcaaggtgctctctttgatagaaactcacaaaaaatattgtcatttttcaagtgaaagaaaaacctctatttatagtgttttaagatcacatattttgaaattcaaataacctacacccaagggttgttaccatttcttaatggggtgtaaatgagattaaatgggtaatttggaggttatgagagttgttaaaaaccatccttatagccaaaaaaacgttcaacaattaaagctgaaaaaaacagtaactagttactagttaccaaatttttcagcttttgcaaacaactcttcaaaccattccaaaccattgccactttattttatatcacttatacactttataaatgacaaaattcaatcccaacaactatatttgaattatggttttgaattttcaaaacaattaaagttgtgtaaccactctttacacacttaa

SEQ ID NO: 281254 - DNA, 509 bp, Cannabis indica
gaattaaaaagtaaaacttgctgcccaggttaaaactccttcttgactaagcttcgatcatgccactttttcgttctctccttgtaaatcttggcattctcataagcttcattccgaaactcctccaattcatccaattgcagtaatcttttctctcctacagccttcaaatccatgttgagagtcttcatagcccaataggccttgtgctctaattccaccggtagatgacaagcttttcgaaacaccaaccgatatggtgacatcccgatcggtgtcttgaaggctgttctatatgcccacaatgcaacatctaacgttcttgaccagtcttttcttgatctctgcactgttttctccagaatcatctttatttaccggttagaaatttcagcttggccattactttggggatgatacggtagagcagttctgtgatggacaccatatctcgaaaggagtgcttcaaactgtttgttgcaaaagtgactcccttcatcgcttatgat

SEQ ID NO: 281255 - DNA, 532 bp, Cannabis indica
gacaataaagctataacgtcttcaaatagcatccaatctcattgaaaaacaccttcccattaataatagttgtcaccagagctagcgaaactgaaaaaatattacaacaccaaaccaaaaaatataattatattagaataacaatttataaaataacaattaaaatacaaacttaaaatttgacccacaacccataacactaactcaaaattactaaaaactaacaaaatttttaaagtataactagccaaaggtattatcctttggctagtaacaacctactagcaccctatttgagactactgaaaataaaaaacaattagattaaatttaaacttaaacttatcggtaaattttatgtaattgtaggccctccacaaaacaacctacaaaataataaaaaataatactccattacaacacaatataatgaaaaatataaagtgaaaagtgatggtaaatcaatcaatattaaagaaaaagacttaaaaagatttgaaatacttatctgttaaaagtgaaaagaatcgtc

SEQ ID NO: 281256 - DNA, 553 bp, Cannabis indica
atatatattttgtatttgttaatatatgatcattccaaataacatttaatttttgcagaaagaagcatttaaatattatgttcacactagtaacttgaattattttattaagaataattccaaaattttgtatattctgaaaattgggaatatgcatctttataagattaattataaatttattaaaattaattaataagacaaaagatattaaaaaaatcgatcataaaattttaggatttttttttttttttttttaattgataaaaccaagcaaccaaacaaggtgttataggtaggtaggtgtagtagtagtggtaaagttagaagtaattaataatgataataattttggatgtataaattaataaattatgggtattcgagcaagaggaatccgtataccatggtgttgttaagccgtgctatgtacgtatactaccttttatcttagcaagttatctatcaactaatatatttttttcttcattaaaacattaattattccccatttatttaaatcattctaaattttggattatgttatatcacc

SEQ ID NO: 281257 - DNA, 565 bp, Cannabis indica
tttttaaattaaaaatttatctgcatgaaatctaagtttttgaaaacttatatcgcaaatttacctttttatttatttagtttaggggtgttcattggatcacatccaatggatttggacccatccgatccaatccaattatttattcgatattggatttttccatccgatccaatccaattgaattgtcatccgatccgatccgatccaatgaatgtattggattggatcagttctatccattggatgctttaactggttttttatttggattggattggatccatccaatgaatccaatggatgaatccaatccattttagccactatttaggctgatttcattaaaaagaaaaaaaataaaatgaaaaaacataatttaaaacctaataaatccaacatagataataaaataaatatataaatattaaataaaataattaaataatataaatataatataaatataattgatggacattggatgatattggattggatcggttatccattggatcgaatgtctcatccaacatccgatccgatctaattagatttttaaaaa

SEQ ID NO: 281258 - DNA, 328 bp, Cannabis indica
ttgttgttttaattatttaaaacgtttagctgcaatacacttgtaagaatagtatgtttatgaagtattaaacttaaataaaaagtacttaccaaaaagaaaacttaaataaaaagtaatacttagttttttacgtatttttctttatatttttaagctaatattgaaatttaggtgtgtaattggatatccaattaaaaaaccaatccaatccaattagtaatcggattggattggattggattgcgaggtccaattagattggatcagatgataatttttcaaatccaattactaattggattggatcggatgaggaaaaaaaggt

SEQ ID NO: 281259 - DNA, 626 bp, Cannabis indica
aaggtaaaataagtaatgtgcttcttcgtaaattcacaaatgaatcatttactggaaataaggatgtatgtagtgatgatatctacaatttcctccctccttgctctaaatttagagcgagtaagcataattttagccggaggaagaagagcttcatcaccacaattatgattattcttcccatctcgattctctttgccattttcggggttggtgtggtctttaaaatttggctgaagagaagaaaagtccagactccaagtgatcaaacagtgatgaagaacggagacatgttttcgatatggaattatgatggaaaaattgcatttgaagatatcatacaagcaactgaagactttgacattagatattgcataggaactggaggttatggtagtgtgtatagagcacaactacctaatggcaaagtaattgccttgaaaaagcttcacagtttcgaggctgaacagtcaattctaaggcagagctttactaatgaggtacaacattgacagaaatacgccataaaaacattatacgactgcatggattctgtttgcacaaaagagtatgtttttgatatacgagtacatggaaagaggaagcttgttctgtgtgttgagcaa

SEQ ID NO: 281260 - DNA, 620 bp, Cannabis indica
ttccttattgcataatccatgtcagtgcaagctaggtggagaagaactcgttccttccagattttgaagttgtcactcctaagctcagggatttcactagtgatttcagcatatttagaggtggatgaaatagctgcaagaataggattacaaaaaatttagatgttaaaagaattgaggctttaatgaattcatgttttaccaatgtagaaacatgatgaagatgaaaattttattaaatctaaaattgcctgtgggctaaattttaaatctaataaaattagatgaactttatgatagatttaatgaagtatttaatttagaaataatggaggaatgaaatctatctttaattaaaatttgtgataacactattaattcaaatcctcataactccctgtggggtaaattaagagaatttaacttaatatattatcctaattaattataaaaatataataaaatccctgtggggtaaaattattatatccaaataattaattacaagttttgtccattaaggtgaattttaattaatatataattttatataattaaagatgctgtggctactccctaattataaaaaattatattttcactttagacattaggtattg

SEQ ID NO: 281261 - DNA, 1039 bp, Cannabis indica
gagctgattcggagaggaaaatttgataagataagaagaacgaggaaggtcatccccgagcggatgacaaggaagaaaatcaaaacgcgagtggttcgagaacgcctcgcaatatcttaaccatcattggagggccccatatcgcaggagactcgtcgcaagagcgatatgccaaagaagccaaggagaagccgctcactaatgtaaacaatcttagtgagcggccagagaaattgtttaagaaagaatgcgacgacatcaccttcatggagagtgatgcgagatgggtccatcacccgcattccgacgcactagttgtcatcgccaatattggcagagataatgtccaccgcatactcgtggacaatggaagtttagtgaatcttttgaacttccaagccttcaaacaaatggggttacaagagaaggacctgcgacccgtgacgtcgagcatatacggttttactggcgacgtcatcccattaaaaggaatgatcaaactcccaatcaccttgggaaccgccccagtaacagccaaatcaatggctgacttcgcagtaatcgaccagtattcggcatataatgacgtgattggtcgaccaattttgaaggagatgaagatcataacctcgatctatcatctcacaatgaagttccctactcccgctggagtaggttctgtgcgaggagtccagtcagactcacgagaatgctacaacgcagcagtcaagctcgcagagaaaaggtcagtaaatgttatctacctattggaggcaccacctcctcgccaggaggtcctcagaatcgaagaggtaccgcacgtggacgaaccagatttggatccaagaatccttgatcatgccgccgcagcccaagccgcggaagacaccattgaggtaccaatagatcctgtagataataacaaagttttaaaaattggttctaagttgaattttcagcagcgagaacaactaacgacctttttgaaacaaaatcttgatgtttttgcttggaaacattcagatatggtcggaatatc

SEQ ID NO: 281262 - DNA, 568 bp, Cannabis indica
ccccattagtgttttgtcttatgtgagttattaaatggaataaatgtttattttaattgattattttggctgaaatagattaatgaaaaagctttcattttattctttttgttattcaaagttagaaaatagaaaaaattgcaaaactctctctttctttcctctcattttcggccaagcttgggagcagctagggctggattttcttgatgaattcaagttatttttagcaagatctaagtaatcctagacaaggtaaaccttgctctagcttcttttcatgttctttgaaattttggatgagttttaatgtgatgcatgcttgattatttgttattgttgctgctgtgattttgttgttgttactggaatttaagcatgttaatttgtggttatttaggttgttagtaatgaatgttaattgctttgctcaagtttgaatttttagctcaaaatatggttttcaaagagaaatgattgaatctgttgctgggttgttgttaatgtttttagttgatttttgaagctattttaagcatgtttaagtagaattaagctgcttggtatg

SEQ ID NO: 281263 - DNA, 511 bp, Cannabis indica
acacatatattgcgagaatcaacgtcaagtcaacaacaaacaaaaagactgcgaaatgattccactcacactaccataaatgaagatgaatcttcttgtggagataatgtttctaccaatgtcgattgtgaaactaatttatttgtaaattcatcatcttcgggcaatgtcaatttcaatcaggtttgcatttgacccatattttttttcttcaaaactctgctacttccttcacgtgatgaaactccatatgattattttggatgttgtttttgattaatattaatatataatcagaacccaaatgaatttgctgggggaccaacctacaataaaagaataacaagacctcgtaggggtaagggacactttcaatttataattaaaatcaatatgttatgtgagttggaatttgatacctaattatttttttacaataaaaaaggtctccatcttcattcctcacctcgatttcgtcaattgctaaaagaggtgccatctgaagcatttt

SEQ ID NO: 281264 - DNA, 878 bp, Cannabis indica
ttaagggatttagtttcatgttgtatttcctgaggactttgaaacattcgtccaggtcgtctatgtgccccccagcctttttggatttgacgagcatgtcatccacgtacactttcatatttctgcaaatctggtctttaaacatcttgctcaccaatctttggtacgtagctccagcattttttagaccaaacggaatgactttgtagcagtagagacccatatctgttcggaaacttgtatgttcttggtttggcggatgcattttgatctgattgtagcctgaataagcgtccatgaagcttaaaattttgtgcccggctattgcatctacgagctgatcgatccttggcagtggaaaacagtctttagggcatgctttgttgaggtctatgaaatcaatacagactcgccatttcttgttcggcttgggcacgaggacggggttcgcgaccgcagccgggtaaaaagcttcaattatgaagttgttgttgcgcaactttccaacttcatctttcagggctactgatcgttctttatccagcaatcttcatttttgctgaactggccggaagttaggatcaatattcaggacgtgtgaaataatagacgggtcaattccgaccatattcgcatatgaccaggcaaaaacatctaggtttgctctcagaaattttatcaactatgattttacttcgagcaacaaaccctttccaatttttagctttctagccaggatagctggatcgatctcgatctcttttaattcttccactggtccaacattgctgtttgggtccccaaatcgaggatccacatcttcatcatcgccttgggaagtttcctacttgggaatgttttttcccttgtctaggctc

SEQ ID NO: 281265 - DNA, 555 bp, Cannabis indica
aagataaataattaagcaaaaagatagattatttactaatttcaaattcaaattacactaatatcatgaattaaattaaaaaatattaaattaattcattatgataattagagttgaattaggaatagtaaataatctataaatacaaaactacacaaaaaatcagaagttaattccatgaaaaagcatgaaaaaatgaagaaaaacgaaaattttgggagttgtacggacagtatgcttgacagtatgccaagcatactgtccgcgcgcgtgatccctggtgacagccgagaaatctcggcggaacatgggaagctgcagggtgtccgcgcgcgtagggaggcaccagatgaggtccgcgcgcgtagggaggcacctgacactagtttcgcgcggggatgaaggattcagacaagaaatttgtctgaatccgcgcgcgcgtgtaagtgcacagtcccttatcttttttcgaatctttaaaaaatcataactaattcaaattaaatcgaaattgagttctgtaaaaaagtaatttgcttaattttttccatacta

SEQ ID NO: 281266 - DNA, 588 bp, Cannabis indica
gtagaaggaaggacgtacttctttacttttttaagtttttaggtttttttttttttttaaataaaatatgggtttagaaataaatatataaaaaatatgacaaagtataaatcctataaaagtttaaaaattaaaaaatactatataatgtgatcaaacttaaaattatcatatttaagtactttttttgttaaaaaaaatctatagttgatgtaattttaattttaaataatgtagagcaaagagaagttaacgtatgatatatgtaaatttttaaattaaaataaagtagaattttagttaggtatagtaaaaaagttcttcatactcaaattggtaagaatgggagattggagggaagtaagttgattctaagtgtgggactttgaaaataaaaaaattattggtcctttactcataaaatatggtgcaaatactattttggaccttgtattttataaaaattaccaattagattctctattttgctaaatgataaaatagatcatgtattttttaaaatagtacaaataggatcctgaactgattttttgtcaaaataaaatttaataataatccaatctaaaa

SEQ ID NO: 281267 - DNA, 610 bp, Cannabis indica
taacatatctaaagcaataacacaacccagaatgcacagaattgaaaaacaccatgtgagctccaagctttgagttcaaactcaaacttggctaaagctcactaacaagcctcaaaactagcttagaacttcataaccaagcataataacactgcagaaaactaaccctaaatcatgcaaacactacagccacaaatttcgaaaattctctttgaaaaccaaactttgagctaaaactttcaatcttgaaatcaaagcaattaacatgcatttacactagctctaacctacttaaaacagcaagattaaacctcagaaacatcacaataattcacagcaacaagaaccactaaaacaagcatgcaacaacacttctttttcatcaaaaattcaagaaaacatacaagaaaagttactagagatcaaaccttgacttggattacacaaagagctgctgaaatcaaagggttgagagagcaaaatcaagagccctagctgctctaagggtggccgaaagagagagagctttgagagagaaaaagttttccaatttttctaacttagaattttttgaataaatgagaaacaaaagcaatttacccccatatac

SEQ ID NO: 281268 - DNA, 511 bp, Cannabis indica
tatgcctgtgttgtcttttcaggtgtgttctgacaggttggcgcggtatagtcacaaccgggtatttcgggccgaacggggttcgggcccaaaatgcaatttgaattgaattatttggcattttatttgataatatgaaatctgaaattatttggaaataaatgagtgtggaatgacataaatacccttgtgtgggtgaataagtgtgcattagccctaagggcattttggtcatttgaccttttttctattatacttggaaaattggattttattaagaaaatcaatgtatttttctggttgtttcatgccctcacccgaaccctcttcctctctttccctccttggttcaatttcttgatttggaggaattgcttgaagattgaacttggattttggtgtgtttttgcttaattcttgcttaaggcttgaggtaactctccttctttgaatttaattgagattcttgctgaatattattgttgtaaaagcatgaaatatgatgtgggtt

SEQ ID NO: 281269 - DNA, 776 bp, Cannabis indica
atagagaaaagagatgaaaagaagaaccaagtgatgatgggtcaccaaagtttgaataatgtttcaacacctttgttaaaaaaaattatttttctcctctgcaaaacgtttaggattttgtggaaatatttttgaaaattattaaaaactaactctctaattttaagtggtgtttggtaataattttttaattaattttttatttttaaaattgaaaaagtaaaaatattttttaaaagcatattctataaaactgtttttacttttaattttttaattaaaattaaaattttaaaaacaaaaaaagtcaccttcaatatttttttaaacaagtttttttttcttaatcaatattttagactccgacgagacccaaattcaaatcctccctccacggtcgtagcactgaacccgacctctgacccgaacccaaattcgacccctaatctaaaccctacttaaataaaataaaataaataaaaataaaaataaactttacggaacacacttttattttctatttttaaaattgaaaaacaaaagtggttgcagaacgcattttattttttaaaaacaaaatttttaaaagcaaaaactttatttttattttgtgattaaaaaattagaaaacaaaagtgttaccaaacgttatgtttaaaaaatagaagagaaaaaagtgtgtcttatgagtaaactataggatcttatttatagtgtttaggttagaccaaaatttgaaatttaaactccacttcgctttggctgttattgaaaat

SEQ ID NO: 281270 - DNA, 531 bp, Cannabis indica
gcacaaggtgactgggagccttacttttcccattgggataagtgtcgtcccgttaaaccctgtgagctgggacccactaggtgagaggtcccggtccgtcaagcctatcgcggtgaaggcttccttgaagagtaggttcacggaacttccattgtcaattaagactctggccaccactttattcgcgatgggggtctctatgaccaatgggtcatgatgagggaagcgcactgtcttggcgtcttcttccgtgaacgtgatgggttggtccatcaaccggggcctttgagctgggagttgagtaacttcccaaacctcactgtgtttcgcggcccctgcgtatcgcttaagctccttgcgagtagttcctccgatatggggacctccggagatcatagctaccctcccattaggccggggcggcagaccggggatatgctgggcgtcgcccgtgggagcagctggagccaatgcccctgctgtaccccccggtgttccctgagggcatacccgcagtcgcctggcccggat

SEQ ID NO: 281271 - DNA, 644 bp, Cannabis indica
atgatctcctggaataaaacatattatcttggatgttccggcccgggacaaaagctgcttgagtaggacaaatcaatctgggcaggaacactctgattctatttgcaatgattttcgagatcaccttataaatcacattgcacaaagagataggtctgaactgagatacttttttagggttggggaccttaggaatgagagtaatatttgtagcattaaagcctctatgcatattccctgactggaaaaagtccacaactgcatcacagaagtcttgtcccacaaagttccagtagtgtttgaagaagagaactgacataccatccggacccggagccttcaagcttcccatagagaacagcgtttgtctaatttcctcgtgacctgggatcacctcaagctcagactgctccaaaggggagagatgatcatggattaagtagtctaagctttccagagggccctgaggcgggtgtttgaaaatgtcacccaaaaaaccagtaaactcattaccaatctcttctttattagttatccacacaccatccttgttcaagatactatccacggagtttcttctattacgaatcgtggcagaaatgaagaaaaattagtacacttatcaccatccctaatcacattac

SEQ ID NO: 281272 - DNA, 766 bp, Cannabis indica
ttcgagaagaggagcgttggggggcggaggaggtagctgaaatatttggcaattcaggtcgagaggtgaaggaagaagggagcctgatcggagtacggaggtgagccggtgccgaagcgaagaccggcattgtaggtttggaggggataagggaaagaggggttgttgggttgcgaaccacagtagtactcaaaaaagggctcaaacgcctctttaataataattactactaagggcttttctttacaatatattcaacggcgagatccacaatgttaatttctctaatttttattgattttgtttcttttattttaatgggtaaatagcggtaagtacctaaagttttgtgtatgtaagcggcataaatttaatgattttttttagtggcataagtactcaatatttataaaactgtaatttttctctattttcgtcagtacagtatttttcgtacagaccaataatttaaaatttagggtcttatatgtgtccagtttaagacaataacagagatgaaacggtaagaaaattacagttttataacattggttacttacattgggtacttatgctactaaaaaaattaattggctttgggtacttatgccactatttaccctattttaatcatcaattaactcgtaagaacatggtaaaaattacaggatcacttgctgaagtgaatatataaagtaatattaatgttattattattcttttttttttggagttttttttatttttatatttttaaatatttttt

SEQ ID NO: 281273 - DNA, 592 bp, Cannabis indica
cctatggaagaattagaagagattgaggtcgatccagatatcccggcgaggaagctgaaaagcgattaggatttgttgctcgaagtaaaatcagaattgataaaatttctgagagcaaacctagatgttttcgcctggtcacatgcggatatggtcggaatcgatccttctattatttcgcacgtcctgaatatcgatcctaatatccggccagttcagcaaaaacgaagattgctggataaagaacgagcagtagccctgaaagacgaagttgaaaagctgcgcaacaacaacttcatcattgaagctttctacccggcttgggtcgcgaatcccgtactcgtgcctaagccgaacaagaaatggcgagtctgtattgactttacagacctcaacaaagcgtgccctaaagactgtttcccacttccaagaatcgatcagctcgtcgatgcaacagccgggcacgaaatattaagcttcatggatgcttattcgggctacaatcaaatcaagatgcatccgccagaccaagaacatacaagtttccggacagatatgggtctctactgctacaaagtcatgccattcggtc

SEQ ID NO: 281274 - DNA, 661 bp, Cannabis indica
aattaaataataaaatagaaaatggtaaatacatacccttttcttgttttacaatttaatttaattaaaaaataacaaaaatttaaaagttaacaaaaaataccttatttcctcttttaaaattatcatgattattatgatcttattttaattaaggtcaagttaccaaaaaaaaattaatatctgaccttaaaaaaaataaaataatcaaattttaaaggaaataagaaaaaggtaagcaaaacttgattttttcctattttcaaaatcaaattacactaatatctaaaattaattttaaaaattaaaattaatttatttctgataattagatttgaaatttgaaaaacaaaaatcaacatacaaaactacacaaaaaatcggaatttaattccatgaaatagcatgaaaaatcgaaaaaattggaaaattggatgaactgtacggatggcatgctgtgcatggccatccgcgcgcggatccagggtgcatgaccgagagatcacggcgcagggaggctgcaagcagccattccgcgcgcgtgatgagttgctcgtcaccccgatttttccaattttcaaaaattcataactaattcaaattaaatcgaaatcgagttctgtaaaaaagtaaattgcttagaattttccaaactatccaa

SEQ ID NO: 281275 - DNA, 532 bp, Cannabis indica
tagtataatgagtgggagcgctaacataaatatggagtccataacttctataagaatttagaagtgaaacgatgatatcctttgagcttggctaaacagagataaatggttgagatctcatttcacttctctgaaatatcatttatacggagctaagtgttttaaggataaaatacattgaaggtgtaacggtaatttagtgcctattcaatgtagatcatctattagaggatcattgatcaaattggggttataacaatggataattaatagcgtatctatatcgtggaacatatagggctcggtcggaacgccgtattgggtagtattgtattgtattgtattatattgaattggattatatatcatatttttatttaatactatattaaactttaatttatactaaaatattatatatttaggtgtccataaaagttaatgccacgtatagttttacataaaaatattgtataaaatacaattcaatataatacaatacaatacaatacgacctaatacggcattccaa

SEQ ID NO: 281276 - DNA, 718 bp, Cannabis indica
gaccctagaacaagactaggaccgtgaccaggacctggacccagacctagaaccgaacacagacctaacctcagacccaaactgagactggaactcgggcccggacacagtcgtgtacccagagcgaaactgagacccagacctggacttaaaatctgggacatgatcccaatcacagacttggacatagatagggatccagatacaaacctggactcgaaccaagacccaaactgggatcgaaattctggacctagatctggactgagatcctgacccaaacccaattttttaccagcactcaggaccacaacatggttcttgacccgaacctagacccagatcggggtccagacttggacacaaacccagacacagactcgaacccgaactcaaacccgcacctagaatcagaccgaaagctagacccggacccgaacccaaactcgaacccagaccaggatcagaatcaagaacttagaccctaaactaactccatacacagatcgagattggaacatgggactcgcacccaaccttgacaagcacccaggacgcgaacccacaaccagagcctgatctggacctagacttaaatctggacccaaacccaaactcagacaaggactcgaactccgccccgaactcatacaaaaactcaaactcagaatcgcaaatggaactagcaccgaactaggactaggaccaggacaaggac

SEQ ID NO: 281277 - DNA, 225 bp, Cannabis indica
cgctttttggactgcgatttcagcctcatgatcgacagcctttttccttacgagtaccaattctgagtagctgccttcgtcgtaggcgtactcgtccaggtttccctcgtaattgtcatcaggaattccttcttcttccccggaaccctcagttgctcctgaggcaacatcttcctcatttggatcttgagcatcttgaagagggcgaggttgacgtgtgcttcg

SEQ ID NO: 281278 - DNA, 454 bp, Cannabis indica
tttttcatatttattttcaagtcctataatattttgggcattttacaattttgtatacattattttaattaattacaaaatatgtgcaaaaaaacttattatcattttctcatacacttttatatataattaaaaactttttttcaatttttattataatatatatggtaataattattgattagtatatatatggtaatattggttatgtttatttttatgtttacaattataataaacatactaataatataaaacattttatatatgtgtttattggctatgtttatttttatgtttacattataataaacatactaataatataaaatattttatatatgtatttattttattttctattattaaacatactaatttaaaacaaaataataatattcacataagtttattatatcactctatatatataaaaaaaattgtttaatcttta

SEQ ID NO: 281279 - DNA, 618 bp, Cannabis indica
gcattttctttttggcttatctctgagattagcagcctttttctttttaactattttcacagcttgaacacgcttcttgctattcttccacttcttcttgttgttgggtttggaagtagaggcaatgtttgcctcagccttagccaccccattagcattgctagaactaggagctttagatcctcctttctgtggtcctccaatcaaattttcaaatgtctgaaggttgttgattaactcgtgaaagtcaagctccaacttgttcatgacataatttgaagtgaagggcagaaaggctggagtcatactgtttaagatcaaactcacttgagttgtctgatctataacagctccatgattctcagcttcctggaagtaactagtcatctggagaaggtgatcacgcacgctctgatgaggtctcatccgtgcgttgatgaaattcttagtcgcctcaaagcgagcttgaattgatgccatcccgaatagctcagttaactggttcatgatttctgcagccgtgagagtgttagcaaaccttgtcttcaaggtgtcaaccatgctagacaacatgaagtatcaagctttgttgttggcattctgccaacgctcgaactt

SEQ ID NO: 281280 - DNA, 600 bp, Cannabis indica
taaaatacatacctcttgagtgcaaactacagagtgtggaatggagacgaggaaaatagagaggaggaagaagagcaaagggtctaggggctagttgcgttggtttctctctctctctctcaatggtattaagcgtcattttttaaatctcgcatatacattaggcgagtgttaccaacagacgcaaattgtaaaaaagttttttaatttttttattttattgcgtctgtttgtttttttaccgtcgtttataaatagacgcaaatcatatattattagtgtcggttataaatagacagttttaattattgggtactattcacgtcggtcaacgctatgaatagtagcgttgatcgacgtaaatagtgtaatttgtagtagtgtcctttggaattaattgaaaagccatatggactatggattaaagctcaacctcagaggaagaacaagctgatcggagaaaggtggcttcgaacgggcacaactgctgactctcaactttttgatggtggtgagaatgcaattaatgttcctgtcattacccccacgagaaatcagggattgaagaaaaacgattgttgtaggagctgactttgtgat

SEQ ID NO: 281281 - DNA, 714 bp, Cannabis indica
aatactgggacacggcaaactttacatttttactgtccaagcccatttttatttcttttatactgcccaggcccaatatatttacttttatactgtaaacagtaacaaaacacaaacgacacctctccttcgtggttggggacggacaaatcaacaccagaatcatagaaacaccaggaaaaaaccataaaatctggcaaagagaaaaaaattactaaatcaacaacaaattactgttttgtagtgttattttactgttgttttaatatgaaaaaaaggccacgtaaatgaaatattgtgaaaaatgacaggacatggaatctataccagttctcataaagagcaatggacaatgggaaaaagaacataattatttcaagagaatgtgacaatgctcgaaaacaacacaacaatacttgaaaacaacacagcaacaacagaatcatacacattggaacaccaattagaagaaggaggagagtcaaaaacaagagaatttgaaaacgacaaattcgacatagttgactatgcgaagctggttgcttaaaaaaatggtagaaaaacttaaaaacaacagtaaaaaactagatccaaaaatcgacatcaacaacgcgaagctaataacagacaaacaccacccagaagttgaaaaaagtcaggcatacgaagacaaggaaacactgaagaaagtttaaagctactacgcaataacaa

SEQ ID NO: 281282 - DNA, 970 bp, Cannabis indica
acatcccatcatctctagtatgaacttgttttttccacatcttgcaaagatctatcctcacttccctatcccaaataatgtttagtttgtccttgataaattttagcgattaggttcgggttgtgacggataacattttgtgtgaatgtgtggatatagtaacttgatgggtgttaagaaaaactaggcttttggctcaattaggggtgactattgaaaattaaatattctcgggttggcttgaaaggctcaatcgtctaaaaatagcctaaatcatttccaagttataaagctcgctaggatttcgcctcggattacactaactaattctagatgcttaaactctctcaaagtgttagctattctaaaaactcaaagtatggtgggataacacaagcacacaattgttgaaagcattcctcataggctagcatttagacaaaaataacacttaaaattagcattttcaacacacaaaccaaggcactccacaaatggaggaaaatggatatttttcatcatcgagcgctaccctaaaccaagctgaaaatacatgcagtatttttctcatttgcaagctaaaacagaacatcacaaacatgacaaaacaacatgattaatacacatctaatccacataatatatattacccacaaaactaaaaacacaataaaagtaaactaagtaaacaatcaaacacaaccagcaataacaatttaactaaggaaaaagaaaactccctcaagatttgaactcttccccactagagtctctgcttcaaaatgctgaagcgatgctgatgcaatgctgtaactactggggcttactgcttcagcacacaaatctgctttacaccatattgcagcagcctatttttctgtcattccatgtcgtgcacctgcaataacaatcaccacaccattacaaattcattagtaactaaagaaattgaaattatataagtatgtat

SEQ ID NO: 281283 - DNA, 674 bp, Cannabis indica
tcgtcaatacaatacaaagttctttaaagaaactttcataacatgtttagttttattaatatactaaattagttgatataaagttagtttacagatgtctaacagttgtttcttcacatattattaaagtacaagtaattatcgaccagtgacaaaaaaatactgacaaataattttttatagatacacatttacatttaatatttctagttgcaattaagttacacattcgttgaataataattttgctattacaatatcatagtattataaaaatagggctcgaaattgtcaaatacgcgacctgaacagataaaacacgattgttgtaatattcgtttgtattaaatatgtggaattattagttattttgtggttttatgttagttggctcgcaatagatataactgtttcattacaattttatcacagttgtcttgaagttgacttcttctttccttctggttttggaggttgaatttttttttaagcaaagacaccttcaacttcttcttcactagatggcgaccacctttagccacggggggagcaaaatcgaagtcatcatcgtcgatgactgggtgttttcctttagccttgtcagtaattaatttatgatccatttttgaagctttttggcaatggagacggagaagcagagccacatgtaatag

SEQ ID NO: 281284 - DNA, 1087 bp, Cannabis indica
catgccttcctctccaagactattttgttaattttttagtttttgtcggccttgcgccataccaacttattccccaagcataccgcctgctttcaggcttatttattttttactccgcccggggatggggctctcccagcccggcggagatattgtatttttacgaacttgtttctgtccccaagaagggggacaaacttaaagacggtttttacgggttccgggcccaccctgccaatgatggggtggtcccgtataataggcaaactcatgttaaggagtatcgccatcgttttttcttctcttccgggttccgggcagtggaccatccggagctcctcactgagtgggtcaggattcctccttacgaacggaccgcacctactcaggtctttcttcggagagcccaggcctttgcctcttatgaccgggctgatcttgacgtcgggggcctggttactacggagaactgcaggaaggcaaaactcatcctgccgcaccaatccgtggaggactctaacctttcccgggttatctgtcccaacgtgagggtgcctgccgcggagaagaccttccgggatgagatcatcgccactgccgagaagaagtaccaggactatctctaccggaaggctcaggagaaggcatactctaaggcccaggcagcttccgggaggccacttcgcgtggggagcccggtcgagagaagaagccaggcgatcgccgggaagccccttcatattggggactcagcggagagaagggctcccaggccacagccttcggctcaggagccgaacactggggctcctggtgccagcacttccggctccggtggtaagtctcctttagcagttcattacgtcccttctgttggcgagtatgccagtcttaggcctgtagggttcgatgagcgtctttataggtttaggatgccctcgacccggtggggagaccatttgaaggagttttatttttccaacttaggagatttcctaggtcggtcccggatgggttctggtcctctggagcccgtccccttaggcccttcagcttatattacatccagctggttccggccttcgga

SEQ ID NO: 281285 - DNA, 569 bp, Cannabis indica
tgatatttttagcctccaatcgggtctccaaggtcgccgaacataaaaatatttttatttcacaaataactcatattatatccacgtattttaaataaatctctgtaattaacaaattacgcttatatatccacttattgagtcttcagggtccccgaacctgaaaatatttttattccacatatagctcatattacattcacacatgctatataaatctccataattaacaaattacgtttatttactcacttatagcaaaatttaaattttatactgaaatagattagtaagatcataatcccactaattacctgattaacccatagtataaatataaactctaattatttacattaggcttatcgggatattacaattgaggaccccgaagataaggtccgggcaatatgtcgcctggccttaggtgatatatcatctgatgctattttaaattcaaatcctaattctaaatggaatcttttctatctttttaagcctatataaagaatgatgtaaattgactttggatgactggagagatacaaagcaactttgagattagaaaa

SEQ ID NO: 281286 - DNA, 546 bp, Cannabis indica
gcggtttaaccgtgtcatgacggtcatgagagtcagcaatgacgcaaagtgtctgcgcttcccgcttactctaagcggggccgcggaggaatggttcaagaagttggaatcaggatccgtgggctgttggaacaagttagagaccaacttccagagacagtttgtcgccgcaaaaaaggtcaacctggaggtcagtgctttgactaacatcaagaaactgctcacagagaccttgaaaaactatataaagaggttccgagaggaagcctcgaagaccaagaaagttgatgacggacaacagcttgcccttctccaggcaggcatccgtacagggactccattctggaacgaactacaacaggaaggagctgcaagccttcaggacttccagaaaagagtccaaaagtacatcaaccttgaaaaggcccaaatagtggcctatggaggatactatcccatcgggatagcagggtatatgcccggagcaccgccatcgggtactgtcccgaccgcggctccaccaatgagcggcatacagttctctgc

SEQ ID NO: 281287 - DNA, 501 bp, Cannabis indica
aaaagtttaaactattccagaaaagataaatgtcaatgaaagaattccttaggatcaagagtgagaggtcttagatatgctttgctatgcactggaccggacacctgctgttgagtggaagtaatgagttggtatcagattaatccaagaaatgaacattggaggaaaatcaagtaaggcttaagatcaagaaaaggaactatatgttagtcgataagggtggtattttaatactcttagactacaccaaattagggtactagacttgtcttagtgctagaaagtctactgatgagatggtgattactctaggggtggagcagtgattttggagaagtgtaaaaaccgatcctgagtttctaactctaccagtgagattgaatgttaaagttccagaaaagatacttattaagtctatggaaagttctatacaatttttgcattgtaccaacaatttattaactactagtgttacttcctgagtaacacagaagtagttgc

SEQ ID NO: 281288 - DNA, 868 bp, Cannabis indica
tatgcacccgaggcgaactggtaggggtacccgcgagctagctgggctcggggctcctggtgagggcgagaaccctccaccaccaccaaactgggaagagttatatgctgcaatgcaagagactattcggcagcagggtgagcaaatcagagaactgagagagcagcgagctcagcctgctctaaaccctaatcctgatcctccagcacctctggtagtgccaccggatgcagggaaccgtttggaacctttgtatgagcggttccgaaagcagaacccgccagtgtttgagggtggtgctgatccactcaaggcggagcaatggatgagtatgataacatccatttttgattttatgcgggttgaagataatgaccgggtcaggtctgctacttatatgctatgagatgatgcccgtatttggtgggagattgtatctcagggtcatgatctgaataacatgacttgggaagccttccgggccttgttttatgagaaatattataatgagtctattcgggcggcaaaggcagaagagtttatacaattgactcagggcagtatgactgacagagtatgccactaagtttgatcgactggcaaagtttgcttcagatgaggtggctactgaagctgctaggaaagcaaaattcattcgagggttggatgaacatatcgctcgggatgtgattgttgcttctaaacaaccgggggttgctcgaacttatgctcagatagttgaacggccctagtttctgagggtgcagaagctcacatacgaaagaaaaatattgccagaagagattcatggaagcaaacatcaggtgctggttctggtaggggtactgatcccggtgaccgcaagaaa

SEQ ID NO: 281289 - DNA, 535 bp, Cannabis indica
ttaactgacatggtgagatccttatgtgatattagtggctcatgattcagaatgaataactccaataatgaaagttatgagagttattgctacaatgaagaagggtcattagttgaatacaaggaagataatgagcctacaattgaagatcaagatccttgtgaagaggaactcattgaatatgaaatcacaagcaagggtatggatagccaagtggagagtgagcaacaagaagaagggttgttagatgaaagtgtagatactgtgacattggaggatgaggaagcacatgacatcattgattcgacttcatcaatgatattgactaataaaccaccaatgaatccatatatttcatcaacaccatattatatcctctgcaagctacgaaaggcttctccccaagctcatcatccaaagtcttatgttgttggtgctgacttttgttcaaactcatcgcttgccaagcttgaaggcaagtacaataacaattttcaagttgtcttgcatgacgcttattacgggcgtcaaccgc

SEQ ID NO: 281290 - DNA, 575 bp, Cannabis indica
tctgatttatatttacaccactctttccaaaatctcagacttcgacttctctatcctcggagcagaagccgctgagatggtcgaggattttcgcgccatgtcgcccactcaaacccaaggtggtggagggaatcttcctgaggaggctgagggtgcggatgctgaggaagtcgagaacgaggccgttagcaaagtcgcggatgaaactgctcctgctgctccagatgcttgactcttctctatgtttaaactgttatgctttttgaaattacctttttagtttttatgcggtacgggggtactcgcactctgtacttagacaaatttgcattttactttggacaaatttatatcctcgcggggataattatcctttaacattttcgcagtacacgggtactcgcgcttttaatatatatatgcgaatttaattacagcttggtgtaatcagtagaaatatttacaagtctttgacgaaatttgaaaattaaacaaacacgagttcatttcctttatataatcaatagtacattctggcatatatacccccctactacttaggatttttttttatt

SEQ ID NO: 281291 - DNA, 496 bp, Cannabis indica
caaactgggagggtccatatgtcatcgaagcagtagttggagtcagagtctataaatttgcttgacttgattgctcgctaataaagtactactggaacgtagaacatttacgaccctactaccaataaataaatgatgtaactcgcattactgatgtaaactttaaacttcggttatgaataaagagaatcatttatactaagtaattacaaagttttattctttaaaaattacttaaggggcatttatgtatgattaacaggaattcatttgaaaatacattgtataatgtaaacccgtcatttcaaatttttttgaaatttaaaggttctcgactaaacctctttgacgaaagtggagtcgaactgttataactccctgaccaaaccttttttatgagagaggggtcgaatcgttataacaccttgatcaaaccttttgacgaagaagggatcaaacaactataattttttatttaaaacctatccgacgggaa

SEQ ID NO: 281292 - DNA, 511 bp, Cannabis indica
gaccacctctagaacacacacaatataatattaataaaattaaaaaaatctaaaaaaatttacaaaaacgaaataataccaatgtacataaataaaatgaatagaaaacatattcataccttaatggacgttgagactcaacgttttctccgctaaaatcggtggtcggagttataccaccaccattttttataataggttcggtttggtatatagaggggaaaaaaactaaacttttttacagtataggtttaggtttagaaaatagaagattttaagacaaaaatagggtaaaattggttaaaaaatgagggagaatgaggttgttttagtggtggttggcgagggttttttcgtgggtttggggctgctgtgggtagctgttcttcgtgtttagaaaagtgtgaaatgaggaagatgatgcccaagggtgtgatatataaccctatgtgtcgtcgtgtggtagtacggtacgtacgtacgtacgtacgtcgtacgtacgtacgtcgta

SEQ ID NO: 281293 - DNA, 302 bp, Cannabis indica
atatcatttttctaattttaaaatttaatttaaataaaaaataacaaaatttaaaagttagcaaaatgtcatatttcaatttaaaatttcgtgattaaaataatcttattttaaatttctaataaggtcattttattaaaaaaaattaaaatataaatatttgaccttaaatttaaaaataagataaaataatcaaatttttaaaaataagataattaattaagcaaaaaattagatttttccctattttcaagcttcaaatttcactaatatcttaaatcaatttaaaaaatactaattaa

SEQ ID NO: 281294 - DNA, 463 bp, Cannabis indica
tatttaaaataatgtatttttaattaatcatttattttaatccatatattttattaatgaaaattaattaatttaaagttggtccaaaattaattaaaaattaattttcaactttaattaaattttcaatatttaattttcgaaaatcattatataataatatataaaatttcgaaaactttataatataataaaataattacttaaaaaatatctaatgtatgttgttctaaaaaaaatttcaaactttcaacttaatacaatattccaagaatctctcaataaccaattcctagaattcctcaacttaattttgaatttcaaaaatattcaaatttaagttgatccaaaattagttataaataactaattttcaacttaaatatattttaatgaaattttaaataattaagcttcagaagaatctaattagttataattctatatttaattaaatataaga

SEQ ID NO: 281295 - DNA, 513 bp, Cannabis indica
tcaaggaagaacgaaaaatcgttttggttaaacgatctgtcgtgcagggataaacgaccttggttcttggtcattttgttaaagctgtgtatgaactttgacattgataatcatgctactaacacgaacatgttttgagtcaaatataaagacctactaagtataataaatgcatggacatatcaattagattatacaagacaagagcctaaagtaacaaacaaaacaaatgtcacctaatttcacgaacatgttttgagtcaaatataaagacctactaacacaaacatgttttgagtcaaatatgaatgtgttatgtcacctaatttcttacaactagcgagtaataacctagttatttatgttatgtacttttcctttaacatttatgtttttttataataaaatttgatccaaattctaccgaaattttgacagcataacggttgtaattggacgttcccaaaatttttaaaagtgcctaaagtaacaaacaaaataaatataacaata

SEQ ID NO: 281296 - DNA, 583 bp, Cannabis indica
tagactaattttagcctaacaactagttccttatttttaattctttcttaatttttattcaaccaaatagaagtaaaggtttaattttatatacttaactgcactccctgtgggatcgacctcactcctggtgagtttactacttgaaacgatacgtacacttgcgtgtgcaaaatatcgcaacacatctctccatagtttaaactgttagaaataattagggtcacaattgtatatataaaatgtgtgttgggtcatcaaataaataagtcaaatttatgtggtctattttggaataaagtttatgacttaagggcatgattgtcatgattttaatatgtggataccaattagacaatttctatattgatgaggggccaaatagaatagtccaaaatattgccaacaggtttgtctgttggtaatataacgggtaatggtccccattttgcatcgtatcagtatttttccagagttcttgaatccccatcatcaagaaaaataaggtttcaaaggttttggatgcaaaattaggaagatcataccaatcaaagatcgattctatggactccggtacgcttcc

SEQ ID NO: 281297 - DNA, 571 bp, Cannabis indica
ttcatggaatccatttctgaatccatgccggctgaccattgtttctgttcgggacttgccattgcctatttatagtttaatgggtcgtcatcaatactgtcaccaacgacaatattgatttcaccatccatgccataacgagatggtttagtagaaaccctcccactacgacgaggagcggtgaccatctgaacagaaactggagtggtagttctctcggtggtatcaacttgtaaaggttcaaccgaggaagtgggattatcctctacttgagtagaagaggatggaaaattagaaggagttatatctgaaaccatttcctcaaacactactttactttgctgcttgaaattcttaatatagtcatcttcgaggaaagtggcgtttgtggaaacaaacactttatcatccttgcgactataaaatagtccacccctagtctccttagaatttccaacaaacatgcaaacctctgtttgcttttcaagtttgccatctttctttcttaagacatgagcagggcacccccagattttgtaatggcataaactaggtgtacgacaattccata

SEQ ID NO: 281298 - DNA, 606 bp, Cannabis indica
ttcacatttcatttgatggtcagaggcgacgtcaagcaatacgtggagtaactcccaatatagcagtaaaaacaagacgtgtaggcggatcgactcatcaggttcccattgaaataggatccacacaaggaaaagaacttgccattcgttggttattaggggcatcccgaaaatgtttggatcaaaatatggttttcaaattaagttccgaattagtggatgctgccaaagggagtggcgatgccatacgcaaagaggaagagactcatagaatggcagaggcaaatggagcttttgcatattttcgttaatccatgaacaagatctatatagacacatagacccatggaaccatacatctcgatctgaaaagaatcaatagaaaaataaagaatcggaattgatcgatatatttctcgaaataaacgaaaaagaaacgaaagacgaaacataaatcatggatcaactaagccctctcggggacttttttaagaataagaaagaggaatctcatgtaaatatcatggaataaggtttgatcctattcatggggattccgtaaaaattccattccaaaaagagaaagttcgaaacaattgggatttt

SEQ ID NO: 281299 - DNA, 123 bp, Cannabis indica
tgggtctatataaccgagcttccaataaggagatcaagaatttataacctaaactatatagatgatctacactttaaagggcttagattaaacacttaaccttgtataaatgatatttcagct

SEQ ID NO: 281300 - DNA, 582 bp, Cannabis indica
taaactaaatatgcattaatttaaaccaaaagatgataaaaagttttaagtttagcaaggtgactctataatatacctcaactttcatcaaataccttgtaaagaccgcttagtttaatttggaaattagcagttaattatgtttaattatggaaattatttatagatatttaaataattatttatgctgttatttttgaattcagaatgcatttttatgtcatatagtgaaatttcataattttgcattttcggtgtccggcaacatggaactcggtgtatggctcagtagaatcacaaattagtattttagtatagtgggacggtttatttagacattgggaatgtcgggattagtcgggaatttagagttttcccaaaatacccctaagtacccttttatgccttttagggtggaaatggcaaaatggtctttttgcccatttgtatgtttgtcttttagtgaattttatgttaatgagaaatcagatttttaaagcttattttggctgaaatgatttaataaaaccatcattttatcccattttatccttttttctaaaaaaataagaaaattgaaaa

SEQ ID NO: 281301 - DNA, 876 bp, Cannabis indica
agtctgcaagcagtattatctcaactagtgaggggaccatgggcctatataaccgagcttcaataagtagatctagaattcaccaagtaaattctctaacttattaattccgccttgcgccactatagatttggaattgaataacactctcaattatatagaacgctctatatgtaccacgatatagatacgttatgattatccattgttacaatcctaatagtcaaagatcctctatagatgatctacactgaatagggacaaatttaccgttactaatataattactgaaatgggatctcaatcatttatctctattcagccaagctcaaaggaaatcatcgtttcacttctaaatacttatagaagctatagattccatatttatgatcagcgctcccactcaattgaactaccatgttcctaagatgtaaatatctgccagaacaattagttagaatccacgaacaacttcaagaacataagtaatacagctaagctgaacctaaccatatcaggattaagatccatagacctaagatcaatcattgatattgacttagaaagatataatagtaagtttatgatatcttatcgaagatcaacatcggtcccttccaatgtatattccatacatccgatactggtaaactttgctaatgtcctagaaaggacataatacttatccaaggtgtaagtataccttatctccgattattatgccagtctaaatccagtgaactgataaatcttgggaattaaacttttgaacaaataatcatgattatattccactgtgctgacgacactataatcatgaataaatatatatacatatttatatatgttaaacataatcatgaagtaaatcatgtg

SEQ ID NO: 281302 - DNA, 639 bp, Cannabis indica
tttcttttctgctcagtggtggagtcaccaccatccctaccataaacaggagtaggaacagtgggggttccaccaacactcggagtcacccggggctcctgaaggaatttcactgcaccctcggctctcaaagccttttcaaccatctctgcatatgtggttgcttcagtggtagtaatcactagatcatgccgaatctttgcactcaaacccgccaaatatttttctttcttactgaagtcggttgggacaatcccaactgcaagcttggccaaacggtcaaactttgtcgtatactctgtaaccgacattccctcagtttgaactaattcagtgaactctttccgctttgcactgcggaccgcttcattgtaatacttggagttaaacaactccttgaattcttcccaggtcatcagcgtgacgtctcgagtgagggttatcaactcccaccacacgagagcgtcttcctgaaactgaaaagtggcgcaggtcacccggtcatttccaaccactcccataaaattgagaatacgatcaatcaccgaaagccactgctcggcctcatcaggacctcccagaaacactggaggtgcctgtttccggaatctttcgtacaacggctccatacggttgcca

SEQ ID NO: 281303 - DNA, 743 bp, Cannabis indica
tggttcttcgtctgggttctagtcctagtatgagtcccagatctagacaccaactactggtctgttccatgccccttacccgaatcccgagtcaagatctggatcactgtcacgggtctcggtatggttctagttcaggtccaaggtcccatttttgagtttgggtttgggatcaagactggggtgcggttctaggtcccgacccttgttctgtgtccatagtctggttccatgtttgggtctgataaggttcgggttcgggtcccgaatcctggtttgggttgggatccggctccagctcacaattcgggtcaaggttttatttggagtccgggtcctggtccggttacggttcaggatctatgtccaatttcatttatgattccaagtccaagtcctagctccagtccccgtcaacttctggtttttgttccaattttgcatcacagggtacgggttcagggccacttttgggttttggactgggtttacgtccaggtgtgggtttgggtccttgttagggttctggtccttgtcagggttcgggtaaagggctgggtcccaaatccagacatcgactacgaattttgtcgaaccccttggtctagatccggatcccaatctcgggtcccagtcttgttccatttctggtgccgggtcacgagcttggtcctaggttcaagttcggctctaggtcgggtactatgtcccggtccttgttctgtttcccaggtccctatcct

SEQ ID NO: 281304 - DNA, 550 bp, Cannabis indica
agtcccagatctagacaccgactactggtctgttccaggtccgttacccgaatcctgagtcaagatctggatcactgtcacgggtctcggtctagttctagtttaggttccaggtcccatttcggcgtttgggttcgggatcgagactggggtgaggttctaggtcctgaccctagttctgtttccctagtctggttccatgtttgggtttgagctcgggttcgggttcgggtcccgagtctaagtttgggttgggatccaggtccggctcctaattcgggtctaggacgaatttggagtccgagtcctggtccggttacggttcttgatcaaggtccaatttcaattttgattccaagtccaagtcctagttccagtcccggtcaacttccaattttggttccaattttgggtcacagggtacgggtttggttccacttttgcgtttgggactaggttcaggtctgggtgtgggttcgggtccttgtcagggttcgggtccacggctgggtccctaatccagacaccgactacgggttttgtccaagcc

SEQ ID NO: 281305 - DNA, 624 bp, Cannabis indica
aatagttaatcaattaaatagctaggtaaataattattaagggcatgattgagttgaaaaataattttgttttaccagaataaagaatcatgaattgtacgtacccaagttaattaattaaattatattttaccgagattaatttacaaattaataataaaaaatgtcaaaagtaaattaagtagcaggtagataaatatacatagtggtagacatttcaaagacaagctttactgtcatttgtccctgttaggatcagatttacaggtaagcaagctaattaaacacatgatcattatcttaatttaaacccacttatcttattcatcaaaaaaaaaaaaaaaaaaatttaaacccaactcaaatataaattataaatatataaatatacatagtactttaacctttaattataaatttatcatcaaatagtattatatatagtacgtagtctaatattcaatacatataaatacacttcttgctgttctactattcaattcagtcagcgatcgaatcaatcgagctatgtttttgttctcttccaagccactttttagcttgaaaaacatgatgatttgtacccgattaactccaaaaaaatatattcttatatatatatat

SEQ ID NO: 281306 - DNA, 522 bp, Cannabis indica
ttaagaaatagttaattataattaattaattctaatataggaatttttacctattggtaacatgctattacatgtcaaagaaaatgtaaccatgatggttacaataaaaatgtaaccattgaatagtcacccatatgggaatatatatgctcatgattgggtgtaaaatataaaaccaatattctacaattgacatatccctataattcaggaaatggtacaccaagtgtaattctaacagtcatgaatgattgcttgtctttcattttttcttcttctgtttagatttcatacgtgtcactgtaatttctttcaatatatatccccctcaaactatgttttggtgacttgataacaattagtttgttcttcaaatagtgaaagcttgatatagtagcaacttggtaagtatatctgcaatctgcttatttgaaggtattgttggaatttattttaccaggatcttaaatctactcacaagtatgttgtttaacaccctaaattatgaactttctaaaacga

SEQ ID NO: 281307 - DNA, 777 bp, Cannabis indica
cttcggctcagtcaagaaatcactcattgagtcgaccggtccgtttttccttatatccttccataattcaccaaggacttcaatgccccccagtatcgcgaataactttccatcctcggttacccgcgacactttggtcgcttccgtcatgaatctgctgatgtatgcccgaagtggctcgcctggtcactgttttacttcgaccaaatctcccagatgcaatgggagctgacgtgaggaagagaattgtgcatggaattccgaagagaatgctttccatgaactaaactttccaggagccaacttgaaataccattcctgtgcagcttctgacagagtggcggggaagattctgtagcatacgtcccctcgtactccttgtaaatccatttgcatctcaaaatacttgagatgggaaagaggatcttctctcccagtatacatcttccatgttggcattttgaatttgtggggcagtgtcaagagattgatctctggtgagaagggagttccgcgagcacggtctaactcaagatcattgttacactatccggccatgccatgaaacatattcttcaactcgtcaagctgggcctgtacagctgggctgactggattggcgttttggtcagcttggattacgtcagcgtctttctgagcggggatctgagcatgggctccgggttgcacgatcattgcagtattctgctcgtctgttccccttcttctatttagatcgtcccttaggtcatgcgtcgttcccagcctatcgaacac

SEQ ID NO: 281308 - DNA, 456 bp, Cannabis indica
tttagtattttcacttgtcattcgtacttgctatgtgctaataatttctgaataagattttgtgttaaaccttacttgatttctatttattgttattaatagtatccaataagctgagtggatctaactttcccaaatggagaaagaatatttacattgctctcattggtgaaaataccctgtttattcttagacaaatatcacggtaccttgtcgtagtgggagaatttcaaggaactcaccttgttaggacttggaagacacttgtgatgaaaaaccattgttagtttaaacaagtaatggattgtcagattaagaaactaggaagagaagccaaagaactatggttaaaaccattcatatggaacaaccaaaagttttctattacaaggacaagaaaggaaatttttaaaataagtctaatcaatggacttaacaaaacttcctattcctagt

SEQ ID NO: 281309 - DNA, 580 bp, Cannabis indica
taactcttcaattgaagctttcttttctcacccgctttgtctaaggaaaaatttagttgcttaatagcccaataggctctatgttctaactcaacgggtaagtggcatgccttcccataaacaagtctatagggagacattccaatgggcgttttgtatgcagtacgatatgcccataatgcatcaatgagtcttagggaccaatctttcctagtggggttgacagttttctctaagatgtgcttaatctccctatttgatatttcaacttggccactagtttgtgggtgataaggtgtagtgactttatgtgtaatgccatattgtttcattaaatgttcaaaaggcctattacaaaagtgggtaccattatcactaatgatagcacgtggtgaaccaaatcgtgagaaaatattttctttcaaaaacttaagcacaactttgtggtcattagtgtgacatgcaatagcttctacccatttagacacataatcaacaccaacaagaatgtacaaattaccaaaagagttaggaaatggacccataaaatcaatgccccaaacatcaaatatttcaacaa

SEQ ID NO: 281310 - DNA, 655 bp, Cannabis indica
ttaggaaaatatcaaaggaaaagcattttctctcaactctctctctctatttttggcctccttgagcagcaaggatctttgaatttttcttgtgaattcatctcctttttggtgttctaatcaagctaggttagctcctaatctctctctctttaagtttgttgaaaatgatgaaaaatgagtaatgcatgtatggtttttgatgttgttgctgctgttagttgttgttgttgtttcttggattaaaatgcttgaattgattggattagaagggttgtaatgcatgctggttacccttgtttaagtttgtgaatttctagtacaaaagctatttttttttcaaagcaaagggttgattttcgttgctgtgattgctgctattgttgagtagtgttacctggtgttaaattatgttgaaacatgttgatttatgcttgatttggtggtttttgggaggtttagtcaagttttgagtttttgaactcaatcttgaacctccaatggtgaaatgagtttctatggttgaagctcggttttaatgctttggatttgttcctaggggtgtctagaacaggtctgaaagatttgatatgctttgggttcgaattgatggagttatgaattttttattttagtctgcgacgaaccggaattc

SEQ ID NO: 281311 - DNA, 608 bp, Cannabis indica
ctaccgatcacagacacaggtaacgagaattactaatagcataataaacatatatcaacttaataaatctacacaatactacaaaggaaatttcattaattgaccctaataatacaacttatataaaaaattggacccttttattttttgtacaaattgataccactaattcaaaaagattcctaaaatacccctaaaattaaatttcactcattctctctgactttccctctctctctcactttccctctctcgctctctctctctgactttccctcttcacgaaccagaaacgtcgacctcgacccatctccaccacgaaccaggaacccgtaaaccccaaacccccaaaccagcaaacccatctccgtcgaccatctccaccacgaacccaacaaacgaggcgaacccaacccacgaacgaggcgaacccaaacccaaaccaaggtgtgtctctctcaaatttgacccaaacccacgacgaaacgtcgacccaaaccgaaggaagaaccgccgtcgccaccacgagcaggacccgtcgccaccaccaccaaattcattaaaaggtaatgttttttttgagaaaaaaatatatttttcatagattt

SEQ ID NO: 281312 - DNA, 501 bp, Cannabis indica
atatttaaattttattttaataatataaactatttaaaatttacaaataatcctaaataatgaggacgatacataattacataaaaatctaaactcctaaacaccaagacagatagatagaatttgtaccgaaacactccttgggtgtagacttaccctattttatttcaggacagtttttatgtttttgttacactttactatcattaacattatcttcttaactcttttgacattgatatgaagaaagaaaaagccccatatatttatcgcaactattcttagattcaaacattaaagtcaaaagcataaattccaactacgatttgtgatacattagtttactaaacttaacttgtaactaaaatgaaactaaatataacataatagcatggctttaaattaaattcaatcacttaatatgagaaaaagaaaagaattatataaaatttgggatattggaagttgaatgaaagacacaattatgccattcaaaatgag

SEQ ID NO: 281313 - DNA, 914 bp, Cannabis indica
gcttggatttcgggtctcacaatacccggattaagcttgttgaacataggggctgcatactctcttattgctcgggctctatcatcggccaaagcaatgggattagcatcattatgagcacccccaacttcaaacccatcggccatattgcagcgttttttagccttttgttccttccttctttgtctgaaagtgcgttcaatttcggggtcaataggagcaagctcaaggtcttcttcttgctcgttcatgcactagatttaacctgaaaaagaaaaattcagcgcaccaaaataggattaaaatctcaaaccagaaaataaattgaaaaatagttgataatacacaatttttagtttcaatccccggcaacggcgccaaaaacttgttgtgaaaattatatacgcaagtatacgtagtcaaacaagtaataaagtgataagtaagatcgtctccacaggaattgtaaacaaaaatatcttgtaaaaccaactaattacaacttaaaataaaaagaaataacatgaaaatgagtgcgcaatggttcaaaattgaaatgacagtaattaaacgtgctaaaattaatgctattgttgctagaaaaatgcttttaaaaaagggaagaaaatataatatggtaaaagtggcttgaatagctaattcctcctatgctggttttttcccagttgctacaacattacctcagcattcttgccagagataacaaaatttcctatgtgtttgtgagaatttttcaaaactcacaaattaagttctcacacctagtttcatatattcctatatcaaactagattaaagaacactaattatgcatcaattcttaagttatgcaaggtaaatgaatattcctattccacttacaaagaaaacctaaatctaggatttctcttgct

SEQ ID NO: 281314 - DNA, 521 bp, Cannabis indica
ttaaataaaaataaaaagtcacccataaatttctcataaaccaagaattttagttatataggcacactttatatagaatatatatatatatattaaattattatttttttttagaataatttgcagcataaataattaagtttaacttccagttacaaataaatatttaagtttaatttttagcagtaagagtactcaagttataattttagaacttatgtaggtacctagttaagtaaattgtcgagtgacaatttctaattggtctaagtcattaaatttttattatttaaaaaaaattagttcaaatatactaatgaaaaaataacaagtggatttaatggcttaatatttaacggttaggtacctacagagttctagaaatataatttaggtattattagcgccaaaaattaaacttaagtatttatttacaactgaaaattaaacttaagtatttataccgcaaattattctttctttaatatatatatatatatatttatatatactagtaaaaa

SEQ ID NO: 281315 - DNA, 592 bp, Cannabis indica
gaaatcataaaacatgctatataaacgaatagtaagcaagtatacaatatacgaagaacttacatgatgtttgaaggctaggagttggtgttgatcgccggtagaacgaagacttgcaacattgaaggaatgaaagcaagaaatctatggtgtttgaagcttcttttctctctgagaaaactctaagaacattttggtaaaatgctgaaagtaaccaaatgaagtaagaaggctggcttttatagaccagaacaggtgtgagacagctgtgatcaaccaccatcgtacggtcaggatggcaatcgattcaaattctacagatccaacggttgtattaaacactcatcaaggcagtagaaaacacttgagtacccgtttgacacccatttaactgcgccatatcaataaatggacagaaaacgaatcgttgtctgcaaaaatcaaataactgcagtaatgatggtcattaatatgtcaccacgcgcccaaggcacgtgccgaggaagctgataaggcaaccagaggcatctaagcaagccttgtttacttttcaccaacaagacttgggggtaaatgttgccctgatttgtcc

SEQ ID NO: 281316 - DNA, 517 bp, Cannabis indica
ttggacgttaaagcttcgttttcttacgtcaaaaacaatccttagggtcccatgcactcaaatataacctcccttgacccaagaacaagcttaaacacgttcgaattcgagtccgtaactaagccgcacctttgaagcttcaaaaatggcgaatctcaaaacgacgacttccgccccttataccacgttaaaaagcttccttaggtcgtatataagtgatcccaaacccccacgttcacccaggtttcactccgcttgaagaaacgaaaattttcggtatcgtatacgccgtatacgtgctctctctctctctcgttggttctctgttttgggtgaacgaaaatagagtttaaaacctaatttctatcgtgtttaaacccaagcaaaatatcgcattgaaccgaagtggagcgattcccattccaccaaaataggcgttcggttcgtgtgttcgttcgtgcgtaagtaacttctttatataagttaataataataataataataataataataataa

SEQ ID NO: 281317 - DNA, 1334 bp, Cannabis indica
tcaaaaatgtgtgagactcaaatattaaaatataccaataatagtactatttttcaatagcacttggctaccttaagttgccctttttacattttttatataaaaattttaaattataatttcttccaatgaagaaatacataaaatgtccaacaaaagtcacacaccccaattatagtccatcccataaaattataggacaaattataaaccccttagggcccgtttggtacgcaggactacattggattagacatgttaatttgtccaatccagtctttgggcatgttagaaatctggataactaattcagctaacctcatctgtctgggattatttatcccatccagcagggtgggataaataatcccatgcaggtgagatttttttttatcatttttttaattttaattttattaataaattttaaatttaataagaatttaaaggaaataattattcacacatttatttattacatttttttttatcaaaaacataatcattacaattagtgaaaatgtataattttgaattattataaataagtttttaaaatttagaatattattaattaaataatagttacttaattgattctaagagaaacatatgacaatgaaattatatattatttttaaattactagaaaatttatataaatatttttaaaaattaatatttatattaaattagtgtttaagataaatatttttatattattcaagtattttttattttattattttaattatttattaaataaaaaatatgataaaacattttattatatatttatgatatatacttaattatataggatatattattttataatttatttatttttatttttctgctacgaattattcatttttatttatttattattatatattttaattttaatttattattatattttttattttaatttaagtttttttttctaaaaaaaaataaataaaatagtccagtctattcttaaaccaaacatagaattactttcagcataatccattagtctaatcatgcgtaccaaacgggcccttaaagtattgcagtacttttctagttttgtcttaatacgttttttttaataattatttgcgaagagtaataaataaataataaagagatattgagaaaatagataaattattgtttacaaagtaaaaaagtaaataaatgcaactaataatcaagtcgtatattaacaactaacataaaaagaattaaaataattaaaaaaataaaataaccttaattatttatttaactactttaattacaaaagaacccttcgataatagtaacctactgtatatgctaca

SEQ ID NO: 281318 - DNA, 185 bp, Cannabis indica
ggctcgctctcacggtccttcagccttagccttgcccttacctacacataaacatagcactgtgagtcgacagactcagtaagaaaagcataatcaaatatcatacataaatcccgagttagccgtgtcccacacgatactgagtcccgaacgttcataagatggtactattgacaagtaacagc

SEQ ID NO: 281319 - DNA, 623 bp, Cannabis indica
taatctctcattaagctctccaaagaactagtttgagagccttgaggttggtgtggttgttgaggtcttggttgttgagaaaattcaagtggaaatgattgttttccttgtgcttgtgctccacttgaacttgctccttgacctccccatgaaaaattgggatgatgcttccatgccggattgtaggagtttgagtatggattgttgttgcggttgaaattttgattaccgacatagcaaaccgaagctggattttaagggaattttcaaaagtatgcccatcaccacaatacacacatgaaatttctgccctttgaatgtcagcggctagttgtacacttcctcccatattcatgttcttcaaaatgttggtcattgaggccatttgagcggttagagtggtcaatgcatctacttcaagaacacccgctacttttcggcttgtaggagctctattagttgaccattgatagttgttgctagctattgataactctatggtatagagttattttttatgcttttaaactaaaagtattgtgagaagagtagtgaaaatgtgtttgtttgcttaattttagttagttttagtgtcattttctatttagtaagctaacttttaa

SEQ ID NO: 281320 - DNA, 745 bp, Cannabis indica
gataaattcacaatcaagaaaggagaaatagcaattatcattaactgaaaataatttcaatcaacattcatcatctccccaaataggagtttagtttataaaattcataatcaaaactaaaacagaaattaacatagaaatcaagagtttaagaaagaactagttggtgattgcattccagatcgccacaattacatcctttgcctccttctttcacttttgtattcaatttctgcctcatttccttctaaaacactagccccttaaatagaaattagggttgcttcctctgaaaaagtcaaaaacttgcccaaaatctcgtgttttgcatacaaaaataagctcgctgcctggcctcctagttgcgaccatggttgcgatcataaaaagggtcgcgaccatggaaagtggtggtcgcgactactgaaggaaattggacagcttcagcatctttcagtaaaatgtgcataactttcacatacgaactccaaatgagttaattcaagatgcgttggaaagaagaaaagaaatctaaaacttttttgtttttactttgtccaaaatcttatcagaacatagtcaaattaaggcttgaagtttcagctttatttcttataaaattttctccttctatagattgttgttttaatagaaatttgatcaatttatacattccaagtgtgaaacctaaaaccaaagaaaaaaagcataattctattccgaaaagaataacaaaaaagaaaaa

SEQ ID NO: 281321 - DNA, 195 bp, Cannabis indica
ctatgcgtggatgcaacaaagaaaagaggcccatgctccccataccagttgagaccatactgtttgtaagactcagttaattgattttaagtaatcaattataattctaaaattagactatgtctatattatgaattttcactaagcaagggcaaaattgtgaagaaaagaggttctaggttttatttattaatt

SEQ ID NO: 281322 - DNA, 528 bp, Cannabis indica
cttacacactatgattgaggactcacttgctatgggtgggcacaccctcaatcactaaaggcttgaatttgctttgtgaagaacactaaggatttcaaaaattagagaagaaaataagaagaagaagtctcataaacctagagagaaagaaagctaggtttattgcctttgaagcattagttggataatgagactttcttttctttttatactacttctcttagggttaggtttgaattatttgaaataaaaaaatgataaaaatttagcaaaaatagcactaagtggccggccattagtgggctcaacactaattagatttttgtcatttttctcaataatttatctatttttcacaaatactacttttgcactttcaaccctataaatgccaaaactatttatttaataattatcaaataaaattatgatttataatatttattaattagactcaacaaagtctcttaattaataaattaaccctaaaatcttatttcctcacaatcaagccataacatagtgaaa

SEQ ID NO: 281323 - DNA, 505 bp, Cannabis indica
aatctttacaaaaatagaaattacttttatactatcttggccaatttttttttcttttatactgtaaacacaaaaaaaaaaaaatgaggcatccatcttccacacccacagacagaaccaccacaggaacaccagaacaatcggaaaacaaccattaattccggtgagattgagataaaaaaaaagtgaaatcgacgtcaaataaataatcatggcaaaacaactacaaaacaacactaaaacaaatcaaacaaaagaaagaaaaacatgattaaaaaaaactaaaaaatgttttgcacaacctcaatacctaatgcaatagcagttacatatgcaagcccaatcttaaaaaataagaaccaaaaaactactaaaacaacacaaaaacaaatgtaaaacaataagcagatataaccacttagaaaaacattaaagaaccacatacctcaaaactttttttctagtgagctcgtcaaatgtatttttaagagaaccaaaataaaaa

SEQ ID NO: 281324 - DNA, 507 bp, Cannabis indica
ttgtatagaagatggtatagaaatttaaggccttttttgtaaggtgcttataggatgtaaaaatttatgtggtgcaatgaatttctgatttatacaaaaaaaaataccaaaataccacttacactatcatcacttacacaatcagacgatagttgcagagtggttgctgcgtgcttgcgcggtggttgcatcagacgaaagtttcaatcagacaacggttgcatggaggttgctaggtggttggccaaaggttccatcagacgaaggtttcaatcagacaaaagtttctgggtggttggccgaaggttgcatcaaacgaagttttcaatcagatgaaataactgttagcaaaatgtttatgcaactgttgtgaaacattaaaaattagaacagtgttttcacatacataactctatctacatgtctttttataatttaatatgaacaaattcaccattacaaatttggaaaacaaaaaaatacaccaggataaacattttactatag

SEQ ID NO: 281325 - DNA, 730 bp, Cannabis indica
tctgaactcacgggtgctcgttctgagttgaaaccaggggagagtcttcgaatcactcacctcacttttgctcatgcttctcttatgcggtttgccttaagcaattgggttcctaattcaaacaagaccgtagtatctcaagatgtggcttcactcttataccgcatcacttctggaacttcaattgatttggcctcccacattctgaaccagattgtctccttccgaagaggtaaaaagccaacctttaaacttgtgtttccaaatctaatttataaggttttatcttctcagaagaatgtggcccaatctcatgaaacacttgagcctcctatcagtggacctacattccagccctctgaatactttgatggtgtgtttcaaaaacggccaaaggctggtgctgctgctgctgcttctgctgctgcaagttcaagttctgctgcagcagaactcctggaagtcaagtccgaacttcagaatgtgcataatctccttggagcaatggaagaagtccagcatgagatgtccaagcaactgtcttctttgattaaactctaccgagactaagttgtttcttctttgcttttgattgaacttatatctatttttctttctttgtttactttggcactctgataaacaaaaagggggagagatatctatttttaatttgtttgttgcccaactctggaccctttttccagggggagttgtggttggttagtac

SEQ ID NO: 281326 - DNA, 579 bp, Cannabis indica
tcttcaaacacagcacaatctcaacagccatgaaatcaaataaaacatgcacaaacaaacctaattcaactaagaaatcatgctcagaactcatctaagcctacagccatgaacacccataaagaactaataaaaacctagcttaaaacctaggaaatcaccaagaacataaggaggaacttacctcaaggttctaggttggcttgggggttgagttcaactctgaaatggtagattttttgaggaaaagaagtctctctaataaaattctaacctaatccagaatattctcaaaataattcttccattaacgtcgtgacattactaaccacatcgctaaatttccacaattaccgggcccgaaaaaaaaatattctatttcaaaattgatatcttcggtactcacatatcccaatataatctccgtaattaataaattatgctatttatttcattgagtaaattctcaataattaccctaagcaagatcataatcttacttcgttaccaaaataattacatatttaataaaatatgtctatttatatattatttattttttgggatattacaactatc

SEQ ID NO: 281327 - DNA, 660 bp, Cannabis indica
aactaggaactaaaagtttccctatcgataaaaagcatggcaataccccctagaacataaaatcgaggaaatctagggtttcagaattttccccaaccggtagaccggttgcccaaccggaattccgattctgggaaaattcagaaccccatccggaattccggatgcacaaccggaattccggttcctcgcaggcagcaaacacaaaatctcatatcttgctcaaatcaactccaaatcaattcaaaccttccagacctattccatataacccctagaacatttctaaggcatcaaaaccacccagattgcacataatcaaaaatcaccattaaagctcaagctttgagttctaaactcaaacttgagcaaacctagctaacatgcaatcaaatcaatctaaacttacttaaacatgcttagaatagcctctgaaaacaataacaaacctcaacaacatcacagcaacagattcaagacatttctctttgaaaaccatatttttgcatagaaaaatcataactttaaataacctaacaatcaagcattacaagaagcttaattaaactctaatcaacatgcttacatctcagaaaacaacaacaagatcacagcagcaacaatattaaaaattcatgcatgcattacaccaaactttct

SEQ ID NO: 281328 - DNA, 459 bp, Cannabis indica
taacatcctaaatatgaacttcttaaacgattataagtaaacagatataaagtatgtaaaaaccttacattgggtgcagcgtaataatatgtctccttctactcagataacccttgtatcctttctgtcgcagagtattatcaagatctgagcccgaatgtccttctttgttgaatctgaattcttcacagtcttccacactatgattaaggtactacttgctgtgtgtgggcactactctatcacttagggatttcgaaacaaagaagacgaagaaagagaaagagtggcggctcaagtagtttttctactaaaaggaatgagattcaattgtgttatgtttcctgaagccattactttctatttatagaataccacatagggccagggttgaattacttggcaattaaaataaatagaaaaaaattaaatgaataaaacctatgcatgtggccggcc

SEQ ID NO: 281329 - DNA, 272 bp, Cannabis indica
atacaatatactacataagtaacaaaaacagaaatgtactagaaaataataggaacaaaaatacacaccttaagatgattttttttggaaatatcaaagtcttcaaacttctctgaactcttaggaggaacctggaagtaggtataacaaaaaaaaaatcataagcaaaaaattcaaacaactaaataaataatttccaaaaaatatgaaaaaacaaacatatctaagcttccaaaaaaaaaaaaaaaaaccaaaaaactaacaactaacaa

SEQ ID NO: 281330 - DNA, 54 bp, Cannabis indica
ttcaaggaagaagaaagagaagaaggtggcgactaggtatagagagagaaggct

SEQ ID NO: 281331 - DNA, 512 bp, Cannabis indica
attctttctcaaacacagaaaacgaaaaatacaatgaaactcgaaactaacctttagttttggcaagttgttcctgcgattgctctcgatcacttctgagattgaggatattttagaaagagtggtagaaatctgggcaaaatacgaaagtgggtttgaagtctctataaaggagggaaggaggaagttaagaacaagagggaaaaatggaggatttgattcgtatcaaagggtttaaatacccatatcccttattaattgggattacgacacgtggcaaccagaatgcctaaggtcgcccaatccaacggccaacgatggccacgcctacacgaaaaccgaggagttttgtgacgtggcaccataaatgcaataaaaagtaataattacagccgtcattttttgaaaccctcgatgggacaaccaaaaggtcacctcctcgtgacaacctttcacctgtctctcgagtaatagtttccctctgtgaccgcacctgtcacatcgcgaaacta

SEQ ID NO: 281332 - DNA, 527 bp, Cannabis indica
taaagttcatataaaatttattagatttaaaatttagcccacaggcaattttagatttaataaaattttcatcttcatcatgtttctacattggtaaaacatgaattcattaaagcctcaattttcttttaacatctaaatttgtaatcctattcttgcagctatttcatccacctctaaatatgctgaaatcactagtgaaatccctgagcttaggagtgacaacttcaaaatctggaaggaacgagttcttctccacctagcttgcactgacatggactatgcaataaggaaagatgaaccagctgctatcactgatactagcactgctgctgagattgcactgcgtgaaaagtgggagcaatctaatcgtctttgcatcatgttcattatgtccagaattcctatgggaatgcgtggatcggtggagccacctgagaaggtgaaagattttatcaaagtgatggatgagcaatttgacacttcagataaatctttgttcatcaacctcatccaagagttctcgt

SEQ ID NO: 281333 - DNA, 565 bp, Cannabis indica
accccgttctggttctaggttcgagtccacgtccaagttcgggtcctgagtgcgggctcaagtttgagtctgggtcaagatctcagtccagcatttcgatcctagtctgggtattggtccgagtccaggttcgtattcgaatccctatctagggtccaagtctgtgcttgggatcgggtcccagatttaggtccaagtccgggtcttagttccggtctgggtacacgaccgtgtctgggcccgagttccagtctgagttctggtttaaggctaggtctgtgttaggttataggtctaggtccgggtcctggtcacggtcctagtctttttctagggtcctggttcgggtttggttcttcgtctgggttttggtcctagtttttgtcccacatctagacaccgactactggtttgttcaaggtcatgttacctaaatcccgagtcaagatcaagatcactgtcatgggtctcggtctgattttggttcaggtcccaagtcccatttttgagttagtgttcgggatcgagactggggtggggttctaggtcttgaccctagttctgt

SEQ ID NO: 281334 - DNA, 843 bp, Cannabis indica
ttggcctgggacaattttaggatgggtgacctcctgggaagttttcttagaaagcgtgcgagtgaggacaaagcacgctggaaacactcgtgttggtctgtagggtcaatcatcagtccatgaagtagccagagtgacgtactcgtgtataagagcaattattccgtgggtgtaagggcccaatggagacttgaagcggggacgttacatgttttaacaaggttgatatcttattatatatttttttctattgatttataacggtcttttttgttattttataattcttttaatattattgtgtaggtgttttatagttatttttctgttattttatgttttttttatacaattattgtttagtttatatacattttttattagtgtatatttttagtttattccacataattttctattaatcatacattacacattatattatatattccattttaaaattataagatatcattatttctatgattaatgtaataatttatttaatttttaaaaaataaattatcattttaactgtcaataactcaaaaagaaaaagagaaaaaaaaaattaagaatataaaattctaacaagaaattccatgaaaaaataaatgtagtagtacaaaaagataaagttgtcataaactaagtaaaaaaatagtaatagaaaaatatattaacaagttgatgttattttgtatattgcaatcaggttattattttgttgttttgttaggtttttttttttttttgttattttatagttgtttgttacgttattcaagagttgtttttttttttaattttttttattttactgaaatatagtatttttgtaat

SEQ ID NO: 281335 - DNA, 498 bp, Cannabis indica
taaaaaaaaattgataaaaaaattattaattttctttccttgtacattggaatggtcattcttttcttttaaaaatggaatagccattccaccaaaatggtggaaagagcattccattagaatgtcattccaatactttaaaatgcaaccaaacaaagaaatggaatgaaaattgtttcctttccattctattccatttcattaactccaaccgctaccttaagtctcgtagttatatgggtgactattcaatggttacatttttattgttactatatggttacatttttctttaacctgtaatagcaggttactaataggtagactttccttttttagatttaattaattataattaactattttctacattccttttttagaattatttaattataattaactattttcttaaaataattaattaaatatttaacaagacctcttttagcaattattatttatatttaaatccttacttgaattattttaataatt

SEQ ID NO: 281336 - DNA, 701 bp, Cannabis indica
caaataaaccctaaaatatttttcttcacaatcaagccataacttagtgaaaatatataaataagacatagtctaatttagaattataattgattaattaaaatcaagtaactgaatcttacaagcagtattgtctcaactagtatggggaccatgggcctatataactgagcttccaataatagatctagaatttaccaagtaaattccctagcttattaattcctccttgcatcactatagatttggaattgcactcttaattatatagagcgctctatatctttcacgatatagatacgctatgacttacctatgtattataatcctaataattaatgatcgtctatagatgatctacattgagtagggacaaatttatcgttacaccattcaatgtatgttatccttaaaatatttagctacctttaaatgatatttcaatgaactaatataatcactgaaatgagtactcaaccatttatctctattaagctaagctcgaaggaaatcatcatttcacttctatgtacggatagaacctatagattccgtatctatgattagcgctcccactcaattatactaccatgtccttaatctatatttcacgagaagatccattggttgactttaatgaacagattgaagaacacaaataatgcaattgaactagaacctaacaggattgagatcatttg

SEQ ID NO: 281337 - DNA, 536 bp, Cannabis indica
gtacaaacacgattagataccaaaaaaatataaatacgttaatataatcataataaaatttaaacataattatattgaatacatattataattttataattaaaattattagagaatgtaaaaataaaattatatgttaatttatttgttgagtttgagttaaaaaaattaaggtgccgtttggtaacacttttgttttttaatttttaatcaaaaaataaaagtaaaatttttgttttaaaaaatttattttgaaaaacaaaatgcgttctataaccacttttgtttttcaattttaaaaacagaaaacaaaagtgtgttctgtaaagtttatttttatttttattttttgtattttatttaagtcgggtctaggtccgaggtcggattcgggttcaagtcaaaagccgggttcagcgccagggccgtggggaggggatttgggtccgggtctggtcgtaatccaaaagattgattagaaaaaactgtttaaaaaatattgaaagtgatttttttttgttctaaatttgatttct

SEQ ID NO: 281338 - DNA, 964 bp, Cannabis indica
gagaactggttatttttccataggtggtcaaacccttcccaattgtgagggcaaggaaatagttggttgtttcaattgtgctgaatttagagaaatctaatattatactagggttgaactaatttgcaagttataatgcaactatcgattgaaaagaaaggtggcaactcctgaatcaaaaaaagtgaggacccatttgcgttcttgtgcaaggttcaaagatcccaaaatccattaatcctggtgtttaaggctgaaggggttattataggagggatgtatcaacttttcagttagtgtggccaatattataaagggaacattagtgagattgggacaatcttgtggctcaaggtttctagatgcttttagaggagtcactagggttattggttaagcgggacattgattctgaattgaaatggtaatgggagtaaaacctgtatctaaaattctgaattggatggtaactgtagaattgaaaggagtgaagattcagttgtaggaaaagttgggcttgaaattaccagtttaagtatttcattctggagtacaccagttttatttgtgaagaataagtatcctttgataaggacagatgttacgttgaataattttagggaaggatcatcttctctaggtttggtcttcgatctggttattaccagttgaagacttgaaaggaggatgttcctaaaatagttttcgtactgatgactttgtaattgtttttattaagggtattgtgatttcttcggatccaagggaggcatatgagagacacccttggatgattttgtaatgtctctagaagcataagttttatgctaaatgtaagaaatgcgagttttgttgatcccaaatttgcaatgaaggttagagattttctgggattaacaggatactacagaatatttgttgggggttgtcaacgcccttagtggaatcaaatcgaaagaattga

SEQ ID NO: 281339 - DNA, 593 bp, Cannabis indica
ttatattgtaaatgctattttgattattttttcttgttatctgatttacttgcgtgcattgttagacagttattaaattgggaaatgttgtagaaataggagaaactatggccaatttttttaggattcttaaatgaacatgtgttttaatatttaattactaagtgtgcttaggatttttctagcaacttgtaaattttttatttcaatcttgtttgttaggaatttttatttttagtttactaataatgtgttaatataaatgatgtttagtgagtaagtatgatgttttcagtatgatgtttcctactaaacgatttaatttgtgtatctcttgcagatgacaaagcaaaaggatgcaaataagccaaaaggacgaggcaggacaaaaaagaatgacatcaacaatctgaaagctcaaggacgcaagacaaaactagagtggaatgagaaaggagaacctataggaacagcatatgcagatatgcaatcatggattggggttaaagcaagatctacagtccctctaacttatgatgattggagacatgtagattcgaaactcaaggagaaaatatggaaagacacatacg

SEQ ID NO: 281340 - DNA, 512 bp, Cannabis indica
aggacgccagggttattcttacagtgcccacgttgcatgaaacaccatcccggagaatgcaaccgaaaagtatgttttcaatgtggcaaggttggacattttaagaaagattgcccacaggtggagaaagaagaacaagagcagaaagcggtatttgttcctaccccggtgaatgctaatgctcaagctgatgatgcagcaagcccttctgtagtggcaggtcagttctctgtaagcgacttcttttacattgtgatgtttaattcgggagctacacgcttatatgtaattataagagtgattgatcttttagggtaggccttgtgatgttttagaaagagggtttggaaccctaatgcctagcggggaattgattatctttaataggcgcattaggtctaagccagttaggatcgaagattggaagttaagtactgaccttatagagttgaaattaactgagtttgccattatactggaagtggattttctgtccaagtattcggccagta

SEQ ID NO: 281341 - DNA, 550 bp, Cannabis indica
ataatgactcattccgttcagaactctagcacttgattcctttctgtagcagagcataatcaagagctgaacctggatctctttctctccttcctttgatgctgattctccttcttgttgtttggattctcctacaatcttacacactatgattgagataccacttgatgtgtgtgggcactactctatcactcaaggatttcgaaattcaaagagaaaaatagaggaaagtggcgcatggctttttctgaaaggaacaatatgcaaagttcatgagtttcctcaagccaacactttctatttatagaatagccatctacgtttagattagaattgtatggcattaaaataatggaatcataaaatggtaaaagcttgtgcatagtgggcggccatataaggaaattaagcctcactttgtaactttcccattttgttatttgtcattcccattttctcaaaaataccaattttcgaatttaaccatttaaattccaattctaattatttaataactaaaaattaattattaagtaatattgccatttaa

SEQ ID NO: 281342 - DNA, 472 bp, Cannabis indica
atcccatgttcatttgaatgacacttgtggtaggaactttagaatgcaactgagaaagtaaatctaaccattcatatggatagaaataacttatcagaattttgaggataagataggagaatttgcaagtctattcgaatgacttaggcaaaattcctaatcctcatgaaatattttatggtatctctaatgattacttaatcttaagcaagtattttacattaatgttaatactatattgctatattgatgacttagtgtagaaggaatttacagtttcaaactaagataatatgtcacaacaagatattcctaaaaaaacaatagtaagaggttaaatgtacttcgatgtatgaatttaaccagactcctactgttgagtgggagctatcttagatgtaatcgaacaaggaacattaggagacagtcaagaaagatttttgaaagtgacctatatgttagataatagggg

SEQ ID NO: 281343 - DNA, 291 bp, Cannabis indica
attttaaattaattaattaaaaaaatcaaaaatattaaataaatatataaaaaattcagttttttaaataaatttgaataaaataaattaatatttaaaattacacctacaaatttgaaaaattaggtttcaactaacctaaatatcatttcaaaaaaaaattttgctaactatcttttaaatatcatgttactttataaagttagcaaatatcttatttctattcaaaatatcatgattatagtaatcttattttaaatttaaataaggtcaaattatttaaaaaaaaat

SEQ ID NO: 281344 - DNA, 659 bp, Cannabis indica
aagggctcatcccacttatcataatctgcaactctgcattgcacttggtggatatattggaagctaatctccccatctcatcgtactcagcactttacctttttgactagaattgttcgatggcctccatctgtgcttgtacttcttcaggtaatgacatatacctaataggaagattaaattggggaggagaaagctaaggaagagttgtattttccctagacatttaagtggatgtagccagaatatttttgggtaatggaggtagtagaggtagatcgtgagcttctttgctggatcaggcattcctccttgaagatcttccgccatcagtggcatgagatctcttctaggaatgaggatcataagcttgtttccttaaggcagccaactattgcaccttttctttgatgtccaccttagcctttttactcacaccaccgttcaaagtccaggacctcttctggaaataatgactagcccatcgcaatctaaagaatcctcatcaacctaatgcataggcatttgtcacaatggcacgacatctaaagcagtatctgtcaagtcgataatcggagcaggcaaattttcctaggttggagcctttagagcagcctcttggctttgggctagaggtgttggcttctgagatccactcc

SEQ ID NO: 281345 - DNA, 1215 bp, Cannabis indica
ccttcatgtctgactccaactcccaggcggcttcctccaccttactattcttccagagtaccttgacaaaagctatggtcttatttcgaaggacttcatcctttttatccaaaatctgtactcgtttctcttcataagataaatctaggctggaattctaggttttcattaatttagcacatgagtgggatccgaaacgtagtttcatgacatagaaacatgaaatatgttatggacttctgaaagtgctgaaggcaaggatagacagtaaagtactaatctaacctttttaaggatttcgaaaggcctgtcaacctagggcataacttgcccttttttgcaaaatgtttaattcccttcattggagacactcataggaatacgtgatctctatagcatcgttggttccttgcactgatctgcataactcttttgcctactctgagaggcaagcattctggctttaatcttttctatagcctcattggtttgttgtactaattctaggcctaaatattacctttctctagcttcatcccattgaattggagatttgcacttcctgccatacagcatctcatagggagccatccctatagtattctcatagctgttgttgtatgaaaatttatcaatgctgagaacttgctccaggagccttcaaaaatctatcacataggctcggaaacatatcctcaagtatatgaattatcctctcggtctttccgtcagtctaaggatggatagttgtactaaaattcatcctcaagtatatgaattaaaacttccgatctttatctgaatataatggactttggagcaccatgtaactcactatttctttaacatataagtccgcatactgtcaaagcgttggttagtacaaagggcataacaaaaaatttatagtgcccatacctagtgcggaaagtagtgtttggaatgtcctcctctcagattctcaactgatgatagcccaattagagatcaatctcaaagaagattgtcttcccttaaagctgatcgaataagtcgtcgatcctaggtaatagatacttgttcttgatagtcagtttgtttagttcccgatagttaattcacatgcgtaaagttctatcttacttcttaatgaacaacactggagctccccaaggtgacacattaggtcgtgaaaaccctaaatcaagcattccatgaagttgaatcttcaattct

SEQ ID NO: 281346 - DNA, 618 bp, Cannabis indica
actagatccactaaaataccatctttacttactacgtgtcccaagaaactcacctgaggcaaccaaaattcacatttcttaaactttgcatacaacttatgctccctgagacgttgcaataccattcgaagatgtctttcgtgagtttcttctgagtctgaatagattagaatatcatcaataaagacaataacaaaatcatccagaaagtctttgaacactcggttcatcaaatccataaacgctgctggggcatttgttaatccgaaggacattaccagaaattcatagtggccataccgggtccggaaagctgtcttgggaatatcctcttctcgaatcctcagctggtgataaccagatcgaagatcaatcttagagaagacggtctttccctgcagctgatcaaataaatcatctatccttggcaaagggtacttattcttcactgtcaacttgtttaactcccggtaatcaatacacattcgtaaagttccatccttctttttaacgaacaaaactggtgcaccccaaggtgaagtactaggtcttgtaaattttaaatccatcatcccctgtaattgcacttttaattctttcagctctgcaggcgccatc

SEQ ID NO: 281347 - DNA, 634 bp, Cannabis indica
acgacgaggagcggtgatcttctgaacaggaacttgagtggtagttctctcgattgtatcaacttgtaaaggttcaaccgaggaagtgggattatcctctacttgagtagaagaggacggaacattggaaggacttatatctgcaagcatttcctccaacactactttactttgtggtttgaaattcttaatatagtcatcttcaaggaaagtggcgtttgtggaaacaaacactttatcatccttgcgactataaaatagtccacccctagtctctttagaatttccaacaaacatgcaaacctccgttcgcttttcaagtttgccatctttcttacatgaccagggcacccccagattctataatggcgtaaactaggtgtacaaccattctatagttctaaaggtgtcttagggactgatttagatggaataacatttaaaatgtcggttgtcatttgaattgcatatccctagaaggacgtaggtagagttgagtagctaagcatggacctaaccatttccaaaagcatggacctaactccattttactgtggagtgctaggggcagttaattgggattcaatgccaagttcgatcaaatgatctttgaactgcatatccatatattctc

SEQ ID NO: 281348 - DNA, 663 bp, Cannabis indica
gggcataaaacccaacacctctaacataattttcttagcttcagggtccgatacacaccttaggtacgacatgctaagtcttctttagtagaaaatgttatccatcatcacataacggtgcgcttgatactgtatccttctggacatcatcctctcttggggcaactcgcctttggttatgtattcgatgatgggaatcatccagttgagctctcgttcaactgctgccacaatatttttggctttaatacttggttctgtgaggcgttcaacgggtaccacccccagtttctcaatttcgctatctgatgctaacttagccaaacagtctgcgtgggcattcttttctctagggattctttccactttgtagttcgtgaactcatggagcagttctcagacaattgctacatatgcaaccattttttctccacatgtttgatattctcccgacacttggtttaccaccaactatgaatcactgaagacttctactcttgtggcacctacgacttttgctaacctcagccctgcaatcagagcttcatattcagcctcgttgttggaagctatgaattcgaaacgtagggccgccaggagtcgaagtccgttcggagatatcattgctaccccagctccggatccgttttcgttggaggcacc

SEQ ID NO: 281349 - DNA, 565 bp, Cannabis indica
taaaaaatattttaattaaatttatttttaaaacaataattatacttataaaaacctataacatattcaacttataataatttttataataatcactcttaaaataatttaaaaatgtcacgagtttcaattacttttagaagttaatatttttctttttcgttttttttctctacttatatttaatttaaaatttcaattaatttaatagtttgaaaattctatcatattatattaattaattttatttttcaagattataatgttcaatgtatttaaaatttttagatataaaatcaattttttacatcaattacatcatttataaaatcatgcatgaactagtaaataatataaattcatagtatgcttattcttaaacttagtttaaggtagggttatgaaaaaaaacccaaccagcagactggttcccaaccagaagaccggttcctggggatcaaccagtcgaccggttgttacaggtgatcggttcagtgcagggaatcccgaaaatgtcctccacaactcaattcgagcccaaactctaccatactctctagaacac

SEQ ID NO: 281350 - DNA, 865 bp, Cannabis indica
gggagttttgtgtggcttttttgaccattgactcacttaatattttaagaacccaaagccaaatccaaaaccaaaaagaccctctagctagctagggcatacaataaatcatcaatatttgcagttattatgatacaaaaagcaatgatgtgatttatcctttgtcaaatatattatattacacgtttggaaatggtgatcaatacactttgaactcaaatgatagactgactacttaacctcatctaactttaaactcagtttgggaaacaagggaactcaaaatattaccctgaccatcaaatattcagttcattagtaggatgaaattagtgaattttattcaccaactaaaagaattattacacttaagccttaattccataataggattttaataattggataaatatatttttggtgttatttatcaaaaaaactaaaataattactttagtatatattttatttatttattttggtattcaaaattgggtcaaataactaagttttagaaagaaataaagaacctaaataaaatatagtaatatataaatattttaacactctcatgctaggtggaatgagtgtacctttaatccagaaagaaagtctatttggattctaatcttttgaaagggtatagtgatagtggtgcgtatgccactttactttagcacaattcccgtgggaggtactttgtcactttccatattttgaggtaaaattgttcggctaaactatactatatcaaagctaacaaaaacaattccataaatatatatctttatatattaaaagtgtctatctaacggcatttcttggtttaacagaatatacttaaaaataaaagaatattctgtta

SEQ ID NO: 281351 - DNA, 692 bp, Cannabis indica
atataaaactatatgtggtattaacttttatgtacacctaaatatataatattttaatataaattaaagtttaacatagtaattatataaaaatatgatatataatccaatacaatacgacctaatacgacgttctaaacgagccctaaacgagctattacacgcacgtctattttattttatatagacaattagaattttattattttatgtattataaattattttgaatttctcaaaatattacaaaatgtcataaataaatacaatacacactatcatataaaaaaattgagattaatactattaagatattaaaaacatgaaagtgctgcatcagtgcacctatttttgagagggtcgaccctaggctaaggcgcacgggctaggcttgcgcctaaggcccacctctatcaggggcccaaatgatttttttttaataaatatacatatttttttaataatttttaaaaatattatttatttttataaaaaagggcccaaaaaataaagtgaaaaatacaccaaatatgagattctataaaaaagtttcataaatatgattttttttaactttaccacccttagatagtatttgtcaaaatttaacgttttttatggtattttctttgccacttttttgtaaatttaatttaaatgccatatttggtaaaaaaaaatcacaatctcaa

SEQ ID NO: 281352 - DNA, 780 bp, Cannabis indica
atatgttgtctttgccagaatacaaaaactccaagtaacccattagttctttaaccaattcacaatgattaatcaaactaattacctcattatcgatagaatttcgaatttgaaggaacaagcgagcatcctcacggagccatattttccttgaatcgtttgtttcttcaggaggatcgtcagtcaagtgatcatctttgtcaatactcctcaaatacagtcgaatcgtcttactccattccaaataattcgaaccaatcaacttatggtccgtgattttagacatcacgggaaccacatcagaaacaacgattgatttcgaatctgattttatctctgccataatctcgaaaccaaaaaaaaattgacagaaaaaggaagagaacaaactcaaaggaatagatacccaaacacaaagaagacaaaagtatcaaaccacaaaatgcgaagaaccgccgaaaaccgaagcaaggaggacgagaaaggagcaggagtgggacgggcgtcgaccgacaccggagaagacgccggacgcgccctcacgcgccggcgcgtgggacggttggcagcggcggacgacggcgcgtgggccccacgcgcggtgaatctggacgccggacttttgggttttgcagtccggcggctgggcagtcttcctatgtgggcggtgagaaaaaatggtcactccaaatagggttttcgaaaaaacaaccctaaactcaaaccctaattttttttttttttttttcagaaccctaatttcgaatttcgaattttgaa

SEQ ID NO: 281353 - DNA, 487 bp, Cannabis indica
aacgctaaaaaaaaatgcagagataaagaattcttcttttggtaattagcatgtctttggtggaagtcactttctaactaattggagctagcaagtataataatggtaaatgttaaaattaagatgagtttatattgttatatatgttttggtatagatgggggggttttgttcaataattttgaatatttgatgtataaattttggatgttgcaatcatgtaatatatatatagatttattgaatatgtttttcatgttgctctccagtagaggagttctctatgtttttcatattgaaattatgtaatttagtttaaataaaataattacactaatatgtgcttgcttaatttgtatatacataataagtaaaaataccgcataaactattattttgtatatatctcctttttttaagcatgttaataatattattaataggtttttattttagtttttttgtttacttcatacgaatttgactt

SEQ ID NO: 281354 - DNA, 632 bp, Cannabis indica
ccacgttgagacttaatacaaacagaataagaatcactacaaaactaaaaataacaaagtaaataaatatttcatagattgtttaattttgtgtaatgttttttttttttggcagttagttgtaggacgtttattttttattttattttttagcctttaaatagttttttaattttttgtatttttacgaaaaatacttatgataacccaaattaaaaactattttttttaaagggaaataaaaattattggagtaacctgaacaaatttaaaataaaaaataaataatagtatatagaataattttttttaaaaatatatataatttttattaatttgtacaaatcaactaaaggacaataatgtacatcaagaggaacatcatctctattaaacactcaatctaaaaaagaataagatgttttagcaagactataaagaacaatgttagcagatcatttaataaaatataagaaaacattatttaaacgatgtaagaaatttacaacaattttctataatgacctcaaaagaagaaactatagctaatgaatttcaaatagcttgtactactaccaagcaatctgactctagctacactttctgccatggtggtgtaaagcccgcttagt

SEQ ID NO: 281355 - DNA, 689 bp, Cannabis indica
acatgtacaatcttcattggctttcctcatggttcctcagccttggccctgcccctacctacacataaacatagcactgtgagtcgacagactcagtaagaaaagcataatataataaaacatactaaatcccgagttataaccaagcgcccatacacctgaccataaccctaactgaatcaaggacgtccatgacaacgcatgattaacaacaaatccaacctatactctgtactctagccgtatcgatctggtagcagttaatttatactaactgatagcctagcatatatctgttggcatctcggttcaactctatgtacacctcactgttcccctaatatgctaatttgacggctatataaaattttcctaacatatatctaatatgttaatcttatggcaactgacatgtacgctaaacatgtataagcatatgcaagacattatactaatcttacctcgattccaaattcaggtgtgccgatcaacctgagtggaacgatctgctcggcgaattacaagctcctaaatcataataatcacaacacagataagtgacacgctaaatcacttcctggggacttaaactcgaaactagaagtttccctatcgagaaataacatggcaataccctaaataacaaaaaaatgggaagaactaggtttcccaaatttgccccaaccggt

SEQ ID NO: 281356 - DNA, 568 bp, Cannabis indica
tctaggttctatttattactctcagtgtgctcattatccctaatggtaggaacattgctagtagatgtacccccactatttcttaatttaaaaggaaatctatgttcataaaattcagcatcattagattccactataacatgtgcattcagatcatagaatctatatgctttgctattcaccgcatatccaataaatacacattcataggctctactagctagttttattctcttaggatcaggaatcctaacataagctaaacaaccccaggttctaaaataagacacatttggttgcctatttttcaagatctcataaggtgaaaatttactcttagttttaggaactctattcagaacataacaaacagttaataaaatttcaccccaccagtgagatgcagcaccagaattcaacaaaatagccacaactaattcagtaaatgttctatttttctttcagctttaccgttcatttcaggtgaatatggtgcagtcctttcgtgtatcataccatgtgaattataaaattcaataaacgagtttgattcatattcagttcctct

SEQ ID NO: 281357 - DNA, 1013 bp, Cannabis indica
ctataccctcgaaggtcatcacatagagaataagtgagccttctacacaaaaaataacaataatgtgtaacaagagtgaccctaacaccagaaaagggaaatctagacatattacgtgaaaactcaagagaaaacattcccagaaacttcaaacactaaacccaggaaaacaaataaacagtaaaacatgccatgaacacgaacagtaaagtgaggaatgcgagaaacttacatgaagtgttggaactgggggttgctattgatcaacaaagaaatgtagactgacagtaacgagcaaaggttagcaaagaaatctgtaaagtgtttgaaggttttctggtctgaggatttctttctctctggaaaactcgaagaaacttggcgaaaggatgaaagtaaccaaatgaaggaaaggtggtggcttttataggccaaggtgcatgtggaacaggcacaatcacctaccaatcgaacggttggggaagcgcacgattcgaattcccaagaatccacggtgagattgattcgtaattaaggcggtggaaacgtttgagtatccgtctgacacacattaatgcgccgtatcaatcaatgggcatgaaacaaatcgacgcctgcaaaaagtgaatcgctgcattaatggtgatcattaaatgcaccttcacgcgcccaaagcacgtgccaggaaaccgaggagtcaaccggaggcacttgaacaagccttgattcattttgcaaataaacaaggcttggggggtaaatattgcccctgattttgcccaatatacgtggaccaaccggacaaggacacgtggatcaaagatcttaacatttgaattatttgctaagtctttatgaagaaaggcagtatccgggacctgcctcccggagaaggcatacggagccccctatgctcccggaggcctaagtaacatcaaagcatctccgcgaggtgtcaggcttcccctgagcagtcatctcgcatttaatgccgcatgggaggaaacgtgttg

SEQ ID NO: 281358 - DNA, 706 bp, Cannabis indica
gttgtccttctgagtcaaatgggtaaattattttctcttggcacttctgactgtctcattataatacttggcattaaaaacctcctggaatttctcccaggtcattgtagtaacgtcatgtatcatggacaccatgtcccaccaaactaaagcatcttcttgaaattgaaaagtggcacataccactctatcatttccagtgacgcccataaaattcaatatcctggtgattataattagccattgctcgactttcttaacatctggacctcccaggaaaactggaggtgcctgcttacggaacctttcatatagaggttccatctggttcgttgcaaccaccggttcggcttgcacagcaggggcaggtgccactggtatttctggaacaagcactgcaggagcaccctgctgtctcaactgtcgaatcacttcttcttgttcattgattctagtttgcatttctgcaaacctattttcccaattctgggaatcctgagcagcttgggcagcctgggcaacctgtggcgggttatcatcattccgaccacgtgccatggccctgggatctcgacctcggccctgaatatttgggggaattcgagcaccctgaccttcatttgatccaaccgacgttgccctggcgtcctggtgtttcgcctgacgtccatactaaatctaaactaagcctgtgtaccaacgagct

SEQ ID NO: 281359 - DNA, 678 bp, Cannabis indica
atatatccccctatacttaggattttttcttgttgaataaaaaatatctaagtataagtacaagaatgaacataatcgaataatgcgaatactattgataataaaatttcaagctctcgctattccatgctcgtggaatcgcagttccatcgagtgttgcgagtcgataagttgcatcaccaatttgatctgcgatgaggtatggtccttcccaattatccccaaaaaccccgtgcgacgggattttggtgtttggcattactcttctaaggaccaagtctcctgctcgcagggtttttaccttcactttggagttaaagtatcttgcggttcgctgttgataagccgcattttgtaggtgcgctttatcacgcttttcctccaaaagatcaaggcagaatagctgattctcgttgttctgcgagatgttgaaaatatccctgcgtagggaacctgccccaacttcaactggcaacatggcctcgcacccgtaagaaagtgagaagggtgtttcgccagttgtagatcgaggggtcgtattataggaccataggacttgcgataactcatctggccaagcccctttgcgatcttctaattttccctttatggtgtgtttaattatcttattaacggcttcagtctgtccattactctgcgggtaagcaactgcggaaa

SEQ ID NO: 281360 - DNA, 559 bp, Cannabis indica
aagtgggctcccttatgcgaattgcattttcaacaggcctgggcgtggccgagagtttcttcttcctcttcaatgggatcacctgctcagcctcaccctcaacctcggcttcatcttcaggatttaagggctcctgagcatatggcttggccctggcacctcccttcaacttagcgtctcgcttaacttgaatgagctcatcctccttatgagctcgttcaagccggctagcatcagacttccccttcttccccgccacggacttaggagaaaagtcctctgggtaaagcccatactctaccagattatcatcggaggtcaactggatgatattcctgtcttcctccagcaatcgtgcaagtttttgagttatatccctaagagcaagggtgacgggaggacggtgatatgtcagaatctactgaaaccaagtccgggtgatgctcggatccttcaccatgaagtactcatcaacaaaacaccctattttgctaatggccttgtcgtccgtaccgctcaaccacttgaagcctggctgagagaagtagaaataccccga

SEQ ID NO: 281361 - DNA, 669 bp, Cannabis indica
atatatatatatatatataatgatcaaaacattcatcatgatcatcttcatatacatataataaatatatgttaaatgaaaattgtaggtgatatcgagccaaacaacatacccatcaaagccttaacctctcttgatctttatatatatgtttgatcttataataaaactctatacttgatttcatctccttaatttgtagagatcacaattcacaatatataacgatagaaagagaagaaagaagagaaagggatataaaaaaagcttaatttctaagcttagttgtgtgtgtctatatcatgtgtacctatatatataaatatattgagagagagagagagaagaaaagagctcaagaagcatgttaatctaatggctcatatatttacctaatttataaagaatgacctgaaaaagattgatacgtttccgcgtggttaccacgcttccacccactccaatatatttattttctatatgctagattaatattaaaaaagtgtaaaaacacaatgcttaattttatattagtttatacatttttttttattcaaatggtacaataaataatgttttatataattaaattaaataatttctcaaaaaaaaaatataattaaattaaataaatcatattttttttttaaactaaaaaaaaaaaagatg

SEQ ID NO: 281362 - DNA, 666 bp, Cannabis indica
taatttagtagtaattagtccaattccctgtggttcgacctcacctgtgtgagtttactacttgattgcgtatacttgcgtagtgattataaattcagcaacaatgcctattgaaaatgataatgtggaaaataaaggtgatgtgcctattgaaaatgataatatggaaaatcaaaattttgattctgaaaattgtgatgatgatcatttgaataattcactcgaaaataaaattttagaggataataataatgacaatgcagagcaaacaaactcatttaaaaatttacttgatatatttgatccaagaaattgggatgctcttgatccaaaaatgattgatttattagtgatgaagggtccaaaaagagattgttctattatggctggtcctaaaggtaaattttctagacgattcactgctaatttgtatactagagttttatcaaatggagagaagtgtgatagagattggcttgtttattcaaaagagttagatagagtattttgtttttgttgcaaagtttttaaaacagggattgttagaggacaattaataaatgaaggctttagtgattgggtgcatattggtgaaagacttagagagcatgagataagcatggaacatgttaaaaatatgaccacttggtacgaattgcgtctaag

SEQ ID NO: 281363 - DNA, 562 bp, Cannabis indica
aaaagattacatttaaatagagttttatttagggcacaaagcttaacaaactcccacttgcactaacataaaacaattagtacatttcaattaatcctaaattcaatctgtgcttttcaaatgtagttgcagccaaaactttggtgaatggatcaactaagttgtcttcagtgtccactttctccaccagtacgtcccctcttgccacatattctctgatgatgtggtatttcctctctatgtgtttgcttctcttctggctttgaggctctttaccattggctatagcaccagtgttatcacaaagtaaagcaagtggtttttccattccaggaacaacacaaagtcttgagaagaactttcttagccaaacaagttcctcagcagcctcagcggcagctaagtactcggcctccatggtagagtctgatatgtggttcgcttagcgcttctccaaacaactgctccacccccaagagtaaaaaccatcccagaagtagactttctgtcattaagacaagccttcgaaatctaagtcggtatagcctacgggatttaaagc

SEQ ID NO: 281364 - DNA, 675 bp, Cannabis indica
ggaaaattcagaaccccatccggaattccggatgcacaaccggaattccggttcctcgcaggcagcaacatcaaaaattcatatcttgctcaaatcaactccaaatcaattcaaaccttccagacctattccatataacccaaataacatttctaaggcatcaaatctacccagaatgcacagaaatgaaaaacaccattgaagctcaagctttgagttctaaactcaaacttgagcaaatctaaacaacatgcaatcaaactagcttagatccacttaatcaagcataaataaccctctgaaaatgaaatctaccaactacagcaaacaaattacagattcacatatttcttcaaaaatcatagttttatacaaaatttcacaaacttaaaccaagcaactagcatgcatgaaacctacttaaattccttcaattcaagcatagaaaatcatagaaaataacctaaaactacagcagcaacaaactcaaaatcatcatgcatttactcatctttttcaccatttttattcaagaaaataaagggagaaagttagaaatcacataccacaatcaagagttcacaaattaaggttgaatctagctttgaaaattgatgaaaaccagccctagaattccatgcaaccagccgaaaaagagagaagaaaaagagagtg

SEQ ID NO: 281365 - DNA, 731 bp, Cannabis indica
accaatttctcttcttgtttcttgtctaacgcagatgcgatgataacagggaaggtttctgactctcctaggaatgcatattttagatcttcaggtaaaacctttagatctaactttggtggttcagggagtgactgtgattctaattggcgaaagggttcaattgactcaactttggtgttccactcttctgtgtttatcaatggtgtagactctaacaaagaatttacactatcaaaagaactttcaaaattcataccaaaatgacttacacaattttcaaaagaattatctttgtttagcatgaaatcttgtgtgacagaatcaataaaatttacctcatatacatcatcgcaatcaacagatttattagcaacattaaaaacatactgactacctctaagatgttccgttaaacatactgactaccccggatctttgtgtttaacaagacttttatattgaattatggagctgacttgttccgttaaaaatgcctttttcggaacatttgtgtttctttttgcagtacacaaatctttcaagaatttagagtaggcaggtatttgcttaatggcatctaagaaagggatatttatacttacttgtttgaatacctctaagatgtcaccatactgactacctcttttgatcgggagcaatctttgtgggaatggagcttttggaatgaacggtaaagtttgactcgattcttcaaccgagtctttgga

SEQ ID NO: 281366 - DNA, 531 bp, Cannabis indica
ttttgtggctgttattattgctgtgttttgttgttgatttctgaggtgtaaagcatgtttaattgaagttatttgagctgttttgaagcatgttagttaggttgtgtaaagctttgagttttctatgcaaaaagttatgatttttgaagaaatgttgtgtaatctgttactatgttgttgctgttgttcttgtttgttttcagaagcttattcatgcatatttaagtagaattaaccaggtttgattgcatgtttgtgggatttgctcaagtttgagtttagaactcaaagcttgagctttaatggcaatttgtgtatctgtgatttctgggttagtttgatgccttggatatgttctttggggtatttagagcaggtctggaaggtttggaataaattgggtttgatttggttgagttaggaatttttgaaaaattcctgcgaggaaccggaattcccaaaacaggaattccggttgggcaaccggtctgccggttggggaattttcagaacccgtgtttttcctcgttt

SEQ ID NO: 281367 - DNA, 452 bp, Cannabis indica
gtttatcgatgacatccttgtatactctcagtcagaagtagaacatgagcaatatcttcgaatggtcttacaacgacttagacaaagctaaactttatgcttaagtttaagagtgtgagttctggttactcccaagtatcctttctatgtcatattgttggtgaaaatggtattatggttgatccaggaaagattgaatcagttagagtgtggctgagaccgaagatagaatctgaggttagaagctttattggtttagctggatactaccgtcgtttcgtagagggattttcttagatctccatgccattgacagaattgactaagaagaaccaaaaatttgtgtggtctgataagtgtgaagccagtttccaagaactgaagaagcgactagtcacagcaccggtgttagccttaccatcagataaagaaaagtttgtggtatattgtga

SEQ ID NO: 281368 - DNA, 530 bp, Cannabis indica
tctcacacttctcaccatacagatagtgacgccaaactttcaatgtaaaaacaacagctgccaattcaatatcatgggtaggataccgctgttcatactctttcaatttcctggatgcataagaaatcactttccctgactgcataagaacacagcctaaccccctgtttggatgcatcacaataaatcacaaacttttcatcacttacttgtaaggttaatacaggagcagtaatcaaactttgcttcagttcctgaaaactaccttcacacttatcagtccaaacaaacttgcagttctttcgtgtcaattctattaagggcgtagaaatttttgcaaagccctcaacaaaccttctataataccctgccactcccaggaaacttctaacttcaattgttgacttaggtcgtggccagtcgcgtaccgcttcactttactggatccattagaataccatctttacttaccacatgccccaagaaactcacttgaggtaaccagaattcacatttcttgaacttggcat

SEQ ID NO: 281369 - DNA, 528 bp, Cannabis indica
aaaacagtgacaaacaggaccaccttcatttttacatatacctcctctacaaggcccctttttacactcggcgtcgcatttagtgggatttgagtctgaatgaggacataaatctggacgctttgtgctcttgcaacatgcaaggagcataggagaatcttgtcctagagtaccattgaagcctacaaaaacaaaatatatagtatgagtactaataataattaatgacaaatataatttcaataatgcaaaaggaacaatataaaaaatatgtatatattgagaccaaccaaaggaagaaatgagaatccccacaagaagaacaacagaaacaatttgaactttggccattcttcttattaattattttctctctttttcttttagttttatgaaaatatgttagctaccaacacagtcttatatacagtttgaagagatgatattaattaattaaaatttcctttttcttttatttcttcaatttttgccaaaattagtgatatatgtatttaagtagttttgtta

SEQ ID NO: 281370 - DNA, 1012 bp, Cannabis indica
accctatgtctgataaatctaggaaactttattcacatagtcatgtttactttccaatgtgttgacgacacaataaacaggatcaagtatgtgaaaagggtttcagatgaattcatacattatgtacatataatcatgaaataaatcatgtgaaccatgcaacattaaatgttatttctgatctatattaataagtaaatctgattatattgaaatgagttttatttagggcataaaacccaacagtgccacccgtaaatattcgagttcaagtctgagtgcacactttggtgtaaattcaagttaggttgtcacccgactactacacatactaacttactttacgtgattaaaccgccactactacaaaatgattgactttttccatgagtttataactgttttttatactatttctcatcagtttttaaaactgttggctatgtgggtgtcataaaaaagtaaaactttaaaagacgatttataactgttgaaaaaaaattactttaaatgaaagtttacaacggtggaaaaaagtcactataaatatttgtttttaaaaaatattatgtatctaatactatttaattttcctaatgaaaggtctaaacaatttttgcacaaaaatttataattggttcttagattagtaacacctaaaaattctataaaattaaaattaaaaatttgttttaattttacagaagttaaaaaacaaaatattcagaagataaacacaaaaataaattcacaaatacatatttgaagatacaaatacaaatacataaacaaatatatatgtgtatttatatgttgagattgttgggcgagcttcttcacggaggtggagcaacatcgatggccaagtggcttaagggtattaggtttgagaactcgacgagcccatccatgacctccacttttgcctatggtgatcagagatggcaccaacgtgcattactgagaaataaacgaagggagagagagagagaagagagagagagagagagag

SEQ ID NO: 281371 - DNA, 708 bp, Cannabis indica
attagcgccccactcaattgaactatcatgtccttaatctgtatgtcacgagaatgtctaattggtcgactttaacgaacaaattgaagaacataaataatacaatcaagatcgaacctaaccatctcaggactaagatttattgacctaagatcaaccagtgatattgacttagaaagatataacaataagtttatgatatttgatccaagttcaatattaatccaatctgatgtatactctatacatatgatactgacatactttgccaatatcctcgaaatgacataacacttatccaaggtgtaagtatactttatcactgattatcatgtcagtctaaatctagtgtactgacaaatcatgggacttaaacttttgagcatataatcatgattatattccactatattgacaacactataatcatgaataactatatgttttggatttaatagaatttatacattaaacatataatcatgaaataaatcatgtgaataatacagcataaaatgatttttgatattttattaattaataaatctgattatattgaaatatgttttatttagggataaattaatatatatatattttccatccttggtattaattttccaataaatattatgaaatttacttaatttaagttggtctaaaattaattaagattaatttttaactcaaatttaatttctataaata

SEQ ID NO: 281372 - DNA, 519 bp, Cannabis indica
aaattatggattcgaacatagaacattgaagctattaaactattaactgattgtaaaataccattatgctacactaaaaaaaaatcttcatcctagttgtgataaatagaaaagaaagaaaaacattaattagtaaatagtatctgcaatcaccgtataagtgctaaaaattagcatctctattataaaaatcacaagtactaattacaaatggttcaaatttcaaaagcattattatgtgcaggggcggacgtacatagaaacgaagtagggcagtcgtatatattttaactagttacaatatatatttataaataaaagtaatatttataaatgtaaaataaactttggtatatggtaaaattatttcatttatataattgatccaataaaagcatatttactttaatatttgcattttattttttaaatctctacctagagttatatttagtgtttaaattgttaatttttttattttttatatatatatatatatactatatttaatattaaaat

SEQ ID NO: 281373 - DNA, 603 bp, Cannabis indica
aaacaaaagtgttaccaaacgctaccttaattattataagcatgtatagcatttcaataatctaattttaacaaatatatgtaatcagtgccactaattgtgtccaatatgttggcaactaccaaatatcttatatattgtacagccggcctataacataaaatatttatgtgtgtgtgtggcaatgaattattagacatgtagtctttcttttagttcaatattttgtgacaatgattatctttattaattacttcagaacatctctctaacacattgttagatcaatgtctccaacattataatttagcatagtacaatcatccaacaatgcaaatataatatctaatgtaatcatatttagcatttgattagttttagctttattattaaacaaatgtactcatattattaactaaaaaaaaagtgttttcttcttcttgaattttaaactttagcatttgattaagaacattgttattaggtactagtggtgtctaacaccttctcgacatgtcacgttgcgattggctagtgatacttcctaaaagttattatattaaattatgtgggactcgatacttaattggaccaataacaata

SEQ ID NO: 281374 - DNA, 715 bp, Cannabis indica
caccattgtttcatacttacaaaatacttatcataagagatcgttacggtgttaaatacttcaccgaataaccatgcataagagggatgaaatctagcgtctcgaggttacattgaaaatatttaaccatgtaagaccaacaatggagatcgaatatccttataactaaagctcattattttttaaggagttgtattttcattctaatatttattttaagctatttatattaaatatatatatttaattaaatttataaatttagaaagttctaactataaattttaatttaatatttatagaattatacttagatagatctgaaaataaataaaattattttcatcttagtaataattctcaataaatatttcgaaaattattcaatttaagtcgatccaaaattaattaaaattaattttcaacttaaaatttaattttctataaatatatatagcaaaattcaaaatccaatgtattcaaaaataaatatattttcgaaattgcataaaataaaataaaataaatccttaaaaaattattctaatttgtgttggtccaaaattaattttcaacataaatataatttttcctatttaattaaatattaagaaaattatcaaatatttaagtttcatgaataaaatcaacttaaatattaatttccatttaattaaatataactagaaaaatacttcaagtaaacagaaaataa

SEQ ID NO: 281375 - DNA, 754 bp, Cannabis indica
catcattaccgtatcaccttaagtaattcaggtaatcttctttaccttagtgataccactcttcttcctgacgttcttttatacgttacacgtgtaatgtccccacttcaagcctccattgggcccttacacccacaaaatgatggctcttatatatgagtgcataactctagctgtttcctggactgacgattcgtcccacggaccaatccaagtatttctaacgtgctttgctttgactcgcacgcttcatggggaaatttcgtaaatgaaaccaacccaagtcaacgagacttaaccatagagttccgtcatggtgagctaccaaaacaagatgcttcttgctaacataggtagtcccattcctacataatctcaaaattactacacaatcgtcgccttcaattcatctaggctcccagacaatactcataaattgcctcacctttggtaacgctagatcacttctaaacaaaagattttgttatttgaatcaattagattgatgcctccattaactactcatgtcctatattccactagggaatatcaacaatttaactcatattgtcatctctctaatctgtctaccctgttaaatgggttaccactatataacatacatgcacagtccattcagatttcttgatgtctctaactaaatgtaacaatgtttaatatcaatagtaattataatattgcccataaattctaacttgagtcggtctaagggccgatatcgctgtcccattga

SEQ ID NO: 281376 - DNA, 511 bp, Cannabis indica
gacctgaacccagtcccaaacccaaaagttgacccgaacccgtaccctgtgacactaaatggaaccaaaaaaagaagtttaccgggactggaactaggacttggactttgaatcataactgaaattggacctagatccagaaccgtaaccggaccaaggcccggactccaaatcagacctacacatgcattaggagccggacccggatcccaaccaaaacctggactcaggacccgaacccgaacctgaactcagacccaaacatggaaccagactaggtacacaggaccagggtcaggacctaaaactgcaccccagtctcgatcctgaacccaaactcaaaaacgggaccagggattcggaaaacggggcctggaatagactagtagtcggtgtctagatctgggactcggactaggaccagaacccaaacgatgaaccaaacccgaacccagacctagacttgggaccaaaaattaaaacctgaacaagaatcgccgaaccaggaccc

SEQ ID NO: 281377 - DNA, 648 bp, Cannabis indica
cctcttcacaaggatcttgatcttcaattgtaggctcattatcttccttgtattcaactaatgacccttcttcattgtagcaataactctcataactttcatcattggaattattacattctgaatcatgagccattgaattatcacataaggatctcaccatgtcagttaagcgattaatctctcctggaagtgattgcataagtgctagtagttgttcctctttttcagattgttgagatgaatttgggcaataaggtgggtattggtgactccaaccctgaagtgatggatcccaatgccagtcgtaatcaaaatctgccatattattcaatagatttattacatcatagcctctcattaatagaggtgctccagttgcctctgctccataatcaacccagcttcttgtttcatcattaagtccattataaaagagccacgtaaaacacccacttgagaaagtgggataacatctctctccatactctttaaatctcctccaagcagaatagaatggttcattgtgttgttgggcaaaatcctcaagatatagcatctggatttatcttgcaggtcaagctcatcaataaaacattagtaaaataaaaataaaactaaattagtactaaaaagataaaaatttga

SEQ ID NO: 281378 - DNA, 326 bp, Cannabis indica
aataaatagaaatcaattatggtttaacacaaaatcttatttagaaattattagcatatagcaagtaggaatgacaagagaaaatacaaaaaaattcaatcctaaataatttccaaggttttcaacaaaagagtcaaagtatcatttattgaatagagttgtcagctcatctaaaatattcctatttcatgagcttcaaccattatttcatacgtttgtaagtcttatacagtcgccaccattagggtgatcaatactaatataaaaaacttacaaatatacttatctttcgagattaaacggtgctaacttgctaatgaacgttc

SEQ ID NO: 281379 - DNA, 669 bp, Cannabis indica
aaaattatagaatatcttagaagttaaattgtaattcaaaataagaaaaatctagaaagttgtagtatcaaccttagctccctataaatactaagcttgggttgaggagctagtgtaacaaaacaacaccaaacaaccaacatccaaactatcaataaagtttactaccttctcatacaactctctcttctaagccaaaaccattttcaacaactattcattaacatcactacttcaattaccataacaactagtaaacatttattcctcatatccacctattcaaatctaaaccaatacaaatttattctcaaaccatcagtggtatcagagctccgttcgatcatatatcactgggcgtaatcttttccactcatcaacatgaattcggagtacaatcgctcttcactacctcttccaattttccatggagaaaactataatttttggtccatcagaatgaggacctattttcaattacaaaatctatggaaaattgttgaagaaggaatcactatttcggaagatattacatctctttcgaaagatcaaaagaaggcacttgaggataatcaacaaaaggattctcatgcattatattgcttccagcaagctatggcagacaatctttttccacgaattatgagcgcaacaacggcaaaagaagca

SEQ ID NO: 281380 - DNA, 569 bp, Cannabis indica
taggtgttgtgctcacatagtgaatttaattgtgaatgagggcctaaaagatttgcacgattcaattgctgctattcgtaatattgtgaggtacattcggtcatctcctgcacgattgggaaaattcaaagcttgtgctgagagagaaaagattgattataaagggggtttgattttagatgtgcctacaaggtggaactcaacttttatgatgctagatgttgctattatctttgagaaagcattttcaaggaatgaggaggaagatgatagattcttgagttacttcaatgaaaatgaaagtgggaagaagagagttggaccgcctactagtactgattgggagagtgctaagatatttgtcaagtttctacgcactttttatgaagtcacactaaagtttagtggtaccttacatgttacatcaaacaccttttatcatgaaatttgtgaaattcacactcaattgtctgatttggcctcaagtgatgaacatttgttatctgtaatggcagccagtatgaaaagaaagtatgacaaatattggggggatgtagaaaacatcaatg

SEQ ID NO: 281381 - DNA, 611 bp, Cannabis indica
tatgtttttgtgtgtttttataattaatttgtgataatatgttatgtggtaattattttttattttattttagtttctaatttttttatgtatttttaggtgtaattggtggtgaaaattaggattaaattgaagaaagtttgaagaagtggggtcaaaaatacaaattgtaaaagaatatcagatttgaccaagaagagacccactctcggtcaactgcaagctccaatcgaagccgtccgtgtgaagatctaaaggcccagaagcgtgcgtgaggcacaccccagacagccgagagtgacaatctgtttcctcctgctgcttttcttccacgcgggccccacgaatcagcttcagctccaatcacgacctgccacgcgtgcgcccagcagctgcctccttcccagctggcaccacctcgtcagcgcccaaccaaccagcgcacgccacctcacgcacgtcagctccttcccaacgaaccagctcgcgccaagtggcacctgctgaagaaaaagaagaagaaagaaatgaagtgttaattgatttattttatcccaaaattatattcacaaacaccaaaaattgcattttctcccacatattacacataa

SEQ ID NO: 281382 - DNA, 737 bp, Cannabis indica
aaacaacagatcctcctactccggttggcccagaaaaaccaaaccaagaacttgggactccagctgcttaaacacttctccttttatctttttatttgatatatcttattcggcctcagggccttttcaaagacatcatgaccggccaagaggtctttaaacttggaattatttttcatttttcgtacaacaggctgaccggacagcttttaatccaggtattacgtgcttttgttatccttaatgaatttcattctctgtttataattgccgtgcaatcgtgattgttttatttttaccaaatgctttgtacaggtaaaggtggccccccaagttatcgagcaaacgtatgactcttggtcacttatcttttacaaatatattgcttatctattccgtgttttgggtttgaccaaaccttttgtacgcattgtatggtaaattataaacatgctgataattttaactcaattgaattttgaaatactatctttattcattgattgatcgaaaagtgtatttgttaccgtagtaacttacatcagagctatttgatctaattggatcttttagcttaacatgaaataaaacaaattgcagacataagaaactgtactttaacgtggtcacccgacctgagtactttgtttcttttatcgaaacctttgggtgtaatccgcccaaaaggccattcacttaaaaaaaattttcatttagtacttaaagtggtcacccga

SEQ ID NO: 281383 - DNA, 696 bp, Cannabis indica
tctatatgcaccataacaaattagttatggcctttcatatctatacaacatttacaatgtattgaaccgtttttcatctttttgacttacttttctaggccatactagtacaatcctttgcttcacactctctttaattcttttcaccacctgagtcatattaggatcctttccttgccatattacttcattcctggtcttcaagaggttatagacaagactagcaagactagctgccatcactttcctcttgaatttgcttactttgatcctttgtatccacttggttagcctaggcagtgttatatctgagtgtcttcattgcatccatgatgttatttcattaaaacattgcatagtcctgctgcatccaaaaaatagacggtcttttgtttcctcttgattgttacacagcacacaataagaatctccaacaatgccaaatctgcaaagtctatccttggttctcaacctcccatgcatagcaatccatagagtaaagctatgcttaggagtgttgaatcttccccgaaacttgctcactccacccctgtttatcttggacagagcatagtagattatagccagcagaaatttggtatctctctgtgaagaattggtgagtaatcaataagagagctaaacttgattttccaggctactaatttactccaataccagctcccatggcttgga

SEQ ID NO: 281384 - DNA, 600 bp, Cannabis indica
aattatcaataaagaaataaaaattattttcattacttgtttagtatgtcatttcgttcatgtgatcatttatatgtttatttgatttataaattcatcaaaacctttatcacacttgtattcttgtttattgtgttgtcaacacagtggaaagtaatcaagattgtgtgattaaatgtattcctagatttatcagtatacagtgtttaacttatatgataatctacaacataatttacttacaccttggataagttctatgtccttttcagggcattggttaaagtaaatcctgtgttggatgcatggagtatgcaaccggaagggaccgatattgaattttgattagatatgataaatttaccgtaaaatctattcaattcaatatcacctagttgatgctagatcaaatgatcttaatcctgacatggttaggttcgatctcaagagttttattttggttctttgatttgttagttaagccttccttttagtctgggtgacacgtatagttttgggaacatgtatagtaaaattgagtggagcgtacgtaatcagtagagttcggaatctaatgcttctatctagacataaaaagtg

SEQ ID NO: 281385 - DNA, 582 bp, Cannabis indica
aaggtttagctagagagaaagtccttaaaacatctaaaggaatgggactgtttcccttagattgatgaatcactcatagtagcaacccgacttatagactggagattccaagaaataggttcaatgggtaataacaagttatgaagtgataaaagtgagatacatgctacgattatacgaaaaagagaagcatgaattcctgaagcgctttaaggctgagttaatagaaactcttaatgagatctatactccaagttgagtgcagtaccgagctatgggagtactctttatagagtcacctatgtgaatgtggaagtggggccgctcctatgaaatttcgggcaaaatttctagagcattcactatactgggatagacgtgcatggccattaacgcacaagcttttgattacacccttgaaaaggttgttgcgtggtactatgttagagatagagttcaaaactacgggtcactctagtaaaatctaaattgtattcactacacagatgttcaaatcgaaagatacatttatttatgctcaatcttactaaatgatactagaagatggaaatattttcttaa

SEQ ID NO: 281386 - DNA, 133 bp, Cannabis indica
agatgcagaatttagaaatttgcaaaatccaagtaaggcccattactgtacatggccggccacttggatttcgaatccttagtgtatgtgtagtgcccacacacatcaagtgatagctcaatcatagtgagga

SEQ ID NO: 281387 - DNA, 449 bp, Cannabis indica
ctaagtgtgtttttctaaattaatttcaaaatattcaaatgaaaaattaatttcatatatttcgaatttaattatattgctaatcaattttattaggttaaactagtttaattaacctagtacagctattcaaatcaggcaaatgagccttcacagttagggttgttcatgtgagggaggacaaggttcagtatgtcgtacccactgctatgaccccctaactctcacacaaggcccaaaagagaggaatttaaccttaaaatgaaccactgttattaattgaataggcccaaatactaatgggcctaaataaaatctatcatggtgtgacattttatttagcaacctagtccattttaattacaaaattaaatgggctacctatatgcatctaagcgtaaagcaaacatataggctcacacaggcagatagatttggatggatcctat

SEQ ID NO: 281388 - DNA, 559 bp, Cannabis indica
ggcctaccggacgacccctagaaccacgaccggccactcgcctttttcaatggcgtacggttgtgaagcgatggtcccggtaaaaacgttattcccgtcccacaggagaacgacttacgatccagctacaaatcaagctttactacaagaagcgctggatcaagttgaagagctccaggacgagtcacaatacggatgacagctcatcaaaagaaggtgacaaaatattttaactccaaagttaaaaatagaaaattcactattggggatatggtcttaagaagagtcttcccagccatccaagaacccgaagtgggggtacttgggccaaattgggagggaccatatgaaatcgaggacgaaatcggttcaggtacttataagctaaaaaggatggatggaaccattgtgccaagggcctggaacgccgaccacctcggaaaatattaccaatagtccaaaagtgtaacttaggccttgtttaaagggtttgtaccgtctaagtgtatgcagcctctgtattttaaataaaactgagtgccttaaaaacaaagtttct

SEQ ID NO: 281389 - DNA, 575 bp, Cannabis indica
agccaattcaatatgcaaccttagaaattcatctaggttttcatcaagagtcttgctagtgctcatcttgaaaccaaagatcctttctttaagaaagatcttgtttattaaagatttcttttgaaactgatcttcaagctttttccatatttttgctggtgtatcttctttgtcaactaacctgataatagaatcagacaaattgaaaatgattaatccagtagcagtttcaagtagttcttcttgtgtagatttagaagtattttctagccattctataggttcactaagaaccctaagtaatttgttatgagcaagaagagctctaatcttcttcctccaaatcctataatcccccgatccatcaaacttgtcaacatccactctaatattactcatgtttaattatttgaacaagataataaaagcaagaatgtaacaagataaagtttaggttagagttttcctgtttatcaatttcttgataatttcaaatttggcttcttcaatgttttgatgatctttcttgtttcttgactttgtttccaggtgttgttgaatcttcttgcttcccc

SEQ ID NO: 281390 - DNA, 522 bp, Cannabis indica
tataaaactatatgataaaagatggtgatattaactacggggtccccctgtttcaaaatatttacaaactggtttaatagtgtttttacaacataaactttgtattcctaaaaatacattcaaaatagagcatcctgttcactgggtcgtgccactgcggctgatatgtacatcgctgccacgacctcgaactcatggctgctcaacctttgccttccctttacctgcaccataaagcactcgtgagtcacagagactcagcaagaaaagtgaacaaaacaataatcggtaataatcatcaattcaatctcatatcaacatgcttacacatttacacaatatcataaacacacaatccttgtactttataaagtaccctttaccactcgttaatcacgagctgaatatgtcactatcgttgcccaatgaagcaaacaataagtaagaaacctatatgcggtttcaagagtaattactcataacagtattaactgtttccaaccctaggtcataacctaggct

SEQ ID NO: 281391 - DNA, 669 bp, Cannabis indica
atgtccccaagctgaaattgggagttttgttctcataagtaatggtcttgcgattaactgaaggcgcttaataaatgattccgcttgaccattttgtgtatgtacatgagcaacaggatacatgagcaacaggatgttctacatttatccctattgacatacaataatcattaaaacgtgtgatgtaaattcaccagcattatcaaggcggattgtcttgactgcatagtctgggaattgtgcacgtaatcggattatttgagcaagcaatcttgcaaatgctacattacgagtagataataaacaaacatgtgaccatctagttgatgcatctatcaataccataaaatatctgaatggtccacatggtgggcaaataggcccacatatgtcgccctgaatttgttcaagaaatctaggggattcaattccaacatttaccagtgagggcttaatgattaactgtccttgaaaacaagtagcacatgagaactcactggataatagaatcttctggttctttaatggatgacaatgtgagttctctattactctacgcatcataattgaaccgggatggcctaaccggtcatgccaaataacaaataaatttttctggtttgcgaacttctcgttcacaataacatgagtttctattgtacttatacg

SEQ ID NO: 281392 - DNA, 559 bp, Cannabis indica
ctgttaaattttttggtatattctgttaagtgcacaacaaaaacggttagatagacattttatatattaggtaagatatattgccgccttttgaagagccgaagaagattgaaacagtcatcataaacatttcttagcatctatactatataggtctcttttctaattattactaatttctcattaatactaatattaggctgcgtattaaaaaaaaatgtaattgtgcgataatgcttggttgcgtgttatttaagccgtcagtgtgtgacacttagaagatattggtgtccgtacgtgaaaaaaaaataatttaaaaaaatgagatccactatattatgtatgtaagtaattaattttttttttgtgtattctacaatgcacccccttaaaagagatgtactgatgcacccttaacttgtttacggcatccagaaaaaaacttttagtactaattttttttcatattcatgtacgttatagctatttaagatatcctacaaaattttaaaaaattcggaataatttacaatatagaaaataatgttcaaacagtcta

SEQ ID NO: 281393 - DNA, 537 bp, Cannabis indica
ctaactagcataggcgtgctaacgtgattttaaacttactgtgcagctcgttgctaatcaacgaggttattggaaaacgtgattaattaaaattttgctttttgattaaaacttagcatattatattaataaaatatcgggatcccgtttacaaaatacagttataaaagtttgctatacataatatcaaaagtttgtcgcccagcgactaattaacaaaagccctgatgtcccgaggatcgtacgctccaggcctaaccgccccgacatgtacaacctccatctgctcgttctcacgattcctcagctttagctttgcccttacctacacataaacatagcactgtgagtcgacggactcagtaagaaaagcataacataaaacatactaataacccgggttataacctggcgcccatacacccgatcataaccctaatccccgtgtcccacacggtactgagtctagaacgttcataagacaatactatcgaccataatgtcagcctatactcaatatgctagtcatactctagc

SEQ ID NO: 281394 - DNA, 675 bp, Cannabis indica
cattccttttctcagccaagataagctaagtaaatcaatttacttaactaagaaaaagaaagaaagaaaataaagaaaaaaatcaaaaaatcaagaaactctcttttccttccctctctctcttcgaaaccagcagaagcaaagggattttgtggctggaattctgtgttttcatcaaggaattcaaagagaaatcaaaccaaggtaagctttagtcatatccctctttgtttcttgaaattcatggatgatggagtatgagatttttaggtttagtggctgttaggttttcatatgcttagggttcgaattttagggtccttttgagttgattttagttcctagatgctggtttggttgattggattaggttttatgcaactttgaatgttgagttcaaagctttgagctttaatggcataattggatttattgctttgttctgtgaattactgcctggaaatcattgtgtatgcattgtataggtatactggagagtttggtaaggtttgggcttgatttgaattaagggggatgatttttggttcccagcagcagaaccggtcgaccggttctgggggaccagtggcaaccggtcgaccggttggtgacccagaaccggattgccggttgggaaccggtctgcctgttgggggaatttccagaaccctagtt

SEQ ID NO: 281395 - DNA, 1426 bp, Cannabis indica
gtttgttgcacatatacttaattatatttttaattttaacttttgttatgtgtatttttaaaatattataaattaaaagaaaccacttattattattttttttttaaataatatttaaagttttaaaattttaaagaaaataaatataaaatttaagaatatcaaaattacacatactactaatattaaaaataataatgttaaaaataatatattaatatttatatatatttaaattagtctaaaattagtatacatttaatcaaataatattagtaattttatatatttaaattaatctaacataaataatattaatatttttatattaatatttcatatgtttataaaatcaatccttgttagataaacacattttatatataacaattacaatttttgtttttattaatataagttaataaatgtaattttatttttaagccccactaaacaaaaacaaaaattccagatccaccgttgcccacacatttatcaatcaatttacacatttataggagctacatttgttttttcttttgtttttttttttttcttttttttttttgttttagttttgttttgtatggcgagacccccgcgagatgtgtgggcatagggagaaaaaatgtgagatttgtggggaactatgaaagcattctttgaaaggaacttttaaaatgttgctttcaattcgctatataattttttgctaagtattattgtggatcatgtattttataaaaaattattaattggaccttgtattttatcaaataacaaaataaattttgtattttttaaaattgtataaatagggcttgaactaattttatgtacaaagtaaaatttaataataatttaattaaatgatgatatgaaaaaattaattacaatttctatatttgctcgtgtttgaaattttcttatagctgattatattaaaaaataaaaattgttaaaaattagagctcagggtcctattttcccccacgtttagaaaatataaggtcaattttgtcatttaacaaaatagagagtctaattggtaacttctgcaaaacacaaggtccaaaatagtatttaccctatttcttttccttttttgttagaatcattcctattatattctacatgaatacctactaatatattttttttgaagtatattctattgtatgatttatacatacttaacagaaattagttatcaattaggtttttgttattttgtctgttacataattttattttgctgttggtccatcttatttattctttgatatctagtcatcatattgctattagttgagaataacaagttcttttcggctaaagaagttattagtagtgcaattacgtacctatgcacaatagttaaatgttcaagataaggagttgaatgaatgcggcaagagatactatt

SEQ ID NO: 281396 - DNA, 563 bp, Cannabis indica
atataatcaagctcccaataggtagatacaaaatttaataaataaattttcttatttattaattcctcccgactccactatagatttggaattgcacttttgattacatagaatgctctatgtattccaaatatagatatattattaattatccattgttttaatgaaaataatcaaagattttctatatttgatttacattgaataggaataaatttatcattctatcccttaatgtattttatccttaaaatacttagcttcctacaaatgatatttgagtaaactaatataattactaaaataggagctcttccatctatatctattaagccaagctcaaattaaatcatcatttatcttctatgctattatagaagctatagattccatatctatgattagcgtgcccactcaattgtactatcatgttccatgatgtaagaattaagaatttccacttggtcaactttaacgaacaagtcaaagaacacaaataatatagttaagctagaacctaaccatcttaggattaagatatattgatctaagatcaattaagt

SEQ ID NO: 281397 - DNA, 574 bp, Cannabis indica
atttagtgggggtagcactagtagtggttcatctggaaagactcgtagtggaccatacgggtatttcagttgtggttaacaaggtcataagaagaaagattgcccacaacaataacaaagatttcaagcatatcatggaggacccatagggagctatgtagagtctactccttttcatggagagcccaggacaaagcagtctcagtcttcatcctacaatttcacaccccaattgggccagtagtctcagtattaacatcagttcaggccacaaggttcaggattcaacatggggtactcacaaggtttccaaactcttactcctaatgggagtcaaagaataaacaatcaaggtggatggtctagtgcaagtacaagccatcctagttagggaaagggaaaggcaaaagcaaagttgtccactcaagcctatgctcttggggttgatgatgtacagggcggtgctgaccagggagttgttgatggtatggttcttatctcacactcttgggctcatgtgttatttgataagggggcattgcattcctttatatctttgatgtttgctagtatg

SEQ ID NO: 281398 - DNA, 572 bp, Cannabis indica
atttagcatacagcttattgtcccgtaatcattgtgaaactgatctgagatgcaactcatgttctttatctgtttcagattacaccaagatgtcatcgataaacacgatcacacatctaatcaggtaatcttggaacgtccgattcatataatctatatcaagtatactacgtagctttggcccatctttcaccctgatggtgattcttacatttcggacattcaagatatgacttgaaagaggattcgtgaccttgacggtcacctcaatttccccgatactttctattactccctgatacttcgaaagcctcagccttccgtttgtaatcagggttgccactgtcggtccccttactgacgttaccactagcaggcggattcgatgtcatgacggcatcctttgtggtctgctcatttatttcatgctctttcaagacttaaactcaaaaattaaacaagattcaatccaaagaaagttatctcaaactcaatttaaagccaagctcaatcaatcctcaaatactaacttcaaaccaagcaaatcttcacaaaatcaagtttgaaattta

SEQ ID NO: 281399 - DNA, 572 bp, Cannabis indica
aaagagttttatttagggcataaaacctaacaaaaacaaacaaaaaaaaccagttaaaaaactaacttacacaataaaacataaaaattaaatgaaaccagttacattacattacatttaacaatgctacaaaaaaacaaaattaaaacagatacaacaataaatataacataaaaaaaaaccagttaaaacttaaaaaccagttaaaaaactcacctatatcattgattctctaaatacaatttaaaaataaccggttaaaaaataaagaaaattacaaataacaaaacataacaaaaaaaaaccagttaaaaaacaataaaaaacttgaaaaatattaaaaaatatagcaaaacatacaattagaaaattaaaagaaaaaaaaaaccagttaaaaaaaaattaaacttaaattttaaaaagaatttcctttcaaaatgcaaaatagttatcaaaaatataaatgacaaataaaaaccaaaacccagtaaacaaaaactagaaaaaaaaaaagaaaaaaaacaagttaaaaacctaaaacaaaaacaataacacctatagtttttaaaaat

SEQ ID NO: 281400 - DNA, 514 bp, Cannabis indica
cggatttaatggttttttcttggtgatgtccgactccggcgactccccacacacgaagcaggtcgttttcccgtgtgttttactgttcacagtataaatgttaagttgttgggcttgggcagtacaaaagtaaagaaaatgggctggggcagtaaaaaagttatttttgccgtgtcccagtatttttgtaaagttttggtccaaaaacagtatatatgtaaatttccctttactaacgcaaacaagaattttgtgtagttttgacccaaaaagaaaataatttgtagtaaataccactcaatctttatctaatggtacgctttaccatctaattttatttatttgatttttttcgcagtgaaatcatctaaactttggttcttttttgtttttaaattgttgttaggatttcctctaataaatgctagggtaaattgtctatgtatacaaatttatacaagtgccatgtttttgaatttaaatttttaatattttatagagagagagagagaga

SEQ ID NO: 281401 - DNA, 449 bp, Cannabis indica
aggctaccggaaacaattggttgtttgcatcgtacgcaacagcaactaacagtgttcctccatacttcgtcttcaagaatgttccgtcgatactaatcacaggacgacaaaacttaaatcccttcctacaagcatcgagtgaccagaaacagtacttgaaccggttatcctcgctgacaatgtcagtaatagtgcctggattcttctgttccagcatgtagaagtaaccatataatttcgtataagattctgctggagtacccctcttgtacataactgccttctctctacatctccaagctttctcataactcatcttgatgccatattcatcaaacatatccctctgtatgtcttttgccttgtagttagatccatctgatgtgtacttgttcttaataatgtgaccaataacccacggtgctgcttgccggtgatcagaatgtcta

SEQ ID NO: 281402 - DNA, 748 bp, Cannabis indica
ctcaacttgataactcagaatagtaaacaataataataaacagtagtatagaaatagaaacttgttttcacatatctaattttcaatatttttagctatcaatatatatatatagatagggtaattatatggtaggtcctagtatttttaccctatagtatagggaagaaaattcaaccaataagaattgaaagaaaagagaatgtataaagtgtttgtttacatagatgtaggagattattacaatattttgtattattatcttattcttattttacatttatgataaaatactttgttttatgtattatgaaatttgtatgtattatgaaatataattactgggattcattgaccacttttcaagtaaaactagcttaactgatattctttttgaaaatgaagcttaattgacgttaataactaatatactatatttattttaatatttttttattattatatcaaaaataaaaaaataaataaaatttttaatcaaaacaataaataaataatattgggtatgtttaaagcccttaaagggctatttcgatagactcttatctgttttagcatttaagagaattttttaatctaatttttttttcatgattgtgtacgttatagtcatttagaatcacttgtaaatttttaaaaaattctgaatagtttacaatgccgaaaataagatttaaatattttgttgcacacacgactgtttttcatatgcgtgtggcaagtaattgtt

SEQ ID NO: 281403 - DNA, 674 bp, Cannabis indica
ccgtatttggcactgggaccacaggcttcggtctgggggtccttcgctccactgggctcccaatacgaaggggccttccggcggccacctgggccttattgtaagcccactcctgttccttctggaagaggtatttctggtacttatcttccgccgtggcgatgatatcatcccggagtaccttctctgcggccggaaccctcacatttgggcagacgactttagaaaggttggagtcgtccaccgactgatgcccctggatcagcttggccttccggcagtgctccgtcgtgaccaactccccgacgtcgagggccttcttgtcatatgtggcgaaggtcttggcccgttggaggaaaagctgagtaggttcagtccgcgcataaggagggatcctaacccactccgtgagaagctccggatgctccacagcctggaacccggaggagaagaagaagcggtgacggtattccttcacatgcttctgatagttaaaagggaccgggccctcattcaaaggatgggcccggagaccgtaaaaaccgtccttaaacttatctccctttttagggatggaaacgagttcgtaaaaatacaaaatctctgccggactgggagagccccagctccgggcagagtaaaaaatgaataagcctgaaagcaggcggtaagct

SEQ ID NO: 281404 - DNA, 923 bp, Cannabis indica
ctattggacactttgagatataaactagttttcatgcacgaacattcattttaatcgaaatagttgtgaaaatctaacattttttatagtggtacccccttttgaaatatgaccggacccccatctcgaaatatttttctccactagtcacaatgaattcttactactaagacgtgaatatcaaaattggattcgcgttaaattttgttaaaaaggccccttaatttaaaaatttaaaatattcttctttttagggtaaattttaacaagttttttcgttactcttacactcgttagtgtactgttaaaatctcattgtacacatctcgaaaatcatgaaattttacaaggacgaaacaaagacggttgtagcatcacttttgtattcgaaactttgagatatatactagttttcatgcaataacattcattttaatcgaaatagttgtgaaactctcacattttttatagtggtacccctttgaaatatgaccggaccccatctcgaaatattttctccactagtcacaatgaattcttactactaagacgtgaatatgaaaattagattagcgttaaatttggttaaaactgaccccttaatttaaaaatttaaaatattcttctttctaagggtaaattttaacaagttttttcgttactcttacactcgttagtgtactgttaaaatctacaccctacacatctcgaaaaatcatgaaaatttcacaaggatgaagccaagaccgttgtgcatcacttttctatgggacacgttgagagataaagtagttttcatgaactaacaatcattttaatcaaaatagtgaaaatctcacattttttgatagtggtaccccctttgtgaaatgtggcccagacccatctcggaatattttttgccactagtcacaatgaattct

SEQ ID NO: 281405 - DNA, 543 bp, Cannabis indica
tttttaatatgaaaaaaaggccacgtaaatgaaatattgtgaaaaatgacaggacatgaaatctataccagttctcataaagagcaatggacaatgagaaaaagaacataattatttcaagagaatgtgacaatgctcgaaaacaacacaacaatacttgaaaacgacacagcaacaacagaatcatacacatcggaacaccaattagaaggaggagagtcaaaaataagagaatttgaaaatgacaaattcgacatagttgactatgcgaagctggttgctaaaaaaaatggtagaaaaacttgaaaataacagcaaaaaactagatccagaaatcgacatcaacaacgcgaagctaataacagataaacaccacccagaagttgaaaaaggtcaggcatacaaagacaaggaaacactgaagaaagtttacagctactacgcaagcaaaaacaacttccaaaacagtttttgaaaacatatttaattgggtttcagtaagaatttttttaatatctttaataacagagtaataaccagagt

SEQ ID NO: 281406 - DNA, 705 bp, Cannabis indica
gtaggcccttcccagggctcgaggagtaaaagatcctccaaaggcagcacccggacggaggaaaaacgccaaaagaggggatacactccacagtacacccagtacacggagctgacggactcccaagagcgtgtgtattttgctaccatgaaaaatacgcactaccggagaccacctcccttgtacaaggatagctcccggagggaccccaacaaaagatgccagtaccacaacgacattgggcacagcaccaatgaatgcaaaaatctcaaggatgagattgaaaacctgatccgattgggccacctctatgagtggatcaagaatcggctgccttacctcaatccgggtcaggcgacaggggttgtaccgtagggaacaccagggggtgcagcaggagtattggctccagttgctcccgccagagatgcccagcacatccccggtctgccacccaggaccaatgggagagtggccatgatctcagtaggaccccatattggaggaaccacccgcaaagaattagagcggtacgctggggccgtaaaacacaatgaggtctgggaagttacttaactcccagctcaaaggccccggcagatggatcaacccatcacgttcacggaagaagacgccaagacggtgcgcttcactcaccatgatccgctggtcatcgagacccccatcaccaataaagtggtggcc

SEQ ID NO: 281407 - DNA, 731 bp, Cannabis indica
taatctacacaaaagaggtcactttggcgacatattgtttcaattaatttactcaaaatattagtcataaaccaacaccaaaatttgaattaaattgttccaaatatataataaactgaatatttatatatccttagcatgtaaaaaatacaaattctgaagccattcttagtaaataatatgaatatattgaatcaatcaataaaaaactcatcaatatatggaagagacgtagatataataatatacattagaagccacaaactgaaggcaaaccgcagcccaagaaaaaacgattgatcttatatatatgcgtatgaattaatttttaggtttactgcttatatataaatcgtacaaagcatatattatatatatataatatgctgaagccattagtttttcaattgtagccgagtataacaaaagaaaacaaaaaaattaaataaataaaactcatcacatcaacgacaatcgaaaccgtatatatatattaacataagcaactcagaaatcacgaatggacatatatatatatatatttatgtttacgatatatatacagaagccataaaatattaaggcacaatatcattcaaataaaaatcaaaaccctaattttcaaaatccccaaatttcataaacaatatcaccagatcttcaattaattcaacaaaggtggctctggtaccacttgttagggtttataaaacacttaagaaatatataaa

SEQ ID NO: 281408 - DNA, 505 bp, Cannabis indica
agagatttgggcaaagctcgggagaggtatgcccgaacagcaaaggacaagaacgaagaatcgatcctggtcgtagaagaaaggaagcctaaaatcccatgcgcaggagggcctaccataaccttcaaagacgaagatgctgtcaaaattaggttcccgcacaacgacctgttggtcgtagaggtccagatagctaataagatggtggccagaaccatggttgataatagagcctcttccaatatcttgatcaagactgcctatgaaaagatgggactccagctcaaggatctaaccccatgtctcctgcctgtctatggtttctccggtcaagaagtcacacctctaggacaaattcgcttacccttcactgttgggcaagcttcgacgagcatgactatcatggcacaattcctagtattagatgtcccttcagcctttaacgtcatgctaggcagaccagctttgtatgacttaaaggttgtcacatcgatattccactcgt

SEQ ID NO: 281409 - DNA, 918 bp, Cannabis indica
caagagctttgtgatgctcaggcgatccgaacaacaatgtcttggcccgatttagcaacgcaatcgcaacatttcgatccgagacttcccatgcagttctagacctcgcgatactaagatccaacaatagctttctctctcctgcattcgttatcaaattggtatcaacctttgatacaatatccgtagctctctcaaaacaggtcgaagcaagttcgaaactccgaagatcatgccaaatgatgccggtcttgtggtaaaaggaagcggtcttaatctccggagaaggaacgcccacgactcctgaagcaatagagagaagatcagcggcgatatgacgaagtttggcatgctcttcttcgaggacggtccccgaagtggtggagcgaaagcgaattgaagcagcattgtaaagatcaacgcaagcgttccagaggcgaaagcttagtttccaaatccggagctttacggagttggggaaaggcgcggattgattcaactgatttaggaaacgtctgagatcgtcagatattgcgatcgacaatggcttctccggcgagagattctccgcttgattgattgaggcttcgatttgggaaagaacaatctgatgttgagataatgatggagatggagatggtgattcacagtgatttttccctaattcttgggtggatatctcatcgattctcatttcgaacggtttagcgggaaatcataacagaaaatggagaagcgttttgaatgtgattaggctttatataacgtgttcgtccatggaaggaaagtaacaaatgcttaaacgacgtttctgattttgtcgttataacaaaagatattttcaaaaagaattatttcacaaatacagagttatatttgcaccccataaaattataaatacacttcattattaaaaaa

SEQ ID NO: 281410 - DNA, 364 bp, Cannabis indica
ctatatcgtggtacatatagagcgttctatataactgagatggtattcaattccaaatctatagtggagcaatgcagatttaataagttgagaatttacttggtgaattctagatctacttattgaaagctcggttatataggcccatggtcccctactagttgagataatactgcttgcatctgatctcatccactatagacactttgtcaaattaatgtcaacatgactattcaaccaaacctagatgagagagttccttctataaagatttcacctccttcattgttcttcagcctatagtgatgagtgacatgcccacagatagcaagtcaagtactcaatcatagtgagtaagacggtg

SEQ ID NO: 281411 - DNA, 510 bp, Cannabis indica
agcgaggtttaaaactttgaggagtccctcagggacgtcttagctttctttggaaatctgagtatatgtgtcctctaaataggggtctggtctcgagtttctaggtgagagaaatctcactataacaatgtccgagcttccaataagcagaccaagaacttaccaagtaaattcactgacttattaattctttgttgcatccacgcatagaactcagaattgcactctcagctatataggaggctctatatgttccaccatatagacacactattaattatccattgttgtaatcctaatttgatcaatgatcctctatatagatgatctacattgtatagggattaaattaccgtaacacccttcaatatattttatcgctaaaacacttagccccgtataaatgatctttcagcgaagtgaagtgagtactcaaccatttatctctgtttagccaagctcgaaggaaatcatcatttactttctgttttccagatagaagctatagat

SEQ ID NO: 281412 - DNA, 1222 bp, Cannabis indica
acataaacataaacataccaataaaaaaaaccagttacattgttatcttaataaataccaaataaaaaacacatttgttcatgctaaattctggtaaaacaaatctacacaccaccgctctctaaatttcttcatattctcatcgtgcacattatcaaacgtagtctccagcatactatgctcgatgtgctctatcacgtacatcccgcagttaccgctgtatgagacaataaaaagtaaataaataaaagtatgcaaattaaattcaagttaaataacaaaaaaatcaattgtaattaagttaccttgtctttgtctgtggaacaacggcccgatccatgacttttgaagtgaaatttctgacctggctctctgaggcggtaagttgaggcacgaggatcatgtcatgactctcgaataggccagcctgcagcagcaaatttggtagtaatttttcccacattgccaggtgacgcttcaattcgttcggggaaatcgatccgaggctggagtcaaatatgttcaacaaccaatgatccagatctacctctagtgccacccaatgctttgctccatcgaagtagagggccatatatattctctccttgttcttccaactggccaagaattgactttcatcccctcgaatcaaatctaatatgctctcgtcccactgatagttagcctggtcatcacccgcagcttcccaccgagcaataactcctgctgggaaaatacacggcatgatgacacatctatttgggtaggcctcgggataaaagtgttgccgcctcctcatcaaatggaatgccgcatccaaatgctaaaacatgaaaattaaatatgtcagagattaaataaaaaagagttagataaagtctttaaaagcaaaagcagtaaaaaagtcttaaaaacttacatcgttcccaagccaaaacttcggagtatgtagttcgaggaaccaagacgaatggtatcgaccggtgaagcactctctcgggtaattgttcccaatctggccgagtacccaattgtgaaaagtcttgagcagcttccgatcaaccactctaagtgggtccgcattcacgagtgtcgaagtagccctagccttcttcttcatttcagtgtactcagcgaaccacctaggccgccttctcttcctccggttctccatgacttctggagctgtctctaacacctgcacctcagaatcctgagtatc

SEQ ID NO: 281413 - DNA, 665 bp, Cannabis indica
agagactgggaataacagtttcgcacccaaccagggcattcataacacaattattctgcctggaaccaacacccagacgaccatcggagatgccactgagttacaaaatctccgcgatgctcttggactcatgtagggtcacaacaataccctacatcctgatcaggacaaactccacactccagtgaatcttgcgttcgacgaacaaaggcgtatgtttaccgagtggagagatagagagatggaggcattaagggctcaccatgcagagattgaaaatcatagtcggcaagctaccgtgctgatacgaaaagcctaccaaactgtaggtcagaaaccgttgaacgtcattcccctgggtgagacggacgaagatccagcgatgaatacttcccagactacaattggtcagccgcccaatccccagtcacgagttccacttgtgggcctagcggtaggctggcagaccttgtctagtaattcattaggagaagtcatagctgatggttcggaccagatcaatggtgccattccacccgtcaaccaagcaaatcaatcgctaaggcaaccaggcacttctgtattcgaaaggttgggggcgacccatgacctaaggtatgatctgaatagaaggaggggagtagacgagcagaatgtcgcgacaa

SEQ ID NO: 281414 - DNA, 818 bp, Cannabis indica
ttttcacttgtcattcctacttgataagtgctaataatttctgaatatgattttgtgttaaaccttacttgatttttatttattgtcatttgtagtatccaacatgactatgaacaatcccatggtgtcactattgactgacaacaagctctctagagctaactttatcaaatggagagagaacattgatattgctctcattggtgaaaattccttgtttctgttgactgaagaggctcttgagcagccaggtgagaatgcgaccaaggcagtcaaagaaaagttcgagagttggcagaatgctaacgacaaagctcgatactttatgctgtctagcatggtcgacaccttgaaaacaaggtttgccaatacactcacagctacagaaatcatgaactagttaactgaactgtttgggatggcgtcaattcaagctcactttgaggcgaccaagaatttcatcaatgcacggatgaagcctcattagaacgtgcgtgatcagctactccatgtgactagttacttccaagaggctgagaatcatggacctattatagatcagacaactcaagtgagtttgatcttgaatagtttgactccagcttttctgccttttacatcaaattatgtcatgagcaagttggaacttgactttcacgagttgatcaacaaccttcagacatttgaaaattcgattggaggacctcagaaaggaggaactaaagctcctagttctggcactgctaatggtacggccaaggctgaggcaaacatttcctctgcttcgaaacccaacaaaaagaagaactggaagaata

SEQ ID NO: 281415 - DNA, 293 bp, Cannabis indica
aggattaagatcttttgatctaagatcaactagtgatattgacttagaaagatacaacggtaagattataatatcttaaccaagatcaattattaattgaataagcacaaatctaattgggcctaaagaaaattacctaagtgaaattttattttagcaacctagtccatttacttagtaaaacttaaatgggcttcctatatgcatctaagcccaataaccaaacacataggctcacacaggtcaaatagatttggatgggccctattcatgttactaggtttacacagatg

SEQ ID NO: 281416 - DNA, 695 bp, Cannabis indica
tgacctattgacaattgaaccatgggttaaaatcagatcattggatctgtcaacaagttaaccatggcaatttagatcaagcaataataggttttataaaacttacacataagctaaaacacatactcctgcaacaagttgaatagtaggatttatttaattttaaattaattaatgaatttaatatttccaaaaaaaaataaataaaaaaatatatatttatttcgattttaaaaaaataaataaataatttaaaatcaaacctacaatttttaaaaaaaaattaggtttcaactaacctaaatatcatttcaaaaaaaaaatgctaactgtctttcaaatttcatgttatttcataaattaaatattcaataatctgaaatgataatttaatttcctttttcagattttataatttaatttaaataaaaataaaaaaatttaaaagttagcataatatcctatttctattcaaaatatcatgattaaataatcttattttaaatttaaataaggtcaatttattttaaaataaaataattaaaaatataatatatgaccttaatttaaaataagataaaataataaaattttaaaaataagataactaattaagcaaaaagatagatttttacctatttcaaattcaaataacactaatatcttaaattaattttaaaaaataactgattaat

SEQ ID NO: 281417 - DNA, 1107 bp, Cannabis indica
agcggaaggaatttgttgagttggtacaaggagagggaatgtctgtaactgaatacacaaccaggtttgatcgcctggctaagctagcctctggaattgtaccaacagactttagcaagaaggaaaagtatttggctggactgaatgccaaaatcaggcatgacctggttattacaacgaatgataccaaacttatgcagaaatggtagacaaggctcttcgagctgaaggagcagttaagtttctgcaagaaacccgagagcctcctagtgttggtgggatcactactatccctatttctggtcctggaaaagaaagtggagattccacttttgagcaaaagaaaagaacttttccatctttgggaagttcaggacaaagtaaaaggtttcgaggaaaccagaacaaaggaggacgccagacttactcctatcctgagtgcccgcgttgtaagaagcatcaccccgggacttgtaaccggagagcctgttttcagtgtggttcagtgggacaccttaagaaagactgtcctcagttgaagaaagaagaaacaaagcctgaagctaaacctgcgcctgcccctgctcgtgtttttgctataactcaggctgatgctgctgccagcccttcagtagttacaggtcagcttctaatcaacggttttgtttatactgttttatttgattcgggtgctactcgatcttatgtgtcatcaagagttcttgatcagcttgatagacctagtgatattcttgagacggggtttggaaccctgttgcctaatggagaattaattatttcaagaaagtgggttagatcagtgttaattagaattgaaaatagagaattgagcgctgatcttgtggagttaccattggccgagttcgacattatacttggcatggactttttgtctaaatactctgctagtattgattgtaaacggaaaatggtaacttttgaaccggagaacgaggaaccttttgtttttgttggttcggtccaaggttctcgtgttccaagaatctcagcattgaaagctagggatttgttacgtagtggatgtgttggattcctagcagttgtagtggattccagtaaacctgt

SEQ ID NO: 281418 - DNA, 600 bp, Cannabis indica
gttgagtgacttgtgtctgatggaattttagattcaattgatttttcagactttgatgtttgtattgaatgcatcaaaggcaaacaaaccaaaacaaagaaattaggtgcaaacgagctataaatgtcttagagttgatacatacgaatatttgtgggtcatttcctacaccttcttggaatggtcaacaatattttgtatcattcatagattattactcaaaatatgcgtacctatttctacttcatgaaaagtctcaagtcttggacgtgttcaaatcttttaaggttgaagttgagaatcaacttagcaaaagaataaagcaagtcagatctgaccgtggtggtgagtattatggtagatatgacgaatcaagtgaacaacgtccaggaccttttgtcagatatctagaggagtgtgaaattgtcccacagtacactatgtcgggatctcctagcatgaatggtattgctgaaagacgaaaccgtactcttaaagatatggtaaggagtatgatcagtcatttaaccttaccagaatcactctggggagaggcacttaagacagcagcctacattttaaatagggtaccaactaaag

SEQ ID NO: 281419 - DNA, 162 bp, Cannabis indica
tatttagtaagggaagttatatttgtaccccataaaattataaatacacaccattattaaaaaaaataataaacttaaataattttaaaaaaattattcttaatatttttttaaaattttttcctcacattattttatgttaattttaatacttattttgat

SEQ ID NO: 281420 - DNA, 769 bp, Cannabis indica
ttttggttcaaaaactatgtttttcaaagagaaatggtggaatatgttgctacacttgttgttgatgcttgttgttgttttcagaagttattatatgcatatttaggtagatttgagctggtttgaatgcatgttagttagatttaaccaagtttgagtttttaactcaaagcttggagctttaatggtgattttcgattctgtggtttctgggctgtgttgatgctttagaaatgttctatggggtatttagaacaggtctggaaggttttgtttgaattggatttgatttgagcaagttatgaatttttgattgattcctgcgaggaaccggaattctagatgtgcaaccggaattccggatgggttcaggaattcccagaaccggaattccagttgcagaaccgttctgccggttgggggattttcaagaaccctagtttttctcgtttttatgttatttggggtattgccatgctttttatcgatagggaagcttttagtttctagtttaagtccccgggaagtgatttagcgtatcacttaatagtgttgtgattgttatggtttaggagcctgtaaaccgccgtgcagtttgttccactcaggttgaccggcacacttgaattcggaatcgaggtaagattagtataacagtatgcatatgtattacatgtttagcgtgcatgttaagaagcctgttagattacattagatatgtatgttggcttcgtaccatccgactgtgtcacatcggtacaggctagag

SEQ ID NO: 281421 - DNA, 114 bp, Cannabis indica
atataactgagagtgcaattccaagttctatagtggatgcaacaaggaattaataagtcagtgaatttacttggtaaattctagagctacttattggaagctcagatatatagg

SEQ ID NO: 281422 - DNA, 212 bp, Cannabis indica
gtttttgggcaccttcccaaaaggcctcattccaatggagatagtgttcatccttatatacccaagatccttcccatttctagccaatgtgggactttagatgtatacccaacataaccgagcttcaaataagtagatcaagaatttataacctaaaatcactgacttattaatttgatcaatgatcctctatatgaatgatctacaatgta

SEQ ID NO: 281423 - DNA, 666 bp, Cannabis indica
agatatgcaaaacatatatataagtaatgcgatgccggctttgtgattaagccaccctgagctcaataattaagctcaccaaatggataagaacgttcttaaaggttggtgctattgaccatgatatcacccactaccagcactatgatcgcactgcgggaccggcactatgttcgtaccgctatgatagcatcaatagcacccaagcgtataattggccatgatatcactcttaaccagtactgtgcccgtactgccgaactgacacaatggttgtgccgctatgatagcgccaattaataccctctggggtgaatatcactcttaaccagtacaatgcctgtactgccgaaccgacacaatggttgtgccgctatgatgtcacccaaaacgtatacaacaatatatacaacatgcttatataatatgttctatgttattcttacctcgttctgtgctcaagtgtgccggtcagccttagtggaagcacagctcgacgctttacagggccctaaaccataatattcagaattcgatgagagacacgctaaaacacttatcagggatttataatcaaaactaagaataaccctatcgataaataggatgctaatactctaaattacgtaaaaacgggaaaaactaaggttcgggaaaaagccccaa

SEQ ID NO: 281424 - DNA, 401 bp, Cannabis indica
gagcttccaataagctaaaccgaatttaccaagtaaactccctaatttattaattcctcgttgcatccactcttagaacttggaattgcattctcagttacgtagaacgctctatatgttccaccatatagatacgctatcacatttaaccatcgttataatctcaatgatgaaagatcctctatatagatgatttacaccaagtatggataaatttaccgtttcacccctcaatgtattttgctccttaaaacacttagctacttgtaaatgatgttttagtgaactaaaatataatcactgaaacaagagctcttccatttacttctatttagctaagctcgaaggaaatcatcacttaacttcgaaacacctatagaagctatagattccatatttat

SEQ ID NO: 281425 - DNA, 185 bp, Cannabis indica
atactatataaaacacttacaaataatattatctttcgagattctacggcgttaaattactaatgaacgttcctccattagggaggattactcactaaaataagaactatgtagaaccaacaatagagatcgaatatcctaataaaaaagctcattatttaaaatgtattttcttctaatattta

SEQ ID NO: 281426 - DNA, 1137 bp, Cannabis indica
caatgtaaggtttcctaaactttctatgtgtttatttcatcgttttagaaagttcatacttagggtgttaataaacatacttgtgagtagatctaagatcctggtaaaataatttccaacatatagttttattaagcacgtaattaaattaatttttatcaatttacccttctcgggtcataattaccaaaatgcccctggctcactaatggggtctttaacatattaaatttcatataaaatcacatatattgaactatataataatataattcctcaattattcctaattatccaattagggttttgctaatccatttcttaattccgggtattacagtccaactcctcaacctcctggacctcagcgtccccctcacgatcctcctccatcgggacagccgaatcctgttcggcactaggcagagtggcaagccgagccacttgaagatcagtagcgtcagccagacgcgtagttttctttgtacgagccatcatcctatggctgggtacaagttcagaagaatatcctttactagaaggaggactagaacgaagacgagggtgatcctcgtgcagaagttgaagcaaattctggtcgatctgatgttcgagtttccaagactcacctgagttcatctacaaaagacaacacacgagatgagtattgatcggaatatcaaacgataaacaaacaaatatgtcgaccaggagtactcaacaaattaaaaaacggctatgtctaaagaaaagtcagaattcaagaagttagaaaattttcttgagttagggcaaaaaagttcatgaagcttagaataagcaagatgaaaggcggacgcaatgcagttcagaaacaagctttatggctataaacccacatgaagacatgataaagaagaatcgcagaagtttctaaccctagggtttcctaagcatttttctacagcacagtgaaagttgcattcgaaatgtaaacatgcgaagataagcataaaggaaactagaaacttactgaagattcgagtgtctgggttcgagcaacgtctatccaactagcagttgtatgaaggcacttcggcaactttgaagccagaaaattttcttttcgctctggagcttgcttagcaaagaagggtg

SEQ ID NO: 281427 - DNA, 657 bp, Cannabis indica
atcctaaagatctaagcgacaatcataagtaattaagtctcgcaaacgtgcgagtattcgaggtgttcgtccgaatacccgcgtgtattcaaaacatgaaagagtgcctattcaaacattttttatacagtgcacggttatgccaattttaagtcattttttctgaaattacccagtttcttgcctaaaaaacgtagcctcatacatattccctacaaacatttattcctaaactctctcatgcatgttaaaacccagaaaacagtgttccctttcaaacagaaaacaaaatgcagcgaagtttttgaaaactaacctttacttctggtaacctgttcccacgaattgccctcgacagaaccggagaatcgagaaaaaacccacaaagaaaagcgaaaatctgggcaatttatggaagtttttgatggtttctctgaaagggagggaacaaaggagttaagggagttaaagaaaatgagagaaaatgggatttttgatttgaatcagagggtttaaataccaaatccctcattaattggatcacgacacgtggctaatttggaatgcctagagtcgcccaatccaacggccaaagatggtaacacgcctacacagaaaccgaagattttgttgacgtggcaccataaatgcaataaa

SEQ ID NO: 281428 - DNA, 753 bp, Cannabis indica
cactgcttgctataccatcaacagagtgttcttacgtccaggtactcacaaaacaccatatgaaatctggaaaggtaagaaaccaaatgtaagtcactttcatgtttttggatgtgtttgttatattttaagagatcgtgatgctaaaagtgatgaaggtgttttcttaggatattccaccaatagtagggcatatcgtgtgtataacatgagaacccaaactgttatggaatctgctaatgttgttgttgatgatctaaaagatttgtctaagttttcaagagaagaagagattgaagacttgctggaaaagcctgctgccgaggaaaaggaacctgacgaagctacagaagctgctgcagtgcaggactctgttgctacagaaacttcaacaacaaaagaattcgagcattcttcaaattcaatcactgatccaattcagagggaaccatcctccagggttaaaaagaatcatccttcagatctcatccttggaaacttggatgagagcatggttacaagaagaaaatatgctaatacaattcaatttttatgttttatttcttcgttagaaccaaaatctgtaaaagaagcactaatggatgaagattggtttcttactatgcaggatgagctacatcagtttgttcgaaacaaagtctggaaaatgattccaagaccaccatttgtaatcatcattgaaaccaagtggatcttcaaaaataatagtgatgctgattgggcaggtaatgc

SEQ ID NO: 281429 - DNA, 515 bp, Cannabis indica
gaaacacgaaaatcccaaaatttgcactcaccgaaacactaccaaaacatatccatatcactccaaacttcacaggacacatatataccataaatactactatccttacgtaacagaaattaaaatcgagcccttaaataaaaaatgcaattaacgttcagactaagctttcaaaagttccaaactcaatttctaactcaaaatcgcctcaaattcaacaagtaaacatcgaaactagtcgcatagctactaaagaacaatcatataaggtcggaacattcataactattctaattcacaaactcctatacaaaaccaatcgtttttagcttaaaatgaaattaaaccataccttaaggtttactctctttaaaaatttgctatcgcactactactggagcttagatcgccaggttttggattaaaaatcaaaaaaaataaatacaaagagaaaaaagttcgtcgaagaggagaaaaaaacaactactctagtataaattataatatatatatat

SEQ ID NO: 281430 - DNA, 575 bp, Cannabis indica
gatgcgagtatcataacgacattagacacagcaccaatgaatgcaaaaaaactcaaagatgagattgaaaacctaatccgattggggcaccgtctacgaatggatcaagaatcggcttcctcacctcaatccaggtcaggcgacaggagctttgccacagggaacacaggggggtgcagcaggagtattgactccagttgctctcaccggagatgcccagcatatcctcggcctgccacccagacccaatgggagagtggccatgatctcaggaggaccccatatcggaggaactacccgcaaagaattgaagcggtatgcggggccgtgaagcacaatgaggtttgggaggttactcaactcccagctcaaaggccccggctgatggatcaacccatcacattcacggaagaagacgccaagacggtgcgttttccccaccatgacccgttggtcatagagacccccatcgccaataaagtggaggccagagtcttgatagacaacggaagtttccgtgaatctacttttcaaagaggcctttgctgcaataggcctgacggaccgagacctct

SEQ ID NO: 281431 - DNA, 539 bp, Cannabis indica
catcgagaattaatgtctccggttgaattattatttatcgtaatggttgaagcttctagctaataatgattccatttccattcaaaaaaaaaaatatatattaattgtcttcattggaaccaattagtaaagttcttttgctacttgttttaataatgttctgtttcattgctgtaagaaatttagctctgatacataggaattaacctctgtaattccagcttcaagatcacacttaaacaaacaaaagttaaatcaaaacaaacaaatcaagaacaaaaaaccaggaacacacataaacaagaaaaatataacacagatgaatctaaatggctgtcagacacaataacacattgatttataatggttccaatcctaagttcaatgtgaacttggtcatactccagtttgaaagcattgccacgaatctttattgataatgagaacaagagatatcactctcaggagctacaagaaaataattacagcaagtcatccatggtgtaatccctcaacacacattaactcactaacccgag

SEQ ID NO: 281432 - DNA, 587 bp, Cannabis indica
tttgagactattttgtacggtagtccgaactggcatatgatgttcttcacaataaagtcttgaactttccttgatggaatggttgcaagtggttcggcttcagtccacttagtaaagtagtcaacttctaccactacgtactgcgttccacctttacctttaggtaattgtccgatcaggtcaattccccaaatggcaaagggccacggactttgcatctgtgtcagctcgttgggcggagctcttggtatctttgaaaatctttggcatttgtcgcacttcttaacataggctctcgaatcttcaatcatcgttggccagaagtaaccttgccttagaattttcttggataagctctgtccggcagcgtgatttccatagaatccgtcgtgaacctcagataggagtcgtgcagcttcatcttgagtgacacatctaagtaatggcatcgagaatcctcttctgtacatgactccctcgactatgatataccgtgctgccttccttctcattttccgagcttcatttcggttatctggagttccccgagttgaggtaagctgctattggcatcatccagcttgggg

SEQ ID NO: 281433 - DNA, 772 bp, Cannabis indica
ttaaaaaaaaaataattaaatattatgggagttactctttagtgacccctcgtatttttaatgacccaattttaggtgactgacactgactgtttagagttattttttgtgggtcgctaaaactcagccttaacactttagtgatctacacaaatatgcacgtcattatagagtgtcactaaagggtatgtttgtagtagtagaacttagagagtaatacaaactttctatatcgtcttatccattacttttctgtatttatttcatgtttttgagttcacaaatatattaatctaaactagccttaaacttttgaatttcgggccataacttggttgacgaattctcattatcaacaatggtaaaaataatatagaccccaataagtatggtcgtatataatttatattaataattaaatgattacgatcaattttattaatttagtaaatgttgatcgaggttttcggcaacaaatataatcaatatatataaataaaggaaagcacaaaagatcttaagtggcatcttatctttttttctaactatttttactattttctaacactttcacattttgttaaaggaaaaacaaaataaattacatattattaataccattattattaaaacatgtatatagtgacttctcatattttataactcttaatcattcattattattattactattgttattattattattattattattattatagagaactttttatattcctattaaagctaatatcatgtatatataact

SEQ ID NO: 281434 - DNA, 595 bp, Cannabis indica
gtgagtagatctaagatcctggtaaaataaatttccaacaactggcctcagagccatggtaattgatttacttgcaagaaatttggactttaaaacgattgtttgtttgtttttggatggtatcatgttgtattgagtgttatttgatgattgattgatgtttgtgaattttcgtgaaaaataattgaatatctgtttctggaattatttttattggatagtatggaaaaaattaagcaagttacttttttacagaactcaatttcgatttaatttgaattagttatgattttttgaagattcgaaaaaatcggagttgtgctgaaattttcctgcgatcgcgaaaactgtccgtacagctcacaattttttcgtttttcttcgatttttcatgctttttcatggaattaacttccgattttttgtgtagtttgtatttgaaattagtaaatatctatctttttgccttaattatttatccttatttttaaattttgaattatatcttatctttttttttaaatttaaggtctgttgctccagaattcgcaccaaaatacgtggaccagtcgagaggggtactacgtggaatcag

SEQ ID NO: 281435 - DNA, 515 bp, Cannabis indica
agacgtgatgcgtcgaagggaaaatctcccatgctttctccacaaggaggtcatgatgaagaagatgaattattctcgcaaaaggtcatggattcgatccctaaatcgctaaaatggacggttgctgaatttctgaaactcaaagataaacgtgatataatcacaattccggtgccccgaggatcataacaccacgtacccagatcacgttatctggagaggatttgcatcatgttgcattatgtgacttcatcggcaactagggaatgctgtttggaacgatgtatactcttctttaatctaattaaccttatatgtcaaattctagtgaaattattataagacactaataataacaatttaatgtaggcacatctgggaaagcataaacgatttgagaaaaatcttcaatgttatgacccagagcttctcgtagtgaatggtatcaaagatgaagagaagagtcagtcttttgacaatgtagcaagacgattggctgcttggttatcattgat

SEQ ID NO: 281436 - DNA, 675 bp, Cannabis indica
cagcgctagttacaataggagtttctatagtagaattaccgtaaaaaataactaaaaaaaaaatatagttttagaagtagtaaaaatagaaaaagctaccgtaagagaatttttattgttcgatttaaatgtatactatactatatatatttggatgtttatataatgcaacccattaatgatgtatcttttacctgtttcattatttaagaaaaaaaatttagttcatttttttttttatatttatgtacattataattaatttaagatattctacaaaattttaatatatacaatatttgaaccctattttttggtatattaaatttttctgaattttttaaaattttacatgatgtcttaaataactataacgtacatgactaagagaaaaaaattactaaaaaattatctcagataccgaaagagagggtgtattataaaattttcttatatttagtaattaatgatgtattgaaaataattagaggataatacatttcaaagttaattagacgtcatttaaattataatttaagttcactaatcacataagaaaactaactcaaagttaattgataataagtgaaattactcagatattattggaattttatatataggtgcactcctaattaaataatgggaaattttcagtcaaactctctaaatttt

SEQ ID NO: 281437 - DNA, 1213 bp, Cannabis indica
cttggaattgaggaaaaagcttgagattttgagcttgaaacttggattattgcttgagttagctttagatttggaagtgaggtagtttctatgatcctaatcttgttttcagatttgttttaattaaattcttgctgagattgtagagtaaaaagcatgtgtttgagtttggattaccttcttgcatgtgtgatgagaaggatgctaatcttatgggattaagcttctatttattggttgaattgttgttgagcttgggctgcgatttcatggtgtttttagattggaatttcatgttttaattgatgttatgctgcttaattttactaggtttgaagtgggttgagttcatgcccttgagcatgaagttttgataagtttaggcatgatttttgctatgtttctcaatctgatttttggtgatcttatggggatttagatgcatgtaatgtgttaattgagtgtctatgatatgctagtgatcccaattgttaatttgtatgcttggttgagaaattggtgtgaaaatttgagtttgaaagctgaaattcgaagagaagggctgctggtttctgggttctgcacccagatgccgcggcatgctctgagcatgccgcggcccgcccctggttacaggaacctgggttttgtccgaggtgcggcggcatggtctgggcatgtcgcggcccgccctcgtgtttttgggcagttttgagttgattttcgaaagttcgtaacttttgattccgaactccgatttgggagttctttatatcgttggaaagctcgttccgagctctgtatgattatctgagttataaatgccaggcttgaattttatgagctaaaaatcagaggttaaccctaagtgtgaattatcccggattgtgtgactaggattaccggcacctgatcaggagcacccaggggtttggaatctctgttattgcgggacaacaggtaagacagtagtttgcacgtagagtatgcgcggtggcgcttatgttgaatatgatatatgtgagtaattgcaaccaggattagggttattaccctaacatgagcggtttaatagcctagggttattaccctagtgatatatgttgtgtaatactatgccatgtcggatatatctatatattggaattatgaattatgcgcttaaggcataattaaactagactcggtaagctagtaccttgagtttaatttt

SEQ ID NO: 281438 - DNA, 558 bp, Cannabis indica
caattcatacatgatatatgtatcctctaaatatgatgttgtgtatgttttatttgattacctttatgtgagataatagacattattatggtggcgtgattgtattgtccaagtgggagaatgttagaattattataatggactaatttaatcataggtttaatttcataatacacaatcattaactatgtgcctaatgttgctaataatcataatgggatggtcaacaacttaattatgtgttagaggcacatgagagcacccttaatactatagttggcccattaaattatagtacaccataaaagaccccataagcccaattggttaataaccccttagggttataagggcaatagcatgtatatatatatatggttatgtgtggtaaaggagtgagatagttttgtgtggtgaaaggcaaaagggttgctccacaagtgttctctccaaaacttttgctcaaggatcttggtggtgatgactctcatggatggcatgtgaggtatgtgttttattgtttttgatgctctacataaatactagatcttggctttg

SEQ ID NO: 281439 - DNA, 519 bp, Cannabis indica
tactaactttttaaaatttatcaaatcaatttattatatattaacttatatattacgtattataattttattatttgtaaatcatatattatttaaactaaaattacaaactttttaaaatttataatatcactttattatattttaatttatatattacatttttcacttttattatttgtttaatcatttattatttaaatttaaattactaacttgttgaactttataatatcactttattatattttaaattatatattacattatttttcacttttattattttttaatcatttattatttaaattaaaattactaacttttttaaaaaattaataccacttcattacattttaacttatacattatatttttttatttttttattttttaatcatttattaattaaattaaaattacaaacttattaaaattaataatatcactttattataattaaaattttatattaaaggccataattaaataattctctaattatttattatttaaatt

SEQ ID NO: 281440 - DNA, 690 bp, Cannabis indica
ccccgccactcactggagtcctagccgactccgacatacatccaactgcgccctcagctcgcagtgctttctccaccatctcaacataggtggtcttttcatctgtggtgatcataaggtcatgcttgatcttcacatttaatccgtcaagatatttttcgttcttactgaaatcggttggcacaattcctgaggccaacctcgccaacctatcaaactgggtagtgtactctgtcacactcatattctccttctgggtcaggtgggtgaactctttcctcttggcacttctaacggcctcattatagtactttgcgttgaagagttcctggaacctttcccaggtcatagtggtgacatcatgaatctgagacaccatatcccacaagactaaggcgttttcttggaactgaaaggtggcacacaccaccctgtcattcccgatgacacccataaagttcaatatcttagtaatcaccgttatccactgctcggctttcatgacatctggacctcccagaaaatctggaggggcctgcttccggaacctttcatacaggggttccattctgttcgccgctaccactatctcggcctgagcaacaggggcaggtgcaacaggaacttccggcaccagcactgcaggagcaccctcctgcctcaatctctgaatctcatgatcttgctcct

SEQ ID NO: 281441 - DNA, 585 bp, Cannabis indica
aaggtcaaataatttaaaaaatagaataatttttaaaaaaataatatctgaccttaaatttaaaaattagataaaataatataaaaaattaatcaaaaagatagatttttacctattttcaagttcaaattacactaatatcttaaattgatttgaaaaaaatccaattaatttatttctgataattagatttgaaatatgaaaagtaaaaatcaaaatacaaaactacacaaaaaatcggaagttaattctatgaaacagcatgaaaaattgaagaaaacgaaaaaaattgtaagtggtacggacagtatgcaacacgcacacgaggggcagcctgaccgagaagacacggcgcaggaggctgcatgcagcctctccgcgcgcatatgccaagtcgtcttcagacatcttgcctacaaaccgagaaatctcggacaaaggcgtgtctaaatgcgcacgcgtccgaggaaaaattgggtgatccgcgcgcgtgtggggttgatgcaacccaaaatttttttgattttcaaaattcataactaattcaaataaaatcgaaattaagttctgtaaaaatgtgaattg

SEQ ID NO: 281442 - DNA, 486 bp, Cannabis indica
ctatcttgtatgggagtccgaaccgacatattatgttcttcaccacaaagtctaacactttcttagatgtaattatcactaatggctcgacttctgtccatttagtgaaataatccactacaaccactgcatactgtactccccctttgcctttaggcaattgttcgattaggtcaattccccaaatagcaaaaggtcaaggactttgcatttgagttagtttgttgggcagtgcacgtggtatctttgaaaatctttggcatttatcatatttcttaacataggcttttgaatcttcactcatggtcggccagaaatatccttgccttagtattttctttgaaaggctttcctcggctttcctcttcttgtgtaacacatctaagtagtggctgttgggttttatgccctaagtaaaacacatttcaatattatcagatttacttattaatatagatcagaaataacatttaatgttgcatggtt

SEQ ID NO: 281443 - DNA, 528 bp, Cannabis indica
gggcattagcggcgggaccccgccgctaatgctccgccactattttttggccgctaatactattaatagcggccaagcattagcggcggaccgatagcggccgaagtccgccgctaatgccctttagcggccagaaaggacaccattagcggccgaggggtccgccgctactggtgttgaatgttgtagtgtatacattggattgaaccgatattgaacttggataagatatcataaacttaccattatatctttctaagttgatcttaggtctatagatcttaatcttgatatggttagattcaatcttaattgtattatttatgttcttcaatttatttgttaaagtcgaccaattggatcttcttgtgacatacagattaaggacataatagtataattgagtgggagcattaattatagatatggaatctatagcttctttaagtatttagaagtcaaacgatgatttccttcgagcttggcttaatagagataaatgattaagatctcatttcagtaattata

SEQ ID NO: 281444 - DNA, 720 bp, Cannabis indica
tttttaaacatggtgggattgcattcaatggaggtacagtacaactcaaacccaaaaaaggtgttacaccctacataatagtaaaaggtaacctcacaagaccaattactaaatatgttattggaagaagcccagtacatttaacacttgaaaagcactaaattagtttacccaattatcaaaagtctattatagagttagattcaatagctcttctttttttcagtttgaatgaaaaccaaaaacagtttctatatttagaagttaattattacttgtatcaataactttctaacttaaattattggactgaaatgagaaatgtaaaagtttgcaatggtcttattttgatcaattttccgaagatatttcagccatctttttccattccaaatcacatgatatttcagccattttttttcattccaaatcacatgatattttcagattaatccacaagcttgtaaggctgttgggtaaaaacctttgcaagcttgtcgatcaatcaaaacgtatcccatagcttgggatagtagggcacaaaaatatgttaattcaattcaagcgatttaaaatattttacttattataaatagactcagatgagataagatggaggagagataaaaaatcaattttgtatctctatagttggattaatttaaaaatttagcatcgatgctaacacaaaaaatatttttttagtaaaaaataaaaaaa

SEQ ID NO: 281445 - DNA, 412 bp, Cannabis indica
aaatatccctacaactttatttagagaaattcttatttttatgtgatttattttactgagagaatcgagagactcattgtttagttttttaaattcttctcatattttttcgatacattgcactaaaataattataaactttctcgagaatattaggaaactcatccggccgaaccttgtgatgttatttattctctaggtaatataactaaaggggagtaggctattaccataatctttgagctgaacctctataaattcttatgttcttatttctcattattacaatcttattagtaattgatcattcaatttcctcgctttaaaaactcagtgtcgttggctaaaagcgaggtcaacattcgtgctttaattgagagcaatcgctaatacgaaaagggatattcgcgac

SEQ ID NO: 281446 - DNA, 559 bp, Cannabis indica
gactatgggatggtccacccctaatcacttagaatagctataaaacatgcaaacattggttaacagttctagcttttcttaagatcacgattaggtcatccatgaatctagtaatggtttactctaagtacacaactatttcatcattctgaaatttttctatcactagggtattcccctagaaggacttaggcaacaactagtaactaattatagaccttatactatcatcaatatgcaaatcaatttttttgggaggtaagtttggatacaattcgaaaaattaacttaatgatctttgaactgcatatctaccaaatatttctccacccttatcagctcataagatctttaactacttaccttaatggttttccaccattgctagaaattcatgaaatttctcaaacattttaaatttcttagcataaggtaaaatctagagtgaacgtcttaagaatataacgaaaactcatatccatccctgaatgtacatccatattgaaatataggcatgttgaactctttgcagagaatgatcttgtcaaaacatctatga

SEQ ID NO: 281447 - DNA, 770 bp, Cannabis indica
gtgtgaaagggcaaaatggtcattttgccccatttatgttttgtcctttagtggacttagagattggaatttatgtgatttattaagttaatgttggctgaaataaaaaggtttattttgattattttctcattttcaatttccaaagttagaaaaaaaattagaaaaaaagttagaaaagctctctctcttttcctcttgttttcggccctccttgagcagcaaggaagtggattttttctcttgtgattcaagtggtttccatcaagtttagagtgattctagtagaggtaattttgtctagcttctcttcttttattttcttgaatttttgatgaaaaatggagtaatgcatgcttagtttaggttattgttgttgctgtgattttgttgttgtttgcagaggtttaagcatgattaattgaggttaattaagctgcttgtgatgcatgatagttaggttgtttagagttgtggaaattttagctcaaaagtatgtttttcaaagaaattgttgaaatctattgctgcacttgttgttgatgcttgctgtagtttttagaagttttattatgcatgtttaagtaggtttgatctgatttggatgcatgctagttagatttaaccaagtttgagttttgaactcaaagcttggagctttaatggtgatttttgatcatgtgatttctgggtggttttgttgcttaagaaatgttctatgggatgtttgaacaagtctggaaggtttgtttgaattggtttggatttga

SEQ ID NO: 281448 - DNA, 393 bp, Cannabis indica
gtggaaagcgacgtgggccattagagagtcatgtttttgaatgatttagaatgtcaatagcggggtactattgttaggcattggagatactggggatttgtcgggagtgtaaatgactaaactacccttgttgcaattaaagagttttcaatcagaaataggacgtccaattcaaggtataatgcttagccttcttctttatggttttctttagctcaagataggctaattgcatgattttagtgatttgaggttctgtagtgtgcagctagtttgggtttgaattctggggttaagtgttgggttttatgccctaaataaaactcatttcaatataatcagaatttacttattaatatagatcagaaataatatttaatgttgcatggttca

SEQ ID NO: 281449 - DNA, 448 bp, Cannabis indica
tagcagagcattatcaagatatgaatctggatctccttctctccttctttgatgctgattttccagagtcttacatactatgattgaggtaccacttgatgtgtgtgggcactactcattcactcaagggatttcgaaattagaagagaagaaaagagagggaaggggtggattggcttttttttttctgaaggaaacaatgtgcaaagttatgagtttcctgaagccaacattttctatttatagaatgccctctaggtttaggttaggattctatggcgttaaaataatgaaaaaataaaatggtaaaagcctatgcatagtgggcggcccatataaggaaattgggcctcactttgcaactttcccattttgttatttctcattcccattttctcaaaaatacaaattttccaatttaaccattcaaatgccaattctaattatt

SEQ ID NO: 281450 - DNA, 707 bp, Cannabis indica
tgtcacatcatatgtactgtaggagtttttattaacaaaagacaaaaattaaacaaaggtaatttaagttttattgatattaacccagtcaaaatgtatatttaaattaaaacattattttctttcatatttacttcaaaggtttgtgttataataatatccctaaatttgtattttttatgtttttaaagaaggtagtacatcctacagatgtcaactgattatttgaaattagtattccaatacaaactaataacaattatttttctcacaaattgtactaatttcttacacgtacccattattaactgagctggttcgtagtactcacaaattgagttttgattattagtaaacatcataatttaatttcttattcatttggccacacatgtttatttggacataatatgggcatatttgttgctacatgtgacaattttagggatgggacaacatttcacttatttaaatatttgatttttctaaccaaactcaaccaaaccataacaaaaccggttattaggttggttcaaattacgtctttcaaggaaaatttattagttggttgggtatgttgaacttacggttttcaatgcattgacaaaatcagatttatattggtgttatatcaccccatctttagccgtaccagtttgtattaattattattttttaatttttgaaaagactacacaacacaatca

SEQ ID NO: 281451 - DNA, 623 bp, Cannabis indica
aaatagtatgttttagattttttaattaacttatttaattttaattttttataatcatttaataaaataattatcttcaaatgctatactaaataaaatattagaaagatatatcatcatataattttaaaactgcttttatcaccgtatctcatttatagtcacaaatactattcataattaagagttttttatttagaaaaaaaagaattactacgcatataccacaaatttaaaaaatctctgaaaacatatagttatattgttctacctcaacatttagaatttgagataaataatctatatatctatatatatataaaggaatgtatagtggctgcttatgtggcagtctatataagtgttttttttacctaatctattatctcaattttttagattttaattatttttttttattcaaattcctctcatttcacattttaatttatttttttatttttttttccaaagttctatttttacattttaattaatttttaaagttttgtttagtagtttttactttaaaaaatcctttagcatcttccattcaatgaaaaaaacccttggcctcttcatttcacatctaattagtttgaagtctttttctgtaaaaaaat

SEQ ID NO: 281452 - DNA, 754 bp, Cannabis indica
cagtctaggtccagatcaggctccaggtgtgggttcgcgttctgggtcttggtctaggttgggccaaagtcccaatttccaatcccgatctgagtctggattcagttctgggtctgagtcctttgttctgatcctggtcttgtttgggtctgattctaggtgtgggtttgagttcgggtccgagtctgtgtccgggtttgtgtccaggtgtggaccccgatttggttctaggttcgggtccaggtccaagttggggtcctgagtgcgggtccaagtttgggtcggggccaggatatcggtccagatctaggtccagcatttcgatcccagtctgggtcttcgtccgagtccaggttcttatccggatccctatctaggtccaagtctgtgttttggatcgagtccaagatttaggtccaggtttgggtctcagttccggtctgggtacacgaccgtgtccgggcccgagttccagtctcaatttgggtctgaggctaggtctgtgttcggttctacgcctgggtgcaggtcatggtcacgatcctagtctttttctagggtcctggttcggcaattcttattcaggttctaattttgggtcccagttctaggtctgggttcgggtttggttcttcgtctgggttctggtcctattctgagtcccagatctagacaccgactactgttctgttccatctcccgttacccgaatcccgagtcaagatctggatcactgtcacgggtctcggtctgg

SEQ ID NO: 281453 - DNA, 443 bp, Cannabis indica
atctttaaggttttatcttctcagaagaatgtggcccaatcacatgaaacacttgagcccctatcattggtcctacattccaaccctcggaatactttgatggtgtgtttcaaaaacggcccaaggctagagctgctgctgctgcaagttcaagttctgctgcagcagaactcctggaagtcaagactgaagttcaaaacgtgaacaatcgtcttgctgcaatggaagaacttcagcatgagatgtccaagcagttgacttctttggttaaactctaccgagactaagttgttgttttctttgcttttgattgaacatatttctatttatctttctttgtttactttggcactccgataaacaaaaagggggagaaatatttatttttaatctgtttgtttgcccaactctggaccctttttccagggggagttgtggttagt

SEQ ID NO: 281454 - DNA, 732 bp, Cannabis indica
catttataggtttgccacttctatggcattttttcatatttaagactttttatggtatttgatatgccatatttttgtaaacctattatccaaacccatatttcaagtttttgtttctaacttaattagttttattttcttttagtttattttacatttacattttagggtttctttttatttggaaaatttataccaaatactaattttttttattcaaatattacatttataatttgataaagaaatttttacatttatacttttcttaatttttttttctttttttctttttttttttactttattaaagttttaaaaagtttttttttgttcttttttattatatattttagtcaatttttacattcctcatgactttttcccatatttgtaagtttttttaaaaaaaaaagtcatatttaggataattaagtttttatgccatatatatcaaaacatatcttcattgtcccatatttttgtaaatagccctataaataaaggaatctcatgctctaaacctaatcaaaatattgggctttggtccatggttatcatgctaagctgcaaactagtttgggttacaataggcggctaaatcaggtcttgtattattctgatcttattgggctttgattcatttcataattggggtttttataaaaattactgaattttaggcaaaaatttataattttattatcaaacaatttttttttacaaaaatac

SEQ ID NO: 281455 - DNA, 1473 bp, Cannabis indica
cacctttctcagcccttccctgtctccctccgcccaccctaaatccctctgcccggagcaacaccaccacccttaacgatttactaccagtgcaagtttttttaaccgtaagttttctattttaacatttattatttatatatataaaaataaatctttaattctataaatatttttcttatttttacctaatattgttaaggtatctactatctcaacaactattggccgaaactaaaagtccactaatgcatattttttagtaggtcagttctttcttctcttctttttcttataacttataattttttgttaataaaatagttatatatttgattatttttagtgtgaacgtttaaaatatatatagtttggttaagtgtgtatatatatatgtatgactaaaaattcttaaaaaaactataatttttctatattatatttatagtatatacgtgtatgcattcatttatatgattatagagatgcaatatataataataatctcaatattttatctatttattatttgattatagttttgtgttttttcagatttgggaaaagaaaaattcgaaatattttgtagcttattggatcatattcacaaatttatatttgtgaaaggtatgtttttaactaatataagattttcttttcttcggtctaataaatctgatttaggtatataatttttgtaaatttaaaaagtaattattaagtaatgaaattattaaaaatttaaaatgtgatgtgtttgtacgttatttttgttaaaataaaatgtaacttgatatgatgtatatcataataataatattatatgttatgatatatttgataaatttaaaattattttatgactattctattatgtttaaataatcatttattatatagtcttatttcatttaagtatttaataataatggtgagtttattggcttgttaacacaggagtaacatttttatctaccccaatacacccacagttttgagattagtttggggacctcgatcttctctgccggccacaactatagccacaacaatcacaattaaccttatattttttggagtgattataaacgagactagtgattaacttttgtatttttgttatattaagacattgtaattttttacttagagaatattgtattaactaatttgtgtaatgactattattattcaatattaaacttaattttaatttatgtttatgttaattatttggcttaaagtttattatttaatatatttttttaaagctatactatttttttatttaaaatatattgattaataatttatattaaaaaaattaattaaaaaacattagaggcggactgacccgccgctaataatagtgtcggtttacgaatctgacattataattagcggcggggtgtgtcagtccgctgctaattcatgttattaacgaccggttattaccggcagattaatagtcgg

SEQ ID NO: 281456 - DNA, 789 bp, Cannabis indica
ctaatgaccatacccgtaccatattgagtcgttgcagcaaaaatcgccccatcagtattgattttcaacatcccagcaggcggcttctcccaacacacactgctaccagcaacaacagcatcaaataatagcggttcaaacctactttcctgagccaacaaccaattataaagtgtagacctagccattcgaaccacattcgcagcctgagaagaacgaccctgccaaagaagctcatttcgggctttccagataccccatgccaccatcaatagctcatccaccaaggccactctacccctaccaaaaacgccttaaaccaatcagcaaaggtagcttctgcagaaaactgcagccccacaccagacctattccaacaagattgtgcaaaatgacatccaaccaaaacatggacaatggtttcttcatcagagttgcagaacacacagcgggggtcaacaggaacatgtttagtacgtaactgggaacgagttggtaaacaccccgagatggctttccacgcaaagtgaagaaccttgggaggaactttgactttccatagagccctccataattcagactccaactgaaggccccattcacctttcaactcttggagatagtgataagaactcttgaccgagtaaaaacctgtcggctccttactccaaaaccaagaatcaacattaacatgatcacttagtggaacctgcattatacaagccaatactcccttgcctacaaacaaatcccagttacttactgccttgatcttttggaggaaagcgt

SEQ ID NO: 281457 - DNA, 646 bp, Cannabis indica
gacctacaagtgtcaagtaaattactacgttgtagttcttagttggtccaaattattaaatttttatttttatttaaaaattaatctaaatataaaataaaaaatacacataaataacagttaaatacctacaaaaattctacaaatataattttagttttattaacattaataattaaatttaattttttacgtgtaaattatttttttaaaaaaaataatattttggtatacttcaagtggactttataacagatattaactccatgtgtaggttattttatatttatagatgagatgatcgatattattttgttaggtatacacgtggcagcatattgtccacaaatattatatataagcatgcttaagagcattgttataagataacagtagtgtctagcaccttctcgacatgtcacgttgcgattggctagcgatactccttaaaaactattatattaagttatatgggacccgatactagttgaatcaatagcgatactgatacataagaaggtgctagataccagtggtaccctttagcatttctcggatgattaattatataatctttctcttaattaacaccatcaatcacgcttcaaacacatgcagctcatgaatcaatgtatgacaacattaa

SEQ ID NO: 281458 - DNA, 533 bp, Cannabis indica
gacaaggcaaactgggtccctatccagttccttgaagagcctaacatcactggcacgaagaaatcgaaatgatcgacacatcctcaaactggatgacgccaatagcagcctacctcaactctggggaaatcccagataaccaaaatgaagctcgaaaaatgagaaggaaggcagcacgatatatcatagtagaaggggtcatgtacagaagaggattctcaatgccattactcagatgtgttacacaagatgaagctggaaggctcctatctaaagttcacgacggattctatggaaatcacgccaccagacagagcttatccaagaaaattctaaggcaaggttacttctggccaacgatgattgaagaatcgaaagcctatgttaagaagtgcgataaattccagagatttccaaaaataccaagagctccacccaacgagctgacacagatgcaaagtccgtggccctttgcaatttggggaaatgacctaatcgggcagttacctaaaggtaaaggcggagtgtagtac

SEQ ID NO: 281459 - DNA, 653 bp, Cannabis indica
ttttttttgattgaatatgctcttgaatgcatgcttgtgaaagtttgatgaattatgtgttttatgcatggttgtgttggtaaaagaatggatattgctcttggtatgttgtggctgagatttcaggggattttctaggttgaaaattcatgttctttttggtattgagctgctggaaaaaaaatacttgaatcaagttggtttgaagctcaagttatgagcttgaagagttgttagtttaaagcatgattttgggttgaattgtaggttttgtttttggtaaattcagaggcgtttttaaggtttcattgagtttaaatctgattgtaagctctaatttggttgtgtaaagcaagcttgagttcatggaactcaagcttggagctttaatggcactttttgatttttagtgaaattattgtgtttgagctatggaatatgtttattatgtcatataatgatgctctggaaagtttggtggtgtttgggaaaaatttgagtaaattttgggggcttaaagattgaaaattttcgtgttctctgcccagacaaccggaattccggttggttcagggctactccaaccggaattccggttggagtacatcgagaaatgctgaattttgttttggccataacttttgactcgggac

SEQ ID NO: 281460 - DNA, 532 bp, Cannabis indica
agattctttgtagtgatatgttaaacccaaagtcaacgttgtagaactttatctcgaacgaaatagaggttaatctcaatatgcttagtgcaagtatgtaatacaggattggcaacaaacatcacagtactctaatatcacaccaaacagtaggaggagtatgcacatgaaaatatagcttgttaagaagtgtttgaattcaagtgagttcagtaactatactagcaagactgtgaaattcagcttcggtagatgatcgagaaatttttgtttgtgtcttatactattaggatactatatgttgggaccatagtaaatgttggaaaattgttgtgctccaatagaaatatcaaaccaacaagattacaactcaatgacaaataatacaaaagacaaaaatataaattaaataatgttacacatgaatcacaatatatatattatatatataaaagagatgtgagagcaatctcaacaccacatacatcacaagtgtataataggggaatcacaaaacttgaacaaggtctta

SEQ ID NO: 281461 - DNA, 618 bp, Cannabis indica
atttcgattaaatttgaattagttatgattttttcaagtttcaaaaaatatcagggtgacatcactaagatacgcgcgcgcggatggcctatttcctcggccagacgcgtgttaggacaagttttatccgaagaacacgcgcatggggtgtctgaaacaccattccgcgcgcgaaaatcctgctggactcctctagcgccgagcttgctcggccgtgcaccctccctagcgcgcgcggacagtatgcaatgcatactgtccgtacagctcgcaattttttcgtttttcttcgatttttcatgctatttcatggaattaacttccgattttttgtgtagttttgtattttgatttttacttttcaattttcaaatctaatatcagaaataaattaatttgaattttttaaatttaattttagatattagtgtaatttgaatttgaaaacaagtaaaaatctatctttttgcttgattttatatcttatttttaaatttgattattttatcttatcttttaaatttaaaggtcagatattaaatatttttaaattaattttttttaaaatatttgaccttatttaaatttaaaataagattattataatcatgtaatttt

SEQ ID NO: 281462 - DNA, 639 bp, Cannabis indica
aacaaacggactccggattagatggacacttctcaaacgcatgcccttctccacaaaacacacatgagacatcatcactttgaatggcagcagctggttgaatatttttagcgttcccaatactcaaattcttcaaaacattcgtcatggaagccatttgagctgtcaaagccgttattgcatctacctcaaggactcccgccacttttctacttgttggagctcttgtgttggaccattggtagttgttacttgcaatggtctccaaaatctcaaatgcttcattgtaagacttcgacaaaatagcaccattggccgatgcatctaacaccattcgagaagctgcattcaagccattataaaaagtctccatctgaatacaatgtggacactttcgcaaaagttccttaaacctctcccacgcatcacttgtggactcatcttcaagttgctgaaaagacatgatctcacttctgaattttgcatttctagtaggaggaaagtatttcctcagaagcttctcagcaaggtcattccaattggtcacagactcaggaggcaaagtgttgagccatgatctagctcggtctcgtagtgagaatgggaatagcttcaaccttaacacctcttcactcactc

SEQ ID NO: 281463 - DNA, 457 bp, Cannabis indica
tttctaaggttttcaacaaactaatatcagtgtcccgtttaggcgagagtcaaagctaccatccattgaatagagttgtcagctcatctaaagtgataaacattctagcaaccttttattcgatcaagatgagaatccagcgttgtctcgtttaggcgagagtcaagactattctatcttatgagtgtccaccattgtttcatacttttttaagccctataaaagtcgccacaattagggtgatccatactaaaataaacacttacaaatagtacttagcattcgagattctacggcgttaagttgctaatgaacgttcctccattagggaggattactcagtaaaacaataactctttaaaaccaacaatggagatcgtgtattttattctaatatttattttaatccatttattttaaatatatatttatttaattaaaatttctaatttagaat

SEQ ID NO: 281464 - DNA, 566 bp, Cannabis indica
ataaaaagagttagataaagtctttaaaagcaaaagaagtaaaaaagtcttaaaaacctacatcgtccccaagccatgtcctcggagtatgtagttcgaggaaccaagccgaatcgtgtctaccggtgaagcactctctcgggtacttgttcccaatctggccgagtacccaactgtgaaaagtcctgagcagcttccgatcaaccactctaaatgggtccgcattgacgagtgtcttcgtagccctagacttctttttcatttcagtgtactcatcgaaccacctaggccgctttctcttccttcggttctccacgagttctggagctgtctctaacacctgtacctcagaatcctaagtatccctgatgctggtgatattcgtcttctcaggtgtacagaacatgtcatcatcatccggtctgtaatcatttgggagaatgaagtcattttccggtgactgagcctcttcttctggttatggctgtggctatggctgtggctgtgactgtgaatttgctgccggccttccaggatcctgcaggagcctcattatggtcttcaac

SEQ ID NO: 281465 - DNA, 762 bp, Cannabis indica
agtttctgcctttgctttatttacttgttgctgtctttgagggtcattgcttgaatatgtgtccatttaccatcctgtgtcaactcccaacaggttcatacaatgtttgaacttgttgagagtgaccaccttagttcccatatctgctgggttctcctcagtaggaactttttccacttgtatttcaccttgagtcaccttgtcccttataaagtggtatttaatctctatatgtttagttcggtcatggaacacagggttcctacataagtgtacacagctttgactgtctgagtacactctaggaacctctttaagtaacttaatctctgtcaaaagtcctttcatccatatggcttctttaatagcttctgtggttgatatgtactccgattctgttgttgaaagtgcaaccacaggttggagttgggctttccaactcacacagtttcctccaagtaggaacatgtaagatgaagtagactttctgctgtctctgtccccggcatagtcggcatcgctgtatccttctatgttggtgctgaacttctgttgcttgtagatgagtccaaccttaggtgtccctactaggtacctgaaaacccatttcattgcaagccaatgaatctttcctgggtttgccatgtatttgctcaaggtacttatggcaaaggccagatctggccttgtacaaaccattaagtacataatagtcccaactgcacttgagtaaggcactttactcattgcttccttctctgc

SEQ ID NO: 281466 - DNA, 290 bp, Cannabis indica
gccggagtgacagggggaaaatgcatggttgctggtggcgtggatgtgtccccgacttgagggtcagtcgtttctgggaataggttgagaggtctgatattgcttctccctactccgccgttaatgacgtctacaggtggcgctccagctccagataatggtacgttcatcatcccaatgttgatggacccgttgttagctcctccgttggtgtgatttccagccatgatgatatttttctttgaaatgaaatgaaatcttagtcgttattcccacagacggcgccaaat

SEQ ID NO: 281467 - DNA, 701 bp, Cannabis indica
tatgagtaccagaccatacttaagagtctcaaatccataactacttaaaatatatgtaccactatagtctatatataaattatgtatatatattttgatcttatgtagtaatcaatttggaccagtacatgattaaatactatttacttgctttatgatttttttttaggtgttgtttctcaatggagttaggattggtgagttcaagtgggggctgtgattggtatggtacccatgtttactattacaaaaaaatagacatcttaactttctttctacaaagatggatttatggcttatgacctacttcacataaagccaccacatgaattgtccatttggtttgtaaattatattatatatatatgtaatatatttacttgtgcttattattagattaattattatataaaatccatgttataataaagacaaattagtgtaattttttttttttgtaaatgcaaattagtgtaatttaaatgagatcatttagtcaacttttctatcatttttttactgctaataaattctcatctctaatttttggtcaaattgaaacttatgattttgtattcatatccttctttttgtttttccttttattatttgaaaaatataattaatcagtgtttttttttcttaattaattaacatttatatatatatatatatatatatatatatatatcaatgtacat

SEQ ID NO: 281468 - DNA, 607 bp, Cannabis indica
ctcttgagatcgaacctaaccgtgtcaagattaagatcaaatgatctaggatcaagtaggtgatattgaattgaacagatattacggtaagtttaacatatctgattcaatgttcaatatctatcccttctaatgcatactccatccatccaacacaagctttactttaaccaatgatttggaaaggacatagcacttatccaaggtgcaagtaaagtatgttgtagattatcgtatcagttaaacattgtgtactgataaatctaggaatatatatttaatcaaacaatcttgattactttgcactgtcttgatgacacaataaacaagaactttaatgtgataaggatttggatgaatttataaatcaaataaacaaataaatgataacatgaaccaaatgacacaataagtgatgaaagtacttctgtttctttattgatatttgaataataaagattacattgaaatgaagttttatttggggcataaaacccaacaaactccctattgcactaatataaaacaatcagtaaatttcaatcaatcataaattttgacggtgcttttcaaatgcagttcctgccaaaactttggtgaatggatc

SEQ ID NO: 281469 - DNA, 577 bp, Cannabis indica
gatgaagatagcagtggtgagaagatatgtgtcattcccatagtgggcatgggtgggattgggaaaactacgcttgctcaaacacttttcaatgatgaacgagtgaagaagaagtttgaatctagagcctgggtatatgtttcagataaatttgattccacggcagtgacaaaaaatctccttcaagaattagcaccgagtgatgctggtaatgacatgactttgaatttacttcaagttaatttgtcaaataagttaatggaaaaagaagtttttgattgtcttagacgatgtttgggaagatgattatgctcagtggacagaagtgatgaagcctttcaatggtggggcaaaaggcagcaaaaataatagtaacaacaagaaaatgaaaaaagttgcagatatcattcgaactcgaactattcacacacacccatcttagtgaattatcagaaagatgagtgtttggaaactaattttcaaaagcatgcatcttgtggaaaatcctgaattagaaacgtatcggcagagaaaatcgctagaaaaatgtaaatggtttgcctttagctgccaaagt

SEQ ID NO: 281470 - DNA, 569 bp, Cannabis indica
gcaaacatataggctcacacaggcacacagatttggatggatcctatcatgttactaggtcatacacagatgaaagaagaatgtaaaatttacctgttacaaattatttacttgacctattgacaattgaaccatgggttaaaatcagatcattggatctgtcaacaagttaaccatggcaatttagatcaagcaataataggttttataaaacttattttacaatcaaacaatataaaacacatacacctgcaacaagttggatagttggatatagggtttatttaattttaaatttaatttaatttaatttaaaaaaattcaaaaataaaaaaatatatatttatttcggaataaataaataataaaaaaaataaattaaaaaaaattaaaattaaacctataattttaaaaattaggtttcaactaacctaagaatcattttcaaaaaaaatagctaactacttttcaaatttcatgttatttttaaaaattaaatattcaataaaataaaataataatttaacatcatctttctgatattacaatttaatttaaataaaaaataa

SEQ ID NO: 281471 - DNA, 520 bp, Cannabis indica
tttacaaaattactatacatatatcatatttttggtgtaataaatatctatatatatatagatgagaatactaatagtttaaaagaatactaatagattataaaaattaagaatggggaggttacattattttttcttattattcaatagaaaaaaattagaaaaaataacaaaatagaaaaaaaatagagaaaatagagaaatggaaggaaaagatgacacatcaatgctcttatgctttcttttatttgattttttatgcttacatattcttgaaatttttcccttaaactcataatatttgatatttgtgggatatgacacattttataatattcctaaaatacccccatttacattaccccctctcttttcttctctctttcactacactgtagaccatcgggccccatcgggccaaccatcgggcccactatcgagcccaccatcgggcccatcgtgcccatcggacccatcgggccatattaaattctatttttttacacatgcaatcgggctc

SEQ ID NO: 281472 - DNA, 752 bp, Cannabis indica
cgacgtaaacttccatgttctgctcggtttgcaaacatttcgtttaccaatcgctgatatgtttccccagcattcttcagtccaaacgacatgactttataacaatagagtcccatgttggttacgaagcttgtatgttcctgatctgggacatacatttttatctggttctatccagaatatgcgtccataaatgacataagctcgtgcccagcagttgcatccactaactggttgatcctgggtagtggaaaacaatcttttgggcacgccttattcagattagagaaatcaatacaagttctccaagttccgttaggcttcgggcgaaaacacgattagctatccacgataaaaaacctcgcgtatgaagtcgttgaccaacaacttatccatttcctattttagtgccccttgtctctcggaatctaaaggtctccttttctgcctcttcgctgggtagcttggatcaacatttaaatgatggcaaataatattagggtcgatccctatcatatctccagggctccaggcgaattgatcctggttcgccttcagaaaacttattagttgctatttgagctgctcgtccaggttcttcccaatgtatatacactttgtgggattttctaggtcgagaataacctcttccaattcctcaattggttttaatatatttctctcatcttgaactcggggatcaagatcttcgtctttcttttcatttttttctgccaagatcgccatcaact

SEQ ID NO: 281473 - DNA, 1061 bp, Cannabis indica
catagccaatcttgtgtacatactaaagcctccaacatgttcggatgaagccttttacgacaaggagtcacatgtcttccactagtactgaaagcagactcagaagcaactgtagacactgggatagccaaaacatctctagcaacttgttgtaatattggatatttaagaccatttgtcttccaccaagctaaaatatcaaactctccactcctaggcaaaactgcttcctccaagtataagtctaactcagacttgtaagtttccacatttgaagtactactaacatacaagtcaaaaccaactaaatcatctacacatccatcattatctccaccaactccagaagcattgaataaaggttcaagaagattttcttttccatcattcgatttatattctttcactaaatcatagcacaacattctaattcgcttaacttcattttgatattcaccaacataaattttaggaaagtaatactcaatcaatttcatcttgaaccttggatccaaaacagttgctatggctaatatgccatgaatggaagtccaatactgctcaaatttatccatcatatttaatgccagaatttcacaaatcttagagaagaaatgattagcagtaggatatttagttccagaaaatatcacagttacattgtaaaacaacttcaatttttcacacataacttttgccaaaagccaatctcgctcactaggttcttttttgtaatttttctcagtatgtattaggcgactaaatacatctttataagtaatggcactagtaagcatcaaataagtagaattccacctagtcttgcaatcaagcactaaccttttgttgctagagcatgataatcctttcttagcctcttcaaacttttcaactctttttggagtgccagtccaaaaaactacactctcacgtatagtttttatggtcaccttgaattgcccctagtccttgtgacatcagtcagatatgagcagagcatttcatgtgaagtgtttccctttcattgtaaagtagtatttctcaattttttctttctattt

SEQ ID NO: 281474 - DNA, 1358 bp, Cannabis indica
caaagagatataggccgcagcctcgcttatctgctcaggttttttcttctttgggattaagactatattggtatcattcattccacatggcataaattcattgtgaaaaaaattcctaagcacatagttaataattgtaattagggaattattcctatgattatattaatcaacaataataattctatcagcactactaccaaacaatcagattcgacgatactcatgcttgggaactcacgcttcaactgagagagcacttctttgagagctaccacctttactatttctggcagaactcggtcatgctgcaacccaaaaattttggccacaacccgcccccaatgatcgcaaatatttcgaaaaatatcaagtatcacaagaagaaaacaaacttgtttcttaagcttataaattgctgaatattattacacactttaggtttctatgttttacaaaattatcttgtttgcattattcttaatctaatgacctaatttaccaaaaaaagaaagtgatttcttttcacattgcacgacgtcgttttgcctttcactttggtaatatcaatacaaaaagcctaaattccctgtctttcagccattgccggcggccggaccactgctccttcttccattattttccgatctctctctctctctggtaaattttcaaagcttaaattctctatgtatgtgtattttatttgtacttaagctaaaattgctcatcattttgactttatttttgggtgttttatttctctcactgtttgtttcttagttttttgtgattttcacacaatttccttaatttttgcaaaaatgacataataatgtttgtattgttttcttcttgaccccaccatccaccaaattccagtaccagagcccacttctaactacaaatccttaaaaacccaaactttactcctctaatggcagcatcttcttcttcaatctcactcttattctccaacactcccagaatctcattcccaacccaggattccccttttcttcctctccacaacgccacctttttaaaatcttctccaaaaactggttctctttctctcagattagaaggggtctcctccatcaacaagaagaagcttagttgtaaagcggtttcatcgactgaaatggctgctgctgaggggaagaagaagaaggtggatgttttcgattctaaggatgagttggctgtgaatttggctaagtacactgctgatctctctgataagtttaccaaagaaagaggtgcttttactgttgttttgtctggtggatctctcatcgattatctaaggtcagctgaaataaaaaataaaataaaaaaaaccaatactttctttt

SEQ ID NO: 281475 - DNA, 609 bp, Cannabis indica
tttcagacctgttctaaacatcctatagaacaattctaaagcatcaaactcacccagattgcacagaaacaaaaagtgccattaaagcccaagctttgagttccaaaactcaaacttggttaaaatcaactaacatgcatccaaatcagatcaaacctacttaatcatgcatataaaagcttctgaaaacacaagaattcgacctcaacaaacacagcaacaaaactcacaatttcatattgaaaactcaagcttttgcatagaaaattcataactcaagcaacctaactatcatgcattaataatagctcaaatatcctcaacttaacatgcttaaatctctgaaaaaataacaacaagatacagcagcaacaacatcaatttatcatgcatgcaatacaccattttcatcaaaattcaacaaactttaagaagaaaagatgaggagctaacctagcttggattaaacacacataaaccttgaatccacaaagaaagaggagcaaagaacccagctgctcctagggccgaaatagagagagaactttgagagagaaagagttttgaaatttttctaactttgtaatttttttggtaaaatgaaataaa

SEQ ID NO: 281476 - DNA, 638 bp, Cannabis indica
ttttctttttcttatcggccatcagattccgctcctatttcttcttcttctatgagaccaaacaccccaaacgatgaacccaagacccaagtcaacgaacatcgtgacaaacccttggcgacaaaccacacgagcagatctgagctagatcgatgatgagagggttgtgagagtgctccgtcaattgtgttctcgagatttggggtttctgagatttgagaacccatgagtaagaggtggggaatcgtgagagaaggagaaaggatctagggtttagctcgttgaatgatgttggcttcgggttgagggaatagtcaatatgactggttttttgaattgggttttcatgggacattcgatttcaaaaatctcaagcttcgaaagtttagagattaatttcaaatctttgaggaaaatcaaatggatatttttgtcagtcggggttctggggtctccatcgatcgtagttagggcttatccccagagggtgttgtgatattttgcgtacgcaagtacacgtatcgtgaaaattgtaaactcaccaagagtgaggtcgatcccacgaggatattagttaagtacgttaaaattaaactttacttctatttggttgaataaaaattaagaaaggattaaaa

SEQ ID NO: 281477 - DNA, 583 bp, Cannabis indica
cctaattggggagcaaaagaaaaaggacaagatatatggtggctgcactttgagaagagggggtacgaaaattacagaagaaaaagtacagagaaagaaaggaaaaagaagagagtacaaagaagagaagaagaagattgagaagaaggagaagaaggcaacctacaaagagaggatttgagcttcaaactcatttctcttgctctcctcttcattttgtatcattttctactctctagttttctctttaactccatgaacatttcattttctggttttgagtttttaatttcagctatgaactaaactctttgagatttgggtggttatgaacccttgtatggactagtattttgattttgcaatgattaagtaatcttgtcttagttcaattagttgtgatgaaatgttgattgaatgttaatttttggccatctttaacatttagcaagctagatcttacttggaaaagtaagacctagttgaacccctctaattgatgcatgatttttaccttttcttttaggtattaattagtagtgaaataggcatattttgctaccatgcataactaaagatttga

SEQ ID NO: 281478 - DNA, 359 bp, Cannabis indica
aattttccaaactatccaataaaaataattccagatacagacaatcaattacctaaatatgaacttctaaacgcgatgaacaaaacacataaaagttcagaatcacttacagtgatggcagcggaataaagtgtctccttccactcagatctctaacccttgattcctgtctatagcagagtataatcaagatctgagtcagattctccttcagttggatgcgatccttcacagtcttccaaactatgattgaggtactgagtgatgtgtgtgggcacttctctctcacaaggattttcgaaattctctcttcttttctctcttatttcgtgggttgttgtgcattcaagagaagagag

SEQ ID NO: 281479 - DNA, 854 bp, Cannabis indica
ggaataagaaaaaaaaggggtatcagaattatttgtaaaaaaaaagagtgggtgaattgattggagaagcttatggtataggtgagcctaaatgaccattccatctacccgtacctaaacctaacattacaagcttagaaagaccttttgattcttggttgtgcattgatttatattagtagagaatagtaagtattgtaagcttatgaaatatattgggttagtggattgatggttgtaattggcatgcataaattgtttcaactgttagttaagtgctaattatggtttcatgaattgaataaaagattaaggtgaatcaagtgtgtgattgaactgaattttggattattataggtgaaatttttttataaccatgataattatcttacttaaaagttgctcatgtttcgattgattgacttgtttcatttaagttgtgttgtttttagttgttagtcttactcgagggcgagtaagaatttagtttgagggaatttgttaggatatttttagcttattatttatatcatttttagagttaattttcttcttcattattattttttggtggaataaaattacgcttgttttctttaatttcaggtttcgacacttggaacgtataaattggtcaaatctcaaaaaaaagatgatatataaaatagaaaaaattgtgtaaaaaaatgaagctgaaacttcaaacctaaattcgactatgatctaattagattctggaaaagccaaaacataaaagttatagatctctctttcagctttccggaacatcttgaatcgtccaattccgagtaatatcaagagagttatggcgaaatactatcagtcgtcgtagc

SEQ ID NO: 281480 - DNA, 671 bp, Cannabis indica
tacattagtgatggatacagagacagggtgttacttacatcataaagaaagtagcagacaactccagtaaaaatatatgcagcacaaaagtgaacccataaccttgagagagaaaaattagaagaaacaatcagagtttctacactaagcatacttgctttcttagaatttaagacaataaaggcacaacacaaacatcttctaaaaaggatttcaaaataggatgtttataaaatccaaggcaaacttagagcataatatacacaagaagacaaacataaagtcttccaaacaaaaaagaaaaaaaaaatctttcgaccatttacaagtatatttagaagatcgtgatagaataatcttaagagcagaaatatcctatcgaatatttcccaaaataaacaccagtaatgaattcctcaagtgatctttattctgaaaagcaatcacaaagttacaatatcgagctttcgagaggctcgtctctccaaatccccaatatttcaagaggagtgctctccacaaagagtctactattttctaattccaagctagttgaaatgaatacctcacccctatatttatagggttcagtcatagtacaaaaagacaactcagccccttaacttaaaacaatcactaatacaaaaatagggaaaaattactaaaagacc

SEQ ID NO: 281481 - DNA, 854 bp, Cannabis indica
tactaaaaagtatgttcattaacatcctaatatgaattttttaaacaataaaattaaacacatataaagtttaggaaacctttcattgggtgcagcggaatatgtctccttccgctcagatctctaacccttgtatcctgtctgtcgcagagtattaccaagatcttagcccgaatatccttctcttctgtttggaatcttcacaatcttccagactatgattgagataccacttgatgtgtgtgggcactcactctatcactcaagggttcgaaaatttgaagaagaaaagagagagagaggttcggctataggtaaagaaagtagatggctcaatttttctgaaggcaaaaattcatctcttttaagtgtgagccatcactatctatttattggtaaccactaggtttaggttaggaattactaggcattaaaataatgaaaatattaattggaaaaagcctcataagtggccggccatagactaatgggccccacttggtatttttccaattttgacaagtttcattctcattttctcaaaaatgaaaattttccaattctaaccctttaaatgccaaaactaattaattaataattaaaattaattatcaaataatattgccatttcatatatatttattaattagacatgttgacttcgcttttagccaacgacaatgagtctttttaataagcgataaacgatatgtcgtaatgagaatatatataagaaagcaataataagacacaggaattttatagaggttcaacccgagcaattcggtaatagcctaatcctcgttatttgtattgacttaagaataagaaagaagtttccttttcttatagct

SEQ ID NO: 281482 - DNA, 675 bp, Cannabis indica
aatcccctaatttaggattactaaaaaaataaatgcgaaaaattaaacttttatctaaaatagaatgaaaattaaacttgtaataattttaagctttacaatcaaaagttacatatttcagtatcccattttttttttacaaaatattacaagtcttttcactagctgacctaagccgtaacatcagagttacaaaagtacaacactggtagaccccaacccgcttggtctagtgtggcccgaacatgtacatacatcgccaagcccttgcactcgtggctgatcagagacagattaaccttttcttgcacagtagagcatccgtgagccaagcccagcaagacagtataaaatatcaataatcataattaacatatcacataaactttaatgccatttcacatttgtttgtatgacacagacccgcatgttacgctcacacgcttatttatgtctatgtggcatagaattacgtattacgctcacacgtctaaatacaataaggccttagaacggttcatcttggttctagttactgagtccaacccaattataccttaaacgtataatccttaatctcaatacatatataacatgacatagcatttacacattaataatcattagggtaataaccctagacaattaaaccgctcatgttagggtaatgaccct

SEQ ID NO: 281483 - DNA, 660 bp, Cannabis indica
catgtaacttggcattccacttgtggcgatcttctcactgggatagatttttctgattgttggaaatggtatacgcatgtgggactgggtaaagtttctctagagcttaaataagaaaggtctcaatatcgatgaagtgtttctctatgcttcaacggttgtcaatactatctggcgggtttagaatgattagctacacaataataaactagataatgtaaaccaaggtattgattctattactatatcttatgcaaattactgcgcttctcttctccgcgcccctacccctgctgcgctggatgtttggcttcctcctccccaagattggctcaaacttaattgtgatgttagagttggactggatagcatgtgcattgcagtcgtggctacgaaccatcacggcgaggtgctccaggtgcaaactaaaaatttcgattttacagacgctttgtgtggggaagaagcgacctgttgtttggctttgaaagttgccaaagataattgccaccagttcataattgtggagtgcaattctaaagtagtggtcaatacactcaacggaaaaaaggcttgttggaggctccagagctttgtctcattttagtaaaagattttttcctttttgtatgagttgtattttgaacaatagtagtagat

SEQ ID NO: 281484 - DNA, 514 bp, Cannabis indica
aaaatatatatctttatatattaaagtgcctatctaacggtaatttttggtttaacgatgttgttttgtttccttcgttaactttaacagaatatgcccaattaatttaaatatttttttaacaaaatttattcaaaaaaacacacattccgttaacataacattattttattaaaaaaatacacattccgttaacatctcaaaaataaccaattatgctaaaaattaggagaagagaatgaaacaaattgctagacttattagttaaagataaagataaaagggtgaaccaatcatacataattatgacttttcagaattatcttctcttttttcttatatatatatatatatatatatatagaataattctatggtaggcacacctgtttgttcatatagtataaggactagtttttgaccagtgatatatatgtacttttactgtgcatattattagatatatagtgtgtgtacctgattaaaggatcgtatttttttttacttaaaaact

SEQ ID NO: 281485 - DNA, 660 bp, Cannabis indica
ggcataatgaggttccgccactggggcctatcatcaagctcaagaggactagacatatagcggtaccaccaaacacaagctcaagtcggacctcatttccaaattttaggtctagggatccgactaggtaaatagttcccagagacgtgtaatagcactcccatggtcaatagaatattctttccaatcagacaggaacgccctcaagagccattcgggaagggaagccaaagaggtgcccaagttggtttttgtcgtcccaaaagatgcttaagtggcacacctctgacacaatcctacgaaatatgggaaaatatcccctctaccaactcgtggaaaggctaacagtgtgtaaacttttttaggattgcaccactactctgacatgtcattttctcatactatctaatgacctaccatgcccaataaattcaatcatgcatatgctaaaaatattgtattttacccctaataggccactttctacatgaaaaaatcatagttgggatcggattcgtccatcccataaagtatggttgcctataaataaggcatatcatccaccatcactactacaaatatcagaattcgtgacagtcctaataattaatttttttggggaccgtcactaaaaaaattaagtaactatttaaaatcgtc

SEQ ID NO: 281486 - DNA, 392 bp, Cannabis indica
aatctctagtgccgctctttccaatttcctcctccttctgtttcttctacaagtcttttctatctcagggtcaacctgaaaaagataagattctaaaaaaaacaaaattaataataaaactaaaaagaaaaaccaaattagaacaaaatttaatttttaataatattaactaacaatccccggcaacggcgccaaaaacttgttgcgatattttgcacacgcaagtgtacgtatcgttttaagtagtaaactcaccaggagtgaggtcgatcccacagggagtgtagttaagtacgttaaaattaaacgtttacttctatttggttaaataaaagaatagaaaagaatgaaaaataagaaaactagtaagaagcaatgactaaagaaaattg

SEQ ID NO: 281487 - DNA, 558 bp, Cannabis indica
aataatctcaacaccttgatatacaaatcaagtgtagtagtagtaaactcctcgtaataggatctgaaaggttgaattaaccacaaccttttctccactattactcttccttaatcacaaaatcattgataacctttggtaatattaacaaattctccaatcacgatctcaattcttattctggttacatttccagtaacctttggtaagatcttttcggtttaaaattttcactactaatttacttcccaaagtagtatgtaatcacaccattaaatttcgatcgactctaactgtttctattgcctattatctaaatcctcccaaaagaaacaatatttccggcttttgtgttctatatagacttcacattctcaccatacagataatgtgccccactttcagtgcaaaacgattattgccaattcaatatcataactgaaataccattgctcatactccttcaattggtctaagtagttaagcaacaactctcctatactgtgtaaaaaaatacgatctagttcttgtttagaagtgtcacgacataccacatta

SEQ ID NO: 281488 - DNA, 537 bp, Cannabis indica
gcctttacctttaggtaattgctagatcaggtcaattccccaaatggcaaagggccacagactttgcatctgtgttagctcgttgggtggagctcttggtatctttgaaaatctctggcatttgtcgcacttcttaacataggctcccgaatcttcaatcatcgtgggccagaagtaaccttgccttagaattttcttggataagctctggccagcgacgtgatttccacaaaatccgtcgtgaacttcagataggagtcgtgcagcttcgtcttgagtgacacatctgagcaatggcaccgagaatcctcttctgacatgactccctctactatgatataccgtgctgccttccttctcattttccgagcttcatttgggttatttaggagttccccagagttgaggtaggctgctattgttgggttttatgccctaaataaaattctatttcaatgtaatccacattattcaatatcaataaagtaacaaaagtatttttcattcatttgtgtatgttttggttcacttaatcaa

SEQ ID NO: 281489 - DNA, 241 bp, Cannabis indica
atctctttctctccttctttgatggttggattctacacaatcttccacactatgattgagataccacttgatgtgtgtggacactactctatcacgtagggtatttcgaaaattgaagagaagaaaagagaagaaagtggaggctcaagttttttctctcaaaagaataagatgcaatctcatagtttcctgaagccatctatttatagaaagccatctaggtttaggttagaattgtatg

SEQ ID NO: 281490 - DNA, 520 bp, Cannabis indica
ggcaacacttcgttttaaacggattcgcaagcaccttagacactatcttatacaagacattgcacaaggatagtgggccgaaggtcacccatcgaagtaggttgtttcttcttcggaataaaaacaatattcgtatcattcagtccatcaggaatactgccattcgcaaagaattggcaaacttggttcacaacatcgctcttcactatttcccagtatttctggaagaaaccttgggtcataccatcgggaccaggagatttatcaggatgcatactaaacagagctcttctaacttcttcctccaaaaccggcctaagtaaagacaaattctgatccacagtaaattgaagaagtaatctccttctaccacagttgagtaatcggccacatttgaagtaaataagttattaaaataatcaaccataacgttcggcaactcatcctcccaagtaaccaaatgacccacagcattcataagccgagttatagtattatatttctttctagaagttgcttt

SEQ ID NO: 281491 - DNA, 684 bp, Cannabis indica
tcccgaagtaaggcttcaacaagtcttctcccgaagaccactctcttgttcagtcaagtcgttctaacaaactctaggacagagtaagaactgatatataaaacactagaacctagatgaacaactaggttctcacataacaaagactctctcctcacaaataagaaaaatgcaaaaaatgaatactagaagagttgattcgaatggctgctctctaggttctatttatagaacatagaaaccttagagacagccacaagatcgaatctacagctgtacaaaactttcctaagaaaaactcgatctgcagcatcaaaatcagaatctgacgcagcaaatcagaccagaaaaggaaacttgctataaacgggtccgatcttgtattgagtcttgattcctgccataaacagtttgtatactctgattgtatcaagacacaatcaaaattaataaggaaaaagacaataatcaaagtttcctttaaaaaccaactttccataagagaattgcttctcttacaagaagtttccatacaagaaaagttcagctgaaaaatgcatctttcctaacatagaaaagagcactaaaaactgaataaacaaggtaagaaatcggttatgaatgcaaataaatcttaccataaaagaaaaaatattttggtatctaacttgccaaaaaaggact

SEQ ID NO: 281492 - DNA, 539 bp, Cannabis indica
gaggcaaacccaaaaaaaattcaagccctcctgaacatgccttctcccaagacgcacaaagatgcgcaaagcctaaccggaaaagttgttgccctgagtcggttcatttaccgatccacagaccagtgcgttcccttcttcaacattctgaagaaatgccaaaaatttgaatggaccgaagaatgcgaggaggcattcaaaaaattaaaagaacacatggccaaagccagttcttagagaggacttgttataggtaacttggccatctccgagaatgcggtaagcgcagccttagtccaagaagaggaaaaaactcaacaccccgtgtactatgtcagcaagcgtatgataagggcggagatacggtacccagtgattgaaaagctagttgtttgcctcctgatggcttcaagaaagttaagaccctacttccaggctcaccctatcaaggtgttgacaaaccatccgctccaacaagtcctgcagaagccggaagcgtccggaagactcctcaagtgggctatggagttaagccagtt

SEQ ID NO: 281493 - DNA, 604 bp, Cannabis indica
aatcaatgatttgcttccaactctctgtagtgcagtgatcaggtactgcttcaataacacttgccaaatcatttggatccccgaaataatgttcctgaaaccacgtgtgcctgatattctttctctcagaatatcttctcttcatctcatgataaagagtactcatcactttttcaggctcaggatggccatcaatatcgtacaaatactacaaacaaatagtatttgttaaaaaattatgtgttaattgaaattaattatttgaaacattaaacttgttaatgtgttttaccttcattttttgtacaatttggtctttaaagtgttgagggatttcactaaaattcaagtagtgtcctggcaacgtaattgtgacctcaacacccatttgacgtacaaaagctgaactttccttaccaaccactttgcctgtcacgacatcaagttttagtggtaatggttttcctgcatcccgccttctttgctcaacatccaagttggtagcaaggccacgtccctttcttcttggcggtggagccgtctgacaagtcggcggtaccctactagggtccggtggatcggtaccacccccatctccaccatg

SEQ ID NO: 281494 - DNA, 533 bp, Cannabis indica
tgtgtacaactgcgaagttgcgagaacaccagctgattcctcagaacgcaagtcttcaaagggagccagtatacaaagaaccatccgagaggcaacaagagcgaatagacaaacgcctctccaagcaaacttctcgaccaatctcaggtaatttatctcttgttataaactaatagatagagtttgacttatacttatctttcatttatcttcgcagatatgacttttttgaagtccgcacctgtcctgaagatcaagccgaagggtggagcaacgacgacctcgcccgttgtcgcccaaaagaggaagagcgatgcgatggctacccttgccacagactcttccaagaagctggccaagaccgcacaagacaaggggaagaaagtcgtaatcgatccacctgttcgagctcccgacttcctagccatgcaagagaagttcctggccgagatcccttatgaggagcttgttacgcgctctgctgagttggccgcgcagtcaatgaccctattcataaaagctgctcctactcc

SEQ ID NO: 281495 - DNA, 784 bp, Cannabis indica
acatcatgaactaaaagaccaaaaaaggatgacaaagtaatttggcttttcacagcttgaacacaaactaagctatcagtttccaaaatcacttgtccccgcgaatcacggtcaatccaacttaaagcttctttgatgccaacaatttcagctatttcaagttgcacccgccccacctttcccatcgtgtaagcttctaccaaattatcgctggaatctcgagccacacaaccaaaacaaaactagccttctcgctcaaacaaagtgccatcaacattaactttaatattatttatagcaggtgcagtccaacgctcaagcacacggtcctaatcaatcaacggagacaaagaaagaccctttctttttttagcagatttatattgatcaagcaaagttcttgctgaagcaaccacatttgcagcagtactgctcctttgttgccaaacaaagtcgttacgggcacgccaaattgaccagctaacaaccgcggcttcctccatctcttcctgcctaccacgactgaacaaaaccagcagcatattgcagaaagtgacattcaaagtgctacccacgtccaccatagttctatgccagcacgcacgagcaaaatcacaccccaccaaagcatggtagatcgtttcatttgaagcgttacacaaaggacatatagaattaacaggaacatgcctgtcttcagctgaaaacaagtaggaagcgaacccgaagctgccctccacaaaaattactgactttggtgaaaccttcagattcaacagctcct

SEQ ID NO: 281496 - DNA, 594 bp, Cannabis indica
aggaaaaccctagaacttttgaatatgtgtttttaaggtttttcttgagtttgagattgtggaattgtgatttagtggctgttaagatttaaagcttatgtaatctgatttctaggttagttttagttgttgtaagctctggttaatagttttgaaaggtggaaatggatttgggtaagcttgagctttgaaactcaagtttaggtcattaatggcaagttggaatttattggtttgttctgtgattttctggttggtttaggttgtaaatgcactgtacaggtatactggaaagtttggtgaagtttggttgagttttgaggtcatgggggaatttttcgggttcccagcacagaaccggaattccggttctgggggacctgtggcaaccggtcgacggttggtgacccagaaccggacttccggttgggaaccggtctgccggttggggggatttttgaaaccctagtttttcccaattttgagatatttagggtattgccatgtggtttattgatagggaaacttttagtttcaagtttaagtccccgatagtgatttagcgagtcactcatctgtgttacaattaatgtg

SEQ ID NO: 281497 - DNA, 742 bp, Cannabis indica
acttgattgctcaggagaaacctgacacgtcccggagatgccttaatgttatttcgagctttcgggagcatatggggttccatatgctttctccaggagctacgtcctggaagttaccttatagcataaagacttagcaaatattttggattgtacattgcttgatccacgcgtccttattcggttggtccacgtatattgggaaaaatcaggggcaacaactaccatgtatgttatttaacatcctaaatatgaatttctaaaataatataaataaacacatataaagttttagaaaccttacagtgggtgcagcgaaatattaatggctcattccactcagatctataacccttgtatcctgtttgtagcagggtatcaccaagatttgagcctgaatgtccttcttcttgattctagattcttcacagccttacacactatgattaagttaccacttgatgtgtgcgggcacttactctatcactcaatgtatgaaaatatgaagagagaaagaaaagatggtgattcgaaaatggaaggaaagatggctcaggaaaattttgactgaaggtcaattttcatcatcttttggtgtgagccatcactatctatttataggcaaccacctaggtttaggttaggatttattaggcattaaaatattgaagaaattaaatggaaattccttccctagtgggcggccataggatgtggaaccccactttagaattttgccatt

SEQ ID NO: 281498 - DNA, 604 bp, Cannabis indica
cttgattatatcactctccttgttcatatttctcaatttgaggcttttcaagtgttgatttgagattgtaagatgctccaatcccgacttatgataagaattatcaattgtcaaatcctcaaggagtgggaggtttgtaatgagatcttccaatgatgactggcttgtcatatcccattcacaattaactagtgagagatttttgattgccttacatgcacacagatttattttcccgaataaagcccaacatagcaccaaaaattcaacatttatggcttatagaccaaaataataaaaaaacccccacaaaattaaataaatctagtaagagtgattataatataagtataaatattttttaatgataaataaatccccaaaaagtaaaaattttaggttcgtcacttataacaaatatacgactctattctaagaagaagaagaagatgatgaagagataaagaaaaagtgaatgagaatttctcacttgtttattttaatggggtgaacccctatttgtacaaaaatatgactaaaagaataggaaactaaacattaattgtgataattaatttagagatttggacattcataaataata

SEQ ID NO: 281499 - DNA, 778 bp, Cannabis indica
atacaacacttacaaactcatgatatgtatttgattaattgattaatcgaattaaataataaaaataataagtctaagttttttttgaaaaaggaataataagtctaactttattaaattaaaagataattacgtttttttttaaatagaaaaagatatacttactacttagtcaaatactagaattgaaaatggggtaaaatagaaaagagaaagttgctattttaggttctaagcctttttttttttgaatgaaatattaatctttttttgaaaatgaaatagtaacttcattgaataattagcattcagaatacaaaagggagattaactcgtcccaagcattatactcaaaaatgctacgaccagagagaaaacaagagtgcctagccacaacatgggcaactcggtttgctgatcgtctaataaagcaaagcttaacattatttagagaagaaaataaaacttgacagtcatgaataatcaagccaaaaatagaatttaaggattggttactacgaatgccttgcacagtgagcatactatcagtctcaatctcaacatcaaaccaattcttacttttaatccagctgagagcttctttgactcccattgcttcaacaacttccgcatcatatgtacctctgaaataacatgatttggcctcaacaagcttaccgaggctatctcgagcaactatcccaaaaccataagagttatcccgtggaaagagtgcagcatcaacatttatcttgattttattcttcaggtgtagtcc

SEQ ID NO: 281500 - DNA, 431 bp, Cannabis indica
ataaatgaataaatcaagtctccaacaataatattttcaataactatcattcattcacattcataaacaattagtaacatcttttactaatttaagagtaaaaaagagatgagagttacatattcaagtgatcatcaatttaaaggatttgcaactcctattttgagatcattctacacaaattttgtaactccataatgtatgttacaatttgacaaaattaatactttgtcacacttaattatttataacttaattatttaatctacatattatattatataaaataatataacattcccccactagattaaataatatctcatcaaataattttgtaacacaacattttatttaatcaatcaaacattatattatggagtaatataatattcccccacttgattaaataacttcactctaatagaaac

SEQ ID NO: 281501 - DNA, 865 bp, Cannabis indica
aaaaactgaaaagaaactaccgaagactgattgaaaacaccaaaaacgaaaacaaaacacataacctgtaagcacaaaaaaacactgaaaataaagaaaacaaaacaaaattaaagaacaacacccagaccagaatcaaatgaaatgatcaaaagcaacaataaataactaaaaaatttaaaaacatgaaacaaaatgcgcaaatgaaaccctaaaatcacacaaagcataatgaacatgaaaacgccaaaatctgggtaaagcataaatggaagaaagggggaaacgaaaataaaactaaaaaccaacctcagtccgatcttcagcatgtgtaatagatttttgaaattttttcccagaaatttctggaagcgtgggctcctccaagttcagcttcgatttcttcgaagaatggggtctcacacgcttcggcattggagcttcaaaatcagaatcaaaatcatcaatgattgggcgtttacccttggatttgttggccaaagatttcttgcccatttttgatttctgtttgagaactggagaaggggatgaagatgaacgagtgattgccatcctataaataagattgaaaaaaactgaaacagagagggaaaaacagttgctaaatcgtgggctaagaggaagttgaaaattcgtggatgaaccaaaaataagagggaaaaacgtgataaattatgggtggttaatggaggttacttgaattcaaaatgaacttagagaacagaaatgaagaatcgaaaatgaaatgaaaacaaaatgaaaaaagagagggaagagagtatgatttgattgatgatgcatggggagagcacacgtgtatgcatggtatgatgagtaagtggta

SEQ ID NO: 281502 - DNA, 745 bp, Cannabis indica
gaaacagaactaggactgggacctagtacccgaccaagacccgaacttgaacctacgccccagctcatgacgcggcaccagaaatggaaccagacggggacccgagattgggatccagatctggacgctgggcttggacaaagcccgtagtcagtgtctggattttggaccaagccctagacccgaaccctgacaaggacccaaaccacacccagacctgacccaagtcccaaacacaaaagtggacccgaacccgtaccctatgacccaaaattggaaccaaaaccggaagttgaccgggactggaactaggacttggacttggaatcataactgaaattggacatagatcaagaaccgtaaccggaccagcacccgaactccaaatcagacctacacccgaattcggagccggacccggatcccaacccaaaccttgactcgggacccgaacttgaacctgaactcagacccaaacatggaaccagactagggacacagaaccagggtcggaacctagaaccgcaccccaatctcgatcccgaacccaaactaagaaatggaacctgaaccagaaccagaccgagactcgtgacagtgatccagatttgactcgggtttcaggtaacggggcctggaacagaccagtagtcggtgtctagttctgggactcagactaggaccagaacccaggcgaagaaccaaactcgaacccagtcctagacctgggacccaaaattagaac

SEQ ID NO: 281503 - DNA, 639 bp, Cannabis indica
tatgttaccttataaagtaactatcttcataacatcatgttacctaatcaaacaagtcgatgcttaaataggataatcctatattgcattgcctaatcaggcaagcccgtaccatagcctggcacccatatatcgcataactggatcacttaatcaggtgagcctatgctacaaacctgcacccatatatcacataatttcatcacttaatcaggtgagcacgtgccacaccttggaaccaatatatagcatcgtctaatcagatgagcccgtacctatgcccggtacttatcatatgtcactgacgccaatatctacatgtcgccaggagaaaaccctacaacggttttattttatgccataacctggcgattttcatatcactgacgccgtatctacacgtcgccaggagtaatcgcctaatcagacaaactcgtacctacgcctggtacttatcatatatcactgacgcccgtacttacacccagtacgtcgccaagaaaattacatcacctaatcaggtgagcctgtacctacgctcggtacttattatatatcactgatgcccgtacttacgcccagtacgttgccaggaaaatcgcatcacctaatcaggtgagcctgtatatcacatgcata

SEQ ID NO: 281504 - DNA, 562 bp, Cannabis indica
aatcgcatatagacggccaaatagatggacaagatttctccggacaatggctttgacaagatcggaggctgccccaagtgtgtttttaaagcttgaaaggcctgctcgcacttttcgttccaatggaactttttgttgcctttcaaaatctgaaaaaactccttgcacttatcagaagatctggatataaagcggtttaaagctgcgactttacctgtgaggctttgaacctcctttggcttggtcggtgatggcatttccaccaatgccctgatcttcgcaggattggcttctattcctcgctgattaaccatgaacccaaggaatttcccaagccaactccaaagacgcatttcagtggatttaaacgcatcttatatcgtcgcaatatatcgaacatggcctgtaagtgggcaatatgatccttcgcatgttgtgatttcacgagcatatcgtcaacatatacctccatggtttttccaatgagatctgcgaacatcatattcactagcctttgataagtcgcacctgcgtttattaaaccaaaaggcattactttgta

SEQ ID NO: 281505 - DNA, 623 bp, Cannabis indica
ctctttctttcaacaaaaatacactttaattcctacaagaaagacataaattgaatcaaaatcaaatattttcatttataaaatatattacaataatttcatgaaaatatcaattaaaactcaatttattttattatttaaaataaataaaagtgtatttttaaccactaatcagctaccttgaaaccgatcaacaccaaataagtcggatccttgcaaattgacctcacaacctacaacgtaaagaaatactacaaaattaccaatttttttatttagctacttactacttatataaattatgagtaactagttagtaataaaaatacatgaatatgaatgaaaattagtaacttgctaaatagttgtaactaactatttactagttactaaaaaaaataaaaacacatgaataaaattgaaaatagaaaaaaaaaattaatacaaaatatagttaatttctaaatttttgtttctaaactaattttatagaaattaatttctaaacttttattttaatactctcctatctcattctcatcacaatatttaattaacaaaactattagtttaaactttaaaatactcaatatatacatatacaatatataaaatactctcct

SEQ ID NO: 281506 - DNA, 532 bp, Cannabis indica
atgaatttaacgagactcctactgttgagtgggagccatgtaagatgtaatcaaacaaggaacataagaagacagtcaagaaagatttctgaaagtgacctataggttagatgatagggatgtatatattagaagtccttatatcttcaccaactcataaatgatccgagatgatggttactctaggggtggaggagttattctagaagagtgtaaaaacccatctataataatttaagctccattaatgaagatacataactttgtaatttcgaagttactggaaagttattcaactgaagaatattctacactgtgttatctctatttcaattttggatgttattcagatgcactttataagcagtaaagaattcagtatccctaaatgagtaatgcatatagcaaataattttgcataatgctttatgaacacaaaggaagtaatggtggagaaagcagtagcttaccacagacttaaagttcctgaaatttgggttgagtcaaatatactacacttgatctgaagatc

SEQ ID NO: 281507 - DNA, 632 bp, Cannabis indica
tcttcaattatcaacaatttagagattaatttttaattttctttttatcttacacacattgtgtttctttttaatttttaattttcttttttattcatgggtcacttttcatttatatataataaaataaacaaaataaatcccattaaatccaaaaaaaaaatacgattgggtttttgctgttgtacatctacgattaggttttctttaattatttattgtattccttttcctattacaatttggacattcccatgggatcacacataatattccaatccgcacttctcttttttcttcttcacaacttaataacaaaatatataagtaataataataataaaaaagaagcgtgacttttatcaaagttcacaaaaccaagcatcaatggcgaaaaaaacccaacaaagtttacagctaataaatgattctaagtgctcggcatatgcattagtttccaggagcaaagttttttaaagttacgtaataatttacatatatgttgcaaacacaatatacaaaaaataaagaagaatatggaagaaagaagagaccattattcacatctagaaaggcagtggagataataatagaaacttttcatttttttttctttttttatcaattttttt

SEQ ID NO: 281508 - DNA, 567 bp, Cannabis indica
atatatctagggtatattaaatctttgaacacaagcttacaaaaattaaaaaaaataggcacactttatattcatacccattatacccttcgctcttctcttctcttctaacttcaccatccatattctgtattcccatctatactgatggtagtccgatgggggtccgatgctactctatttttttttttttatgtttttgtacaataaaaaaaagtagcatcaggtgatcatcgaaccactatcagactaccatcggaccatatctgctaccatttttttttttttatgtttttgttactaataaaaaaaaaaaagtagacatcaggtgaccatccgactaccattgaaccatatttgcttaccattttttattttttttatatttttgtacataaaaaaaaagcatcaggtgactatcggaccaccatcggaccatatctacatttatagatgttaagctctattcataagcttgtgaggaaggcatcgggccaccatcggaccccatcggaccatatcatcgggctaccatcgaaccactatcggacattcgtcttcaacctt

SEQ ID NO: 281509 - DNA, 913 bp, Cannabis indica
gttgtttccccccttaatctcttgagattggtgacaagcaagtagtcacctttgcaaactgttctactaacgtggaaaaacgtgtacacctttaaacaaaggcatagctttatggaaaatttttaacataattttttttagtttatgttgatctttaaattcaagctgttgaatatattaggattgaaattttgtacagaagtttttgacaagtgagaagcatgcgagtcagcgagctagtattcttgtgattcacaccatttttcactaatccaactcaattaaagacaaaaagctcacgagtcacgacctcgccaaagccaccatctattagtcaaaactaaatttaataaactagaaaatatactaccttccgcacgactatatgaaaataattatgattgatttttattaataataaattcgtaattgaatcgtgtcaaatttcaatttgaattattttattcattaagccaaaaataaaaggttttttttttcttcttcttcatgtgtattgggcaggtcctatgaagtactaaaatgataaaaatattattaaaaaaatgataaaaatattacacatatattggacaggtcctataaagtacaaacatttatgggctatttacaaaaatatgggaaaataaagataagttttgatatatatggcataaaaacttaattacactaaatatggcatttttttaaaaaacttacaaatatgggaaaaagtcttgagtaatgccataaaaaacttaaaatttgtgtttctttttatttattttttctttttttaaaaaataaaatactaaaataaataaaaaatgatctcaactatagatattatttttttttacagaaattaaacttgtttttttttatttaaactactattttttttctttgttttttt

SEQ ID NO: 281510 - DNA, 684 bp, Cannabis indica
ttactgacaaaaattaaacttagatatttatttgtaattagtagttaaatttaagtatttatgctgcaaattactctaataaaatatctaacagaatttctaagaaatagaaggctttgttaatgtaaattattattttttaattgataaaaatgaagtgacgtgtgaaaattatattaaagtaattgtgggacacaatttaataatagaagatagtgggagcacttttcattacctttagggtaccttttgtatgctgaataaattggattattaattaagattatatattaaattggattattttagtactataatatattcgacacattataaaacaaaatctagttatatatatactatgttaatacatatattgattaaattaatgtatataggtaatgttatgtgaaagggaaatttcattaattgaccctaataaaatatctcatttcaaaatttataccatccactaatttatacaaattaattccattattttccaaaactacccaaaatacccttttattttaattttccctccttaactcttactcttctcactctctctcttcgtccttctctcttcttcctctctgtcaaccgacccaccccccacaccacaccaatatctcaaccgacccacccccacgactaaacccagacgtcgacgacgacgaccca

SEQ ID NO: 281511 - DNA, 603 bp, Cannabis indica
agatcgagatcgatcctgctatctcggctagaaagataaaaattggaaaggatttgttgctcgaagtaaaatcagagttgataaaatttctgagagcaaacctagatgtttttgcctggtcacatgcggatatggtcagaatcgatccttctattatttcacacgtcctgaatatcgatcctaacatccggccagtttaacaaaaacgaagattactggataaagaatgagcagtagccttgaaagatgaagttgaaaagctgcgcaacaacaacttcatcattaaagctttttacccagcttgggtcgcgaaccccgtactcgtacctaagccgaacaagaaatggcgagtctgtattgatttaacagacctcaacaaagcatgccctaaagactgttttccacttccaagaatcgatcagctcgtcgatgcaacagccgggcacgaaatattaagcttcatggatgcttattcgggctacaatcagatcaaaatgcatccgccagaccaagaacatacaagtttccgaacagacatgggtctctactactacaaagtcatgtcgttcggtcttaaaaatgccggagctacataccaaagat

SEQ ID NO: 281512 - DNA, 518 bp, Cannabis indica
tttttaaaaaaaataaaaaatatgtgataaatatatttttataatttttattagctaatttattagatttggccattttcttaatttttttaaaaagtggacatttactaacttagtttccaaatttaaagtcatttttcatctcaaccaaaaaaaaaatattgataaatgcccatttcaagttttagttaggtggcccagtttgttctaaaatcaaattaagagtaattcatgatgtaataatattctcaagcaacagatgagagaacaaattttagaagcttttaatttagggataatttcacagatacacaaaaataacaaaaatattacaaaaatacggtttcacgaaattttaaacatttttacgaattttttgattttatttacagaaaatgcggtctttttatattgtattcatgttaatttgttgttgattttttgttatatgtatgttattttttgttgttattttaatgttatttagatgttattttcatgttatttttatgtagttt

SEQ ID NO: 281513 - DNA, 509 bp, Cannabis indica
aaaaaccggccaaaaaacgacgaaaacatggggaaattgatgggtttcgatcggtattggatttctagtccatctagactactaatttcgagtttttaaggctcaatttctagatctcttggcaaaaacaatccgaaaaaaaataaaaacaaactatcaacccgattctagcatgtatgtcatacaattcgaaaaattaaacgtgtagaaacattgtaaattagttgataatgagatttgcaccatcaattttagtgtataaactatagaatcaaaaatcccaaattgaatttcataaagaaaaaaatacataaaccctaaaagtttaatcttaaaattcttctaatttactcaatgattttatgcaagtaatatatcaaaagaaagagaatttaatgaggaataaaacccctaaacttttaagattaaaaaataaaaaattcaacataaaatatgaaaagactcggtttgaccgagtcaaatgtacttttatatatatataaaataat

SEQ ID NO: 281514 - DNA, 769 bp, Cannabis indica
tcagaagcgtcggccagacgcgtggttttctttcgtacgagccatcatccatggctgggtacgaggtcaaaaaaatttccttcgctagaaggaggactagcacgaagacgaggatgaacttcgtgcagaagttgaagcaaatcctggtcgatctgatgcccgagttcccaagactcacctgggttcatctacaaaagacaacacacaagatgagtgttggacggagtatcaaacgaaaaacaagcaaatatgccgaccaggagtactcaacagattaaagaacgactatgtttaaagaaaagtcaaaactcaagaagtcagaaagttttcttgagttagggcaaaaaagttcatgaagcttagaataagcaagatggaagacagacacaatgcggttcaaaaataagctctacggctgaaagcccacatgaagacatggaaaagaagagtcgcagaagtttctaaccctagggtttcctaagcattctttctacagcatagttacattcaaagcgtaaacatgcaaagaaaagcataaagggaatcagaaacttactcaaagattcgaatgtctgagttcaagcaaaccagcaatcgtctgtaggcacttcggcaactttgaagccagaaaactctctcttttcgctctggagtttacttaacaacgaagggtgataaaatgagttatgtgccagtacgatgagtatttataggcaaaagggtaactgtatacaaaggaaccttagacgcctcgacttcctgcctcaaa

SEQ ID NO: 281515 - DNA, 561 bp, Cannabis indica
aagttgcttgcattagagtaagtaaattaccaggcatacaacaagccataggtttagataatctcaaatctataatactaggaataggaagttttgttaagtccattgaatagacttattttcaaaaattcctttcttgtccttgtaatagaaaacttttggttgttccatatgaatggttttaaccatagttctcttagctttacttcttagtttcttattctgataatccattacttgtttaaactaacaatggattttaatcacaagtgtcttccaagtcataacagggtgagttcctttaaattctacaactacgacaaggtaccgtgaattttttctaagaatactaaatggtattatcctcttcggttgtctcaacaacaacagaggcagtgggattatcttatatcgaataagatgatggaacacttttggaatcaagaaaaagaatatctcctttatttgctacattatttttagacttagtgattttcttagaaaagtagtatttgttaaaacaaacactttttttttaatctaattactatgggatggtcc

SEQ ID NO: 281516 - DNA, 669 bp, Cannabis indica
gttattaggtgagattattattacgtatatctaaataatatactttataatttagatatggtgcgtggaatccgtagtccattggatgcttggcaacatcttcaggctcgattctagcagtgttctgaatttgcaaaatgaatattaagagtataaataaatatacaactcctaaagtcataaccccaaggtgtagcagaaatggttctgagaggtaaaactgaatattttaaatggaatgccaccggtaagtacctttattataaaaactaagctcgttaaaaatgtgaccaggagaaaacaaaatattctcaatgctttctactaaactacatttgaaaattagaagtagatattgggattttagtttatttttgctaataaattgggtttcagtttcgatttccacgggagatcattttgatttcatagtttaatttgtacttttatttttatttatatttattttaagaaaaaattaaaaacttaacagacgttacgttagtttaggcattcaaaattattaaatagtaattggaataaagtcacccaaaaaccaaaaattctgttatatagatacattttaatataaaatagatatatatatataaattaaatcagaaacaaattacagatatcagttcaaatattaatgagatttgttttatt

SEQ ID NO: 281517 - DNA, 696 bp, Cannabis indica
caaatgatgtttaagtttcaaaagtattgggaacagattcatgggattatgactattgcagtggttttggatcctagatacaagtttttgttgctccaattttattttcctcaactctatggagatgataaatgggaggttgaaattagaaaggtgcgtaggctttgtgatgatctattcaatgagtacaaatctaaatgtcctactttaagtgaaaaaaattcacttgtggaagggtcatcatcttcttcaacacaagatcatctatctaactatgacttatatatatgttagagcttcatctggtgcaatgaatgaaaagtcagagttagatctctatttagatgaccaagtgttacccatgactgatgaattctttgatatatgcaactattggaagataacaggatctaaatatcctgtgttgaacatgattgccagagacatatttgctgtgccggttagcactgttgcttcagagtcctcattcagtactggtggtagacacgtgagtccacatcgagcaagacttcatcctactactttggaggcattggtctgtactcaaagttggttggcaattgacaaacaaggtataattatttatttattatataagtttatacattaattaatagttgctttattatattattttaataattttttttacaggcacaaaaactaaactaatta

SEQ ID NO: 281518 - DNA, 556 bp, Cannabis indica
caggagcacccggggatttggaatctttgcttttgaggacaacaggtaagacagtagtatgcatgtagagttaagcgcagtggcgctcatattgaatattgtgattgtgatcaattaagaattgggattagggttatttccctaaaatgagcggttgtttggtctagggttattaccctagtagttaaaagatgttaaatgttataccatgataaatatgttggaataaagaattatgcgtctaaggcatgattaagctagactcggtaaactagtaccttgagttaattttaatgtggtctaggattattaccctagaatattatgaaagtaaggaagcaataatgaatggttatgttgttaattaaatgaaggcataagttagggttattaccctcaataaatgttatttcgggcataccgtaatatgttgtaggaatgagtatttagtatgcaagttagggttattaccctaagattctatatgctttgatatctattgaatgcatacatatatgcaagagttaagtgcataagacataacgtggttagacct

SEQ ID NO: 281519 - DNA, 791 bp, Cannabis indica
ctctctctcggctggtatggtgtgctagggctgggtttcttttgatttttcaagctctttttcattcaatctaagtgttcttcaagtgcttggtaagacccttgtatcttactcttttagtttcttgagtttttgaagaaaagtggataggttgcatgctagcttttgatgttgttgctgctgttagttgttgttattttttgtttaaaatgctgaattaaatgtgattagataggttgaaatgcatgctagttattctagttctagtttgagaatttgtagttcaaaagctatggtttttcaagtgaaattgtgagttttgttgctgtgtttgttgaggtcgaattcctgtgtttttagaggttataatatgcatgtttaagtaggtttgaactgatttggatgcatgttagttagatttaaccaagtttgagttttgaactcaaagcttggagctttaatggcatttttgatatctgtgtgttctggactgtgtagatgctttagaaatgttctttggggtatttagaacatgtctgaaagttttggttgggtttggaattaatttgagcaaagtatgaagttttgaagttttctgcgaggaaccggaattccggttgtgcatccgaaattccggatggggttctgaaaattcccagaaccagaattccggttgggcaaccggtctgccggttgggtgattttcagaaaccctagatttttctcgtttttatgttatttggggtatttccatgctttttatcgatagggaaacttttagtttctagttt

SEQ ID NO: 281520 - DNA, 797 bp, Cannabis indica
ccaaaacttttgaacttataaatcctagtgtactatgcaaatcactttaacaagactaaagcaaatttataccatttgattatttgtagtcttgatgtagatgagcttcctagcttgatttgcatgttttgatccaaagttgacttttcccgagagttgaccttgactttgactttgactttcgggttgacttttgactttgggcttttgaagacctcttttgaatagggtcttgagttgttgatcctttgatgaatcttttgctcttatgaattatgaagtagttgatatacttgttgaatatacttctttgattatgtttgactttaccgagcaaatattgatactttgtgaacttgcttgcaaaatgatcaagaaaagattagtaacaaataataatcaaatatttgtttatcatcaaaataaatgagtgattgacttttggtcaacattctccccctttttgatgatatcaaaatatttgattattttaaaggaaagaaaaagtaaattgaaacatgttgagtttagctccccgttttttttttttttgaggaaacacgtctatgtcatagattcaaataaaattagacctctcggttgttacacaaaatattgttaggtacaaccgaaaccgggatagacccaaatacctgatgagcaaacgcccatctagccacattatgagcggcaaaattacaagttctacttataaaagaaaaattacaactaataaaaagtggagaagacttagaacaaaaagtgatatagttttcaagcgcccagcaagaatcctt

SEQ ID NO: 281521 - DNA, 575 bp, Cannabis indica
gggatcccttgtatataaaatttccttataacaaatttcaaaaccattattaccaaaataaagttacatttccaaacacaaagaaaagaagtcgatcctgctttccggaagccaagacaccacgactgatatgtacattactgggagacctctgactcatggccaaacacagctcctaatctccttacctgcaccatgaagcactcgtgagtcacaatgactcagcaagaaaagctactaattagacattatggaaagtgcaggcagatttcataataatataatatacataccggtaggtcttacatatgtcaatctacatatacaaaaataacataacgcttatgtaagcacacttaatacataataaagaatatttatagctattcataatcaaccatctcagtggttcataaagtaccctaatcacacatcattataaacactcactttcagtacttcataaatcactctaattcatatattacagtaaccacataatctcagtgcttcataaagctctcaaacacataatcttagtgcttcataaagcactcaattcttacatccctaca

SEQ ID NO: 281522 - DNA, 786 bp, Cannabis indica
agtgcaagatcccgagttagtgaaatcccgagatagggtttcagctgggaaaactagtgactttacagtggatgaaacgggaatgttacgatttatgaatcgtgtttgtgtgcctatggatgatggtattaaaagagagattatgaatgagtctcatacgactccttactcaattcatccagggtcaacgaagatgtatcaagacctcaaggctatgttctggtggccaagcatgaagaatgacatcgctgagtatgttgctaagtgtcttacctatcagcaagtgaaagctgaacatcagaggccagcagggttgctgcagccattgaatattccaaagtggaaatgggaagacattgctatggactttgtggtaggcttgccgagaaccacgggacaattcgactctatattggtcatagtggacaggtttacaaagttagcacacttttcgcctgttcgaacaaacttctccattgatcagtatgctgagttatatgctagagaaatcgttcgtcttcatggtgtcccaaagtccattatttcagatagagatccgaaattaacatcaagattctgggagactctgcatcgagctatgggaactcaattaaagtttagcactgcatttcatcctcagacagatggacaatctgagaggactattcaaatcttagaagacatgttgcgggcatgtgtgcttgactttgatggatcatgggtaaagtaccttcccctgatcgagttctcgtacaataacagctatcacgcaacaatcgggatggc

SEQ ID NO: 281523 - DNA, 711 bp, Cannabis indica
ttggtgttgttttagtgacatggggtctttgccccactttgaattgctaatttgcctcttacattgatcaattctcttccgaaagttaccagtaatctctctaccccactttcccaatacctccccacacctaagaattttttcttgaatattgaccaaccccgatccctcccaacacccttccaccagttgtttacatagaggctcatggagccatgcattttcaaagcgaaaggaaacaaaagaataagcaggggacacacctttgaggattaagagaatagggcaatggtcggatagtggagatactctaagttgtgtagaatcgcttgaggaaacgttgatatccattcgtgagacaccaaggctttatcaagacgttcttcaatccagttagacgttgatattcactagttaataataaaaatatatgaatattaatgaaaaatataataaaaaaatatttaatttcacataatgaaaaaatttaaattcaataggtaaataaaaaataaaaataagatctatttttctcatatatttttaaaacaatttacatatacatatataataaattatatctcatactaaaacttaattctataagctaattaaaactctcctatctcattctcattcacaatatttaaaaaaataaataagcttaaaatattacaatatatacatatacaatacttagaatgtatatat

SEQ ID NO: 281524 - DNA, 512 bp, Cannabis indica
gagttctggttctggtccgggtcttggttcgggttaaggtccaattcccagatttagacaccgactatgggtcgggtccaagcctcgagccttgggtcctgtccagagtccaaatctagatcctaatctagttctactgtctaaggtcctggttcgggtctcaggtctaggtttgggtcttggttcttgagtcatgggtttggatccccaattcaggtcagggtgctaggtctcggtctgggttagcgtcccacccgagtgcaggttccggtccttgttcggtaccagtccttctctcgagtcatggcctggtctgggtttgggtcacgatttggttcttaggtcccaggtccaagtatcgggtcctggtcccgttcccagttcccaatcgcggtgctagtctgggttctagtcctagtccaagttcaggtctcggtttttgtccaggtctgggtcccagtcctaatcttggttcgggtctgagtcccggtttcaagtcagagttttggtat

SEQ ID NO: 281525 - DNA, 580 bp, Cannabis indica
ttttttttaaaaaagtaaatttaatagttattttattttactttttagtacacttaattagtaatttcttattatttttcatattcttctaaagatattttttttagtatgttgctttcaaaaaaatatttattttaataagcttattgaggaccctttttaaaatttattttctaaaaattatattttatgtctttcttagatttattttctttataataaaatcagtttttgagcaatacaattttctggtacataaaaaaaatctaataagtacaataattcataataaaaaataaattaatatgtatacatcaacgtatatttaaataagtacataatcaagtaactcatattaaaataaatgagtaatttgcagtataaatatctaagtttaactttcgattgtagataaatatttaagtttaatttttgacagtaataatacctaagctaaaattctgaaacttccctaggtacctagtcattgagtgttaagtttatgcccacgtgacagaccttaattaatctagatcattaaattttattttttaattaaaaattaatttaaatgtaccaa

SEQ ID NO: 281526 - DNA, 703 bp, Cannabis indica
tcaacatgtgatttctaggtttacgggctgttaggtttgcatgtgcttagggttcgaattttagagtttatttgagttgattttagttcctagcagctggtattattgattggtttaagttttatgcaactttgagctttgagttcaaagctttgagctttaatggcaacttgggtgttgatggtttgttctgtgatttgttggttggaaaatgttgtgtatacccttattaggtactctggaaggtttcattgcatttggtggggaattgagcaacaaatggagggttttgggaactctggtgcaaaccggctagccggtttgcagtgccacaaaaaccggctagccagttttggcagggttccccgagcctttcattttctcaattttcgtctttgcagtgcctcggttgggtgtttccccatttccagagttagaataacccattgagagtataacagaacctagggttttggttttgggtttcccgggattagggttaaatcatgtaacttacccggtttcaaaatgtgaatagggcatccatctagcacaagatttccgttcaggtcggccagcacacttgaattcggaaataaggtaagaactgaatataacgtgtgatataaatatctgggtgtatgtatatgtatgatatatatgcatgctgtgtgtatcattgtatatgtttgggtgatatcat

SEQ ID NO: 281527 - DNA, 780 bp, Cannabis indica
tcctaagctgatctactgacttaactagtaaaaagttatatttatttctgatagatattcaattagagcacttcttatttccacccactaatatatacttatctcaacaccttgtaaatttctacttattaacacattccttccatcttgataatctctggaacgactattgattatgcatcctaatatgaatctttctagcgtactttgtcctcactcgtgtgctcttcgagataacttttcgaaagatttcccaccttgagattaccccaagttaagcatgcttaactccaaggtaagctcatggtgggttatcagaaagtagatgcttctttgtcgtccctacttgtatttcttgctttcattctattgttaataaaattcaatttccatcattcccttcattaacctcttgaaattcctcataagttttgttcacttaaacttgaggaattcccccttattgtcaacttaaatcttgttcatctccacttattttaacttgcatcaatatctcttgaattgacacaacttttaaattttccaatcatttacggttaaccaccattataaagtaaatcgattaaacctatacagtagaggcaacactcctcataccaggtacccacaactaaactagaaatacccatttctcgaattctcaactaataatatttaatcaaagatcattccgtgatcttgaaatttcttttctgtgtttggtagaaatcataataatcttttcaaacacatcaaaaaatatacatacctcaagtatat

SEQ ID NO: 281528 - DNA, 515 bp, Cannabis indica
tcatttaggttaactaccattataaagtaaattgattaaacctatacagtagaggcaacactgctcataccaggtacccacaactaaactggaaatacccatttcccgaattctcaactaataatatttaatcaaagatcattctatgatcatgaagcttcttttttgtgtttggtagaaatcataataatcttttcaaacacatctagaaatatacatacctcaagtatattctttattttattgacaacccttggtacaaactaccataccaatttatagtgagtctcctattgatgatgctgattcatcaacatctgagactctcatgttcttttccatcattaccactaaggtttcactccctagttcatacgataccactgcttccttgcaatcatcactatcttcatacttggttaacaactttaaaacttattttacactcaattatataactctttgtttaataaacaacctactttgtgatccaatattcactaatcagtcaaata

SEQ ID NO: 281529 - DNA, 1076 bp, Cannabis indica
tttcttgccaactttgctcaaatttcccagagagaaaaattctcagacccagaaaaacacctttaaacactttgcagttttctccagttcttcttcgtttgttactgttagtccttcttgtcttcattcgattcacagcaggacccccagtctcaacacttcattgtaagttctttgcaccctttgcttcattattaatatgcatggcatgctgttacttatctgtttgttcttttctgggtttgcattcgaagtttctgggaatgcaagtgtttaaatccttcatataatcggtttgagtttactgctctagtgataggattactgttgtcacgcatttgttgttattttttgtagaagaccatacgttcttcgtataatggtcgcttagggcataggatagactgttttctttctattttctgccttttctttttctttagtgcgcaatgccgtcttctgtgaatttattgcacccgactcttgtccagggaatcctcctagggtttcctgtatgacaggtgtccggagggggcctctttccagcggttaggggacccccattccctttttcttggtttagggtttggtatggggcctaactgctggaatcttaactctttttacagaatcgaaaaatgtctgcttctggctcaaaatcatcgaagaagagcggtaagcgcctggctaccctcgaggaggtctccctgggtcctgttgcccaggaggggtacaagtctcgggcgaccggatgggaggcggccgagcttcactccactctaacctgtccccatcagttggagaacatcgtggaggtagctggaatcaagccttccacatcagggacctaccatcggccacctcgcgacgcggagacgcccaatcacaattacggcggctttggggcctggagccagacgcatttgatggctggggccatgcttcctcttcaagattattttgttaatttcttagtttttgtcggccttgcgccataccaacttattccccaagcataccgcctgctttcaggcttatttattttttattccgcccggggatggggctctccccgc

SEQ ID NO: 281530 - DNA, 561 bp, Cannabis indica
aaaccagctacgagaaccttaaatcaacctaaaatgatcataaaaaccaaaccccaagtatttctaacccttaacagccaccatttaacaaaatcacatactcaaccaaccataaaattcaaaaactaaaggagggtgctactagggcttaccttggcttcaagaacccttgaatttctactgaatttccagaaaaacagctaaagatcaaatggtttctccttggtttggtgctgctcgaagagaaagggagaaggagaaaaggtttcttttgatttttttcctcaatttttcgatattttccctaaaataaaactaaggttaattcaattaaccttgctgaatattttagttgctaggtgttacatgtctaggcagccacataactctccatttaacaaaaagaccaaaatgccccttaacctacaacttaagcatttttaagactaggggtgaaatggtcaaaaaccataaccccacacaaccccggtattttatttttttccaatatgtttcccactacgaaataaggctctaaacttacccatgtgatcaaactag

SEQ ID NO: 281531 - DNA, 521 bp, Cannabis indica
cgggacaatttgactctgtgtgggtcatagtggacaggtttacaaagtctactcactttttacctgttcggacgaatttctccatcgatcagtatgctgagttatatgttagagaaattgttcgtctgcatggtgtcccaaagtccattgtgtcggatagagatccgaagtttacatcaagattctggaaaagtctgcatcgagctatgggaactcagttaaagttcagcacaacttttcatcctcagacggatgggcaatccgagaggaccattcagattttagaggacatgctacgggcatgtgtgcttgactttgagggatcatgggtaaagtaccttcccctgatcgagttttcttataataacagctatcaggcaacaatcgggatggccccttatgaacttttatatggaagaaaatgtagatcacccattcactgggatgaagtgggtgaaagaaagttcttgggtcccaaagctgtcaaaaaaacaagtgaggcagttgacaaaattagagcg

SEQ ID NO: 281532 - DNA, 853 bp, Cannabis indica
cccagccggagtactttggtggagtcgaggtcgcacactgatatctcctcgacatcctccaatggttctacaattttttcagaccccactcggggatccaactcatcttcttcagccatttctggctcaatggtttcccggaccatcagtacgggcaggtgggttgcaacattgtaacattgccttgcctccccctgatttcctctcaccgttcctattccagcttcctgggtagggaactttaagcacaggtgtcgtatagacgtgactgcgtcaaaatctaccagggccagtcggccaaggatcgcgttgtaagcagtcgggcagtctaccaccacaaaagtgcagtatttgaatgtgctttggggggtgtccgagcacaaggtgacaggaagtctcactttccccatcgggatgagtgttgttccgttaaaccctgtgagttgggaaccactgggtgagaggtctcggtccgtcaggcctattgcagtgaaggcctccttaaaaagtagattcacggagcttccgttgtcaatcaagactctggccaccaccttattggcgatgggggtctctatgaccaaaggatcatggtggggaaaacgcaccgtcttggcgtcttcttccgtgaacgtgatgggttgatccatcagtcggggcctttgagctgggagctgagtaacctcccaaacctcattgtgcttcacggcccccgcataccgcttcaattctttgcgggtagttcctccaatatggggtcctcctgagatcatggccactctcccgttgggtctgggtggcagaccggggatatgctgagtatctccggtaggagcaactggagccaatactc

SEQ ID NO: 281533 - DNA, 583 bp, Cannabis indica
aggatcatctagcagctttttctcacccacaatttcatcaatcaaatcaatgaagaaacagttatcacttgcctttgggtatgtcatagcctttagcacattaaagaccacttcttctccttggactctcagctttaattcacccttctgaacatcgatcaaggcttggccagttgccaagaatggtctcccaagaatgattgggacattgctatcttcttccatatccagaacaatgaaatcagctggaaagatgaacttgtcaactttaactaacacatcctcaatgactcctctaggatgagctagtgatcgatccgccaattggagagttaccgtggttggctttgcttcacccagctgcaatcttttaaacactgacagaggcatcaagttaatgctggctcccaagtcacatagtgcatttattccttcaattctcccgatagtacaaggaatagtgaaactccctggatctctgagtttgggagggagtttcttctgtagaatggcgctgcactcttcagttagagccactgtctcataatcctccatctttctcttctttgacaaaatttccttc

SEQ ID NO: 281534 - DNA, 502 bp, Cannabis indica
tccacgaacctacggtagtacccagctaaacccaagaagcttctgatctctgtcactgtctttggtctcggcatcataaccacccagaaagtacagaaaagaaaatcaccattaaagcccaagctttgagttctaaactcaaacttgataaaacctagataacatgcatccaaactagctcaaatctacttaatcaagcataaaataacctctaaaaataacaccaatcatctacagcaagcaattaacagattgaacacatttctttgaaaatcatagcttttgcatagaaaattcataactcaagcaacctaactatcatgcattaataatagctcaaatatcctcaacttaacatgcttaaatctcagaattaaccacaaactcacagcagcaacaacatcaaataatcatgcatgcattacaccaaactttcttacaactcaagaaaacgcaaagaggagttactagagatcaaaccttgacttggattacacaaaga

SEQ ID NO: 281535 - DNA, 602 bp, Cannabis indica
aaattttaaaatgaaaattaaaattataaaatatagcttaagaaattataactaaggttataaactggtaaaggttgtgttggaggctagggtttttgctctagagagagaaatttgttagattaaattttggtaagattatttagctaaaattaatcaattataattaatattttctaatcagaatattctatcaaatattagaatattctgttaacattttgacagaaaaataaataataacattaaaccaagaattctgttacatagccacattttatataaaaaaagaaaatatttttaaaaaagtaactcaataatttctcataaaccaagaattcatttatatagccacattttatatattcagattccgatgtggaggcaaacaattataacctgatcgagccaaaaaaataaatagaaaaattctttagcaatatatatataatatataaatagtagtaaattcttatttagaataaaatccaactaaataacataagtatatttagaaaagccaatagtagatgtaaaaagtaaaaacccaattgatttttttttagatttaatgagatttattttatttattttatatatat

SEQ ID NO: 281536 - DNA, 564 bp, Cannabis indica
gcttttcaaaccttaaaaacgcatttggggcaacctccgatcttatcaaagccaatgaccggtgaagtcttgtccatctatttagcagtatcaaaatatgcgattagttcagtactaatacgcgaggatcaaggacgacaatacccggtgtattatgtcagtaagcgattactggatgacgagacacgctacccccaaatagaaaagttggcgtttgccttgataacatcgtcaaggaaattgcgaccttatttccaggctcacagtatctaggttttgataaactaccccttaagtcaaattttggcaaaactagaagcatcggggaggttattgaaatgggcgatggagttgagtcaattcgacatcaagtataaaccaagaactgcgatcaaggggcaagccctagcagattttatccttgaattccccagcaccgaggtagcactcatagaagacaaaagtgacattgctatagcgaaaagagagctgtggacattgtacgtcgacggagcctcaaataacgagggctctagtagcggaatcttattaatcagtcccaac

SEQ ID NO: 281537 - DNA, 573 bp, Cannabis indica
actattctaaggccttattgtaattagacgtgtgagagcaacaagtaggtctacgccacgtagatataaatagatgtgtgagcgcaacacatagatctacgccacgtagacataaacaggcatgtgagtgtgacatgcaggtttgtgacacacagacatatatggatgtcattactgtttaaatagtatgatgagcatattattgatatgggcttggctcacgggtgctctactatgcaggaaagggtaagtctattgctgatcagccatgagtgcaggagctggacgaggaatgtacatgttcgggccatactagaccaagcgggttggggtctaccagtgatgtattttgtactctgttttgccgcatagatcggctaaaagaaacgaacttgttataatattttgttaagtactttcgggatcccgacacttgtatcttttattttataaagtgaaaaaatagtacaagtttattttcactctgtttgtaattaaagtttaatttctgcgctaattttactggtaatccctattaggggattagggttttataagtatattgggtagcgt

SEQ ID NO: 281538 - DNA, 265 bp, Cannabis indica
aaggaagaagaagagcaaggagtggcggctagggtttagaaagagaaggctcaggtttttcttagaaggaaagtgtgaacgttaagtctaaatttcctgaagccttcactatctatttatagcattccactagggttaggtttgaatcatttggcattaaaataatgaaaatataagatgataaaccctataaaaggggccggcctaggcaatatggatttgggcctcactttttgcaattttgtagttttatcgtttctgcatc

SEQ ID NO: 281539 - DNA, 720 bp, Cannabis indica
taggtagaattcttacagtatttgttccaaaatacttgttttccaaactgaattctattaaagacttttaaaagtctaaccctcaaattggtaactcactaagtacttcacaactttataggatgggacatatagtacttatcacatttgttcacacattgatttgttcttacctattgaacctaacactagtaaattactagtattaagataggttaccctcaattgtgaaccggtttagggagttttagtcccatccctttagaagtcttttccactaaatctctagttagtggcttcgtaaacggatccgccaagttttcacttgatctcacataggatattgagatgactcctctttgaatcaactcacttacatatccatgtcttagactaatatgtctagacttcccattatatactccactatatgctctagccaatgttgcttggctatcacaatgtatcgatattgtagatacatcctctttaataattggaatctcaattaagagatctcttaaccattcggcctctttcccagtggcagctagagctataaactccgcttccattgtggaatgagaaatgcaagtttgtttcttggacccccaagaaaccgcccctccacctagggtaaatacccaaccagttgtggacaaattatccccaaggttggctatccaacttgcatcagtatatccttctaaaattgaagga

SEQ ID NO: 281540 - DNA, 669 bp, Cannabis indica
gggtcgaggtccaagttggggtcccgagggcaagtttttgtctgggtcaggatctcggtctaaatctaggtccaacatttcgatcccagtctgggtcttggtcctagtcaaggttcgtatctggatccctatctaggtccaagtttgtgtttgggatggggtgccagatttaggtccaggtccgggtctcagttccgttcagggtacacgaccgtgcctggcccgagttccagtctctattttgggtctgaggctaggcctgtgttcggttctaggtcttgggcagggtcgtggtcacggtcttagtcctgtttgagggtcgtggttcggcgattcttgttcttcttctaattttgggtcccaggtctaggtctgggttcgggtgtggttcttcatctggattctgggcctagtttgagccccagatctagacaccgactactagtctgttccacgccctgttacccgaatctcgagtcaagatcaggatcattgtcacgggtctcggtctggttctggttcaggtcccagggtcccatttttgagttttgagttcggggatcggacactgggggtgcggttctagggtcttgccttgggttctttccctagtctagttccatatttgggtctgagttcaagttctggttcgggtccgagtctaatttt

SEQ ID NO: 281541 - DNA, 772 bp, Cannabis indica
tcatcgacaaacactataacgcagttatcgaggaaatccttgaataccctattcataagatccataaaggcagcaggagcattagtcaatccgaatgacattaccagaactcatagtgcccatatctggttttaaaagcagtcttcgatatgtccttctctcgaattctaatttgttgataaccagatcgtaaatcaatccttgaaaactctgtctttccctgaagctgatcaaacagatcgccgattcagggcaacgggtacttgttcttatacattaatttgtttagttcctgataattaatacatattctgagggaaccatctttcttcttcataaacagaaccggagctccccagggcgatgcattgggttagataaacccaatgtcaaagcatcccctgaagttgtaacttaaactccttgagtttcgctggagccatcctatatggaaactttagaaacaagttcgactccagatgccagatcaattacaaaatcaatctctcgctgtggcggcaatcccggtaactcctcgggacgccgagaaaatcttttaccactctaacttccccaggcccaaatgtttcaggtctgctggagtcaaaaaccaccgctagaaatcctacacagccattgcatagtaaatccctagcccttaatacagaaataaccgggatccgagacccctgaactgacccaacataaacaaatggatcttcacctattggctgaaaaatcaccattttacgcctacaatctatactggccg

SEQ ID NO: 281542 - DNA, 517 bp, Cannabis indica
gatgtaatcaaataaggaacattaggagatactcaagaaagatttatgaaagtgacctatatgttagatattaaggaactgtatattagttatccttatatctacaccaactcattaagaatttgagatggtggttactctgggggtggaggagttattctagaagagtgtaaaaacccttctataataattcaagctccaccagagaagatatatataactttgtaaattcgaaattaccagaaagttattctactgaagaaaattctacactgtattatctcagttccaaattttaaagtatgagagatatgtcttctgtttgttcagatgtacttaataagcagtaaggatttcagtatcccttgatgagtaaagcatatagttaaggatgtttcataatgttttatgaacctggttccagaaatttgggtggagtcaaatatactacacttgatctgaagatcaagacaacagattgattggaatgcacaacttgttttatgttagtgcaagt

SEQ ID NO: 281543 - DNA, 510 bp, Cannabis indica
aaactgtaagtttctctaagactaggtcaacaacatagcagtctagtatttgaagtgtaaaatacttgctagagatttaagcaatcaaatcaagataccataaaatgtaatgaggattagaaatcttgactcaagtcattcgaatagactatgcaagaattcttctatcttattctcataattctgataagttatttctatccatgtgaatggttagatttgttttatcagaggtgttcttaagttcctatcacaaatatcaaccaaacgaagatgggtaaagaattttaatattctcccactcaaccaaggtaatgtgatacattatcaaagaactttaatggtatcaataactattacaacagtaaatctaaactggaacatataatcaagatcaaggatttattctgataatagctaatttattatattgcttccatgtttaagttatgtgtcacaaagaatactgtggaataaagtcaacccctaagtttatagagattatgatcc

SEQ ID NO: 281544 - DNA, 520 bp, Cannabis indica
cctgaaataaaactcccgaaattcttttttttttcttctaattttcctgcgtttctaaagtaatcttttggttacttataatattgataagaaacctaacttttttcataaaaagtatcactttaatattatataattttagatacattttagttacatctaaaatttatatatatacatgagttaagattaatgtacatatggttaagattaatgttgacggggctatttttcaagaacaaaacaagtttggctttgggtgcgtcgcccgtgatacgaatggaatgcttcttgaagccaattctgcttctcggtttggagtggttaaaccagaaattgccgagacaattggcattaaggaggccttgagttggatagaaagaaagcaatggtccaatgtcgtaattgaaactgatgctctggtggtggtacaagctattaatagctcaattttaatgccttctcagtttggattacttgttggggattgtcgggctttaatttcgtctttgaataatgt

SEQ ID NO: 281545 - DNA, 498 bp, Cannabis indica
gagcagtgtccagggatttcaaaaagcaatttcaggctactagggatagggaacctgaagcagcctcgctaaccaatataaaacagcagcctagcgagacacttaagacttaagtcgtttaagcatggctgcgaccagggttagaaatttggatgatagcacgcaacttacagcccttcaggcggggatctctactgatccattaaccgcatggggtgagttgtgggatgacttacaaggacgtcccgtgagaagcatcactgagttcaacgaaaggctcaagtgtttatttggaaagaagaagcccgaaaggaaatgaatctatagaaaaccagctcgggaggcaaacccagcaatattttaataggaacagtttccacgagaattgataacttgggggcttctggttcgaagagaaaggacagagttaaggaaccgtcaaatgataaaaagaaacaaaaaaagcatgaaaaacatgtgtcagtgtatactatttat

SEQ ID NO: 281546 - DNA, 931 bp, Cannabis indica
tccttaaattatttaaaaactgatactaatagcaatatgatatagggtgctaagcactactgatatcttctagtatttatatatattaaataaaataataaggccaactaatcaagtaataagcatattctataatccattttattgtcatcaaaaaattgagctgattatactcttttttttttttttttttttttttgttttttgtattagaaattttttatttctattttccagaatacaatacagttacactttcacaagtgtttaataaccattttctatcaatggattcaaactgtatgtttaagtatggaatatgagtttagtattctgtgaccagaatccacttgcactattctaagaactctttgatgtaactaaacctaagtcatcaaaagatacaaccacatattttataaatctatggcatttgtatcttgttcatagtggttttgacaagatcattctctgcaaagagttaatatgcctatatccactgaaagtaagttcatctcattcgcagatggatgtacattcaggggtggatatgagttttcgttgtattcttaaaacgatcactctagattttaccttatgcaaaagaaatttgaaatgtttgaaaaatttcatgaatttctagcaatggtgaaaaaccattaaggtaagtggttaaagatcttgcgaactgataggggtggagaaatagttagtagatatgcagttcaaagatcattaagttgatttttgaattatatccaaacttacctccccagaaattcgatttgcatattgatgattagtataaggtctatgattagttactagtcgttgcctaagtccttctagggatataccctagtgataggaaaatttcagaatgatggaatggttgtgtacttagtataaaccattactagattcatggatg

SEQ ID NO: 281547 - DNA, 505 bp, Cannabis indica
caattcttaatatttgttaatctctattttggttttggttttggtttagtcttttattatcctatattgtttaataatatctcttatttctttttcttttttagaccacaaattatatgaagagtgtttttttttttcacagatttgtcaattttttttcaaaatctttattcttaatgaggatttttcaatttttaatcttttttatctctattttggttttagttttggtttagccttttattacctaatattttttttgataagattatatttctttcttttttaggtcaatatatgatgaggcaaattatatttttaattaatctctattttggttttggtttagtcttttattatcctatattgtttgataatgttaattctatttttgacatattttattgacaaaaatattttattatttcctattaatttcgggtggagtgttttaatatggtttcctattttgtgtattcaaacttgaaaggaaagttgtctagct

SEQ ID NO: 281548 - DNA, 553 bp, Cannabis indica
cctggagtcgcagtccggtcgggaatatcgttgccacccctgctccagatccattttcattggaggctccgtccacaaatactctccatgtggggatcgatggtgttggcgcatttgcggttgcctcggcttcattgcattcggtaatgaagtctgccaaggcttggccttttatggagattcggggaacgtagtgtaagtcgaactgacttaactccattgcccacttgaggagccttccggatgcttctggtttttggaggacttgccggagcgggtggttggtcagtaccttgatcgggtgtgcttggaaatacggccttaattttctcgaggccatcaggaggcagaaaaccagtttctcgatgatggggtaccttgtttccgctcctatcatgcgcttgctaacatagtacacgggatgttgagttttctcttcttcccggactagggcagcgctgaccgcgtgctcggagacagccaaatatagaaataggtcctctccgagaataggttttgataggatagtgttaggttataattaacctatatt

SEQ ID NO: 281549 - DNA, 689 bp, Cannabis indica
tcattaggttagggttagaaaaagaacaccagaaatatagaggttcgccctaaatcaggggtacgtcctctgatgagctcgccttgaagatcgacctcagatctttcactatgaagcatgaatattacaacaggtaagaaatccaagtcacagatcgactggtatttctaggtttttctctcttgtgttttctgtgtttatttctctcttgtttttctggtttctcacactaacacttttctgtttcttgtgcatgtacttgaaaaacatctggagctgaagaactttctcagatctggtaacctagggctttttgcatctggtatatcttcatttcttctcttctgttccttttatagttgtagttctagggttgatcacagaactaggagttagttacaacttcggttgtaactaacaactagttcttgatccactagaggcgaagccacctaggatctgatttctgttgtattctgtttgcttttatttgtaattttcacttcatctgtaaaactgtaataataaaggttacagtgaggtctaattttaacacatatgaatgaggagttaatgaaaccttatcgcaggaatctttcacaaaattatcaactaatatcatcaactgatcataacgaacggtttgttattagaccgtggtatttgattcgtcaaatacatcattattg

SEQ ID NO: 281550 - DNA, 524 bp, Cannabis indica
ttcttctcacgacgttgttcacgacgtgtcgcgactttatttacgactttaattaatcttctcttatttttatgcagcacataaatgtcatatcacacttgatgaagaggagatgccttcattttccagagttgtaccctcagtcaggtgtgattttggacacaacacttccacaattcctcataggcatttggggctgcgagactggtgacagaagtacgtttgaatggccagatccagtgaaccagtactatctgggtatggagagccgttacatgccatgttggaaggatcagaacttcatatacttcgtcctgcacttccattatcaaaaacattgggttgctgttgaggtagatgttgatatgtggcagattcgggtgtacgataatgatttatcgtgcaccaccaacgcagagtttgatgccatcatgctaccttggactcagctgtttccacatctgttgaggtcaactggctattacgatcaagtgaacaactacattctgaatgtggacttaggg

SEQ ID NO: 281551 - DNA, 725 bp, Cannabis indica
ggtggtaatattagcaggaggggaagggaaagtgccatcaacatatttataaagatcttcacccaaaagttgtgcctggatttgagttttccaagcaagatagttggtagatgtgagtttgatggtatttggaaggtgaagaagaatgaaaggttgggtgggatcttgagcattatttaattgattggtggccatagtgataaatggaaacacgaagggggaaaaaattaaagatcaaaggctattgataccatgtaaatgttgaaagcaattgatattattaattgataaagagcctttatataggcatgtacatttacaagaaggaatactgatatatactacaatcaaggaaaagattgactaggttattaacaaactaataacattaaaagagagtgaacagaggaatatacaaaacaactctaacgaatataatggtacaaattgttatagtttgactgataatagctggcagtattatccttctgcaccgtcaaccttggagaatacgaatcaaaaaatataataacatttatactaaaggatattaaaatgaaataactcattaaatgcagagttgaaagagtatatctataaccctgattgtgaagtcttaagcgagataaggatgtgcaaactatttcgtgcattgacgagaaaccgtttcacgtcagaagacacaatcataaggatgacatcagtaatacaaagcgaggcaccaa

SEQ ID NO: 281552 - DNA, 774 bp, Cannabis indica
aaaatttacttggtaaattctacatctgcttattggaagatcggttatataggcccatggtccccatactagttgagacaatactgcttgtaagacttagtcaattgattttaattaatcaattataattctaaaattagactatgtcttatttatgaattttcactaagctatggcctaattgtgaagaaaaaagattctagaatttatttgttaattaagagactttattaaagtctgattactaaatatattaaatgaaaattttatttgataattaattttaattattaaatgaatagttttggcatttaagtggttaaattgaaaaatatggcatttgtgaaagaataggataaatagttgaaaaatggcaaaattgcaagtggtggagccacatcctatggtcggccactaatgcttgatttttaccattttttttatcaattttttaatgaccaaataattcaaacctaaacctagaaggattcctataaataaatagtgatggactcaaaactgacagcctaaagtttttttttttggatgaataagatcaattgtattgcttaaccaaacatttacaaacaccaattcttactcaactatgtatcattctatacatatatagtcctcatactatccccccactattaattacaattctttacgattttaactaaccaagtcttatccccaacttgacattttgctaggaagtgttcccattttgctaaattacactagccttcagtcaaaaatttgagccttctc

SEQ ID NO: 281553 - DNA, 531 bp, Cannabis indica
aataaatctgttaaatgatatggtagattttgattatgattggcattgggatccatcacttgagggttggagtcaccaatacccacttaattgcccaaactcaccccaaccaactgaagaagaggagaatctactatcacttacaggagagattaattgcttgaaggacatggtaagatccttatgtgataatttaatggctcatgattcagaatgcaataactccaataatgaaagttatgagaattgtttgagcaatgaagaagtgttattagttgaatacaaggaagaggatgagcctacaattaaagatcaagatccttttgaagtggtattaaatcaaaatttgactaaatcattttattacttgataaataatgaatgtcgtgtagtgaatgaaatcatgaaagagaatgaattcatccatgatcatgaaatcattcaatatgaaatcacaagcaagggtatggatatccaagtggagagtgagcaacaagaagaagggttgttagatgaaagtgtaaatactgt

SEQ ID NO: 281554 - DNA, 494 bp, Cannabis indica
cattaccaacccctaacaagtccaagcagtgcttgaacttagttaagggtagcaccttagtaccgatatcagaaagattctcttcagtgggaactttctctatctgtacaaccttctgtgtcactaaagtggtacttgatttccacatgtttggttctgtcgtgaaagacaggattcttacacaagtggatacaactctggctatctgagtagattataggttcttcatctaataatttcagcttttctagtaatcccttaagcaaaatggcttctttaatagcctctgtaacagctacatactcagattctgttgtagataatgctacaacaggctgcagttgtactttccagcttatacagtttccccatagtgtaaagaaataggcagaggtagattttctactatctctgtctcctgcatagtctgcatcactgtacccagtgatcattctgctattgtcccttctcttgtagtttaatcccacttctgt

SEQ ID NO: 281555 - DNA, 559 bp, Cannabis indica
gtcccgcacagacttggggggcaaatgttatcccaaaattggcactctgacgtggaatcacaagaatggtaacacgtggcatcaacttagagcacctggtcagatcaacatgccgaggaggatgcctcgctggcatgtccatgatggaatactcaacaagccgtgcagaatgagcaacacttagtaaattcagccaagcacttcgtgagtcaccagctcaatccctataactcagggataaacttgtgtgaatatggcatacacacgattccactatcagtgtatacggcctcaatcccacgatcctagcattcagcaatccctataactcagggatcaacttgtgattatgcgctttgtaacgagagaggaaactcttactcctcaagtttcctgccctgtatatagggaggaatgttcactggtcaaggagaggagaaatcatacgccgaaacgctataagctaaggctatctaagaattatatatttagagatactattgtaagagctataagaaaaggaatcttattccttattcttaagtcaatacaactaacg

SEQ ID NO: 281556 - DNA, 342 bp, Cannabis indica
tgaaaactagcctcacatttgtctgaccatataaactgctgattctgtttggtgagatcggttaagggtgttgagattttagaaaacccttctacaaaccgacgataataaccagctagacccaagaaacttctgacttctgtcactgtttttgatcttggccaatccctgacagattctatctttcctggatccaccttgatcccatccttactaacaatatgccctaaaaaggacacctgggacaaccaaaattcacactttttgaacttggcataaagcttgtgttctcgaagtcgttgcagaaccattccaagatgtagctgttggaaattattttac

SEQ ID NO: 281557 - DNA, 245 bp, Cannabis indica
ttttcacccagaaagatctgaatataaggcagagaaggtggttggagttggttaaggactacgattgtgaaatactgtatcaccccgggaaagctaatgttttggtcaatgctttaaggtcctgggcaggtttgtaccacggttttgatagcccctcaactagcctctgaaatggttagtgcagggattgagtttgtggttgggaaattgcataatttgacacttcaatctgatctgttggagag

SEQ ID NO: 281558 - DNA, 653 bp, Cannabis indica
ttgttttatggttgttttacaaacacctacaaccagtttttagaaacattcataaacgtatataaattaattgagcatgtttccaactctcttgtccaacgtttttatcccattaaataccaattaaagtgttggtaacagtcatgtgatgaaaggatttgatttttacatgtgatcctcaaaacactataaatagaggtcttgggttcactttggaaaaaaaagagaacaagtttctatcaagagagcacattgctagaaacactataggcttgataaatccagaaagctatttcgattcttttcttttccctaagtgctcgtggtagggggaaataagcttttggacaaaggtgtaagaccttgttaaagttttgtgattcccctattatacacttgtggtgtaagtggcgttgagatttctctcacatctcttttatatatatgctatttatatattttgttttatgtgtagctttttagtttgagttgtaatccctctcttcatctctattctctattttatgtgtatattttgtttagtgttgtaacattatttaatctttgattttgtcctttgtactatttgtcatttgagttgtaattgttggaatttattttaccaggatcttagatctactcacaagtatgtt

SEQ ID NO: 281559 - DNA, 471 bp, Cannabis indica
acaaatttaccgttctacccttcaatgtattttatctctattcagccaagctcgaaggaaatcatcgtttcacttctaaatacttatgaaagctatagattctatatctatgatcagtgctcccactcaattgaactaccatgttcccaagatgtaagtattttctagaacaaaaagttagcttccatgaacaactctaagaacataaataatacaactaagttaaacctaaccatatcaggatttagatccatagacctaaggtcaaccgttgatattgacttagaaagatataacagtaagtttatgataccttatctaggataaatatcattcccttctaatgtatactccatacattcgatactggtaaactttgccaatgccccggaaaggacaaaacacttatcaatatcattccctcctaatgtatcgctgattatcatgctagtctaaatctagtgaactgac

SEQ ID NO: 281560 - DNA, 620 bp, Cannabis indica
atttagtactttgtgttttatctaaatacaagttcggtacactgtgttttaatatacgtatttggtaccttgtattttaaattatacatatttggtaccctaaacttaaatttttatcaatacaatcaaattgtcacaaaatttatgaatactaaattcaaatttcattatttgattatatattactgagaatagtttggttaaattaataaaattgtattgattaaattttattttgagtaccaaatatgtacaattgaaaaatataaagtactaaataaatactattagaaaacataaagtaacaaaatatgtcgttactaatagaaaacacgaaggtactaaatgagtattatttctttttttcattttaataatatgttaaattttattttttttccactaatgtatattattttttttttcaattttatgttttaattatttttttaacttcacttttttttttgatgaaattttaacttcacttttacattgttcatttctcctactcatatgattcctttctacaattttaaacattaatcgtatatataatgtgtaacggcctaatactaaggcacgctacagtaattttttcaattacagtgttatctttg

SEQ ID NO: 281561 - DNA, 511 bp, Cannabis indica
ggttgaacaacaggatttgtggccactttaaaaaatgatagttctctgatagcatctcaacataccggtccaatttaacctttgataatgaactatgacagtcatattgtttttaactcaacaaaagacattcataatcacaaataccaaagtattaaatcgacatggtcaataagtctagtagtgtggtaaggaattatgttcaacatgtgatcaatttaaaataacataatatccttatcagtcctcaatttcactgataccgtgatgcttaataaataagccagtgaaattaaacatacaccacttaaaataagtaagtgtcactaaacttgcttaaagaattaagccaacaacatatcattgtcaataagcaaataaatttaaaagacaatgatcacaacaatatgaaccacatgctttcaattcaatcattctcgagaatataacaaaacataattgaaaacatatccattcaataataaaaaatattgaaacataaaatgtagtt

SEQ ID NO: 281562 - DNA, 579 bp, Cannabis indica
attaaaaaaaatcttaataattgcttaagaattaacaattattcataaacattgaatttgaattcaatatgtttatgtggtattaacttttgcagagatgaatatatcatagattttgtatcaataataaaacataaacacatacaaacatgataaacatataaatataattggtattggcatacacaagataaaaaaaaaacatgaagctcaattcataaatgcaattcatatctaaaagagaaaactttattaatattctaaaaaaaatgaattgtctgcataaatatgaaatagggaataaaatcccaaacctataattgaaatcaaattgttcataaaatctaaaaggaatttgttgagttttaatgatatatatcttcatggatatgatactgagtctgctactgagggtgacatgaaatatatgaacattactaaatgtaatgcaggaaaaagatacatactagaaaaactaccaatgctccccactggactacattatacatatataagtgtaattgagtcacatgtggtagttaaagagaaaagtaaagatctctcaatattaaatacttg

SEQ ID NO: 281563 - DNA, 530 bp, Cannabis indica
tttagaaaaagattgtttaattttttgggttaattatttatatatttttgaaagttaacgggaggatcaaacctatcgttaaatttaacagaatattcttttatttttaaagtatattctgttaaaccaagaaatgccgttagatagacacttttaatatataaagatatatgtgattgtgatagtggagaggaattaatgagggaatctctccttctgccatggactgcccaaagcattaacacccaaagctcacactctacttttacaacaactacgtacagggccggccctgaaaatttatgggcccaagacgaattaaattttggggccctcaaaaatatatcaaaaaaagagtgtcatgggatttgaacccatgaccttgaacattatgtcctccacctcaaacaactaagctataaatatttgttgtttatattacacttaaattttacttaaataaaagcctaataatttttttttttattttgggcccccgaaaagtgtgggccctaggcacgggcctagcc

SEQ ID NO: 281564 - DNA, 829 bp, Cannabis indica
aataatgtatttttaattaatcatttattttaatccatatattttaataatgaaaattatttaatttaaagttggtccaaaaattaattaaaaattaattttcaacttgaatttaattttcaatatttcatttttgaaaatcattatataataatatataaaatttcaaaaattttaaaatataataaaataaatacttgaaaaatatctaatttaagttgttctaaaataacaaaattttcaacttaaattatttttcaaaatttaattaaataacaaattaagttactaaccacttaatttaaaaaatattccattttaagttgatctaaaattaacaaactttcaacttaaaatatattccaagaatctttcaataactaattcctagaattcctcaacttaatttttaaatttcaaaaatattcaaattcaagttgatccaaaattagctacaaataactaattttcaacttaaatatatttattgaaatttttaaataattaagcttcagaagaatctaattagttattcattctttatttaattaaatacagaaaaatacatttagtttatcttgaatttgaatttcattaaactaagtgtgtttttctaaattaatttcaaaatattcaaatgaaaaattaatttcatatatttcaaaattaattatgttgctaatcaattttattaggttaaactagtttaataaacctagtacatttattcaaattaggcaaatgggccttcacagttggggttgttcatgtgaaggagggctgggttcagtatgtcgtacccactgctatggtcccctaactctcacac

SEQ ID NO: 281565 - DNA, 797 bp, Cannabis indica
cctaaacctagagggcattctataaatagaaagtattgggttcaggaaactcatgactttgctcattgtttccttcagagaaaagctatgccaaccctctctctctttttcctctctaaaattttcgaaaatttccttgagtgatagagtagtgcccacacacatcaagtggtacctcaatcatagtatgtaagactgtggaaaatcagcatcaagaaggagagaaagagatccagattcagatcttgataatgctctgctacagaaaggaatcaagggctagagatctaaatggaaggagtcataatattccgttgcacccaatgtaaggttttcttaaactcttatatgtgtatttcattgttttagaattcatattaggatgttaataaaacatacttggtattaaatctagatccttgtaaaatatttccaacaccatcctcttcttctcaagtagaggataatcccacttcctcggttgaacctttacaagttgatacaaccgagagaactaccactcaagttcctgttcagaagatcaccgctcctcgtcgtagtgggagggtttctactaaaccatctcgttatggcttggatggtgaaatcaatatggtcgttggtgacagtattgatgacaacccattaacctataaacaggcaatggcaagtccagaacggaaacgatggtcagccggcatggattcagaaatggattccatgaaaaagaacaaagtctgggaatatgtagatgttgggttttgtgccctaaataaaacccattacaatctgattag

SEQ ID NO: 281566 - DNA, 584 bp, Cannabis indica
aacatggcctcgcacccgtaagaaagtgagaagggtgtttcgccagttgtagatcgaggagttgtattataagaccataggacttgcggtaactcgtctggccaagcccctttgcgatcttctagtttccctttaatggtgtgcttgattattttattaacagcttcagtttgtccattactctgcgggtaagcaactgcggagaatgccttcttgattcccaaatcgtcgcatagttgtcgcatctctttgcagtcaaactgttttccattgtctgagatgagtttgtgcggaatgccaaagcgacaaatgatggaggtatagacaaactcgcgcaattttgttgctgtgatggttgcgagtgctttggcttcggcccacttcgtgaagtaatctactgcgactaccgcatatttgactccacctttccctttgggtaactcgccgattagatcaatcccccatattgcaaagggccatggacttgtgatagaatggaggttacttggaggttggtgggtatatgtggctattcgctgacacctgtcacacttcttcgcaaacgcgagagcatcttgtcgcaa

SEQ ID NO: 281567 - DNA, 535 bp, Cannabis indica
aattcacaataatacgattctttataatattaacgtatccagtcttaacaatattatataccttagctcataattgtaacttaaataactccagatatggaaagctatatcatataccatatatttgtactaaacgaaaccattacatatatgtagggatcacaaccctgacatcatactcatagcaataacatatagtaattatttcaatcatatcatgtctttaccataatgtggcgtatcatagccactccatacacaacctgggcttaactggccctacaataacatgggcacatttagccctaccattgctatggaataaggtatctctatattcaacagcattgtcgctgtatcataccttaccataataatgtcatacacaaatcggacaaatgtagggtagggtatctctacattcaacggccttatcccgtatcataccccaccataataatttcatacacgactcagaaaaatgcagggtagggtatctctacattcaacggccttaccccgtatcataccccac

SEQ ID NO: 281568 - DNA, 652 bp, Cannabis indica
gttaagcaaaaattttacatttagaatattaaaaataaatgcaaaacacaatttcacctatgccaaaattatagcataagagtttattaatttaagttcgacccattcaagattataaaaataatctcttaattacaatccttttatttaaaggaaataccctttgattccaattacaatgatattaaataattaaaataattagggaaaatttggagtgaatttggaattgcagctgaactcagtccatttaattaactgagctgcctacatactttctttgtgaaggatcaagccacttgtagttcagaatacggtattttagaatttggatataaggattccggtagatgaccactttcaggaatcctttgctatttaaacatttaagaaaattactaggtgtaggaccttttatggaattttgagagttgtgttttataccatttttgcggtatcggcgactgcacacttagtcttaacaactaagttgcctacgtatccttttgtaggaatcaagtcaaacgtagttccaattttttaatttttttaagaggtgaatgacctctcttttggaatgccatttaatttgctatggctttgaagtttagtgcactatttaattttttaggtaaaattaccatttttgaga

SEQ ID NO: 281569 - DNA, 550 bp, Cannabis indica
acttgcaccagcaaccattttgttgcattttctacatacaacacgtggcaccaactcacaaagataatcaacccgagccttccacgtggcacagttacaacccacttcgtccaatccaagaacgacacgtggcactcctaaattaactttgtgaatttgcaaaaatacccacatgcaatttgtaataagtttaattgcacattagtacttttacccttctataaatagaagcttaggtttttagaatttagttacagtttgagtttcagacagaaaaatccagagaaaacgctcagagcgctcagtgttagtttaccgctttcttagttaattttcttatgagtttctaagtacccttattattaaggaggacgatgaaacctagtgtacttaattaagtatttatttttattttgattctcagtacaatatatgcctatgattttcgcttcttaaaataattttttcatcttaaatatcacgtatttttgatagttagaaattatttatgcttggttccacattttataaaaaaaataatattctttga

SEQ ID NO: 281570 - DNA, 797 bp, Cannabis indica
cctaaaagggggatgtgcgcctggtcgggtgcccatgcccaggaaggggcattaatgcctttgcatcaatacttcaagaatgtggcggacttcttcggcctttgccccacccatttcactcctaagggcattaaatatctatctgccctcgttgtcctctacgcttcccagaagtggggtatgccttctcctcacgaagttggctggttctttgatttgatgtccaccacgaagcaaggtaggtcggggtacttctatttctctcaatcaggcttgaagtggttgacgggcatggacgactcggccatcagcaagattgggcgttttgctgatgaaactacatggtagatggcacgggcatcactcgcactcagttccagcagattctgacatatcacctgttgggttttatgccataaataaaactcatttcaatataatcagatttacttattaataaagatcaaaaataacatttttacgttgcatggttcacatgatttatttcatgattatatgcatataatgtatgaattctatttaagtccagaacatatgatttgttaatgattatagtgttgtcagcacattggaatataatcttaattatatgttaaaaagtttattccatgatttgtcagttcactagatttagactgacatgataatcagcgataggtattcttacaccttggataagtgttatgtcttttccagggcattggcaaaagttttccaagtatcggatgtatggagtacacatcgaaggaccgatattgaactttgattatatatat

SEQ ID NO: 281571 - DNA, 269 bp, Cannabis indica
aagctgggatagggacggtgagaggaaatcaaggggaggcgaggcaatgctacaacgttgccacccacctacccgtaatgatggtccgagaaactagtgagccagaaatggctgtagaagacaagttggatccccgcgtggggtccgaaaaaatcgtagaaccaatggaggacgtcgaggagatatcagtgtgtgacctagaaggacatgactggcataagtccccacgtcatcacccacgtcctcaaacgtcaacccgaacatgccgc

SEQ ID NO: 281572 - DNA, 602 bp, Cannabis indica
accttctccaattttatcatcaagaggacacaaaccatcaacgtacttaacaactccataatcagaactatctttagaacttgaaatcgaagagtcaaactccataaagggagacgtcaaagctattggtttcttagatttcctcttttcaacaagaggagtttggtcaatgagaattgaatgatcttccacaacttgaatattagaatcaacaaaaacacctgttgtacccatctaagtatatatataaaaacaaataggggaaaaagtataaagtcagtcattataaaacaactgttgagcaactaaacaaaaatggtaaaacaaccatgcctcaacaccaagaccatgaccctccttaatctcaaaatttttcagaagctagaacctggttaccagaattaccaccaaacccacctgaagactatctttttttttcttaaaaaaataattagaaaaaatctaaacattcacaaccattaaacaacaagaaattatcaaacaaacaatattactataatctcaactactttcacacctgactgaacagtagcctcaacatcaatttgagtggctccatcattgaaattaacaaaattctt

SEQ ID NO: 281573 - DNA, 670 bp, Cannabis indica
gaaagaaatttttttctcattcccacatcaacgtcttcttctgtgaggggttcaagggcagtcgtctgagagtgattcgattcggctcaccgacgtcctctgtctcagatttttgttttcatttattcgattccaacatatcatcacaaacttaataaaaatattttttttatggggttagtttaattccaataatattttttttatgtaaatatttaataaacatatataaatataaataaaatttgtaaatgtatttgtatatatttttttaatttcgtattaaattttagtaaacatattatttcagtaatatatcaaaatataaatattaacttttatgtttacatatttagttttatctatttttttagaaaatcaattgaaagtaatcaacatgttaaaattataaacatatatgtttatttgtaaatatttataaattctatagaattatgtaattatattttttttgcacattttgttttttgtaatattatacatttatttgtatataaataaaaattagcctttttaatatccaagaacttatttaatcgaatctacaatatcaatattgattctcacatcaaataatatatatattgtattcttttctgtttataaatattaataattatgtggatgtccaaatcttttatttattacc

SEQ ID NO: 281574 - DNA, 514 bp, Cannabis indica
actatgtgattgttagatttaacgatttgtctaatttcattcaattttactatttcactaattgtttgtgtactaaatcatgctccccagactctgatatataccaaatcatgcttctcgaactttgacatgtactaaatcatgccccctgaactttcatccatgttagacttttttactaaaattggacaaaattccttaaatccaacaatctcaatagttcaaggggtatttttaacgactttaaaagttagggggcatgatttggtacatgttaaagtttagggggcaaaaattctaattagccatttcctttttatctttgattcaattactaccgtccttcctccacgtacacactatagtatcatttggtaacacttttattttctaatttttaaatcacaaaataaaagtaaaattttagtttttaacaaataaaaattcattatgtaaccacttttgtttttaattttaaaaacagaaaacaaaagtgtattctgtaaagttcatt

SEQ ID NO: 281575 - DNA, 690 bp, Cannabis indica
attggatctgtcaacaagttaatcatagcaatttagatcaaataaataataggtttattaaaaaaaattgaataaataatataaataaacaaacaatgtccatgtaacagattgtgaaataaaatattaatataattaaattattattttaaactaaccaactaaattttgaaaatttagggttgttaaaaccaaccttaaatttctcatcaaaatttaaaattcaaaaatgaaactaatttaaaatatctaggtttatttgaattattttatcaaattaaattaaatatcaaataagataaatgatttgaaaaataatatttcaatatcgttttctaatcttacaatttaataaaattaaaaataataaaataaaccaattttattatagatgtggttacacaattattattttaagaataaaataataaacaaataataattatcctaattatatatcaaaatatctcaaatttagcattattcaaatttctacaaaaatatataagttatttaaatatttaaaatataatttataaatttataataagtaaaatgatatataaaaaaaaatactatttttctaacttataatttataaacaattaaatatttaaaaaaataaaaaaatttagaatttgaaaatattatggttagaatatctataaaaatatctaggttaatttcaaa

SEQ ID NO: 281576 - DNA, 665 bp, Cannabis indica
ctctgcgctcttgacctaccatagatccttaggtggtcggaccgatcgacccttccattcaacgccctatcgtacaaagccaactctacgtaaaagggcttcgtttggtgcaatgagagaggttactttcacatcagtcgggttaccaaacctacaagcagtagggcgacaatcctgagcttcgtcaagtaggcgtccaatccgtagggaaaaaggttcggtgagggggggcggtgccgcggaatgcgtcgcgcttggtgatgcagtacaccgagcgccacccccggttgtgcatgcggtactccgtcaccgagccgtagatccacccgatcccgccctcgtaccattcccttctgctgctatagcctccatggagaaggttggcagaacacaattcctgctgctagaaagaaagaaaatagatgaagtgaaccgatctatttataaggtataaggtgttggacttacgactcttgaacttgaaggtgggattgtaccagtcgactgaacgatgggaggataaatcctttgaagggcgcctatttactaacctattttattgggcttgcttggctttctcttagcttcccttcacttgtcccatatacttagagcaagagggttcgggtgagcaatgaatccactcgcgcttacttacttacttt

SEQ ID NO: 281577 - DNA, 442 bp, Cannabis indica
ttttcttattttttttaaaatttaattattttatcttatttttaaatctaaggtgagatatgaaattctttttgtaaaatatcttcttttaaagtaatttgaccttatttaaaataagattactataatcatggcattttaaaaagggaaataagataattttgttaacttttaaattttgttatttttttataattaaattataaaatcattaaagggtatgtatttatcattttccattttattgaatatttaatttattaaataacatgaagtttaaaaggtaagttagcaaattttgtttttgaaatgatatttaggttacttgaaacctaatttttcaaaattgtaggtttaattttaaatattatattatttcattttaaaaaccgaaaatattttttttattttattattttcgaaatatatttaatattttaaa

SEQ ID NO: 281578 - DNA, 561 bp, Cannabis indica
ggtgtttactcttgggggtggagcactggtttggagaagtgctaaacaaactgcaacgtcagactctaccatggaggccaaatacatagcgactgcggagtttgctaaggaacttgtctagcttagaaagttcttcacagaacttggtgttgtttctggaatggaaaaaacactggttttactttgtgataacactggagccataaccaatagtaaagagcctcgaagccacaagagaagcaaacacatagagagaaaatatcacatcatcaaagagtatgtggcaagaggggatgtactggttgagaaagtggacactgaagacaacttagatgatccattcaccaaagttttggctggaactacatttgaaaagtacagactgaatttaagattaattgaaatgtactgattgttttatgttagtgcaagtgggagtttgttgggctttgtgccctaaataaaactctatttcaatgtaatcttttccattcaattatcaataaagagacagaattattttcattacttatttagcatatcatttggttcatgtgatca

SEQ ID NO: 281579 - DNA, 525 bp, Cannabis indica
taaaataatttccaacattcttcacttcttacactactggtgattttggcactgtcagaatgggaaacaatggtgcatcaaagattgtgggtattggagatatttgcttggaaaccagtgttggtagcaaattgattctcaaagatggtaggcatgttccaaacattcgccttaacttgatatctactggaagacttgatgatgaggggttcataaactggtttggtgaaagtaaatggaagctcaccaatggttctcttgtagtggcaagaggaaagaaactcaatactctttatgtcatggaagctaagctacacaaaggagagattaatgcagttcaaaaagatgcaaacattgatctttggcactagaggctcggtcatatcagcgagaaaggacttcaaactcttgctagaaagcaattcttaccgaatttgcaaggtatgcctcttaaaacttgtgatcattgcttagctggaaaaacacatagagtttcttttcgtacacgtccaccatctagaagat

SEQ ID NO: 281580 - DNA, 386 bp, Cannabis indica
agtcgcgagacatctcctcgatcttcgtctgatcattcttggcctcgagctcgacttgctccttggccttgcggagttcctcgagctccttgtccttagaagacgcatcttgcttcagcttcttattgtcttcttgaagttgagcaatatgtttcttcgcgagttcaacctccttggacccggtagcaaaagccttcgagaacatggcaataaactgcgaagctagctccgccgagcgaggcagcagttcctcagtaggattcttgtcaatcttcgactggaactcatcgctgacaaatctctcctgaaggtacaacacatggcgaactcgaaccgctgggtcgatcacgactttcttccctttctcttgaatacccttagcaggc

SEQ ID NO: 281581 - DNA, 805 bp, Cannabis indica
aggaagtaagcacacatcaatagctgaagggagttcactacttggtgtgtttcagagatcagattagcaaggtggattacaaagagttgcgaaaaatcactagagggagtctaaatttgtttaagtcaatttcttttgtaatctttgatattttactaattgatttcattctctgggcgtgacctcgtggactagtagtgtttgaaagaacactgataccacgtacaaatctcttgtttcaagtgatttaattttctgcaattatttttatattctgtcaattctattttgtctctgcaaaattagtttctgcagtatcagaattactttatgttgctgcagacgtatacagttttatatataatatatctctatattaattattggcatttgtaaaaactcagtttttcaataaaagagaatatttatcaattaaaattattttacagttttaatgtgtaataaaaaaagagtaattttcagtttatcccaaataaaaaaaaaacccacaacactaaaaagaaatagcccaataaaatatggaggtaggcccctaaatccataataattgacgaagctaacaaaaagatcggacacctgaagatttaacacagcaaatggtgatacttgacataaactcatgaaagacacagacatgaaatacactgcaacaaaaccgagataatgaataccttaaaattgttgggttttgtgccttaaataaaactctatttcaatataattttaaatattcctttatcaataaagaaacagatttatttcattacttgtttaatgtgttatt

SEQ ID NO: 281582 - DNA, 891 bp, Cannabis indica
agtagtgttgggaagctttgactcagatattgcttgttgagaagaacagaaatgatatcagtgtatcctgctgatgagctacttaagccagccatgtttaaggtttgaacacatatggatgggtatctagttaggctgcaatcttcctcaacaatgtctcttatttggggattgggtaacccctaatgcacatattcccattaatgcccaaaacaccaaaaaattactaccattctcatcatcatgatcatgatcatataaaatataaaagaaaaaataaagtttttttattgtatactataactaaaagaaaagctagcttagaagtgcatgtatatactatatagtgttgcaagaagagaatgagagggtcttagtatttatactattataaattgtaataatatatttttaggttttctttgaataataataatttgtagtggagaataggcgtggctgttctgatgtggctgtacgtattagctaaagagtcatatagcgttagtttggatgtcaattttcactattaatatcatgaataattgacatccctcaaaagtcaacatcttctcaattcgttaagcttattagtctattgatcctttattaatctacttaacttgctatttatctatagaaattttataatataactattttatatttttggctggagtttataaattttttgggtttgactatgatacgtacaagcgctcatgtatgcctaacaagatatttgaatcatacttttctactacttagtgagaccatattttaatgtatattttctaatttgatatataatttaggttgattttaccgtgcacccttttaaaagagatgtactgatgcactctctatttgtttcggtatcttaaaaaaaaa

SEQ ID NO: 281583 - DNA, 659 bp, Cannabis indica
taataaagttttaattaatcatgtttttcattattcttgttgattagcaatgagctgcacagtacgtacaaaattacgctaacacgcctattctagttattgtgttacagcgggagtccctagacaagtagcgagaggagtttcaatgctacttcaaagagtagtggactagcgttgaggctcaccaagccacctaggagcaaaggggagagcctaatgggctcgatcgttacgcaatgtgtattgagctgagaataggacgtcacccgaaggtcccgtccacttgaggaagggtgcccccacgtcttccaagtggccacttgggcactagcacttagggtgaaaccttaaatgcatagaataatgtagctatcacccctagtagcattaccgctactccccgagcagctgggactaacgtcccgactagggaagcaaaccctcgacaagagtctgaaagggctcagactagaggtgagcaaccccctatgggccctccaccttaagtggagaaagctaattaggaacctatttggagcaatccaaacaatagggaaaccaaatcaactcgaagagctatgtcccactggtcagcaaacactcagagcatgaaccacaattataacaccctgactaccataggcgtattacgtgatttt

SEQ ID NO: 281584 - DNA, 555 bp, Cannabis indica
aaagagttttatttagggcataaaacccaacaccatgagcctatataaccgagctttcaataagtagatctagaattcaccaagtaaattctctaacttattaattctgccttgcgccactatagatttgaaatcgaatacactctcagttatatagaacattctatatgtaccacgatatagatattgttgcccttaattttgcatgaaatacgtggaccagtataaagacgacacgtggagctgagaggatcagctcttaaagaaatcaaccaagtcttgggcaacaaaggagtgcctctgagaggataactctcggagaagatatgagaaggatctttgtactcccggaggccagggccatgctaaggcagctttgggaggtactgaactctaattgaacaatcacctcgcatttaatgccgcatgggagaaaacatattggaaccaccataaacgatatgactgacgacgtaacccctcttttgcagctattacgctgtgattaataaggctagtgacgactactttatgaggaatcacatcaatcaagag

SEQ ID NO: 281585 - DNA, 769 bp, Cannabis indica
tttgttttaagttgaaaatttgttaattttggatcaacttaaaattgaatatttttcaaattaagatgatgagttcaagatacttaatttgttatttaattaaattttttaaaataatttaagttgacaattttgttaatttagaacaacttaaatttgatatttttaaaatatttattttattatattttaaatatttttgatatgttatatataatttttgaaaattaatttttgaaaattaaattaaagttgaaaattaattattttattaatttttgaccaacttaaattaagtaattttcactattaaaatatatagactaaaataaatgattaaataaaaatatattttttttaaaaaaaataatgagctttaatcaagagacattcgatctccattgttggttctacatagttcctattttagtgagcaatcatcctaatggatgaacgctcattagtaatttaacgccgtagaatcttgaaagataagtattatttgtaagtgttttattctttgtattgatcaccctaatggtggctactattagtaagacttataaaagtatgaaacaatggtgtagtctcatgaaataggaatgaccttgactctcccctaaatgggacaacgtcggattctcatttcgatagaataaaaggttgctagaatatgtcattttagatgagttgactactctattcaatggatgatctttgactctcgcctaaacgggacactgtatcagtttgttgaaaaccttagaaa

SEQ ID NO: 281586 - DNA, 497 bp, Cannabis indica
taaggaaaaagtacaaaattaaaggaaattgcatttctctctctctctctctctctctctttcggctgagacaaaaccaaagcaaggatcaattttgccttccaaattctctgaatttaagctagggattcaaggtggagcaatcaaaggtaaccctagaactatagtgttatgttttgaagctttaaaagttagtttgaacttgtaattttgagatttagtggttgttaggtttaggcttgcttaaggttcgaatcatagggtttaattgagttggtattagcttcttgtggctggttttgatggttggattaggttgtatgcaattttgagctttgagttcaaagctttgagctttaatggcataaattgatttggtgtgtttttctgtgaaatactggctgggttttattgcttatgaattgtttaggagctctggaaagtttggtaacatttggtggaaaattgagcaaaggatgaggtgttttgggaatact

SEQ ID NO: 281587 - DNA, 509 bp, Cannabis indica
tcagagtccatggcattgtcccaggggattccttttgcttgctgaaaactaacaggttcatgcatggttgaaatggcaaacactagagccttgaattttgaagagagtttggagtagtcaagcacctggtgtagaggatatgcagtgactgccctactgtcctgagaaacaacagacagattattagaagacagaaaacagtgatagtcattcaaataagatggcttggtgatgttcctaacaggcctacggggaggaagagatgaagcagtagtgtgaagtggttcagatctgtcttgatgaatagaatcagtaacagtaggaggagaagagtgagatgaaaattcatgatcaatagaagattagggcaaggaaaagaaactttgatactcaagaggcaaactgctagagttaacaaaagggaaaatagtctcatgaaaaacaacatccttagaatagaaaattctattggtatttagatctaaaagtttataagctttcataccaat

SEQ ID NO: 281588 - DNA, 531 bp, Cannabis indica
aagatatttttcctttttactgaaatcgattggcacaattctcgaggccaacctcgccaaccgatcaaactgagttgtgtactcggtgacactcataaaattcaatatccccataatcactgttagccactgttcggcttccatgatgtccagacctcccagaaaactgcaggtgcctgctcgcggaacctttcatacagaggttccattctattcgccgctacaactggttcggcctggacaacaggggtaggtgcaactggaacttctggcacaggcactgtaggagcaccctgctgcctcaatctctaaatctcactgtcttgctcctctattctggcttgcatttcaacaaacctaatttcccaattctgggctttctaattggcttgagcagcctgggcagcttgtggcgggttatcatcaccccgaccacgggccctgcccctgggacctctaccacggcccctagcatgcgggagaaactgagctccctgacccttatttgactcgactgagttgccctgactc

SEQ ID NO: 281589 - DNA, 528 bp, Cannabis indica
ccccccttggtgcttatgcaagcacaacttatcccaactcctccaatgaatcccttggccttgtgaagactttgtatgccaccagtatctacccataagttgatccacatctttacaaatctccaacaggatcaggaaaacactcatagcataagtcagtaaagattgaataaccgatttcaaaagcacttccttccccgctctagacaggagtttactatcccacttgtgaattcttttcctcaccttctcttttagaaagccgaaagtgacattcttatttcttcccaccatactaggtagcccaagataaaaactatgatcatccgctgccctcatatgaagagtagacaaaatagaatcacgagtcccgacatcggtattagaattgaagaaaacagaagacttactaaggttcaccttctggcccgacgccctctcaaaagtgttcagtaactctaggacccgttgagcctcttctctgtttgccttacaatagagaaagctatcatcagcaaacaacatatg

SEQ ID NO: 281590 - DNA, 604 bp, Cannabis indica
cgatggtttcctcaaagcgatcagcaccctcgaggtcttttgtcagcacagtgatcttcttctcagcggcaaacagcttcttgttggcctcacccaactcatgacgaacagctgcagtctccgccctggccttctcagcttccttcttggccaagtccgactccgccctcaaggtgtcagacagagccacactcttggaagtggcagatttagcccgggaataggtgtaagccaatttcaaaccggcctgcataaaggaaaaagtcagcatatggagctaagtatgaaaagctaaaagggaagtgtcaaaaagaaaagactaaccctggtaagctccttcaagactccgcccaccaacacatccagagatgagtcgtcagcaccagccaattgctcaccgacctctagaaccagtcggttcatgtattgagccatcacctgcttgcccttcttggcctcaggcagcacgggcataggtggagttggtgcctgcactcgctcagggatcctcctaaccagttcggacccagatgttggtgacccagactccttagacttggcagatttgggagtggaaggatttgcagtagtcagctcctcagaa

SEQ ID NO: 281591 - DNA, 806 bp, Cannabis indica
tgtttgggtctgagttcaggttcgggttcgggttcgggtcccgagtccaggtttgggaggggatccgggttcgtctcccaattcgggtctaggtcggattcggagtccgggtccttgtcctattacagttctagatctaggtcctatttcagttatgattccaagtccaagtgctagttccagtcccgatcaacttccagttttggttccaattttcggtcacagggtacgggttcttgtccacttttgggtttgggatattgtttagctccaggtcctcgtcagggttcgggtccaaggcaaggtctcgaatccagaaactgactacgggttttgtcgaagccctgggtccagatccggatcccaatctcgggtcctagtgtggttccatttctggtgccgggtcacgagctgggtcctaggttcaagttcgagtcttggtcaggtactaggtctctgtcctagttcgagtcctggtctgagttttggttcgggtctggatttaagtctaggtccagatcaggcttcgggtgtgtgttcacgtcctgggtcttggtctatgttgggtcggagtcccaagttccaatccagatctgagtctggattcagttctgggtctaagtccttagttctgatcctggtctgggttcgagtttgtgtttgggtccgggtctagctttgggtctgattcaaggtgtgggtttgagttcgggtccgagtctgtgtccaggtttgtgtccaggtctggaccccgatctgggtctaggttcgggtccaggtccaagttttggtctgggtcaggatct

SEQ ID NO: 281592 - DNA, 493 bp, Cannabis indica
acaggtaatatctcaagaagaaacgagatgcctttaacaggaattttagaagttgaattgtttgatgtgtggggaatagactttatgggtccttttccttcatcctttagcaatcagtacattcttttggctgttgattatgtgtctaaatgggtcgaagcttcagctacacctcaaaatgatggaaagacagttctccgcttcttacaaaagaacatttttactcggtttggtactcctcgagcaatagtaagcgatgaagggagtcacttctgtaacaagcagtttgaagcacttctttcaagatatggtgtccgacatcgaactgctttaccataccatccccaaagtaatggccaagctgaaatttctaatcgggagattaagatgattctagagaaaacagtgcaaagatcaaggaaagattggtcaagaaaattagatgacgcattgtgggcatacagaactgctttcaaaacaccgattggcatgt

SEQ ID NO: 281593 - DNA, 799 bp, Cannabis indica
ttcacgcccattgattgatacggcgcattaatggtgtcagacggatactcaaacgtttccaccgccttaattacgaatcaatccaaccgttgatctttgggaattcgaatcgtgcgtctccccaaccgttcgattggtaggtgatagtgcctgttcctcatgcatttttgcctataaaagccaccacctttccttcatttcggttacttcccatttcttgccaactttgctcgagtttcccagagaaaaaatcctcagaccaagagaacaccctcgaacactttacaaatttcccagttaaccttcattcaccactgtcaatctacctttcctttgtttgatcgacaacataacccccagcttcaacacttcactgtaagtttctcgcatctcttgctttactgtttgtgtacatggcatgctttacttatctgtttgttgtttttctgggtttggtatttgaagtttctgggaatgtattcttttgggtttttcacgtaacaggtctagattcaccatctctggtgttagggttattcttgtcacatattcgttgctatttttacaaaggaccatacgctcttcgtgtactggccttctagggcgtagagaagactttgtttttgttgattctctgccctttctttttcttttaagcacaatgttgtcttctgtgagttctttgcacccgacctttgtccaagaaatccttctagggttttctggttgacagacgtccggagggggcctctttccagcggttaggggacccccattccctttttcttggtttagggtt

SEQ ID NO: 281594 - DNA, 798 bp, Cannabis indica
aaataaggcatgctgagtcctcttcgatagagaattttgtccatcatcacataacggtgcgcttgatattgtatccttctggatagtgccttctcttggggcaactcgcctttggttatgtattcgatgatgggaaccatccagctaggctcttgctcaactattgttatggcttcttttactttgatgcttggctctgccaagcgttccacaggtaccacccccagtttctcaatttcgctgtccgaagctaacttagccagacagtccgcgtgagcattcttttccctggggattctttccactttatagtccgtgaactcgtggagcagttcccagactatcgccacatatgcggccattttttctccgtgcatctgatattctcccgacacctggtttactaccagttgcgaatcgctgtagacttctactcttttagtccccacggtttttgctaatctcagccctgctatcagggcttcgtattcggcctcattgttagaagctgagaattcgaaccgtagggctgcttggactcgaagtccgttcggggatatcattgcgacccctgctccagatccgttctcgttgaaggcgccgtccacgaataccttccatgccaggactaatggtgtgggtatgtttgcagtagcttcagcttcattgcactccgtgatggagtctgctagcgcctgcccttttacggaaatgcgtggaacgtaatgtagatcaaattggcttaaatccattgcccatttgaggagccttccggatgcctcttgcttttgtaagact

SEQ ID NO: 281595 - DNA, 533 bp, Cannabis indica
tttagtttcatctgatgggtgtgttgtcttaacaggaaacagaactgtagaccagtgctatgctgtatgcaataccatagtgtgcaacaggaccttcttggacaaacctgacttatggcactacaggctgggacacttgaactacagagatctccaaagattggtgaagcttcaagctgtaaagggaattcctgacatgaaagtttccaaggaaagagtatgtggtccatgtcagcttggaaaacagcataaggcatctcatcccacaattaatagacttctcacctctcgtgtgctggaactaatgcatgttgacttaatggggccaatgcagaatgaaagtatcagtgggaaaagatatgtaatggtcttggtggatgactactctcggtttacctgggttgaatttcttagagacaagtctgacacatttggatcattctctgccttgatactgagattgcaaactgagaaagactccaaagttggaaaagtttttcgactaagaagtgaccatggaaaagagttcgaaa

SEQ ID NO: 281596 - DNA, 548 bp, Cannabis indica
acaacatgaaactaaatcccttaaagtgcgtccttcggagttagctcaggaaagtttctgggcttcattgtcaatgctcggggaattgaagccaatccagagaagattcaagccctcctagatatgaagtcgccaactaaaattaaggaagtgcaaagtctgattcgtccgatcgccgcactcagcagatttgtttcaaaatcaacagataagtgtgtcccattcttcaatatcctgtgaggaaacaagcaattcgagtggacggaggtttgtgaaaaagcattccaagagctaaaagcacaactttcaaaacccccgtactctcaaaacctctggacagagaagaactatgaatatacttagttgtcacagagtatggtgtgagtgtcgtgctaatcagagaagagaacagcctacagcacccagtctattacatcagtaaaagactcattgaagttgaaggccaatacccattgatagaaaaactcgcttactgccttattctagcaacaagaaagttaaggacttattttcaagctcgtcctgtt

SEQ ID NO: 281597 - DNA, 225 bp, Cannabis indica
aacctaaacctagtaattgcctataaatagaaagtgatggctcagtcaaatcataagttttcataagcttctgacagaaaattctctcttcagaaaactgagccttcccttttctctctatagccgaaatctctctctctcttttcctcttctaaattttgaaccttagtgatagaataagtgcccacacacaacaagtggcaactcaatcatagattggaagac

SEQ ID NO: 281598 - DNA, 502 bp, Cannabis indica
tattaatcaaatttcgaaattgcatttcttaaatgctggaatttcgaattttatttgaaaaatagattaaagttgtaaattatttattttaattttggaccaattaaaataaatgaagtcagttcggacagatttcaaacatcctcaatcaactgacgcaaccccctagttgatggttgtgatgctgcatgatttaagacgagtgtcccccatccttctggcaatgaagtcggtgaagatggctttcaaacatcctcaatcacccaacgtgaacgcccgccgaaatcccatcggagggtggtgacgccggatgatttcaaatgagtgtcagcaatacatcactccgacagtgaagtcggttcggacagctttcaaacatcctcaatcaaccaacgtaaccacccagttgacggttgtgacgccgcttgattttagacaagtgtccaccatccttctgacaatgaagtcagtcaagatggctttcaaacacctcaatcaccca

SEQ ID NO: 281599 - DNA, 160 bp, Cannabis indica
tacactaagaatttcgaaatttaagagggaagaaagagagagggagtggtcggccagatagggagagagaaggctcaagtttttccgaatcagaagtgttaaaataatgaaaatatcagagttaaattcctataaaagtggccggccctatactagtgga

SEQ ID NO: 281600 - DNA, 519 bp, Cannabis indica
ctatccaacaaatgactaaatcatattccaattgaacactatcaaggatttcgcctcaaaagaataaacatgcaagttttaagctatcctgtcaatgttcccacaaaccatagtaaaacaattataacaattttcacagattgagaagttgcaattatacacaggtttctaagaatccaaactaatccaaagagttaacagaatcaagtacacagttattttacaatttcagatcacattacactaagcagcagtatacaactatcttctagcttattgacattccttaactaaaataaaaaaactaaaacagaaaattaaaatgcagaaataaaaaaaaaattaaatctctccccccaaactaaatatgacattgtcgccaatgtatacaatgaaatgcaaagagaagagacttacctgagaccctctcagaaagggttgagtggcggcggctgatcatatggatagaaccgaggaggcggcgccaagtaattcgggtcatcaatcctgatgttcatt

SEQ ID NO: 281601 - DNA, 1018 bp, Cannabis indica
gcttgtttgtttgtttgtttgtttgtttgtttggggagttacagtcttcaaaaaagaacaaataaaagccttaaaatgttcagagaaagaaagaagaagaagaagaagaaatgaatgggaaggtaacgagtggtttatataggggaaagaagaagatgaagatgaagcggtttcagctcatttcactgaaatagtttttgagaaaataaaaaagaaaagtagagtgagaaattaaaatattaaaattaaaataaaataataaaactaagggagagagacttttggctctgcgcggaagaaaatatgtctgaaacaaggtcgcgaaagatccgggctggcggaaattggagagaatttgttagggttcgtttcgttcgggctcttttctaacccatctcaataaaaaaataaaaactatatatgattttacgaaaatcccttcaccaatcgtcttgcctttgctgtacacttgtcttacatgcagctttttcgtcactgacgtggcttcttttgtttttattttattatttttggaaaatattgtgtcgaaatcatttgtgcgtttatttctttgtattttagttcatttagttaattattattagtgttagactcttaatactttcacataaaaagcacactacgaggggaatttataaaccaatttatatgattatacataaacatttgttttttggttacagaatccacttacactaattaatttcaattttataaatatagttatggtccctactttgacaacgaatctctaataaaaattgcatgtaataacatcaattagtttagtaagtgtgaaagagtgttgtacgtgtaatgttaattggggtgtttatttattcttgaaccaaagaaattttatcccttttaagcataaaaaaattgaaaaataattagagcatgtttagtattgttttctgttttttgttttaaaaaattgtttttagaaatgaaaacaaaaataatttttaaaatttttaaaacacaagtcacgttt

SEQ ID NO: 281602 - DNA, 545 bp, Cannabis indica
ttatccaactaatgcttctaaagctaaaaacctaattttctctctaggtttatgagacttcatcttcttctttcttcttctaatttcgaagcctatagccttcttcacaaaccaaattcaagccttagtgattgagtgcatgcccacacataacaagtgagtcctcaatcatagtgtataagactgtgaagaatccaaacaacaagaaggagtttcgggctcagatcttagtgatactctgctacagaaaggatacaagagttagagatctgagcggaggagtcatttatatcattttttcatatcattttatatcatagtatatctagatcgtggtaaaatatattccaacaactggcctcaaagccatggtaactgatttacattcaagaaatttggacttaaaacgatatatgtatgatttggatgtgattcatgtgtttattgatgattgtttgatgtttgcaaattttttacataaaataattagaattgaaaatttattattttagaacaacttaaattagatatttttcaagtattta

SEQ ID NO: 281603 - DNA, 557 bp, Cannabis indica
gtcgtcattttcaaaacgacgcaaaaaacaattttcgacatttataaaccgacgctaaataattacttttctattttattttaagcgtcggttaaaaaatgacgctaaatgtttcatggcattttaaaactgtcacaaaaaacttattccgtcggtttaaaaatgtcatatctattacgaaaatactttttttttacctattgcgtcacttataaaatgaagcacaaatataagtaagggaaaattgcaaatttttcatgcaattttccccacctgcattatcaaattttagaataactctatataatagtaaatacataatacaaaaaaaattaaaataacatttttaaaacttatataaaattagtaatcgattctattaactaatcacacaataccaaaattgttaataaaatcgattctaaaacttaaattccatgtatatcgtaaactaaaccttaagtacttaatctataatcaaagacttcacaaattcggcccactcatcccgtacgacattgatctcctcgttactatagggagcgtctaacttgaac

SEQ ID NO: 281604 - DNA, 748 bp, Cannabis indica
cgagagtttttgagagctgcacagaagctgatgatgtctacaagttggggatggccttgtttgttatgggcgtcctcactggtaaggaggagaagactgtcgttcctccttttgtgataagaatggttgataaccttccattcttctacgagtacccctggggaaagatttcttacaccaagctgatggaaacttgtaacaaggattacttggatgtgaagaataagatgttgaaaaagattgagaagggagtcactcagaaggaggcaaaatactcagcctacggctatgctgcagcgttgcagtattgggcatacgaggccatattacagctgggcaacgagtatgcagtgaggaggtcgcatcgctttccgagaatggtcaactgggagagtaagccgaacactacactcgggaaggatgaagtgaccagattatttgctaaaaatgtaagtttgttacgctttatgttgaattcatgttaatttccatatattatattaatatatttgttatatttttcagttgacagtgtactccgtgttatgtcctcggccgaacgagattgagtttgtgagttacataaccgggggtcagcctccgttatttgttgacttggaggaacttgtgttgggtgaggatgggcaaccaacacaggatgctttgcgaagccaggccgaaaagcttgcctccacattggaagaacgagcggaggcagcccgaatatttaaagactctacaccacctc

SEQ ID NO: 281605 - DNA, 861 bp, Cannabis indica
aaaaaaaaacaagtgtgaacttaaaatgtttgacagagagattttttaacttctttaacatattcaaaggatttgtctttacatgtctcttgaacaaatatattgatattgtctttatttttcctcaaggaaagacaaacaaataaaaaaaatattacaatctcaatactagtttcattaatctttatatgcctctcttgtggcaggacatgactgtttttctaaagaatctcattgcatattttctcgtccatagttttcgatattaatgtattgtctttacttcgttttaattgaataaatatatttatattgtctttagtaccactgctagttttattaatctttatattgctttttctgtttactctgcaattcccaaagagtaatcatctctgtttattaatctttatatagttttattaatcctcaatatatcatgtttgagaaaggctctatatagttaatagtagtttgatttttgctttgaattgttattacatgaattattgtggttgttaatttgcataagtcaattataatcattcctaggtggttgttaatttgcatatattgtacacattgcttattgtattgttatttttctttagttctttacctagaagttttggtttttagaagggaaattaggttcaatagattattttgtaataacaaaagttttttataaactaaattaccaatgacattttttctttttttttttcttttctgtttgtgttataaggattatgaagtaaaaacaacaattgatattaaatcttctcatgttagtttattgattttattctttacacacgattgtttgaatgtgttattattaaaattatttcttttcat

SEQ ID NO: 281606 - DNA, 633 bp, Cannabis indica
gaaaacaaattaccaacaaaatattaatgttctaatttgatctaacaatccatcgatatgatcacgacagtccttattttatttttttttaaatgctaatatatattatttaatattctcaaaatatcccatttatattatgttagataaattaataataaacccaagatctatttgtatataacatagaacacaataataagatataataattaggtatgtgtacctgattgatccatagcaattatctctgtttgatccacagcagttactccactttgatagtgcaatactatcaactaagtcttcctccctagatctctaaatcagaagcagtttatttatctgattatcaaaaggtatacaattgtgatgagacaatatgtatttatagagttagggaggggacttagctacaaaaccctagttgggctgggcctgctcatcaaaggcttcagtcaactagaaaagcccacacttctgcttcacctagactttacacacagatgctaagcccattaacaattgatcaccaacaacatgggctaacacagcaaagaactatccaatcaacccaagtttaataaaaccaataaaacttaatgtaagcccaaataaaaagtctaacattct

SEQ ID NO: 281607 - DNA, 499 bp, Cannabis indica
ctactagtttctgtttgttggttttttcaatacatagtaaattataatcaaacataatgatatacactaataaacttattaatctatttttcgtatattggaataacaattcattttttcaaacacatatcatcatgtatgcctataaaataacaaactaattagtctatttttaaaatatcaaatgttagatgtattggtaacattaaagatacttatacttttaaaatatcaaaatcatcatctgtatttgtaaaaaaaaaaaaaagttaaaaagtgaaaaacaattataaagagaagaaattattaattacatactcatagtatggaacataaaagataaaaaaaaaaagaaaaaaaaaaagaaataatcagtaataaagagaaaaataaaattctcactctagacctttatttattatgtagtgatgctcaacttgattgacgtgatagatttcgaaaaaaaaaaaagaaaaaacttagattgacataaacaaat

SEQ ID NO: 281608 - DNA, 503 bp, Cannabis indica
tagtgcattatgaatcacacgccaagcaaaaatctttacttttgtggaagttttaagccccaaaaaagcttccaccaggctgcttgagagttggaacttgagccaagagcagtttcagcatctgcaatcgatgaggcaaggtgatatcccgattggacagtgtatgtacccgtagtattgtagtgccaaagaagagtatcagtactctgaaaaaaactgatgggtatagttaatatacgatccacatccagtggtgaaaaccattcattgagaagaggtacattccattggcgttcatcagttattaattgggagaccataccatcacacgggccagtgtaaagaaggggggtaaaagtttccaaccctggaatccacggatcagtggagatatgaacaagtctcccttctccaactttccaccgtagccctctaattagtaactctctaccccatataattccttgccaagttaaagatgggttgtgaccatgatgagcatg

SEQ ID NO: 281609 - DNA, 589 bp, Cannabis indica
tgactatttaattttatgttttagcatttggatgcggcatttcatttgatgaggaggcgacaacacttttatccggaggtgtacccaaatagatgtgtcatcatgccgtgtattttcccagcaggagttattgctcggtgggaagctgcgggtgatgaccacactaactatcagtgggatgagggcatattagatttgattcgaggggatgaaggtcaatacttggccagttggaagaataaggagagaatatatatggccctctacttcgatagtgcaaagcattgggtgacactagaggtagatctggatcattggttgttgaacatatttgactcgagcctcggatcgatttccccgaataattcaagagtcacttggcaatgtgggaaaaattactaccaactttgatgctgcaggctggcctattcgagactcatgacatgatcctcgtgcctcaacttaccgcctcagagagccaggttagaagttttacttcaaaagtcatggaccggggcgttgttcgacagacaaaatcaaggtaacttaattacaattgatttttttattatttaacttgaatttaatt

SEQ ID NO: 281610 - DNA, 581 bp, Cannabis indica
tatgatgttgtgtgtattgtgatattaatgagtttttttttttttacagattcagatatgttccaccaactaattgcgagttatggtgagagtgaggatgttaatgagtctggaggagaggaaagtgctcaagaccttcctctagtccctcgagcctgctcccaactgaggaagccttgtcctgccgcggtagaaggcgaggagaatgctcaagcctctccttctgtcccaaatattggtggccgcatgaggagaccttccatcgtggttcccataattcgtcccgatgatgccacaattcagatgctagagtctgtgcatgacaacattgacctccttgttcgaaaaactgcaaccgttgaggtggtgcgtgacatgtccaactacgaaggtgatactgtcactagaggagtccaagacatccttcgggtacgtgatggattatttatcaaactgtattgataatagcctatcttcttatgtgcacgctcatatttatatgatctcatatccttttattgtgctgacaccctttcattctcttattttttttagggtgtgactcaattcatggtctccaa

SEQ ID NO: 281611 - DNA, 588 bp, Cannabis indica
tttagttgtatgaattttgatctttttgtttgttttaatagtttttttttttttaaaaatttcctttaattgaattgtgttttatatttgttaggaaaagtgtgcgaatctagtgttgctgatgatgagaaactggttaatgtcattgaaaaagataaaaagaaaccagtttctaaatctcatggcaagaagaagagtgagactcatgttgatgctgctcccttggtaatttttcttatcaaaagaaactggtttcttcctttatgatttttgttgtttttaggttttctgtttatagttttatcgttcgtaagttatttttgttttgtgtaatcattttgagcttctgtattttttattagcgtatttttaaataactggtttctatatttaattttgattttagttatataggtaagggatattttcaaaaatatgggaaaaatgagccatcttatgataaatatggcaacaaaactaaatgccacaaaatatggcattaactaagcaagcaaactacaaatatggttatggttttttttttaaaaaaaaaacataaaataagttaaaaacagaaactaattttaa

SEQ ID NO: 281612 - DNA, 463 bp, Cannabis indica
ggagtatctcagtattacgtgggacgcgagagcgtgccctaaaaactgcattgagatgatcacgcagatcacctcgatgtacctgataacgtcctccctgttgcgtctgtacagagccggaccttgtgtacctgcttggagtgcgaccatgcgatgacgaagaggctgattctacgtcgttgtctcttgatggtcgactgcgaggattacgccgttcagggtcttcatcaacttgtgtgctttggtttggataccttgcggattgagccctcgatgttggatggttcaggtccaaaccttcagggttggttctccgttccctgcgtacacgattagtatgacgtctagaagtcgttacctgagggttatcggtgcgaatagtaggaactcgaggagggcgtcgggctcggttttgtccatctacttcggcttgcagcgcgcgcagttgatcctgaatcgcagc

SEQ ID NO: 281613 - DNA, 566 bp, Cannabis indica
ttagtccaatagctcgggtttatttaccaaagtcagactcgggcgtaatcattttatgtgatttagcttagaacctagttattagctactagtgatatgattaagtttatgttttgctagttgtctatatatgtgcatgtgcattttagttaagttttatttttatttatgtgactacctgacacacatttccttactgagtttagtagctcacccttattaaattaccatgtgcagaccaaagtaactgaaagtctagaatgccggtggcgagtggaactttggacgcttgtgtgtgaactcgctgaggaccatataactgagggcggtctagggcgctctatttatttatttacgctattaagtttatgtcgcaattattttagttattatttattatgtcttttgtacgaaaactggccagttgtgaacattttcaagtattaaaataaaaatgcgacattatgattttccgcgtttaacgcttgtaaataaaattaatatttttataaaagtacgggcgttacagtttggtatcagagccttgacccagccggaagtgtggt

SEQ ID NO: 281614 - DNA, 718 bp, Cannabis indica
tcgagatccaggagacttcccacagagtaaactgagccattaaagagatgaaattcgccacctgatcctaaatgttatggtgaagagttccaacttcctgcagattaagaattcagagcagaggttgcatttgatgaatcactctgaaaaatcatcttcgcatacccttgctttaaagcttcttcggcttccttacaaagaaccatgatctctccgataaggggctcactcacagtcaaccggagtgtgaagcaattgatgaactctccccgtttcatttctgaagaccatagcccctgccgcctggtgtttcccaatagatacatccgtattacacatcacccagtccggggagggggggagacattcaatgataccaacttgctgtgttcgcacatcttccgtaatttcaagaatccttgtattaatatgttggaggatggtgtggagaggggtaggcgttcccccatgagacaagttgtttctttctcgccatatgctttcaaatattatggcagccccaccaagaaaaagatgcagatgaagcccaacgagacgattagaatctatagaaaaatcagtctagccatgcttcccagcagtctatgttaaatgaattcgttcttatctgccaccagcagccaaaccacactgccctcgcaaaaattgcagtgccagagcaaatggagtgaggattcgacttcactatggcataatg

SEQ ID NO: 281615 - DNA, 524 bp, Cannabis indica
atttcgctggttgtactgattcacgtaaatctacatctggttacgtgtttatgtttgctggtggagctgtgtcctggaggagtaacaaacaaactttgactgctacttctactatggaggctgagttcgtttcttgttttgaggctacatcacatggtgtatggctaaagagtttcatttcaggccttagagtggttgattccattgcaaggccgctaaagatgttctgtgacaattcagctgctgttttcatggctaagaacaacaaaagtggaagtcgaagcaagcacatcgacattaagtacttagctattagagaacgtgttaaggaaaataaagtggtcattcaacacattagcactgaattgatgattgccgatcctatgacaaaaggcttgccacctcataaattcaaggatcatgtagagaacatgggacttggttcccttatgtaatttgtacaaataaagttattattaatgaaactcttattttgatttttctcatatttatgcgcatcttaa

SEQ ID NO: 281616 - DNA, 552 bp, Cannabis indica
ttatgtgttcatatgtcatttgccaaacaaaagcgacttccttttacatctaacaataattttgccacttctgcttttgatttaatacatcttgatatatggggtccttttcacgttactagtattgaaggttatcgatatttcttaactattgttgatgatttttctcgctatacttgggtatacatgcttacttctaaatctgatgtttctttcattattcctcaattttttttctcttattgccactcaattttcagtcaacattaaagctgttcgttgtgacaatgctaaagagctaaatttaacaaccttctacgctaccaagggaatttcaaccaataattcttgtgttggccgtcctcaacaaaattttgtcgttgagcgaaaacatcaacacatattaaatgttggtagagccttattatttcaatctcatttatccttaccttattggggtcatgttattaataatgttgtttaccttataaatcgtactgcatctaaactacttaacaaaaaaacttcatttgagatactttataacaaagc

SEQ ID NO: 281617 - DNA, 288 bp, Cannabis indica
ggcaaggctaaagttgaggagccgtgagtacgagcagatacatgtcggggcggttaggcctggagcgtacgatctttgggacatcaaggcttttgttgtatagtcgctgggcgacaagcttttgtttatgtgtatagcaaacttttaaaaagtgttttgtaaacgggatcccgaaattttatatatgtaatactttaagtttttaattaaataagcaaattttaattaatcacgtttttcattaaccttgttgattagcaacgagctgcacagtatgtttaaaattac

SEQ ID NO: 281618 - DNA, 871 bp, Cannabis indica
caatcagccataaaattaaaagtcaaaattcccatttaacaaaatgactaatttaccctccaaagaaacttaaattctaaaaaaataacctaggggcattttggtaattttactaatccattaaaccgacattctaaaaattctaacctagtccggaataccctcaaaataattcttccattaatgtcgtgacatttctgaccataatgctaaatttccacagtagccgggcccgataaaatattttattcgaattatggtatctacgatacccacatatttcaatacaatctccgtaattaataaattacgctttattattcatttactcatattttcctaatcaactcgtaattagtttaagtaggattataaacctactctaatacccacttaatcacatatttaataaaatatgtctaattaaaatatcaatatatttttcgggatattacaactatcccctccttatagaaatttcgtcctcgaaattattcaaataactcaggatacagctcccgcaactacgaatttaactctcaaatcgcctttcagtcttgttattctctcagggcactaaaactaacggtatagtctttacttcgcaacactttctctttcaattcagaaaatctataccgattgttcctcatatgacaagtctgtttgaatttcaatattttcataactccatataaagatcgcttctacctcatactcctgaaacattgaagtgcatattggaaaccctagataaagcagggagtatggttagctaataagctacccgacctaccctttccagaaattcagacagaccggttaaccggagacttaactttcctttcttcccattttctgaattccctca

SEQ ID NO: 281619 - DNA, 992 bp, Cannabis indica
tttgggcttcctttcttccacggccaggatgacttcttcttgctcatattgagctgtgcgggcatatcgctcccgagctttgcccgtgtctccagcgatgtgcgggcctccaatgatgacttgcaagtgtccatctattggcggaggcatcagatcctggttattctgaccttggttggccttgacatacttctgtaagtgcgggttgttcttcttgatcagaagttctatttcccacttcaagttgtagcattcgttggtgtcgtggccgtagtctccatggaaccgacaaaattttgtcatgtcccttttgctggtatctttcttcatgggcccgggcttcttgtacggaattagcgactgagtcgctatatacacactttctatatcctcagttaggatagtgaatgcagtgtgtttggcgcgatcacggggagtctgttcgggtttttcggtgaactttcccttcttcccgttcccttgcttgtggttgttgcctgaacgcttgccacttgaattgctggaatattggggaagctgggcggacgttccagtagaaggagccttcgttttgttcggcttttgctcaccttctgctcgctgaatggcttcttcgagcttgatgaaacctttggcccggtcaaggaaatcactcatcgagtcgagcggtccatttttccttatgtccttccatagttcgccaaggacttcaatgccccccagtatcgcggataactttccatcctcggttacccatgataccttggttgcttccgtcatgaatcttctgatgtatgcccggagtggctcgcctggtcgctgttttacttcgaccaaatcttccagatgcaatgggagttggcatgaggaagagaattgtgcatggaattccgaagagaaggtcttccatgaactaaactttcctggagccaacttgaaataccattgctgtgcggcctttgacagagttgcggggaagattctgcaacata

SEQ ID NO: 281620 - DNA, 681 bp, Cannabis indica
ctcacatacacttctatgtcttgttccatcttcggccaataataagactttgacagcaaagctagcatcctagccacacccgggtgaccagcccacttaggatcgtgggtttctttcagtaattcccttctcaaagttccactgttcggtacaaataacctgccacccttggcatagagaagaccatcttcttcccagtaccgcactaattctccctttcttgcttcttcaagaagcttcttgtaaccaggatcgagcaaggactgctccctcacccggtcgaagaaagttgaactcacctgagtcaacgcaccaacaaaaacttgtacatcctttcggctgagtgcatcagccacttgattctgcttccccggtctatgaacccacacaaaatcaaattcagccaaatactcttgccaacgagcttgcttcggagttaatttcttctgagacttgaagtatgtgttggctacattgtccgtcaccactgtaaacttcgttcccaaaagatagtgcctccacacatccaaacaatgcactaccgcagccatctccttctcatgagccgaatacctttgctcagcatcctttaactttcgactttcaaaagctattggatggccatcttgcaccagtactccacccaaggcacgatccgatgcatcagtttggacttcgaat

SEQ ID NO: 281621 - DNA, 506 bp, Cannabis indica
agagggtttggaaccctaatgcctagtggggagttggttatctctaataggcacattaggtctatgccagttaggatcgaagatagggagttgagcgctgacctcatagaattgaaattaactgagtttgacattatactaggaatggattttctgaccaagtattcggccagtttagattgtaagtagaaaatggtgacttttcagttagaaggtgaagatccatttgtttatgttaggatcagtccaaggggtctcggatcctggttatttctgtattaagggctagagatttactatgcagtggctgtgtaggatttctagcagtggtaattgactccagcagacctgaaacatttgggcctgaggcagttagggtggtgaaagattttctcgacgtgtttcccgaggagttgccaggattaccgccacaacgagaaattgatttcgtaattgatttggcacctggagtcgaacttgtttctaaagctccatatagaatggct

SEQ ID NO: 281622 - DNA, 628 bp, Cannabis indica
ttagataatcgatgttctatgtgaaacgagagtattcacatgacttatgtgacgagtagattattacctaatgctgatttcatgttagtttaattaaggaattaattagagaacatgtgatttagaacctagaagatctgaaaagagctaggttactttataatctgtcattcacttcaagaataggaagcaattaggcattaacgatttgggtaaacaacaacaggattctcctccctatcatctcatcttgcttaactttaaactatgttaataagttttctgaattactttaaatcataaatacttttgatttgccaaatagaattataggtatagtttagtaataattaatccaatttcctgtggttcgacctcacttgcgtgagctactacttgactgcgtatacttgcgtagtgtttataattttcgcaacaacatccatgattctagtaatggtttacactaagtacacaaccatttcatcattctgaaattttcctatcactagggtatttccttagaaggacttaggcaactgctagtaactaatcatagaccttatactatcatcaataaggtaagtttggatacaattcaaaaaatcaacttaatgatctttgaact

SEQ ID NO: 281623 - DNA, 722 bp, Cannabis indica
cgatatactcattccaccatacagcctttcctagtggccctattaactgtttcattgaaacaaaatttgccaatcggtctagcttagtatcattctccattattgcgctgcccgaaatcaaccatacaggttctactatagtgtcactcagataatctcttacttcatagcattcatttgctctcagccctgtggtaggaagatttatacccacactacctaccccgagcctagtaggctctcaattttacttactagatcacctcaggtatacctcctagtatacccgtgatcaatcctttctcatagttaaaatctttctaactagaattaatgctaataagcattaccgcacatgcatagacatacttagcaaccttatatcaaaaacttatcacgcttctctaacaactttacacatatcaaataagaagacaattcaaataattagtaaataaaccactaatcaactaacaatcaacacttactaaaccaagagtcgaacgagtcttcgcagccaaagtacatatcaaaccagtcttcaggatctttaaaccttggtcgctctgataccatgttgtaacgccctgaacctcaggaacgccacgtgtgtgcttttataatcttattatcaataatctattagtttaggaaaagtgtggtttaattcaaaaaaatatattatctttaattaaatttaaaatagaaactttagttcaaaa

SEQ ID NO: 281624 - DNA, 549 bp, Cannabis indica
tttttagtttaagtttttagttaagttttatttttatttatgtgactacctgacacacatttccttactgagtttagtagctcacccttatcaaattaccatgtgcagaccaaggtaactgaaagtctagaatgccggtggcgagtggaactttggacgcttgtgtgtgtgaactcgctgagggccatataactgcgggcggtctagggcgctctatttatttatttacgctattaagtttatgtcgcaattattttagttattatttattatgtcttttgtacgaaaactggccagttgtgaacattttcaagtattaaataaaaatgcgacattataattttccgcatttaacgcttgtaaataaaattagtatttttataaaagtacgggcgttacagtttggtatcagagccacagttatatcggtcccgaacgttctcacgagttacacacatcagccaaaaagtttccgcttgccaccaagtaagtccattatatatgcttgcattttatgtgtatttttttaatttctaaatttgcatttta

SEQ ID NO: 281625 - DNA, 567 bp, Cannabis indica
ttgggtacttatgtcgatatttaccctttaattaataataattacttaataaaattatattaaaattttaactttattattaaaaaattgtgacataaatacttaaaatattaaatttgttgctaataaataccgaaattcaaaaatagtgacataagttctcatttatggtttaatttttattctgatgcgtgtgttaagttctgggttcgaattttattgggtgtgtgtttttaatgtttgagttttagtgttttatcaggttctaatgtttgagtttgtatttatgagatctgtttttatttatttatttttatagattttgagaacttgaaatttgatgttgtttctattgattattaggattgaaaatttgatttttcatacggaaattattatttgcattttcgtttcattgattgaaaaatattagtagaacgtttatagaatgaaaattttaaatatatgaaaatagaattgaaaaatagcatttgaatcgagaatcaaaatttattgttaatctccttacaaaaaaaaaattattgttaatctgtaaagataatatgg

SEQ ID NO: 281626 - DNA, 541 bp, Cannabis indica
tcttttgcattggatattgtttggctctgtatatattacgtgtaaattttcttaaatttacttggctaattaatacctatgctcttgcttagttattcatttattaccggcatatgtagggttttaggcatattatatcagattattcaacaaaagcatattcatgtttttatggatggttgaatcaaagtatatttttagagtcgtgtgtaagcattttctatatatgaaaataaaaaacaatttattgataatcctaaaagaggattgtaacaaaacagtacgtaataatgtgttcagataaaaaactgataaaaatgaaaagtaacagacacaagcacaacattagctttagcatgctgttcaaacaaaaatggggagtaacacttttggtgatctcgtctgaggcagtcagtcacagaataagaattgaccatggtaaccgttttcttcgctttcctcattttcagagtggatatctgtcttcaaaagtgtctggagcatttaggaaacttggctgattggttgaacctagtagtag

SEQ ID NO: 281627 - DNA, 591 bp, Cannabis indica
ctaggtttggttgaatagtcaagttgacattagttggatgagtgagagtatcatgttccttttatagtgtttcaactagggcttagggttgaattatatggattaaaaaagaataaaatattgggcaaaaaatcacacttggccgtacacttaatgggaccaatttctagttagatttttgccactttatttcaaccacttattcttcttttcaataataccatattttccaattcaaccttataaatgccaaaactatttatttaataattataattaattactaaataaaattgtcatttatgtaatttattaattagaccatacaaagtctcttaattaacaaattgaccccaaaacctcttttcttcacaattaagcccttgcttagtgaaaattcataaataagacatagtctaattttagattataattgattaattaaaatcaattaactgagtctgcaagcagtattatctcaactagtgaggggaccatgggcctatataaccgagctttcaataagtagatctagaattcaccaagtaaattctcaacttattaattcctcattgaaccactatagaacat

SEQ ID NO: 281628 - DNA, 531 bp, Cannabis indica
attgttattaggtaccagtggtgcctagcacctttgtgaagaccgcttagcttaaatttggaaattagtagataattaaggtttaattatgaaaattatttattagctttaaattattaatttatagtgatttatttgaatttagaatgcattttatatgtcatatatagaaatttcataattttgcatgtttagtgcccgacaacattagaacgcggtgtatggcttagtagaatcacatcttagtattttagtatagcgggacggtatagttagacattggaaatgtcgagtttagtcgggaatttaaaatttcccaaaatacccttagtacctttttatgttgtgttagtgtgggagcggcaaaatggtcattttgccccatatttgtcctttagtggacttaattgctttttataatcagattttattaattatctttggctgaatccaaataaaaccattttattaatcattttacaaaaataaggaaaaagaagcaaaatcatatttctctcaaagctctctctc

SEQ ID NO: 281629 - DNA, 575 bp, Cannabis indica
gagaaaaatacacgatctgctcgcacaattcaaaatctacggtcccagacaaattctaagagaagaaaatacaactgcagacgcgttagctcgattggcaagcagtaatgtaagtggcaaggcaaacctggttcctattcagttcctcgaatagcctagcatcactggcatggaagaaatcaaaatgattgatacatccccaaactagatgacaccaatagcagcctacctcaactctggggacctttcagataaccgaaatgaggctcgcaaaatgcgaaggattctcgatgccattgctcagatgtttcactcaagacgaagctgcacgactcctaatgaagttcacgacggattctgtggaaatcatgccgccagatagagcttatcaaagaaaattctaaggcaaggttacttctggccaacgatgattgaagattcgagagcctatgttaagaagtgcgacaaatgccagagattttcaaagataccaagagctttgcccaatgagttaacagagatgcaaagtccatggccctttgccatttgaggaattgacctgatcagacaattac

SEQ ID NO: 281630 - DNA, 616 bp, Cannabis indica
agaccaatcctgcgaagatcagggcattggtagagatgccatcaccgactaagccaaaggaggttcaaagcctcacaggtaaagtcgcggctttaaaccgcttcatatccagatcctctgacaagtgtaaagagtttttccagactttgaaaggcaacaaaaggtttcaatggaacgaaaaatgcgagcaggctttccaagctttaaaaacgcatttggggcaacctccaatcttatcaaaaccgttgtccggagaagttttgtctatctatttggccgtctccgaatatgcgattagttcagtactaatccgcgaggaccaaggacgccaatacccggtatattacgtcagtaagcgattactagacgccgagacgcgttatcctcaaatggagaaactggctttcgccttgataatatcctcaagaaaattgcgaccttatttccaggctcacagcattgaagttttgacaaacttccccttaagacaggttttggcgaaaccagaagcatcggggagattgttaaagtgggcgatggagttgagtcagttcgacatcaagtataaaccgagaactgcgatcaaggggcaagccttggcagattttatacttga

SEQ ID NO: 281631 - DNA, 574 bp, Cannabis indica
aatgacttggaccaattaggaatcgtcacgtggcaatttactttacaaaagtttcagaattataacttaggtattattaccgcaaaaaattaaacttaagtatttatttgcaactgggagttaaacttaggtatttatgccgcaaattactctatgtgttatgaagtattttattatgaaactagttttgtcctttatttatatttcagtgttttaggaactgatttcttctttatttttaattgtaatcggtttgagttattgcatgttacttgtttgtattcattatgttatataactggttctattttagttataaccagtttgagttctttcgtgttatttgtttttattcattataacactgctatagaaccggttctatttaaattataactggtttgagttattttatgttatttatatttatttattatgttacagaaccggttatatttcaattataaccggtttgagttatagtttttattcatataaccagttataattttagttatatatgagagagtaatttgcggcaaaactcccttaactatcaatttacttgcaaaaa

SEQ ID NO: 281632 - DNA, 548 bp, Cannabis indica
agaaaaattatatttgtgttgaaaattaattataattaattttggatcagcataattagaataatttttcaagattgattttattttattttatagcatttttgaaagtagtatttattttaaatacattatttttcgaatttgtatatttatagaaaattaaacttgagttgaaatttttttaatttattttggatcaactcaaattaaataattttcataatatttattggaaaattaataataaggatggaaaataatttatttttatttttcaagatcttccttaagtataattttataaatattaaattaaaatttatatttagaattttgttctaaattggtaattttaattaaatatatatatattaaaataaatagattaaaataagtatcaaagaaaatacaactcttttaaataatgagctttagttataaggatattcgatctccattgttggtcttacatggttaatatgttttcaatatatcctcgagacgctagacttcgtccccctaatggatggttatttgttgaagcattt

SEQ ID NO: 281633 - DNA, 483 bp, Cannabis indica
acataaaaacaagaaaaactagggttcctgaaaatcccccaaccggcagaccggttctgcaaccggaattccggttctgggaattcctgaaccccatccggaattccggttgcacatccagaattccggttcctgccaggaatcattcaaaaattcataactcaatccaaacaaccccaaatcataccaaactttccagacatgttctaaatacccctaagaacaaatccaaagcaaaagaaccaagcttcaatcacagaaactcatttcaccattggaggtttaagattgagttcaaaaactcaaaactagactaaacatccaaacaaccactaaatcaagcataacacaacctatttcaacataatttaacaccagaaaacactactcaacaatagcagcaaccacagcaacgaaaatcaacaatttactttgaaaccaaagcttttgaaccaaaattcacaaacttaaacaagggaaaca

SEQ ID NO: 281634 - DNA, 343 bp, Cannabis indica
taggtaaaggcaaagctaaggctgagtagccatgagagcgagtggatgaaggttgtacatgttgggatggttaggcttggagcgtacgatctttgggacatcatgttgtattttaaatggtcgctaggcgacaaatttttgtatcgattatgtaaaagatatttattttcttttagagagtaattaagtaaaagttttaattattgatctaggcttagatcttgataatactctacgacagaaaggaacaagggttagagatcttagcaaaaggagttattatattctattgcaatcaatgtaaggttttttaaactctcgtgtgtttaattttattgtttta

SEQ ID NO: 281635 - DNA, 598 bp, Cannabis indica
tcaaaatgcaatgccaagtcctcctccatttctggtgctaggggtttcgtccacttgtcagctttttcttttcgtgaagcaaaccacttctggactttggacctcaggaatgctacagcagcagtgatcgggaagcctcttgcatccttagttgtgttgttgaagctctcagcccagttgctcgtcattacattgtaacgtacccctggaaagtacgaccggacccatttttcaaatccgatttcctcaagatattttgcaaccgctggattcatggcccgaatgttctcaaattctctgtgaaactctgatcttgaatacgtgtacgcacacgtgtaaatgtgattcgtgaagacgtcagtcttgaacttgtggttgacgttcataataatgtggtggtagcatgacgttcataataatgtggttgacgttcataattacaacaaaaatctcaccgaaaaatatcttaattaatcattaataacaaaacaataatacttaattgataataaaataataattcataataattcataattcataataaaacaatatttaataattcatataaaaaaaatttaataattaaaaaataatt

SEQ ID NO: 281636 - DNA, 524 bp, Cannabis indica
ggggctcctacccctcctgcatcaggctttagcaggggaggtagtggttcggtcatggaccagaagaggagaacatccactgcatccggtggctcggggcagaaaaagaggttccgggggaaccaaagtagcggcagccgttagagtggtgcggagacccagttttcttatcctgagtgccccagttatgaaaggcaccatcagggtgagtgcagaggtcagggatgtttccagtgtggcatgctcggacattacaagagggattgtccccagctcagaccagaggcacctagggctccggcgagacccactccagctcgagtgttcgccatcacgcaggctgatgcagatgccaacccctcagttgtaacaggtcagctcttagttaataactcattttactcagtgctgtttgattctggggccacacattcttatgtggcagccagaatatttagtaaatttgatagaccgtgtgatagttatgaatcagggttcggaaccctattacctggcggagagtt

SEQ ID NO: 281637 - DNA, 618 bp, Cannabis indica
tataatatcaaactccgttaatttcaattctataaggtcaatactcaattccctatcttcgatcctaattggcatagatctaatgcgcctattagagataaccaattccccgctaggcattagggttccaaaccctcttacaagaaaatcataaagtctatccaaaagattaaatactctcgatactacatacgagtatatagtcccaaagtcaaataatacattaaaatgggagttgctgataagaagctaacctttcaccatagaaggactggatgcaacatcagcctgagtgataacaaatgtctgagcaagtacaggctttacttccagcttctgcttatctttctttgcctgagggcaatttctcttaaagtgcccaaccatgccacacaggaagcatgcttttcggttgcactctccgggatgatgtttcttgcatcgcgggcactcagggtaagaataatccttgcgtacacccttgccttgatttcctcggaaccgcttgttccgttttaaacccaccactgacgacgtaggtttactcttctgctcaaccatggagccccaaccacctctgccataactagaaatatggcaagcggtatcccaatttcg

SEQ ID NO: 281638 - DNA, 411 bp, Cannabis indica
ttggttctctagatttctgcttttgggtacttggcgaagattcctccggttcctttccaagcccagcagagatggcttttggatgcacgtggtttcctgctgcctccgtggctttttgcatggccagcatcacctcttggatcttttggttttgcactttttgggctgcgatttcagcctcatgatcgacagccttttgccttaagagcaccgattctgagtagctgccttcgtcgtaggcgtactcgtcatcaggaattccttcttcttcctcggaaccctcagttgctcttgaggccacgtcttcctcatttgggtcttgagcatcttgaagagggcgaggttgacgtgtgcttcaagtctccaccattgttgtgttgttgtaatgcagtgtgtgtttacagacgattt

SEQ ID NO: 281639 - DNA, 277 bp, Cannabis indica
gtaaaataatttccaacaccctgatgggggaaatacgacaaaccgctctcgggaggaaagaacagagcgtgaagaagaaagtgtgactttgaggcagtcaagaacccatagtcgatcaactcgaagaggagaaagcacttaacgagctaatgatcaagaaagtatgggaagcagtaaatccgcaagccactcaaagacagtctatgagtaggatacaatctatgagtaagacaaggtctgccagcaattagtctcaactggatctgcgagagcactt

SEQ ID NO: 281640 - DNA, 758 bp, Cannabis indica
ttttatgtttgtttgagttgattggaagtggttttaggtgctattatgttgtttgagcaagctttggagttttgaactcaagcttggctcattaatggtagattttgattatgtttttgggtagttattttgttgccttgaatatgttctttagggtgtatagaacaggtctggaaagtttggattgaattgggattgatttgtgtgagttgttaattttttagtgtttcctgcactgaaccggaattctagttcagagaggcctgtaggaaccggaattccggttggcttcgaggatttttttcccagaatcggaactcgggttgggggaaccggtctaccgattggggcaattttgggaaccctagttttttcaatttttgtgttatttagggtattgccatgttattcatcgatagggaaacttttagtttcaagtttaagtccccgggaagtgatttagcgcgtcgcttatcagtgttgtgattgatgtgatttagagcctgtaattcgccgagtagttgttccactcaggttgaccggcacacttgaattcggaatcgaggtaagattagtataacagtatgcatatgtatttgcatgtttagcgtgcatgttagtaagcctgttagattacattagatatgtatgttggctttcgtgctatttgacagtatcacatgggtacgactagagtatgactagcatatcgagtataggctgatattatggtcaaaagtgttggtaaatttatttta

SEQ ID NO: 281641 - DNA, 388 bp, Cannabis indica
tagatatgtatgttggcttttgtgctatttgacagtatcacatcggtacggctagagtatgactagcgtatcgagtataggctgatattatggtcaatagcatcatactatttgacagtatcctatcggtacagctagagtatgactagcgtaccgagtataggttgatacagtatcacatcggtacggctagagtatgactagcgtactgagtataggttgttactatgtcaaaagtactgtcgtacgaacgttcgagactcagtaccgtgtgggacacggggattagggttatggtcaggggtatgggcatctgatcataatccgagatatatgtatgttatatgatttatgcttttcttactaagtctgtcgactcacagtgcta

SEQ ID NO: 281642 - DNA, 304 bp, Cannabis indica
caatacacctgtctcggggtacacctgaagattcgtactctttattacctagttacttgcacatgctacagttgcggaatccaggtaccatcacggattttgtggtagaagatggtcgcttcaagtattgtttcttctctctgggtacatgttgtatgcgttgatgggtctttcttgaagactaggtatggtgggcaaatgttgtgtgcagtggctttggatgcagggagtcatatctttccgatagcttttgctatagttgacagtgaaaaccacaattcctggacctattttatgagaaaat

SEQ ID NO: 281643 - DNA, 640 bp, Cannabis indica
atcatttatttatgagaagagagcacaaatggcatgattatgttataacatgcatttaatggttattgctcttgtttctcattagctttaagcaatccaagaacctctgccatgttgacgctgaacggaactaaccacaagcagtgggtagaatctctcatgatgaatttgactcttatgagagtggatttggccttgagaactgatgcacctccgaaacctactgatgataccactgaaaaggatagaaagtcctatgaggattgggagcattccaatcgttgttgtctgatgcttatgaggtatcacatggatgagtccattcgtgatagtattccccaaactgagattgcaaaagattttctcaatgcgatcaaggagaagtacaagaaattctcaaagaatgagaaaaatgaatgcctgactttgttccatcggactaattatgctgattcaggtgacattagatctcacattgacaaactgatgggttgttaccaaaagctcaagggcatgggattggatcttggtgaggattacatggtgtggtttgtgatggaaaccattccctctcagtttgattcgatcagatcaagctataatgctcaaaaggagcaatggaccgttgaggagatgactg

SEQ ID NO: 281644 - DNA, 482 bp, Cannabis indica
agtccaagatgaaaatgaagcttcgatttttttttttttattatttttgaattaattgttttagtttaaaaacaatttggatttcaattattagtttgagattttataatctatttttcatattgttgtagacaattcctttattttggagactttttataataaagttttctaattttgaaaatgaattgtatttatgaattaatcttcattttctttatcttgtgcataccagtaccaattatatttatatgttttaatgattgtatgtgtatatgtttttattattgacacaaattctatagtatcttcaacacttcaaagagttaatactacataaacacttcgaatttcatttctatgtttatgaataattgttaattctaaaacaattattaagaatttttttaatagaaagatcttttgatctgataggggtggaaaaagttaagaataatatgcagttcaacgatcttttatat

SEQ ID NO: 281645 - DNA, 666 bp, Cannabis indica
ttctgtttcccaggtccctatcctaattcttggtctaggtcccagttattttgtgggtttgggtcccggtctaggttcgggttcgagtcttagtctctgttcgtgttaggtctctgtctgggttttgatctgggttttgatttgggtctaagtccttgtccttgtcctagtcccagttcaattctagttctatttgcgattctgagttcgagtttgggtttgagttcgggtcggagttcgagtcctggtctgagtttgggttcgtgtccggatttcagtctagttccagatcaggctccgtgtatgggttcgggtccggagttcagtctaggtccagatcaggctccgggtatgggttcgcgtcctgggtcttggtttaggttgggtccgagtcccatttccaatcccgatctgggcctggattcagttcggtgtctaagtccttggttctgatcttggtctgggttcgagtttgggtctaggtccgagtatatcattgggtttgattctaggtgtgggtgtttgagttcgggtccgagtctgtgttcgggtttgtgtccagatctagacctcgatatggctctaggttcgattccaggtccaagttcgggtccccagtgtgggtccaagtttggatctgggtcaggatctcggtccagatctagg

SEQ ID NO: 281646 - DNA, 1200 bp, Cannabis indica
gtttatggtattaagctcatgattatattagtccgcaataataattctaacattctcccacttggacaatataatcaaccaccataacattgtctatcacacataaggtaaccaattaagacgtacataatatcatatcgacaggatacatgtattatgtatgaattgaccttgaagacatttatccattaacaatcattaacaatcaaactaaacatgcatgaggtacgacaaaattgagattatgcgcattcatctcgttttgtacctgtcacttccttgaacaacgacatatatgtataagcatacatatgtaataacaataaagaagtgacttcagtatcataatgcatgttcttaacaaaacacaagccataagcaatccgtacaaaatactagcatgttcaatacataaataacaaactcccactgagcttaataagctaggcttccaacaatcccattcgggcaacatgctccaaaaaacacatatgggtaagcctttcgttagtgggtctgctaacatgccagtgctaggcgtgtattcaatggaaataggagactttgtaactttctctttaacaaaatagtacttttgtcaatatgctttgagcgagaagtacttctagtgttcttagagagaaagctactgcagaattaccacaatataatttcagcggcctcgcgataaaggctacagcatctagtgctgaaatgaaattctgcagccatattgctcaacaagtagcctcataacacgccatatactctgcctccattgtggatgaagctatgagtgtctgcttgacacttttccacgatacagctcctccagccatcatataaatatagcctgaagtggaccttttatcgtccacgcatcccgcataatcggcgtcactgaacccaactatatccagagtgtcagctcgccgataggtcaacatatgatccttggtaccctgaagataccgcatgaacttcttaaccgctttccaaatggctaagtccgggatcactcaagtacctacccaacacgccagcaacaacggcaatatcagggcgtgtgcatacttgagcatacataaggctaccaaccagtgacgcatacagacaattttcatttcatctctctctttatctatttgtggacattgagcctttgagaacttgtcacccttcactatcggtgccttccca

SEQ ID NO: 281647 - DNA, 221 bp, Cannabis indica
gctaactgatagttctggaggatattatatctagggaacatggtagttcaattgactgggagcgctaaatacagatatagaatctatagcttgataatcataacatatctatatcgtggtacatatagagcgttctatataattgagtgtgctattcaattccaaatctatagtggcccaagatggaattaataagttagagaatttacttggtaaattct

SEQ ID NO: 281648 - DNA, 575 bp, Cannabis indica
tggattaacaatgaatgtgatccttgtgtaaccgattggacacctgctttgtatataaaggggtgatccaccatgaaatggcacctacgaatcccttgctacagtggactaagcagatcataatctgactgaaccactataattctctgtcttattgttattttccagccttcgttgattgtttctcattcccagtcgagtactcgccattctaggttgaatactcgcacttgtctttccacataaatttcttcttgattattaataatactatataatttggtgttgcgaaattcactcgacaacatttggcgccgtctgtgggaatcgactaagattttattcatttcaaagaaaaatatcatcatggctggaaatcacacaaacggaggagctaacaacgggtccatcaacattgggatgatgaacgtaccattatctggaactggaatgccacctgtggacgtcattaacggcggagtagggagaagcaatatcagacctctcaacctattcccagaaacgactgaccctcaagtcggggacacatccacaccaccagcaaccatgcattt

SEQ ID NO: 281649 - DNA, 470 bp, Cannabis indica
aagctaaccatgcaggaattttattaaaccaagggtcctttgatattagttattttcctactgggctttataagctcaccccctattttctcccattccaggaactcagtttgatgctagtggaaaagaatggtaccgttgggaaaggaatgtaattattagtacagtcttattatactctttaaccatctaatgaaacagattttgtatttaagctgaaatagatcgtctagatgacttaaattagctatgcactagttagagatgaggaatgatgaatgctaggtattattttggtattttattgacgtatttaatctatctatttggtgattacataactgtggggtatattactgttcttttatattgatgagtggtcctgattttgttactaatattttcttattaatataggagttaatccatttacttttaaattagttattttgtgatataaataaaggatc

SEQ ID NO: 281650 - DNA, 556 bp, Cannabis indica
tgatttaattacccaattgttaatgctaattactattctctttctttatgtgaatgacagattataaaattaacctaactcttttcagatcttttaggtcctaaatcacatgttatctaatcatctctgagatagattaacatataatcagcattaagcaataatctaaatgtcacaaaggctatgcaaatactttcgtttcacatcaaaacctagtttatccaattttagcattcctaattctcacttttcagattttgaattgggatcataaagcatgtacaaggtgatcaatcttaaacatgtaattaaacacaaatttggataaattcacaatcaagaaaggagaaatagcaattatcattaactaaagataatttcaatcaacattcatcatctccccaaataggagtttagttcataaaatccataataacatccataatcaaaactaaaacagaaattaacatagaaattaagagtttaagaaagaactagttggtgattgcattccggatcgccacaattgcttcctctgcctccttctttcactttt

SEQ ID NO: 281651 - DNA, 560 bp, Cannabis indica
tataagacataaccgggttagacctggtataaatcacatggataaaccaccgaaagaacgtaatgtatgaattatgtatatatatgaatagggttatgcgagcaaggcataaccaggttaggctcggtaaccaaaaccaaggtaaaccctactaaagccttattgtatatagatgtgtgaaagcaacacgtaggtctatgccacaaagacatatataggcgtgtgagcgtaacacgcaggtctatagcaaatagacaaataatgcagtggcaccattaattatgtgttatatatattgagattaagggttgtgcgttcaagacataatcaggttcgactcggtaactagaaccgagatgaactattctaaggccttattgtatttagacatgtgagcgcaacatgaggtctatgttacatagacataaacaggcatgtgagcgtaacatgcgggtctgtgtcatacaggcatatgagaatggcattaatgttattatagtgtaataaacatgttagtgatatattatattgtcttgctgggcttggctcacgggtgctct

SEQ ID NO: 281652 - DNA, 538 bp, Cannabis indica
aattaaagtttaacatagtattatataaaaatatgatatataatctaattcaatataatacaatacaatacaatacggcctaatacggcgttccaaacgagcctaaaaggtattattttctgcatgattcagagaagaaggggcttttttcaaaagtattttaatgtttaattaacagggtcaatgctattaatatttcaaatcaacatttaatcgaggagaattaaaataattttaaaatgaatgttgactattggttaattttctctagattagtataatagattttgcatttcagttttttttttcattcttttataatttagaactagagaactaagccgcggtgttgtctaacttttataattatttatattttgattttttttatgcttgattaagtgatataattggatataaaaatatttataattgtatatttacaaacaaagtaataattttgaagtttagaaacataaataatttattatttttaaaatatattaaagaatggtcattttatgacaaatattaaaaa

SEQ ID NO: 281653 - DNA, 771 bp, Cannabis indica
ttttccttcaacgggccaagaccttcaccacgtatgacaagaaggcccttgacgtcggggagttggtcacgacggagtattgtcggaaggccaagctgatcctggggaatcagtcgctggatgactccaacctttccaaagtcgtctgcccgaatgtgagggctccagctgcagagaaggtattccgggacgatatcatcgccacggcagaggacaagtaccagaagtacctcttaaagagggaacaggagcgggcttacactaaggcccaggcggccgccggaagggcccttcgtattgggactccactggagcaaagaaccaccagaccaaagcccgtggtcccagtaccgaatacggaggctcctgatgccagcacttcgggttctggtaagtcctctttaatgatacattatgtcccttccgtccgtgagtaggctagccttaggcctatagggttcgatgaatatctccataggtttaggatgccttccactcggtgggggaatcatgccaaggagtattatttctcccacttaggcgattatttaggtcggtctcggatgggttctgaacctccggtgcctattcccttggacccttcagcctatttatcttctagctggttccgtccctcgcagagctatctcggggatgatgtagccagtgttatgattctggactttgctagggccgaattagagagtcagggtaggactagcttgattgttttttgctaagtgtatgatgctttcatggatgttctaacac

SEQ ID NO: 281654 - DNA, 250 bp, Cannabis indica
atgagatcctagagtaaaggccatctagaatgcaattatttgcataactcgaattttcaagaaaatcaccctagatgactaattcagcgcaagattagcatcattaagaagtcaaactgttctaacaacccatttacctaagaacataaagtgatgattgtgcactgcattgtcacatcaactgcacatggggaaaattttgtctcacaaacccctacaacggaggctaggtactgcctaaagaccaaaa

SEQ ID NO: 281655 - DNA, 527 bp, Cannabis indica
aattaatctctcctccacacttaatattagcattgtcctcaaggctcaatcaaataaaatcaatgcaaaataaaaagaaaagggcaagaaaaactcccgtaaggttgctttgtttaacgtcgttagctcgactgcatgttgtgctcatgtggtcttcacgtcggatcttctaacaaagagtcattctttatgtatttatgaatggaatctaacacattgaatttgagtgtttccctatcaaattccattctaagtatccatgcttttgtatccaacttctcactcacagtgagtaagaaggttctcccaaataaagttgttgtaagattgggatcaccctcatcttccatctcaattatgtaagaatcacctggaatgacaagtccataagcctgcacaaaaatatctttaactatccctaaacgataagcattagtttgatcagtcgattgaataaaaatctgagtttttcgtgatggacccagatttaaataagcaaaattagaataagacatattactattaat

SEQ ID NO: 281656 - DNA, 588 bp, Cannabis indica
agtaaaacaagttttatattggtttactattcaacaaccttgtcaagaattcatgtaagttgtaaccacaaaattgccaggtcaaaccaacactttcattgcaatattcacagactattcaacagagtaaaacaagttttatattggtttactattcaacaaccttgtcaagaattcttgtaagttgtaaccacaaaattgccaggtcaaaccaacactttcattgcaatattcacagactaactacaaaattatttcatagcatttacagaaccgcacacccccaatcatctttaatatggacgtatcagaagccagatcattaacctaaattggttagttctattatgttttggaacaaatcgtctataatataaaaaaccctcatacttgtatcttgaaacattcttcaggaaccaagattttaaaacacaattgttacctccttaaggtcaacccactcccaagtctcatttgttgtatttatatcatagaccaaagcatgccggccctgtaaataataagaaaatcaaacgtggtttaaatctcaaggcaatagagccttttccgttaaatctcaaagataca

SEQ ID NO: 281657 - DNA, 501 bp, Cannabis indica
ttgctgaatcatacaaagtcatgtatgaaaaatggattcaggttactactgaaaatagagagttggttaaattgaataaaaaactgtctcatcaaattgaaatgtgtgaattaaaaataaaagattatgagacagatttttgtgttaaagatgaaaaaatcactctcttaaagaaggaacttgaaaattttaagaaaaatgttcaaatgcttaaccctggatcttctatttttgaaaaagctcagaatgcaggtcaaagaggttttgctggcattggatcaaatggtatggaaagttctggaatcacgaagtttgtaaaatctagtgttccaacgaatcttcctgaggctacaaatgtgaagtctgctgcaacagtctcacaacctgtcgtagcagaagcagtttctgctgccgcaaaatctccaggatttacaaaaagagtaagatctcaggtaaaaagatttgttcctacttgtcatttttgtggtagaaaaggacata

SEQ ID NO: 281658 - DNA, 597 bp, Cannabis indica
tagaatcctgttgttgtttcttttgaactggacccttagcagcttcattctcaaatttccttttcttgcccttatccttaggggtagtggccaagtgagcactttcagttttgtcctttttcaacctttcttcctcttgcacacaatgagaaataagctcgttgagagtccatttctccttttgacagttgtaactaattttaaattggttaaactgtggaggaagtgttaacaaaaccatgagtacaagtacatcatccgaaagctcaatcttaagtgtccttaatcttgagacaatatgatgcatttccataatgtactcccttacatttccttgacccttatacttcatgttcattaaagaaccaagaagtgttgtcatttcaaccttatcgtttttagcaaaacgttcctcaatttgttcaaggaaattcttagccatagtaaccccttcggattctgtgccccaaaaggcttctggaatgctgtgtttcataatcattagactcatgcgatttgaacgatcccacctctcaaattcccttttatcatcatgggaactttccttagtgagaggtgcaggttgttcattcctta

SEQ ID NO: 281659 - DNA, 836 bp, Cannabis indica
tcaacagtgatgcaccgaattctaatggaagacaatgccaaaccgacaatcgacgctcaacgaagactcaatccacccatgaaagaagttgtcaaaaaagaagtagtcaagtggttggatgctggagttgcttatcccatttcagatagtaagtgggtcagcccggtgcaagtggttccaaagaaaggtggaatgactgtgatcaagaatgaaaagaatgagttgattcccacaagaacagtcactggttggaggatttgcatcgattacaggaaactcaacaaagcaacacgaaaagatcacttccatttgcccttcattgatcaaatgctagacagattggcggggcaagaatattactgcttccttgatggctactctggataccaccaaatagctatagcacctgaagatcaggaaaagactactttcacatgtccctacggtacctttgctttcagaagaatgccattcggtttgtgtaacgcccctgctacttttcaaaggtgtatgatggctatcttttcagacttgattgaatcttgtattgaaatctttatggatgatttctcggtctttggttcctccttcgatcattgtttagaaaatttggaaaaggtgctaactaggtgcgagaagtctaacttggtgctaaactgggagaagtgccactttatggtaacagaaggaattgttcttgggcataaaatttcaaaagcaggaattgaggtggataaggctaaagtttcaacaatagagaatttgccacctccagtttctgtaaaaggagtgaggagttttctaggacatgctggtttctatcgatgattcattaa

SEQ ID NO: 281660 - DNA, 681 bp, Cannabis indica
atggataattcataacgtatctatatcttagtacatatagagtgtgctatataaataagagtgcaattctgaatctatagtggcgcaaggagaaattaataagttagaaaatttacttgataaattttagttctacttattggaagcttgcttatatagggccaagttaattagttttaattaatcaattataattttaaaattagactactttttatttattaattttcactaagcaagggcttaactgtgaagaaaagaggtttttcgatttatttactaattaagagacttttttaagtttaattaataaataaaataaataaaaattttatttgataattaattataattattaaataaatagttttgacatttataggattaaaattagaaaatatggcattatcgaaagaagaataaatagttgaaataaagtagcgaaattgtaactagtgaggccgaccacttattgtatttcttcccattattttattctttttaatccatatatggatcttaggtctatggatcttaatcctaatatggttaggttcaacttagttgtattatttatgttcttcaagttgtttgtggatgctaatttatggttttggcggatatttacatcttgggaccatggtagttcaattgagtgggagcgctgatcatagatatgga

SEQ ID NO: 281661 - DNA, 174 bp, Cannabis indica
ggatgaagatcttttgatctatgatcaaccattgatattgacttagaaagatacaacggtaagattataatatctttaccaagatcaatatccgtcccagtccaatgtatactccatacatccagaactagcatactttgccaatatcctggaaagaacataacacttatccaa

SEQ ID NO: 281662 - DNA, 423 bp, Cannabis indica
tattatttaataattaagttttagttattaaataattggaatcggtatttaagtggttaaattagaaaattggcgtttttgagaaaaatgggatgaaaaatgataaaatggcaaaattgcaagtggggcccattatcctatacatggccggccactatgcatttaatttaccattaatttttcattattttaatgccaaataaatctaacctaaacctaggtggttacctataaatagatagtgatggttcacattcaaacttaactctgtcagacgaaaactgggcgtctttttattctctatagccgaaaccacttcccttctcttttcttcctaaaatttttgaaccttgtgtgaatgagtgattgcccacacacatcaagtggtacctcaatcatagtgtggaagattgtgaagaatcc

SEQ ID NO: 281663 - DNA, 587 bp, Cannabis indica
ttcaaaatagaaaaaatttcaaaggaaaactctctctttctttcctctcattttcggccctcttggagcagcaagaactggccattttccttgggattttgcttgtgatttcatctctctttaaggttcaattcaagctaggttagctcctcttcctttcttcttaaaaatggttgaattttgatgaaaatagtgtgatgcatgcatgattatttgaggttgttgctgctgtgatcttgttgttgatttctgtgatttaaacatgtttattagagtttaattaagctacttgtagtgcttgatagttaggttatttaaagttatgaattttctatgctaaaactatggttttcaaagagaattggttaaaatctgttgctgtgatgttgttgaagtttgtagttgttttcagaggctaatctatgcatgtttaagtaggtttggactggtttgattgcatgttatttaggtttactcaagtttgagtttggaactcaaagcttgagctttaatggtgatttttgttattgtgctttctgggtggatttgatgctttagaaatgttctaggggttatatagaacaggt

SEQ ID NO: 281664 - DNA, 1403 bp, Cannabis indica
  modified_base (52)..(52): a, c, t, g, unknown or other
  modified_base (56)..(56): a, c, t, g, unknown or other
ttaaaactaaaggaatagaaatgacgaaataaaaaaaaaagaaaaaaaattntacnggtatagattttaaaatccaatatacatttaaagttagtacataatttgctatgtcgttagagtaaaaataatattaaaaaattttataccaattttaataaaatgatgtgctattagaaatgctcaccttattgccacacttgtttattatgcacaatcgcattaataagaaagatttagagtcaacaagcacactttatttaatatataataaataatacttgtgtcttatgcgtactaaatacgaaattatgaatagatgtaattccaaatattcaatgtaattaggaaaattgattaaaaaaagtaattaggtaaacaaattaaaaaggaacaatcaaaattaattttaatggaacaaaactaaagttattaatttgtggtggcaaatggaatacaatgccaaaaattcaaaagagaattaaaattaatctccacataacaccacgatcttaaatttggtatttttttttttttcttcaatagaaaatttggtatttttcttagatcgctgacatttcctcttttttaattatttgtttatattagtgaaaatattaaaaaaaaatagaaaaatgaaaataaaataataaataaagtcaggccagtgagtttacgatgagagagccaaaaaaaaccaaaaaccaccaaaaacccagcgaagccaaaccaagcacagactcaacactaaacacaactcctccactccatatatatatatatagtcttactactactgctactctctctttctccgtcgaaactcaatccctagatcgccaaccatggctgcatcaaagagagctcgggaccgccatgttatggactccgtctacccagtcattgaactcctcttccttctcatcgcttgttctgagctctgcgatgccgctacagtcgtcgatgtttaccgtctaattcaatacgatatctctggtgtccccttggatctcgactcgctggactcaaccaccacgctgcttctatgcatttccctccctcctccgatctctcccgtactgttctcatcatccctctccgtgaactcaacatctcattcgttaaaggtaacgataattgtctcattttgtctaactcataggggtactgcggtgtttgaatgtttgacctgatctgaattttgattgattggaattgatagtccaagtatattgggattcttgcgtattttattgtggtgagagggaaaaaaaagtcttttactttaaagctgatgattggcgttagtgaggtatttaaataaaaaaaaaattgagctttgtgtttgtgcgaagagatatcatggattgaatcgaatatgtttagtgccatgggatctagctagt

SEQ ID NO: 281665 - DNA, 552 bp, Cannabis indica
tctgtgaatttattgcacccgactcttgtccagggaatcctcctagggtttcctgtatgacaggtgtccggagggggcctctttccagcggttaggggacccccattccctttttcttggtttagggtttggtatggggcctaactgctcgaatctttactctttacagaatcgaaagatgtctacttctcgctcaaaatcgtctaagaagagtggtaagcgcctggctacccttgaggaggtctccctgggtcccgttgcccaggaggggtacaagtctcgggcaaccggatgggaggcggccgagcttcactccactctaacctgtccccatcagttggagaacatagtggaggtggctggaatcaagccttccatatcagggacataccaccggccacctcgcgacgcggagacgcccaatcataactacggcggctttggggccttgagccagacgcatttgatggtcggggccatgcttcctcttcaagattattttgttaatttcttagtttttgtcgaccttgcgccgtaccaacttattcccca

SEQ ID NO: 281666 - DNA, 564 bp, Cannabis indica
aatcaccattaaagctcaagctttgagttccaaactcaaacttgagcaaacctaaataacatgcaatcacaccagtcgaaacctacttaaacatgcatagaatagcctctgaaaacaactacaaacttcaacaacatcacagcaacagattttaaccaattctctttgaaaaccatagttttagcatagaaaattcataactttaaataacctaactatcaagcactacaagtagcttaattaaactcaaataaacatgtttaaatcatagaaatcaacaacaagatcacaacagcaacaacctcaaataaaactaagcatgcaacctattaaacttactcaaattcacataaaactcaaaggaaagccaagggagacataccaacaacttgagatcactagagttttgcaaaatagagcttgaatcaccaaggaaaatggctggttcttgatgctccaagagagccgaaaaagagagagagggttgagagaaaagctttgatatttttaactttgtaattttttgaaacttagaaaaattaaggaaatgccacatagcccttt

SEQ ID NO: 281667 - DNA, 458 bp, Cannabis indica
caccatcatccaaagccgcctccagtacagaccaccatcaccatcatccaaagccgcctccacttcggtgtctccattgccccttgattcgactccggtacaaataaatcaagcggcggtcgacaggacgaagaaattctctatctccacgaacctcgaatcctctgcctcaaacatgaaccgatcaactgcgacgaagaaattcctcgaggtgttgtgctcctgttccactacgattgagacgaagaaccggtctaccctcaagtacacgaacgatgcccattgagtgaacgagacgatgtcgtttctagatttgttgacgggactgtccagcaacacgttgagcatgatggcaactgtaaagcccgcttagttaatttggaaattagcaattgtttatgattaattatgaaattatttatagctatttaaatattttattactgttatttatggaa

SEQ ID NO: 281668 - DNA, 592 bp, Cannabis indica
caaatataatcagaaagacgtttcggtttagataaaagtcttcccattgttgaagtgataggagaagtagtagacatgttcttgggtgtggatggaacttcatcgggattaatgtttgtcacaggcaagctattagaggatgaatttccatcagatttgggaacatgtgatgagtcctcagagggagtatgtgaatgtcctgtagaaggaattaaagaaggtgagaataattcattgatggatgtgggagatatagttttggaaagtggaaaaatatcttcatgaaagtaaacatctctagattgaatgatttcttgagtttcaatgcttaaaagattgtaagctttcataccagggggtaacctataaagacgtaaggtcgagatctcggggagaacttgtgccgtttggtttctaatgtcgaagcaaaagcaagacaaccaaagactttgaggtgagtataattgggagctttgttataaagaatctcaaaagaaggtttcttgttaagtaatttagatggagtacgatttataagataaacagcagtattaatgacataactccagtaaggtaaggataaatgagattg

SEQ ID NO: 281669 - DNA, 562 bp, Cannabis indica
aatggtgggtgtgtcacagtattctaatggtcatatacgcggttatatcgccccttgagatattgtgataccacccagccatttgcgacatgtgttaatgttctgatgagcgtactctttggctggtagatattctcgaaacggtgggagtacctcactaacttcagggtcatgcttgagaacgcatgccccttgagtcactgagtttctcccagccgtttctagaggtatatcgcttggcccaggatgcgtgacttattcacaggctgcgactctagttagactcctacaaatggtgggtgcctcctcgttacctcagggtcatgccaggagacgcatgtcgctgaggtcaccagggcgcccctgaccattcattgggatgcttttctattcgctatttttagttttctctctctcgcatattgatggagtggtcagtattcgcagaacgctgaccattctatcaagtgcgactttatgcgagtgtgatcacttactttgtttttcacacagtcaccatgctgaaaagatctctatctttcagatgagcgacctgtcggat

SEQ ID NO: 281670 - DNA, 605 bp, Cannabis indica
aggaggacattccaaagacagcttttcgtaataggtatggacattatgaactcctggttatgtcgtttggactaaccaatgctcatgcagcatttatggatttgatgaatagagtattcaaggatttcctcgatatctgtgtgattgtgtttatcgacgacatccttgtgtactctcaataagaagaggagcatgagctacatctccgaatggttctgcaacggcttcgagaacacaagctttatgccaaattcaagaaatgtgaattttggttatctcaggtgtcctttttagggcacattgttagcaaggatgggatcaaggtggatccaggaaagatagaatccgtcaggaattggccaagaccgaaaacagtgacagaaatcagaagtttcttgggtctagccggttattatcgtcggtttgaggaagggttttctaaaatctcaacacccttaaccgagctcaccaaaaagaatcagcgttttgtatggtcagacaaatgtgaggctagttttcaggagctgaaacagaggttgattactgctccggtactagctttgccttcagacaagaaaaagttcgtagtctactgtgacgcatcc

SEQ ID NO: 281671 - DNA, 478 bp, Cannabis indica
ctttaatggagttcttgttaacctgggatttttgctaaagatttgctaactttttgctgcagcaaaaacgcacagtttttgctaaacatagggggattcaatagttcaagcctttcacatttcaaaagctcacaactaaattttattttcatcttgcatctacttttgagttaatttacttatttttttactcctttagttgattcattaatcatttaattttagtttttaggcttgttgcttggtaattaatttttgcaatagaaattttattttcacagtccttgtggagacgatactcattacttatcactgtattacttgtttgtgactacgtgcacttgcgtatctaattttaacacaacaaacaacaatacatttcggtttgaatgaggaacggggcgaggatttctcatcaaaatggggaatggggcggggacgggaattacttttgtccccgaatgttaaacgaggcggg

SEQ ID NO: 281672 - DNA, 529 bp, Cannabis indica
aacataaatataacatacacccaagcttcaaattacaatagttcaatctctaactcaaattcatatactcaagtgaaagaaaatcaatttctttagcttcttcaaacacaacacaatctcaacagccatgaaatcaaataaaacatgcacaaacaaacctaattcaactaagaaatcatgctcagaactcatctaagcctacagccatgaacacccataaagaactaataaaaacctagcttaaaacctaggaaatcaccaagaacataaggaggaacttacctcaaggttctaggttggcttgggggttgagttcaactctgaaatggtggatttgctgaggaaaagaagtctcctaatggctggctcaagcttgctcgagagagggaatgagaggagttgaagatgatgaagttacttagcctccaagtaacttaaataataagattttctcttctttttctttcttttctatttctatttatttattttttttttaaaaaaaaaagtctcagcccctaaataaaaa

SEQ ID NO: 281673 - DNA, 541 bp, Cannabis indica
tagtcacaaattttgttgtgattaaaaataagattttttgtagtgatatttttcttatcaatttttaaaattaaaaaaaaacaaaaatggttatagaatacatatttttaaaaacaaaaaattacttttatttttatgattaaaaattaaaaaaataaaaaaataaaaatattaccaaatgccccttaaataattaaatatttaagagtcaaataatagtattaattactcattattataatatttaattaattagtatttttatttgataaacaaaaattaaatattattcttattaattaataatatgtttatattaaatgtaaattattgttgcatacatatataaaagtcatatactataaaagtgtaaattattgtacaaattaatatatttaacagtgcctatacataaatcgatctattgtgtataacatttgttactttactttcttattataggaaattttgcaaataataatagggatttttttctcaaatatacaaaaaagaacctcatatttacatttatacggacaca

SEQ ID NO: 281674 - DNA, 525 bp, Cannabis indica
caatatggcacttaatcctttggttagaggatctgcaaacatcaacttggtctttcaatattctatcacaatgtctcctttcttgaccaagtctctaacagtgagatactttatttttatatgtttggaagcactactaatctcattattctttgaaaagaaaacaacaatattattatcacaatagattagtatatgagaggaaatagaatcaactagtcgtatctctaaaatcaaattctttaaccataaagcttgcaaagatgcctcataacatacgacaaactcaacatatatagtagatgatatgattaaagtctatttaacactttatctaagaaatagcagcaccaataaaagtgaaaatatagccagaagttgactttaaatcatctacataaccaccaaaatctgaatctgaataaccaacaacttggagattgtcgacatgcttatacacaagcataaaactctttgttctttgcaaatatctcaaaaactttcttggctgcaacccaatgatca

SEQ ID NO: 281675 - DNA, 611 bp, Cannabis indica
ctttcatctttttatgcattttgaaatttctctttacctattgtgcttcattgatacaagtcatatcttgtatgattaagggggagaaatatatttagcttgaccttacttcctatgccaccctttttgatgaaatcaaaaggggaagaaatattagaattgattattttggcattaatcatattatgctttcaagtattaacaagtttattgagtatatgattaagggagagctttgtcatgttaagaaaaggtaacaataaatatgcaaaagtaaaatattataaatcaatatatgcatatattaagggggagctaaactcaacatgtttgaatttactttttctttcctttaaaataatcaaatattttgatatcatcaaaaagggggagaacattgaccaaaagtcaatcactcactttttttgatgataaataaatatttgattattatttgttactaatatttttttgatcattttgtaaataattcacaaagtatcaatatttgctcggtaaaatcaaacataataataataaaaaaaagttgattcaacaagtatatcaactaattcatacttcataagtgcaaaagattcatcaaaggatca

SEQ ID NO: 281676 - DNA, 532 bp, Cannabis indica
gctcttttcgacactcaacacgatggtgcaaactcacagaggcctgtctgacccagcaacttcacagacgctggatccgacatcgcaggacccaaggagttcaagggttccacctactgtctggacagacgggaagtgtggtgaatggtgaaacaactcctgttactgaaactgtgcctggtgtgcaagaaactgggaataacagttccgcacacagccagggcattcataacacgactgttctgcctggaaccaacacccagacgaccatcggagacgcaaccgaattgcaaaatctccgtgccgcactcggactcatgcagagtcatagcaacactctgcatcatgatcaggatgaactgtgtgccgcaataaatctcgcatttgacgaacaaaggtgtatgctcattgaatggagagacaaagagatggaggcattaagggctcaccatgtagagatcgaagatcgtagtcggcaagctactgtgctgatacgaagagcttaccagactgtaggacagcaaacgccgaa

SEQ ID NO: 281677 - DNA, 495 bp, Cannabis indica
tgctgtgattttgttgttgttgctgaggtttaagcaagattaattaaggttaattaagctgcttgtaatgcatgatagttaggttgtttagagttgtggaatttgtagttccaaagtttagttttcaaagtgaaaattgagaaattggtggctgtgattgttgcatgagtttgtgtatgttttctgcagtttctaaatgcatgaatatgtagttttaagcaaggtttgatgcatgatagggttgtttaaccaagtttgagttttgaactcaaagcttggagctttaatggtgatttttgattctgtgtgttctggactgttttgttgcttttgaaatgttctatgggatgtttagaacaggtctggaaggtttgggttaaattgggtttgaattgaatgagttatgaatttttgaatgtggtctgcgaggaaccggaattccggttgtgcatccggaattccggatgggggttcaggaatttccagaaccggaat

SEQ ID NO: 281678 - DNA, 892 bp, Cannabis indica
agatagctttttcaagtcttgcatgaggaggattcaagcactcttcaaggtgatcgaaggcatttcgagctcttagagttttatcaagattcgattagtaggtggaatacatcaagcttgcggcataaaataagagggagtctatttatgcataagtcaatttctttgtattattgagaccgatctaatgaatcttatctctgtacgtggccccatggactagtaacaatctgaaaggattgttgaaaccacgtacaaaaaccttgtgttacttttctgcactgtttgtttttctagtttcttatggagttatagagttgtcttctgtaactacagaaaaatattttcagtatcagtttcattattccgcatttaattaaataataaaactcagaatattaaaatacggaattttaaaataaatgttcatattagtagtttttcttaaatattacgaaattaatacaaatatacttttattttatttttgttagagaaaatattgagccctcaaagattagaaaaaaataaaataaaaatatatttttgtaaaaaaagaactattatatgatttataaaattgttatgaataaataatatattttgagtttaataaagactaatatatatttatgtaaggaataccaataatatttatatattacaaaataaatgtgcgttttaatagttttttaaaaaaaaaatgttacaaaattaatgtaaacatacttttattttattttgttggataaaatgttaagcttttaaaaattagaaaaaataaataaaaaatgatagagaatgccacctcttttaatgctttcctatatgtattaactagtaaacaaagccgcgcttcgcgcggtttaaagtcatgatttcaatatatata

SEQ ID NO: 281679 - DNA, 1039 bp, Cannabis indica
acgtatgaatagattgatgatagattttgttcgaaaaaaaattgatgatagattttactaaaatataaaattgcatatatgaagtaattgccatcccatcagcacgaagaaaaaaatgtagataccgaacatgaagtgcctaacagaaatccaaatagccacgattaattgtgtgatcacaaatgactgcccattattatgcatcaacttcatgggacccgtatgccattttcattcttaaaattaataatattggacaacataaatatcgtcatatgtgtagtaggcgtgcgagaagaaaaatacaaaaaagaaaatcaatataatgccctcgtcctatgcatcaaattcaaaaggagaagaccatatagaaaacgacacgacaagttggagcaaccccacccctacggtttaaataatttaaagctattaatcttaataacgtattgcgattagctaccgatacttcttaaaacctattattaaagtatacgttttagcatttttattcttagaaatatttatattatgacaattattaaaaagagtcagttggctaaattaataattaataaataacaataacaagtttggtacatgtacgacgacgagatggaaagagccaagagattagaagatcaaatcctaattcttgttttggtaagatggagaggagaggagaggaggaaggattactacttattattataccaaatagttaaagaatttatactctccattgtaattttatatatatatatatatatatcttccaaaagataattcaataattctgtgtaatagcaatccattcttctggcaatcgatttctaccaaagtagttagtgaaattattactctcttctttcgctcttactataactccccatcctctctatatggttaggacattagtttattcaggtcagccctcacaacctatcatattgtcacctaccactctcgtcatcccactaagccatatccccaaaatattcacttaattgaattcaatttcatcgcattaactctttctcca

SEQ ID NO: 281680 - DNA, 524 bp, Cannabis indica
agagcaaacctagatgtttttgtcgggtcacatgcggatatggttggaattgatcctgctatcatttcacacgttcagtccaacaaaagcgaaggctactggataaagaacgagcattagccctgaaggaagaagtagaaaagctacgcaacaacaattttataattgaagctttctatccagcttgggtcgcaaatcccgtattggtgcccaagccgaacaagaaatggcaagtctgtattaatttcacagaccacaacaaagcataccccaaagactgttttccacttccaaggatcgatcagctcgtggatgcaacatcagggcatgaaatattaggcttcatggacgcttagtcaggctacaatcaaacaaaatgcatccactagaccaagaacatacaagtttccgaatagatatgggtatatattactacaaagtaatgttttctggtctaaaaaatgctggagcaacataccaaacgattggtaaacaaaaatgtttaaagaccagatcggacggaa

SEQ ID NO: 281681 - DNA, 453 bp, Cannabis indica
tcaggggcaacatttaccccccaagccttgtttattttaaaaaatgaaacaaggcttgctcaggtgcctccggttgactcctcggtttcttggcacaagcctagagcgcgtgagggtgtgtttaatgatggcatttaatgcagcgattcgctttttgcagaggtgtctccggtcgactcctcggtctcctggcacgagcttagggcgcgtgaaggggcatttaatgatggcatttaatgcagcgattcgctttttgcagaggtcgattcgtttcatgcccattgattgatgcggcgcattaatggtgtcagacggatactcaaacgtttccaccgcctttattgcaaatcaatctggcccgttgatctttgggtatttgaatcatgcgtttcccccaccgttcgattggtaggtggtgacgcctgttccacatgcatttttgcctataaaagc

SEQ ID NO: 281682 - DNA, 691 bp, Cannabis indica
ccccacttcaacttgggaaacaacttcctcttagaggaatatccctcaagatatagctcgcaagctaaccgcatactcgcatacggttcctccactccacatttcactttgatgaagatgttgaactaatgcctcgatcattctgactcttcgcccctcgacatttcattgttgccttagtaccctagtcctgctgacttttgccttaggccaacattgccatggtgttatcttagtacctgagtcctgcagactttcaccctagataactggctctgcctgtgtcctgagtcttcttgactttacatcctgaacaacaatcaatctccatgatactcatctcgatgcttgtaatgaataactagtcttgttgagtgaaccgtgaaggtctctcccccacttcatctgttggcgtcctcgacaacatgcccacacgcaaatgcctgaccgccccaactcttcatgcacaccatgtcatctaaaagtgcatcccgcaggatgtgactctcgagtcaactatctcattagcacccctgtcgatttccacatgcatgcactaacttcccactcaaccatccaactgattcacacttgcatcacgcccttctggctcccacggtgtactaagttccaatgacgcagccctctggccttcatgcaaactctagcacccttctcgaccttcgcaggc

SEQ ID NO: 281683 - DNA, 474 bp, Cannabis indica
ttttatttgattcgggtgctactcgatcttatgtgtcatcgagagttcttaatcagcttgataggcctagtgatgtttttgagatgggatttggaacactgttgcctaatggggaattaattatttcaagaaagtgggttagatcggtattaattagaattgaaggcagagaattgagcgctgatctcgtggagttaccattggccgagttcgatattatactcagaatggactttttgtccaagtattctgctagtatttactgcaaacggagatggtaactttccaaccgcagaatgaggaaccatttgtttttgttggttcaattcaaggttctcgtgttccaagaatctcagcgttgaaagctagggatttgttacacagtgggtgtgtaggattcctgacagttgtagtggattccagtaaacctgtgttatttggacctgaagaggttaaagtggttaaggaattcct

SEQ ID NO: 281684 - DNA, 539 bp, Cannabis indica
attacatctcagatggctcccactcaactgtagatgtctggttaaattacacataaaagtacatttaacctcttactattgttttgagggatatttagttgtgacatattatcttagtctgaacctgtaagttccttctagactaagtcatcaacatagcaatctagtattttaaatgaagtataaaatacttgctagagattaagtaatcaaattgagataccataaaattttatgaggattaggaatctttgcccaagtcattcgaatagactatccaagaattctattatcttattctcataattctgataagttatttctatccatatgaatggttaaatttactttctcagtagtgttcttaataattttaaaattctcccactcaattaaggtagtgtgatacattgtcaaagaactttattggtatcaatttctattacaacagtaatatattaaatggaacatataatcaagatcaagaatttattctgataattgctaattcattatattacttccatgtttaaaatatg

SEQ ID NO: 281685 - DNA, 667 bp, Cannabis indica
ggagaagcatcagcagcctggcagaagcttggccgaagttgaagcagccacctcttttcgaccataggcaacttgggccatgcagtactcgaggtacatgtccttagcatcgcccaagtagtcgaagttggcctggggattagccttccaaaaatcaaagaagagctcaaggctggcagtctccaaagcattgaccttctccttcaaacggtccgcctcggtcacctgggcgtccttatcctcctttagccaaagaagaacttgccgcaaagaactcctctcatcctgaagacggtcaacttcagcggataaggtctcgatggtttcctcaaagcgatcagcagcctcgaggtcctttgttggcacggagatcttcttctcggtggcaaacaacttcttgttggcctcacccaactcatggcgaacagctccagtctcctccctggcctcctcagcttccttcttggccagatccacctccgccttcaaggtgtcggacagagccacactcttggaagtagcagatttagcccgggagtaacgtgtaagccaacttcaaaccggcctgcataaaggaaaaagccagcatatggagctaagtgtgaaaagttaaaagggaagtatcaaaaaagactaaccctggtgagctccttcaagactccgccca

SEQ ID NO: 281686 - DNA, 556 bp, Cannabis indica
atctgagtctggattcagtttttggtataagtccttggttctgatcctggtctgggttcgagtttgggtccaggtccgggtcttgctttgggtctgattctaggtgtgggtttgagttcgggtcggagtctgtgtctgggtttttgtacagctctggaccccgatctgggtctaggttctgctcctggtccaagttggggactcgagtgcggctccaagtttgggtcgtggtcaggatctcgttccagatctaggtctagcatttcgatctcagtctgggtctctgtctgagtaaaggttcgtatcaagatccctatctaggtccaagtatgtgttggggatcgggtccaagattcaggtctaggtccgggtctcagttacgctctggttacacgaccgtgtctgggcccgagttcctgtctaagttttggtctgaggcttggtctgtgttcggttctaggtctgggtccgggtcctggtgacggtccttttcttgttatagggtcctggttcggcaattctcgttcaggttctaattttgggtcccaggtctagg

SEQ ID NO: 281687 - DNA, 602 bp, Cannabis indica
aacaaatccttggtaccataaggatgatagctcaagtaccaatccaacatgcctgcaacagatatcccaataggaatgcatgtacttgagcaaaccctaggctgccttcaataagcatatatatgcatgggacaatttcaatgctaatctctcgttattactaatatacatggactttaggcctttcataacaaatcacactttagactatttaaaaattctcaatgaaatcaaagcattaatcacaacactagttagtcaatgcaaactatgagacaatttagtttactgttgatctcttcatgaagaatctaaaataattagaccatataaagttcatcaaggattcttcatcttccagagattatcaaataacagttcaactgtctccagaatagatcactatcataaaatatgagcaatgtactatatcaagtaacaatataaacatatcattgctcccactaatctctcacatagtattgactaacgataatgctttgaattaaccattttgagaaatacagtaatcactatcttgatgttcttcctgaaaagggattaaatctattgaactcgggtgtccttttagttaccttttc

SEQ ID NO: 281688 - DNA, 262 bp, Cannabis indica
tttcaaggcttcctttagggcattgtttaagacaaaatttgtctcctttaacgacaggggtatcacctggtctacaatcttgcatgccaaaccgtttgagtactttatcgatatagctcttttgtgataatccaagaataccccgagaacggtctcgatgtatttgaattcctaaaacaaaagaggcgtcaccaagatctttcatctcaaaatgcttcgatagaaatctcttggtttcgtgcaataagcctatatcattagt

SEQ ID NO: 281689 - DNA, 659 bp, Cannabis indica
caggcgatgtgggattgcacagccttacccggtatttccccttacggatcacgggactactgactgtcacacctccgggagctatctttgtacaaaggatgtggtcttcggtagtgcgtattttgcctagtagcaaagtacacacgttcttgggaatccgtcagctccgtgtactgtgtgtactggggagtgtacccccttttttgacgcttctcctccgaccgggtgctgcctttggaggatcttttactcctcgagccctgggaagggcctgccaggctagcggttggagcggagtgtgagggagcttgtccatttatccctgagggatttccaaaatgggatgatgcgggcgccaaggcctggccctgactatatccgggagtggcagagaactgtatgccgctcatcggcggagccgcggtcgggacagtacccgagggcggtgctccgggcatgtaccctgctatcccggtgggatagtatcctccataggccactatttgggcctcttcaaggttgatatatttttggactctcttttggaagtcctgaaggctagcagccccttcttgttgtagttcgttccagaagggagtccctgtacggatgcctgcctggagaagagcaagctgttgtccgtcatcaactttcttggt

SEQ ID NO: 281690 - DNA, 917 bp, Cannabis indica
tctgtcccaatgtaagggcgccggtcgcggagaagaccttccgggacgagattatcgccacggcagagaagaaataccaggactatctctaccggaaggcccaggagaaggcatactctcaggcccaggcggcctccgggaggggacttcgtgtggggagtccggtggtaagaagaagccaggcgattgccgggaagtccgaggctaaattttttgacaagattcttcaagaagagattggagatcgtcccgccgggaggccccttcgcattgaggattcttcggagagaagggctcccaggccacagccttcggttccagagccaaactcaggggctcctggtgccagcacttccggtgccggcggtaagtctcctttgataattcattatgttccttccgttggcgaatatgccagtcgtaggcccgtagggttcgacgagcgtctatataggtttaggatgccctcgacccggtggggggatcgtttgaaggaattttatttttcaaacttaggagattttctaggtcggtcccggatgggttctggtcctccggaacctgttcccttaggtccttcagcttacattacatccagctggttccggccttcggacagctatctcggagatgatgctgccagcattaaagttcaggactttgctagggccgaattaggaagtccgggtaggagtagcttatttgccatatcttgtgtaagtggtttcccacggatgtctaacacttgcctatttttgttaaacaggtatctccatggacgccatcttggaccagcttgccggagttcatactcctgaggctcctccggcctttacttcttccccaatagcccctgccctaaaggcctcttccagcgctccccctgacactattgacttagtggatgacgaggaggt

SEQ ID NO: 281691 - DNA, 758 bp, Cannabis indica
ctgcctcatcttagcaacaagaaagctaagaccttactttcaagctcatcctgttctggtgtacaccgaccaaccactacgacaaatactacaaaagccagatgccttttgggcgattactcaagtgggcggtggaattggggcaatacgaaatcaacttccaaccccgaacagctatcaaaggccaagccttggccgactttgtggtggaatgcagaggaaaaactgaaagcatcccagaaggcgatctcgagtaaacaccacagccgagcagcacttaaaacaagccgacctggaagctgcatgtggatggatctgccacagatcagctatccagcgcaggaattacccttgtcacacctggggggcaacacctgcgggtgaatacgaggctcggggagaaaaaatgatagcatatctaagaaaaatacattatctgctcgcacaattctaaagctatagcctcaagcagattccaagagaggaaaatacaacagcagatgtgctagcccgattggcgagcaacaatataagtgacaaggagaacctggtctcgatccagtttcttgaagagcctagcatcaccggcacggaagaaatcgaaatgatcgacacatctccgaattggatgacgccaatagcagcctatctcaactctggggaactcccaaataactgaaatgaagctcggaaaatgagaagaaaggcagcatggtacatcatcgtagacgggatcatgtatagaagaggattctcaa

SEQ ID NO: 281692 - DNA, 557 bp, Cannabis indica
atttaaatggttaaatttggaaagttggtaattttgagaaaatagaaataaatattgtcaaaactgcgaaatccaagtgaggcccattaacaccctaggccggccacttgtgcatgctttttccaattattattttcattattttaatgccaattaatcactaacataaacctagcaattgtctataaatagaaagtgatggctcacaccaaattaagcaattaagcaatcaggaaactacatctttcagaaatttgagccttcccttttctctctattgccgaaccccttttctcttttcttgctcttcctatttcgaatgaccctagtaaaaagagtagtgcccacacatagcaagtagtacctcaatcatagtttggaagattgtgaaggatccaaatccaagagaaggacattcagactcagatcttgataatactctgcaactgaaaggatacaagggttagagatctgagtggaaagagacatattattccgctgcacccaatgtaaggtttcgcatactttatatgtatttattatcgttttagaaagtt

SEQ ID NO: 281693 - DNA, 660 bp, Cannabis indica
gttccacgattctttcggaccctacacgagggtccaactcatcctcttcagccatttctggctcagcggactcccggaccataagtacgggcaggtgggttgcgacattataacattgccttgcttccccctgatttcccctcacagtcccgactccggcctcctgggtagggaactttaggcacagatgtcggattgaagtgactgcgccaaagtctactagggccggtcggccgaggatcgcgttgtaggctgtcggacagtccaccaccacgaaggtgcagtatttgaatgtgctctgggagtgtccgggcacagggtgaccgggagcctcacttttcccattgggataagtgtcgtcccgttaaaccctgtgagctgggatccactaggcgagaggtcacgatctgtcaagcctatcgcggtgaaggcttctttgaagagcaagttcacggaactcccattgtcaattaagactctggccaccactttattcgcgatgggggtctctatgaccaacgggtcgtgatgagggaagcgcaccgtcttggcgtcttcttccgtgaatgtgatgggttggtccatcagccgaggcctttgagctgggagttgagtaacttcccatatctcattgtgttttgcggccccggcgtatcgctt

SEQ ID NO: 281694 - DNA, 549 bp, Cannabis indica
gggaacatggtagtgcaattgactgggagcgctaaacatagatatggaatctatagcttcaatctagcaaatagaaagtgaaatgatgatttccttcgagcttggctaaacagagataaatggttgagtacacatttcacttcactaaaatatcatttatacggggctaagtgttttaaggataaaatacaatgaagggtgtaacagtaatttaatccctatacaatgtaaatcatctagagaggatcattgatcaaattgggattataacaatggataatttatagcttatctatgtggaggaacatatagagcgttctatacaactgagagtgcaattctgagctctatgagtggatgcaacaaggaattaataagtcagtgaatttacttggtaagttcttggtctgcttattggaagctcgaatatataggcccatggtccccatactagttgagacaatactacttgtaagactcagttaattgattttgattaatcaattataattctaaaattagactatgtctagtttgtgaattttcact

SEQ ID NO: 281695 - DNA, 581 bp, Cannabis indica
attaaaagttttagatctctttttctcctttccaacgcatcttgaatcagctcatttggagtttgtatgagaaagttatgctaattttactgaaagaggtcaaagcaaaaaaaattgggtccagtggccccggcaacatacgtatcgttttaacaagtaatactcaggtaagtgagatcgttcccacgaggactgcagctaagtacaaatcaattaaattcttgtttctatttgacaatcgaataaataaactttgaacaaaataaactaagcaaaattaattaaaacaaacaaataaaaggtttaacaatggatgtgaaattagggatatgatttcaattgctttgattacccacttattaacactaattaaccattcttcttcctcctatgtgatgacagattataaattaatctaaactcttttcagatcataaaggtcctaaattgtatgccaactactgcatctctgagatagaacaacatacaatttgcattaagcaataatctaaaagtcacataaacaatgtgaatactctcgtttcacatcaaaacctatgtctattcatttagagcattct

SEQ ID NO: 281696 - DNA, 672 bp, Cannabis indica
tccctaattccactttcacataacataaatttggcattcaaaatacagataatcatatagagctcggaacaagttttccaacgatatcaagaacatccaaaacggagtcccgagtcaaaagttatggacaaaacaaaatcgaaaaaagggatggctctctgctaggtttatgaccgcgacgaccacaaatctggccgcggccactgcgttcgaaaaaacccagaaaataagattttaaggtctaaaaatgctcacattttcatatattcgaaccttaatcaaaccatacccaaaattaacttcttacaaataaaaatcatcacaatagagagctaacaacatcaattccaacattaatcaacaacatccaaccaaagttccaaagcttgagctacatctcaaataaatttccattaacaagaacttgaactccaacttcaaacaataaatttcagagctcaacaacagaaaattacactaatcaaatcctctaatttctgtccaaacctaacccaaacaaacttatgaatttaaagctttaagcatgctcaagacaaccccaacaaccaagaacatgcatcacaaattcaataccacaaccacaacatattttcatgctcttcaacaattaatttcagcaataaaactcagattaaaaccataaaaagttac

SEQ ID NO: 281697 - DNA, 557 bp, Cannabis indica
atgacagacagcgaggcgtctatctcgcttgaacatggcatgcatacgagaaagatcatctcgacactagaaaatttagttattagaattaaagcaatattgatttcgggaagtcatatgacgagccacagctcgccatcaaagttaacttggctcaatacctagcgaagcatccccatgagataatgcttaccgtatatccctaaatatgcattcatctcagcccaatgaaagcaggatactcacagttgtgtggattataaataaaatctgcatttacttagcctaatttgtaataaaatcccatgatttaagggaataattgctgtaaaaattattgtcaacttttgtaatttactggccactatttaattttaaataatggcaaacaagatgaaaaaggggaaaaaactcatacacgagaggccttaaaaatcaatcaaaattatgaataagattgactcgtggactatgcaaaattttaactgcaaaaccacgtaaaaaaccctgtgttcatattttattcctacaacttttatttttcagtatgaaatcat

SEQ ID NO: 281698 - DNA, 503 bp, Cannabis indica
ttaggcttttctttgtaagtggataggaatatttcatttaccttgcataacttaccaaatgaatgcttgaatggtgtcctgcttgctggtttgatataggaatatattgagcttaatggtaggattaaagttgtgagtgttggaaaattctcacaagcctagaggaatttgttgttatctctgtgcagaatgctaaagtaatgctgaaccaatgctgtactgactgtaaaaaacctgactagaaggaattagttattcaagccatttttgccatattatatttttttatcttgcaaacaatttttctagcagcagtagttttaattttagcaagtttaattcttgtcaattttaattttgaatcattactcaaccatttacatattatttctttttattttaagttgtaattagttgattttatatcaaactttgtttgcaatccctgtggagacgatcttacttatcactttattacttgtgtgactgcgtatacttgcgta

SEQ ID NO: 281699 - DNA, 579 bp, Cannabis indica
gtgtgaattctacgaatgttgtgcctaaggtgcagaacccgaaaagccgaatcaatttaggcccatctctctttgcaatgtgatgtataaggtcatttccaaaatcattgcaaatataattaagcctatcctccccacgctcatttgcccaacacaagctgcttttgtcccaggtaggaatattcaagataataatgtgttggttcaagagatcatccactcgttcaataggaaaagaggaaaagagggtttttttgcgataaagattgaccttgttaaagcctatgataggctaagttggaagttcatcgatcatgtcctaggttgtttcggattccctcaaaagttttgcagttgggtctctcagtgcatctccaccgcttccctcaatatttgccttaatggtggtccggtaggaaagatcctgccctcgtgtggtatccgccagggggacccattatctccctacctgttcatttgtgcagcggaagtgctctctaggctggtagaagaagctattgggaagggagttatccatggaattaagctaagtagggggggcccggtgctatcccatct

SEQ ID NO: 281700 - DNA, 580 bp, Cannabis indica
gaaagatgatgaagtttgttgctgtaattgttgctgcggtttagatgtatgttctggagttttattatgttgaaataggttgagttatgcatgatttagtggctgtttggagggattagtcaagttttgagttttgaactcaatcttgaacctctaatggtgaaatgagtttctgtggttgaagctcggttttagtgctttggatttgttcctaggggtgtctacaacaggtctggaagatttgatatgctttgggttcgaattgatggagttatgaatttttgattttggtctgcgaggaaccggaattccggttgtgcatccagaattctggatggggttttgaaaatttccagaaccggaattccggttggacaactggtctgccggttgggtgattttttgaaaccctagattttctcgtttctatgttatttggggtattgccatgcttgttatcggtagggaaacttttagtttctagtttaagtccccgggaagtgatttagcctatcacttatagtgttgtgattgttatggtttaggagcctgtaaaccgccgcgcagttcgttccagtca

SEQ ID NO: 281701 - DNA, 1152 bp, Cannabis indica
cacatagtcatgtttactttccactgtgttgacaacacaataaacaggatcaagtatgtgaaaagggtttggatgaatttataaatcaaatagacaaataattgataaggtgaaccaaaacatacaaatgaatgaaaaatacttctgtttctttattgatattgaataaaatggattacattgaaatggagttttatttagggcataaaacccaacaattattgatactttattaattaatttctttctctgggcgaggccccgtggactaggagtgttcaaaagaacaataataccacgtacaaatatcttgtgtcaagtgatttaattttctttaattatttttatattttgtttgttctattttgtcgctgcaaaactggtttctgcagtaacagaattacattctacttttccagaagtatacaattttatattttcgtatttattattggcatttggaaaaactcagttttttaattggtattagagcgggacattaaactcttagtgtggtctttttaacgatttcgcgtgtttttgtgtaaaatgtcattttttgcaaaaggaggttcgatttgtagatcacctttgctcaatgattctaattatcctttttggaaagttagaatgagagccttcatcaaatctcaagatgaaagagcttgaaggatggttctatcaggttggtcttctctagttgagatagattccgaaggtattctaaaataaaatctaaactcgaatggtctattgaagatgataaactttctgcctacaatagcaaagcgttgcatgctatatttaatggtgtatgtgaaggttatattaagcttatatcatcgtgtgaatttgttaaggaagcttggaagatccttcgaactcagtttgaaggaacatttgatgttaagcctattgggattttatgccctaaataaaacccatttcaatctaatttgatttgttatcaatgaaagattagaagtcatttatctttacatgtagttttcatgtttatggtttagtatatacaaaatctgtaagtccagaacatatagtcattcacaattacagtgatgtcaacacagtcaaatgtgattgtgattatatgcttcaaaagacaaagtctctgattcatcaatgcactggatt

SEQ ID NO: 281702 - DNA, 852 bp, Cannabis indica
attggcaaagtatgctagtatcggatgtatggagtatacattgaacttggaccgatattgatcttagtaaagatattatagtcttaccgttgtatctttctaagtcaatatcactggttgatcttagatcaaaagatcttaatcctgacatggttaggtttgatctgaagagtattatttgtgttctttaagttgttagtcaaagcctaccatttggtttgggtcacacatacagcttgggaagatgatggtacaattgagtgggagcgttagtcatagatatggaatctatagcttctatctggacatagaagtaacacaatgatttttttcaagcttggcttaatagatataaatggaagagctcttatttcaatgattatattagtttactgaaatatcatttataggaaggtaagtgttttaaggataaaatacatcgaggggtgaaacggtaaatttgtccctacttagtgtaaatcatctatagaggatctttgattattgggatcatgatggttaaatttttatagcgtatctatatcgtggaacatatagagcgttctatataattgagagtgcaattctgaatctatagtagtgtaaggaggaattaatgagttaggaaatttacttggttaatttttagatctgcttattggaagcttggttatataggcccatcgtcccatgctagttgagacaatactgtttgtaagactcagttaattggttttaattaatcaattataattctaaaattagaccatgtcttatttatgaattttcactaagctagggattaattgtgaagaaaagaaattctagggtttatttgttaattaatagact

SEQ ID NO: 281703 - DNA, 681 bp, Cannabis indica
gcctttagctttttaacaactcatcgaaaatttggtcgacatcatcatcgtcgaatgaatacttaacttctttcctttctttgagagttaatttcttttgcggctcccgtgccttccctttatctttgttgccggtattgacaaaagttgccattgattctcccttcttgaatggctttttattttcgaatctcggtgagggtttgccacccctttgccgagaaatttgtatttcaacgttgcaggccttcgagacgagctcattaaaagttttgggttctgctgtgcccacaaaagttgccacctcagggttgaggtttttggcgcacattgaaaccgccgcttgttccgatatcctttctggacattggagattgagatttctccacctggttatgaactcattagcgctttcactaattcgttgctttgtttccaccaggtcatggagacttatggtcttctttgagctcacgaattgtgccaggaaagctttttgcatgtcatcccaagtagttatcgatcctgggggtaactgagtataccaggtgaatgctgcctcttttagagattgcacaaattgccggatcaatagtgcatctgattgggcagattcaccacatgcagaggtgaaataggccaaatgctcatgaggagaaccattaattccatcaaactttt

SEQ ID NO: 281704 - DNA, 634 bp, Cannabis indica
ctaatcagattgtaatgggttttatttagggcacaaaacccaacatatgaggctcggggagaaaagatgatagcatatctgagcaaaatacatgatgtgctcgcacaattcaaaagctatggtcttagaaaaattccaatagaagaaaatacaactactgacgcgttagctcgattggtaagcaacaatgtaagtgacaaggcaaacttggttcctatccaattcctcgaagagcctagcatcaatggcacagaagaaattgaaatgattgatacatccccaaactggatgacaccaatagtggcctacctcgagtctgggaaactcccagataaccgaattgaagcttggaaaatgagaaggaaagctgcacggtatatcatagtagtggaagtcatgtacagaagaggattctcgatgccattgctgagatgtgtcactcatgaagaagctacacggctcctatccgaagtacatgacagattctgtggaaatcatgcctccagacaaagcttatccaagaaaattctaaggcaaggttacttctggccaacaatgattgaagattcaaaagcctatgttaagaagtgtgacaaatgccagagatttttaaagataccaagagctccaccca

SEQ ID NO: 281705 - DNA, 584 bp, Cannabis indica
ctatggggttttgaaaagaaaagtaagaagcttgtgggttctgtttgtgtgcttatgatatcttgagccaaaactgtcttttgtcgatttctgaatatctgagccataatgcctaaacctcgaaaagacctaatgattccaaaagatattgtcaacattagtggagaaaggtaagcatgcaagcttatgagttatcgggctgtggaacagttggaaagagtaaaacttttataacaatgtttcacgtgtgaataaattttgtggttatacgtagtgttatgaattgagcatctgaattaattgttagagttagtaggatcgaaattctagtttatgcaaggaagaaagcagagcatgagtcagcagtgtagtgattatctgatagcgtagttagttttttttatcttactcgagggcgagtaagaatctagtttgggggaattttgttaggttatatttagcctatgttttgggtctgaaaagtaagcattttctcgtctattggtgtcttttggagcggttttacgcttgattttcattgtttttaaggttcccggggtgtcaaagttcaaattcagtcaaat

SEQ ID NO: 281706 - DNA, 822 bp, Cannabis indica
ccatcggtttgaggatgaaaagctgtactgaatttcaacttagtacccattgcttgctgtaaacttccccagaatttggatgtaaattttggatctcgatctgaaactatcgactttggggcaccatgaagtcgaactatctccttaatatacaaatcagcatattgatccactgtatacgttgtcctcaccgggagaaagtgagcagacttcgtatatcgatccactatcacccaaatagaatcataataccctactgttctgggtaatcccactacaaaatccatggtgatgtcttcccatttccattcaggaatctttagaggttgaagcaaacctgccggcctctggtgttctgctttaatttgttgacaggttaagcatcttgacacatattcaacaatatctcttttcatacccggccaccagtataaagctttcacatcatgatacatcttggttgttcccgggtgtaaggagtacggtgtagtatgagattcatcaagaatctcctgtctgatttctttgtcaaccggtacacaaattctgttcttgtatcgcaacaacccatcagataaacacgaaaagtcttttgccaatccggcctctaacttctccttatgcccctgtagctcaagatcactttgttgagctactctaattctttccaataaatcagattgcagggtaatattggcaagttttccaattacaaattcaattcccgctctagtcatatcctcagctaattctgctgaaattttctttaattcacaaacttgccctggtccttttcgacttagagcatccgctaccacattt

SEQ ID NO: 281707 - DNA, 578 bp, Cannabis indica
tatgatgcgtagaataatagagaactcacatggtcatccattgaagaaccaaaagattcttttatccagtgagttctcatgtgctgcttgttctcaaggaaagttaatcattaagccctcaccggtaaaggttggaattgaatcccctggatttcttgaacgaattcagggcgacatatgtgggcctatttgcccaccatgtggaccattcagatattttatggtattgatagatgcatcaactagatggtcacatgtttgcttattatctactcgtaatgtagcatttgcaagattgcttgctcaaataatccgattacgagcacaattcccagactatgcaatcaagacaatccgccttgataatgctggtgaatttacatcacaggcttttaatgattattgtatgtcaatagggataaatgttgaacatcctgttgctcatgtacatacacaaaatggtctagcagaatcatttattaagcgcctccaattaatcgcaagaccattacttatgagaacaaaactcccaattatagcttggggacatgctattttacatgctgcggcacttgtac

SEQ ID NO: 281708 - DNA, 811 bp, Cannabis indica
ttgttccgacactttcgtgccatatgacccggcttgttacagttgtaacacaaaaactgtgcggggtcattctgtttatgtggaggtggctgccttccatgttggttcctattatggttccaactctgattattgttacgaggagggttgttgcggttagaattagaattcgagttgcggttctgattcttaaaatttttgccattaggcttcagaaccgctggtgtggatttcttagtgttgttgtttgaaacaacaagcacttcatctttctggtcttgttttcttgcttcctcctctatacgaaggcgggtgatcaaactttctaaggaaaattccttagtcttatgcctgagagtacttttgaaatccttccaggaagggggtaacttatcaattaatacagcaacttgaaactgttcatctaaagtcataccttctgagatgatctcatgtgcaattttctgaagctcgtgagattgggcttccacaggtttgtcgtccaccatttgatacttgaggtagcgactgacagcatactttttagttccagcttcttcagtatcgtatttcttttgcagagcatcccatatttcgtttgctgatttatctgaattataatagtcatacagatcgtcagataaaccgttaagaataaaattcttacagaggaagtcattttcgacccaggagtccaaatccttttgttgcttctcgcgttcagcctctttgtccttgtcggtagaagcttcagagacgactggcttcagagcagtgagaacgaaagcaactttcttcatcgtcaggtaga

SEQ ID NO: 281709 - DNA, 764 bp, Cannabis indica
ttttttttgtttggaagatcaataacctccattgttgaagcataactacccattattcatcacggttttttccctctcattttttgttcttccaaaaattttcaactcccactcaacccacgattcctcacgttattttccctctcagtttattcttgtttccaatttctttataaaatggccatcactcgttcatcctcatctccttccccagttcagaaaaaaaaatcgaaaatgggcttgaaatctttagctaacaaagcaaagggtaaacgtccgattgttgaagaggaggattctgattttgctcctcctttaaccaagcgtgggaggccacatactaagaagaaatcgaagctcagtgtggaggagcaaatggttgaagaaatttctggtaaaaaagctagtgttgctgccgaagttcgaacagaggttggttttcagtttcattttcgtttccccctttttgaacattttagtgtatttccagattttgcgtttttttgttcattctactttgtgaaattttagggtttcctttttaaaatttcgtttgatgttgtttaagtttttaggtctttatttttggttttgagcaatttattttgttcttttctgggtttggctttttaatttcatcgtgttttctttctttacagtgttcatttgtgttataggttttgtatttgttttcgttttaatgtgtgtaattagttggctgtagtttcttattagtttttttttatagtttaatattgttatgt

SEQ ID NO: 281710 - DNA, 538 bp, Cannabis indica
ttttcctattttgttctttttgggccgcgatctcagcttcatgatcagcatccttttgccttaagagcagcaactctgtataactgccttcgtcgtaggcgtcatactcataaaaatttccctcgtactcatcgtcgttggcctcatctcgttcctcggagtccacgttcactcttgagggcacttcctcgtcctttggattttgaacatcctgaggaggacggggctgacgtgtattgttgcgagtttccaacattgttgattcaacatctcagattgttgtctgtttaaagacgcctccttcagctctcaatgaaagcaccaaaacgttcaccgagattttcggcaactagttaaataatgtataagaagagctgtagaaagtttaatgcatgatacttttacgtggttggggcattaatgagccttagtctacaagtcttttttattaatgagagtatttattacagagaatgttcttggtggatttctctccttgattccttaaaaccaaaaatgttcgacccctttctagtct

SEQ ID NO: 281711 - DNA, 392 bp, Cannabis indica
tgtgtgctttggtttggataccttgcggattgatccctcgacgttggatggttcaggtgcagaccttcagggttggttcttcgttccctgcgtacacggttagtatgacgtctagaagtcgttacctgagggttatcggtgcgaatagcaggaactcgaggagggcgtcgggctcagttttgtccatctacttcggcctgtagtgcacgcagttgatcctgaatcgcagcatactgatcagtggtgagttggatcattcgctcagataccaccgccggagtgacggggggaaaatgcatggttgctggtggcgtggatgcgtccccaacctgagggtcagtcgattctgggaataggttgagtggtctgatattgcttctccctactctgcc

SEQ ID NO: 281712 - DNA, 584 bp, Cannabis indica
tagtccacaccttctctttgggtgcaacccttagcgaccagtctagctttgaaagttttgacttcgcctccagcacctcttttcttcttgtagacccatttacatccaattggatgataatcatcaggtgcggctacatattcccagactttgttctttttcatggaatccatttctaaatctatgccgactgaccattgtttctgttccgaacttgccattgcatgtttataggttaatggatcatcatcaataccgtcaccaaagaccatattgacttcaccatccaagccataacgagatggttttgtggaaaccctcccactacaacgaggagccgtgatcttctaaacaggaacattagtggtagatttctcgattgtatcaacttgcaaaggttcaaccgaggaagtgttattatcctctatttgtgtagaagattatggaacattagaaggagttatatctaaaagtatttcctccaatactactttgctctgtggtttgaaattcttaatattgtcatcttcaaggaaagtggcgtttgtggaaacaaacactctatcatccttgcgactataaaa

SEQ ID NO: 281713 - DNA, 582 bp, Cannabis indica
tttttcttttttctttttacagtaaaggcacatcacataaaaaatattttttcaatctcttactttcaaaattattccccacttacaacacttcattccccccaaacttgattaaaagcttatggcataataaggtatgttgagaataaaaatagttaaagataacgaattaagcttagttaagtggtgaaaatttttaaaacaggttaaggatcaactttgggtacactgaggataaaacttttcaggtaagttcgaaaggctcaatcgatccaaagaaaatttgcctaaatcattttccaaacaaaaatcatcaaggatttcgcttcaatagagtatgtcaaacaagttctattccatgtcaagccaacattccacaatccaagtagaataaaagtgataaacaaccttctagtacacaacatccaattcaattcaaagagttcatgactcaagcacacggttaaaattccaatccattgcacatgtaaactacagtagttcaatcaatattccagctcagatatcaacacatgacactaacaataacgaaaactaactaaaaacgggaaaacaaaaaaa

SEQ ID NO: 281714 - DNA, 642 bp, Cannabis indica
gtgatattgaattgaatagatattacggtaagttttaatatatctaatcaaagttcaatatcggtcccttccgatgtatactccatacatccgatactggtaaactttgccaatgtcctggaaaggacataacacttttccaaggtgtaagaatacctatcgctgattataccatgtcagtctaaatccagtgttctgacaaatcagggaataaacttttgaacatataattaagattatattccactgtgctgacaacactataatctttaacaaactcatatgttctggacttaaaaagaattcatacattatatacatataatcatgaaataaatcatgtgaaccatgcaacataaaatgttatttctgatctttattaataagtaaatctgattatattgaaatgagttttatttagggcacaaaacccaacactaagtgcttaacaagttcagacaatgcttaaacttgactctagttacacttttagcaaaaatatcaataggattccatgtgtgcttattttcttcactcgcacttgcttggatgacacaatatcccttatgaagtataacttgatatcaatgtgctttgacctctcatgaaatattagatttttcatgagatgcaaagcacttt

SEQ ID NO: 281715 - DNA, 579 bp, Cannabis indica
cgctgaacgaactaaccacaagtagtgggtaaaatctctcgtgatgaatttgactcttatgagagtggatttggccttgagaacttatgcacctccgaaacctaataatgataccactgaaaaggatagaaagtcctatgaggattgggagcattccaatcgttgttgtctgatgcttatgagatatcacatggatgagtccattcatggtagtattccccaaactaagattgcaaaagattttctcaatgcgatcaaggagaagtacaaaaaattctcaaagagtgagaaaaatgaatgtctgactttgttccatcagactaattatgctgattcagttgacattagatgtcacattgacaaactgatgggttgttaccaaaagctcaagggcatgggattggatcttggtgaggattacatggtgtggtttgtgatggaaaccattccctctcaatttgattcgatcagatcaagctataatgctcaaaaggagcaatggaccgttgaggagatgactgccattcttgctaaggaagatgaggacttgataagggaaaagcaagaagcatgtccatg

SEQ ID NO: 281716 - DNA, 509 bp, Cannabis indica
tggattgaaaaagccatgaccgaagcttggactctacgctttccctgtcaaatttctgagtatcactctgggctttttcttgcttctttccaatgtgatggagataggcgccgtgtgcttgaagagcagccatggcattttgacaagttcttgatggtcttcacccatccggatgtctcaccaactccgactcctgactctgttcgatacacccctttttgggttcaaatccatcgaattccgtttggccgtaaaagtccccaactcgctcagtttatcgctgatgaaattggtgatcttctggaaatcttccctctttccttagtggaaaactttggaccttatctgcgaatccgtgttctgtttgatatcaccaagcctctccgtagaggaatgaccattcgattcagaggcatctctgagccacgttgggttagtttcaagtatgaaggccttcccaatttctgttatttctgtggtttgctcgaccatacttacaacaaatgctc

SEQ ID NO: 281717 - DNA, 579 bp, Cannabis indica
aggcctctacgagtttgcactattgaatttgcgattggatgttgaataaagagcgattcgtgatccttctctcaatgaaagcaccaaaatgttgacctcacttttagcaaacgacaacgagtgtattttataagcgataagtgatttataataacaaatataggataaagtaatataaagacacaagaattttataaacgttcagcctcaagcagtttggtaatagcctaatccttgttacttgtattgacttaagatcaaggagaaagattccttttcttatagctcttacaatagtatctctgaatatataattcttagataatatatttagggtatagtcttagctcaactgctttttgaccgatctcttgcccagtgaatgtaacgtcctcgcttcaagcctccattgggtccttacacccagggactcatggctcttatacacgagtacaccactctgcccacttcctggactgatgactgaccctacagatcaacacgagtgttttcagcgtgcttggttctcactcgcacgcttcctggcaaaacttcccaggaggtcacccatccttgaaa

SEQ ID NO: 281718 - DNA, 607 bp, Cannabis indica
ggagatttgtaccgtttcttaatattagttctttcattaagatctcgacactattttgtgcttacatgtcttgctttcatactaatatattcgtgcttttgaatttgctatgcatgtcgtgttgtgcttatattcatattttttgtgtcgtcctaggctcaaacctatattctttttgtgttataccatgcttaatctcatattttttaatgttgtatcatgctcataccacccaaactcgtaccagtttctaatcatgccaaaaagtatggttcgaatatgttagatctcgttcgtgcaacttgctagaccatcttactttattttttacatcatagtatcatattatccgttttgagtctaagccttgatgattttatttttaacaccttcttaaatactttatattaataaagtaagtgaaatacttataattaagacaactcttacatattcttccaatcaatcgataccacttgggaacccgaacacaatgaattggaggaagttaattaatataaagttgcatgtgttaacatatgtgtaatgtatgtccaacactttatattaataaagtaagtatttcacttacttattaatataaagt

SEQ ID NO: 281719 - DNA, 560 bp, Cannabis indica
tttagtgaaattttatttgtgcttaattactatcaatttagttttttttagtttttcattttttttcattttattttccttgttctattttacgctttgtttgtttgtcttggttcctttttcaaggtacttgggatgtctcatcgacaagtccttatgaattttgttcaacatgacttggagtccttgtatgaagcatggtggagatacaaggcactcctaatgaggtttccatatcatgggttgtccaaagagtgtcaactagaaatcttcctaaatgggttgaatccaagcacacgaaaatgggtagaaagaggaaatggtaccaccaatttctaccaactatcaatcgatgaagcctattggatgttggaagacatggcggagtacaatgagtggtgttgtaattgtccaaacaatgaccatgtttgggaggacaattacaacaatttggagccaaattttgacacttacactcaaggaccaaatgatgagattttagaagatttacaagagttcaacatagaagaaaatcttcatcaaatggctcaaccaagctc

SEQ ID NO: 281720 - DNA, 566 bp, Cannabis indica
gctgggaaacttgaggaggaagagtttcctctctcgttacaatgcacataaacagaaaaatcgtgtgatcaatgctgaatgcaaggatcgtgggattgaggctgaatacactgatagtgggatcgtgtgtatgccatatccacgtaagttaatccctgagttgtagggattgcgctgatgactcatcgtgtgaaagctaaattcgctaagtgtcgattgccctgcatggctcgttgaatatctcattctggatgtgccagcgaggcgtcctgctcggtctatcattccaagcagatactccaagtggactccacgtgtcaccattcttgtgatgccacgtcagagtgcaaactttgggataacatttgcccagcaagtctgtacgggacctctgaggttgtgtgtagacttattctgagctggctctgcctttgaatggggacacgtgtcgagcatgaccgttcgagactcgatgtgaagctgattgggcgtcccttcagttttcagctaattaatgctttgacaattaatattttgaaatcagattttgtctctccacggctgac

SEQ ID NO: 281721 - DNA, 533 bp, Cannabis indica
acttgtcagcaaattaaagctgagcatcaacgaccggcagggttacttcagccattaacacttccagaatggaagtgggaagacattgcaatggactttgtggttggcttgcctagaaccacaggaatgtacgactcagtttgggttgtggtggatcgctttacaaagtcagcacatttcttacctgttaaggtaacctatacagtggatcagtatgctgatttgtatgtgaaagaaattgttcgtcttcatggagtaccgaagtcaatcgtttcagatagagaccctaaatttacatcaaagttttgggtgagtttgcaaaaggctatgggaactaatttgaaattcagcacagcctttcatcctcaaacagagggcaatctgagcgaaccattcaaatacttgaagacctgttacgagcttgtgtcatggattttggagggtcatggagtaagtatttgcctctgattgaattctcctataataatagctatcaaagtaccataggaatggctccctatgagctgctctat

SEQ ID NO: 281722 - DNA, 540 bp, Cannabis indica
aatctcctaagttggaaaaataataatccttcatatggtatccccactgggtcgagggcatcctaaacctcaggagacgctcatcgaaccctacaggcctaaggctggcatattcgctaacggatggaacgtaatgtactgctaaaggagacttaccagagccagaagtactggcatcgggagcccctgtgttcggcacctgaaccgaaggcttttgcctgggagccctcctctcagtcaggctcccaatgcgaagggacctcccagcaatcgcctggcttctcctctcgatcaggctcccaacgcgaaggggcctcccggaagttgcatgggccttccggtagagacacccctggtacttcttcttcgcagtggcaataagttcatcccggaaggtcttctccgcggcaggcaccctcacattcggacagataactttagaaaggttagagtcctccactgattggtgcggcaggatcagcttggccttccggcaattctccgtcgtgctaagcccccgacgtcgagatccgcccggtc

SEQ ID NO: 281723 - DNA, 548 bp, Cannabis indica
gaaatgaaggccggacacattgacatctgcagtgattcatagctagtggtaaatcatgtatccggagaatacgaggcacggggagaaaagatgatagcatatctgagcaaaatacatgatctgctcgcagaattcaaaagctacagtctcagacaaattccaagagaataaaatacaactacaaacgcgttagcacgattggcaagcagcaatgtaagtgacaaggtgagcttggttcctatctagttcctcgaagagcctagcatcactgcacggaagaaatcgaaatgattggtacatccccaaactggatgataccaatagcagcctacctcgactctgggaaacacccatataatcggaatgaagctcgaaaaatgagaatgaaagctgcacagtatatcatagtagagggaattatgtacagaagaggattctcaatgccattgctcagatgtgttactcaagaagaagctgcacgacccctatctgaggtgcacggcggattctgtggaaatcatgccaccgggcaaagcttatctaagaaa

SEQ ID NO: 281724 - DNA, 507 bp, Cannabis indica
tagatatggaatatatagcttctgtctagcaaatagaactgaaatgattatttcctttgagcttggctaaacagagataaatggttgagtactcatttcagttcgctgaaatatcatttatacgaggctaagtgttttaaggataaaatacattgaagggtgtaacggtaatttaatccctacacaatgtaaatcatctatagaggatcattgatcaaatgggattataacaatggataaattataatgtatctatatggtggaacatatagagcgttctatataactgagagtgcaattctatgttctatgcgtggatgcaacaatgaattaataagtcagtgaatttacttggtaagttcttggtctgcttattggaagctcagatatataggcccacggtcccgatactagttgagacaatactagttgtaagactcagttaattgattttaattaatcaattataattctaaaattagactacgtctagtttgtgaattttca

SEQ ID NO: 281725 - DNA, 546 bp, Cannabis indica
aaactggtttccacaaaaaaaaaattgattaggcttccaaaacatacctacttatcttgtaaaaactggtttctgtgaacaggtttgacaataatatcagacaggcataagagtatagagaaggcggtgagcagtgtctacccaaaccacttccacggagcatgcatcttccacctgctaaacaacatcaaaaccaactttggagtacatggagatgatctgaccataaactttgtaaaggcagcaaagacgtacaagctcacctcattcgagagatacatggcagagatagatagaatagacaaacgaataagaccataccttgagagaattggacatgaggtttggaccaggagccactgccctacaagaagatacacaatgatgacttcaaacatagcagaatcaataaattcggcgatcctagctgcaagatcattacctataacaacaatgattgagtgcttcagaagccttgtacaaaaatgggtgtggaaaaatggcaatgaagcacatggaatatttactgaagtagcatcagatgct

SEQ ID NO: 281726 - DNA, 762 bp, Cannabis indica
acgatactcaagagagactttcaagggttaaacaatatcttgagtcatcgtctgcttctcgatcttcaaagactataaccgacaacccactctttcaacctcttggtcctgccaaacagccaccatcaactgatcccgagtcagattctgacgactcggttacttctcacaagaccatggctcaaaacaggacattgaaggagttggccgcgccaaatctggaccagcaaccattgtgcatctattatgcacctttggatgtcaattttgaactgaaatccggcctcatccatttactaccagcttttcatggattacctggagaagaccccaacaagcaccttaaggagtttcatattgtctgctctagtatgaaacctacatcagttactgaagaacaaatcaagctgcgggccttccctttctctttaaaagatgctgcgaaggagtggttgtactatctaccaccgggaactattgaaacatggaatgacatgaagactgttttcttggagcgatacttcccagcctctaaagttggaagcatccgaaaagaaatctgtggaattcagcaaattactggagagtcactttatgaatattgggaaagatttaaaaggttgtgtgctagttgccctcaccaccaaatcagtgaacaactcctaattcaatacttttatgaaggtctcttaccttttgagagaagtatgatagatgcagcaagtggaggagcattggtagacaaaaccccaacagaagcca

SEQ ID NO: 281727 - DNA, 640 bp, Cannabis indica
aaaacatcgcgaaatcgtgaaaacatctccaattcactatatcgcgaaacacatcgcgaatatcatcgctaaacatcgcgaaacatcgcgaaatatcgctaaatatcgcaaatcatcactaaacttcatccctgacctcagatttgttctatcattgcaaatacatcgctaaatatcgcaaaatatcgcaaaaaactggtaaaccagaagaaaaaaatgcagaaaacgagagaggccgtgagagaagatgacggcgaggccttgcgactgaagttctgggtctgtgtgttcgacggtaggggttctaggtcggggttaacgccggagaaagagagagagacatggatgtttgatttttatttgtttaagggtaaaattggatagaaaaatagtgtgagtatattttgcatgatgcaaaatatgctagcatatttttagtggataaattaattttaagcatataatatcaaatttcccttctatagtccgaatccaagtgaccgtagtccatgtgcccggatcatgccaaattggctttttttttttaataataataataataattagaaagggaaatttgattttctatacttacatatacctaatatttttttcctaaactaatacttttttacattga

SEQ ID NO: 281728 - DNA, 572 bp, Cannabis indica
atcttccaatcggaaagtgatgaaccatttgtgtttgttggttcaattcggggatctcggatcccggtgatttcggccatgtcagctaaagagttattgcatggcagttgtttagggtttctggccgtggtgatggacaccactcggccagataccattcggccagaggacatcaaggtggttcgggaatttctagatgtttttcccgaagaacttccagggttaccacctcagcgggagattgatttcgttatagatttggcaccaggagtggaaccggtttccaaggctccgtatagaatggctccaactgaacttaaggagttaaagattcagctccaggggttgcttgacatagggtttattcggcctagtgtgtcaccctggggagctccggttttgttcgtcaagaagaaagatggaactatgaggatgtgtatcgattacagagaattgaacaagctaacagtgaagaataaatatccactacctagaatcgatgatctgtttgatcaacttcaggggaagacggtcttttccaagattgatctccgatcgggttatcatcagtt

SEQ ID NO: 281729 - DNA, 280 bp, Cannabis indica
aaaataatttccaacaactggtcagtcagaaagaactattcagatattggaagatttactgcgagcctgtgtcatggactttgagggttcatggagtaagtacttgcctttaattgaattctcctacaacaacagctaccaaagtacaatagggatggctccctacgagatgttatatggtagaaaatgtcgttctcctattcattttgacaaaactggagaaaggaagtgttaggctaaaattagtctaagtttcgggttgtattttcggttttttttc

SEQ ID NO: 281730 - DNA, 557 bp, Cannabis indica
caaaatcttaaaaagaccaaaatcttaaatgaaactagcaatacgtggctcggcacgtatattcacctagtatatatatatatatatactagaaaaaagctacgtgccaagcacgtatatgccaaacacgtatacttagttttatgttaagtattttctactttatttacaaataattgaagaaaaaatattattaattattgtttaaaattatttttaatgtatacaataaataaataatacattttacattaattaatgtaaataatggtgttgcaaattaaaagtatactgaatgcaatatattaattttaagaaatcttgattatctaacgacaaattgttctcaaattaatccaaaaataaactaaaaattattcgactttaatgtcaattaaactaaaacactaatgttccatgatcatacacatgtatatgccaaaatcatcacctaaagggtcaatcgtattttttttatttaatgagatttattttattaaatataaataaaaagtgatccatgaatttctcataaaccattttatttttaataataa

SEQ ID NO: 281731 - DNA, 882 bp, Cannabis indica
cttgcttcgggatatcctcttctcgaattctcaattgatgatatccagacctcaagtcaatcttagagaatactgtcttgccctgaagttggtcaaacaaatcgtcaattctgggcagaggatatttattcttaatggttaacttattcagctcccgataatcgatacacatccgaagagttccatctttcttcttcacaaatagcacaggggctccccaaggtgacacactaggccgagtgaaccctagatccaacatcccttggagttgtatcttcagttcttttaattcagcaggtgccattcggtagggtgcctttgaaacaggttctgctccaggaattaaatcaatgatgaaatctatctcccgctgaggtggtaatccaggcaattcctctggaaacacatccaggaattccttaaccactttaacttcttcaggtccaagtaacacaggtttactggaatctactaccactgctaggaatccaacacatccattacgtaacaaatccctagctttcaacgctgagattcttggaacacgagaaccttggaccgaaccaacaaaaacaaaaggttcctcattctccggttcaaaagtcaccattttccgtttacaatcaatactagcagagtatttggacaaaaagtccataccaagtataatatcgaattcggccaatggtaactccacaagatcagcattcaattctctatcttcaattctaattattacagatctaatccactttcttgaaataattaattctccattaggcaacagggttccaaaccccgtctcgagaatatcactaggtctatcaaactgatcaagaagtcttgatgacacataagaccgagtagcacccgaatcaaata

SEQ ID NO: 281732 - DNA, 506 bp, Cannabis indica
aaaatatgttattctttaatttggaatatatgtgatatgggtagattttgaaaggtgatttagagattaattagaataaaatgttataggaaagtttcttctttggttttaatttaatggaatccagttttaatggtattgattgatttacaattttggtactaaattaggtaatatacacagtcttactataattaagacaataatatttaggaaattttaattttaatgttgagaaaattttggaaagctcatgtatgagctgagggttgactctgttttgttatggtatatgtgtgagttacatatttcgtaagtttattggaataattatttactgattatatatttaatttaatttattactatttattcataaccttccttattatcccaaaacttaattagtatattttctttgatcgtataggattgttttattaattacattttatataaggaaaaaataatcaatttgtatactctttattttctttttttttttt

SEQ ID NO: 281733 - DNA, 519 bp, Cannabis indica
tcgtgttccctgatgcacaccacggtgcatgctaccaccacattattatgaacgtcaaccacaagttcaagactgacgtcttcacgaatcacatttacacgtgtgcctacacgtattcaagatcagagtttcacagagaatttgagaacattcgggccatgaatccagcggttgcacaatatcttgaggaaattggatttgaaaaatgggtccggtcgtactttccaggggtacgttacaatgtaatgacgagcaactgggctgagagcttcaacaacacaactaaggatgcaagaggcttcccgatcactgctgctgtagcattcctgaggtccaaagtccagaagtggtttgcttcacgaaaagaaaaagctgacaagtggacgaaacccctagcaccagaaatggaggaggacttgacattgcattttgaaaaaggtcggtatttgaacgttgactcatgcgggccttacacgttgcaggttcaccctggaggaacagttatgaccggtggcgtag

SEQ ID NO: 281734 - DNA, 519 bp, Cannabis indica
ctacagtctggtaggctcttcgtatcagcacggtagcttgccgactaggatcttcgatctgtgcatggtgagcccttaatgcctccatctctttactctccatttgttgctatatttttaaacgctacgcaagtatacgcaatcaagtagtaaaatctcacacaggtgaggtcgatcccacagggaattggattaagtaccactaaattatacttatgattctattcggtaaatcaaaagtaattatggtttaaaaacagtaaaatttgaaagaaattcagaaaacttaataacacagtttaaagttgagcaagatgagacaatagggaggagaatcctgttgttgtttacccaaattgttaatgattaattactatcctattcttggggtgaatgacagattataaaataacctagctcctttcagatcttctagattctaaatcacatgttatctaattaattccttaattaaactaacatgaaatcagcattaagcaataatctactcgtcacata

SEQ ID NO: 281735 - DNA, 523 bp, Cannabis indica
ggagacatttgactttgccaggccaggcgaataccaatattatagcccctacaattcaacaaaacaagtgttaggcctcctatccgcttcacatacttaggggattacatttatattgctcgtcaggtgaattgagggacctttcttgtaattgtgagtggtaggaaaggtttattatggctgttagtgtgagagtgtgactcatgcatgtatattgagatttctctcaacatcaaggtccgaaaccactatccttttctgttattgctttccctttcgagaaatataatgtaaaaccatggctgaaatggcttagtttacctactgctctactcaggcccggtcctgggcataggcgggctaggcctgtgcctaaggcgcacccagcccaggggcccaaaatttatttttttctcttttaaaattatacatttttttttactgattttgaaaaataccacattttttctaacataagggcccaaatttttttttctctctggcccactttgtttcagggctg

SEQ ID NO: 281736 - DNA, 891 bp, Cannabis indica
cgagtttgtgtccgggtctgggtctagctttgggtctgattctaggtgtgggtttgagttcgggtccgagtctgtaattggctttgtgtccaggtctgtacaccgatctgggtgtaggttcgggtctaggtaaaagttcaggtcccgagtgctggtccaagtttgggtctgggtgaggatctccgtcaagatctaggtccagcatttcaatcctagtcttgttattggtccgagtccaggttcgtatccgggttccctatctaggtccaagtctgtttttggatcgggtcccagatttaggtccaggtctgggtctcagttccggtctgggtacacgaccgtgtccgggcccgagttccaatctcagtttgggtttgaggctaagtctgtctttggttctaggtctaggtccgggtccttgtcacggtcctagtcttgttctatggtcttggttcgacgattcttgttcaggttctaattttgggtcccagatctaggtctgggttcgggttttgttcttcgtctgggtttcggtcctagtctgagccccagatctagacaccgactactggtctgttcgaggccccattacccaaatcccaagtaaagatctagatcactgtcacaggtctcggtctggttctggttcaggtcccaggtccaatttctgagtttgcgttcgggatcgagactggggtgcggttctaggtcccgaccctggttttgtgtcgctagtctagttccgtgtttgggtctgagttcaggttcaagttcgagtcccgagtccaagtttgggttgggatctaggtccggctcccaattcgggtctaggtctaatttggagttcgggtcctcgtccggttacgattctggatctatgtccaattttag

SEQ ID NO: 281737 - DNA, 670 bp, Cannabis indica
ttttggactcttttctggaagtcctgaaggctggcagcttcttcctgttgtaattcattccagaacggagtccctgtacggatgcctgcctggagaagggcgagctgttgtccgtcatcaactttcttggtcttcaaggcttcctctcggaacctctttatatagtttttcaaggtctctgtgggtagctgcttgatgttagtcaaggcgctgacctccagattgaccttccgtgcggcgacaaactgtctccggaagttggtctgtaacttattccaacagcccacggatcctggttccaatttcttgaaccattcctccgcggacccacttagagtaagcgggaagcacagacattttgcgtcattgctgactctcatgaccgtcatgacacggttaaaccgtgacaggtggtcgcttggatcggagttcccagtataagcttccatttcgggcatcttaaagttcttgggagctctgcttccaggatatgctgagcacatggctcccggtcctcacagtctgagtcggagtcgtcccctttctatctccgagagactcgggcgatatcttttcagagtgtggcgagttccaccatgattcattcatttaacgttcccgtggagacagcgggcccgtattcttttggtcaaggtgatcctggaggtca

SEQ ID NO: 281738 - DNA, 1194 bp, Cannabis indica
ttgctttgtttccaccaggtcatggagacttatggtcttctttgagctcacgaattgtgccaggaaagctttttgcatgtcatcccaagtagttatcgatcctgggggtaactgagtataccaggtgaatgctgcctcttttagagattgcacaaattgccggatcaatagtgcatctgattgggcagattcaccacatgcagaggtgaaataggccaaatgctcatgaggagaaccattaattccatcaaacttttcaaacttttgtctgatgtagtttggtggaaatggaatttgatcatagtaagccgggtatggcttatgatatccaagaataggcattgttgcagcctgatattcccgaataccctccatgataagagcctttaggtcctgctgaggttgggcaccagctagtggtggttgcacaccttgtggtggcggttgtgtgttgcctacaggcggcactgaggacgaggattgttgcccaatctcactctccttttgtctcatattaacttgatgagataattctgttgagagtcgggctacttcttcgtccctctcagccaataacctttgcagttcctgaatcttctcttcattactgattgtcccagttactaacactggcatatttttatcattgccaatggttagtgcttcgaactgagtaatgagatcagcagacaccccctcactgtgttcaatatggggagtgtcttctaaagagtgttcagatgtacacccttcttcctgaactttttgaaaagagggattcactgattcctgcatggcacgagctttcgatcgagttacagggcccgtgtaggaggtaagcttagcagttgaggtgacccttgttggtcggtagccctggagaaacatccagtcaccatgttctcttcggaatgcgttagggcttgctttgggaacccttacactatcgcttctagccttctttgggaaggagaaaggcgtcctacacccttcatctaataaagggcgttcattgatctcagcaggtgccccctgttgaccttggcggttgacagagattacgatcggaggcctaatcggggtgcctcctactaattccctcatttcaagagggtttggtgaaggtgaagtgtttgtccccctcctcccttttgtcgccttcctacctctccgaggttgagaagtcggtgttgc

SEQ ID NO: 281739 - DNA, 1113 bp, Cannabis indica
atgactggcgagtttgcgtcccagcttacccggtgtgcacctaagcggttcgctgcttgtgcatccttgaactccatcttccaagtccaggacctcagccactctctcactgtggtaagtgttttgagtttgcttttcccctattgttttcttttctggagattcttacttatacttgcatatttttagcttgctgctgaagccggccgtctctccaagaacataatcaaccatggcttcgtcctgtccgattttggggacatggacgaagtcaggaagattcttcaggatcttactgctgagaggcggctttatcaggaggctgctgagcgccgggaggccgctgccaaagctaatgaggaagaggctaagcggagggaagcgcaggcggaggcaatgatccgggaggaggccctgcggagagataggctggaggccaggcaccaggaggagctgaggacggaaggtgaagccactgcgaaggccaggcgggagcttcgggaggccagggaagccttggatgagatggctgccaaggtgaggtccttagaggaaactcaccaggcaaacttagaatccagggccaccctggccgcggagctgaaggagctcagggacttcaaggaacaagcctcaaagaaggcaaaaagagctgagcttctttctcccgtttcctgcagccggtgcaccaagcgttttgatgatggcgtcttcatggcttggtctaccaacgaccagaacatcaagcttaccttctaccccaaacctgaggagatgatcgccaaattccgggagaagaagaaaaagcttgatgccatggtggaggcacgcatcggacctcgtctccctccgcgcatcgattaggccgctccgagtttgacccagtacaaccaggatttcactcacttcttttttttatatatatatatttgtttatttacagctatttttcttttatttaagacaatatctatatagctgttttatttaaaggggagacaatttctaaggcctgtccccgggccatttgtatatatttagacctgccctttaaggctaggatatttatatttatacatgatctcttttgatgcacatatttttcttttggac

SEQ ID NO: 281740 - DNA, 741 bp, Cannabis indica
agacctcttctataggacccaaataacatttctaaggcaactacacagtccagaacacacataaaccaaaaatgccattaaagctccaagctttgagttcaaactcaaacttggttaaattcaactaacatgcatccaaatcagatcaaacctacttaaacatgcatataaaagcctctgaaaacacaagaattcgacctcaacaaacacagcaacaaaactcacaaatccactttgaaaactcaagcttttgcatagaaaaaaaaaaccataactcaagcaacctaactatcatgcattactaacagccaaatatcctcaatttaacatgcttaaatctctgaaaacaacaataatcacagcagcaacaaccatttaaactatgcatgcaacctcatctttttcatcattttttaagaaaacaaaggaagacaagctagacaagaaatacctcttcaaggatcacactagacttgctgaaaatcaccaaaatcacaagagaaaatccactttcttgctgcctcaaatggccgaaaaagagagaggaaaagagagagagttttccttttgaaattttttctaattttactaagtttggaaaaatgaaagaaatgccacataaccctttacttcagccattaaaagcattaaataaacatgtatttttcaattattaagccacaaaagacaaactaacaatggggaaaaatgaccattttgccccttcacactaaaatcaca

SEQ ID NO: 281741 - DNA, 651 bp, Cannabis indica
agattgtaaagagttttatttagggcataaaacccaacaggcacaaccgaaagacatgcaacaatcaagcaataaaatagatacagatgaattatttgaattgtttaattctgtgtgagaattcacacaggttgatatgttatattctatacacatgggattttatttttgaaaatttttaaacagtttggtaatagttgcaaaatcgttttttgacagttttgacacttcttaaatatttagtacaaaaataacttctttattaaagttttaaaaaaagtcagataggaattgataaaacataattaataaaggaaaatggagaaagggaaaaacagtgaataaatacattgatagtcaattaaaaaatacaagtacgctgaacagtgtacattgtttgtatatagttgtaaaatagtttctatatagttgtgcgactgtatataaaaacttgaacaattagaaaaacatacaacttctgctgatacaaacatatagaataaacatattataaggattaatgtcaaatatcctaaaagtttaaaaccagatccagagtataaaaccagatataataattagaaacataaaatcactaactattgtctgataataaattcaaccaataacaccaaattatcactaaattaa

SEQ ID NO: 281742 - DNA, 620 bp, Cannabis indica
aattttgtgagaatgagtgctttatttatacaaatattaaattggtgggtttcattttataatttttttttgagatattcattttatatttttattttctttgaaattcttttattttaattagtttttatattttttatttacatagatttggaaggagaaatataatatttttcttttactattttattatatgaatagatctttctattttatattaactctttgcacttgagatttaatttttcaatctatacgttttaagatagtgtttatatacttattgccaagaataatttttatataaagacatatatttattttattaatattaatgatacattgaaaaatatccttcacttatttttattatttgtccataaatattgtttcaaaaaatatatttctatataaaatgtaaatatatagtaacattactctcatactactatatattcatattttaaaagtaaattttgtattataatttctattgaatttgatttttagtccgttgctaattattattttaaattaagctatctatttgtttatatataatgggaaatttgatatattatgctaaaaaatagaaagtggtgtttaattataccaagaat

SEQ ID NO: 281743 - DNA, 819 bp, Cannabis indica
aaaaacagatgaacagtaaagcatgccatgaacacaaacggtaaagtaagggatgcgagaaacttacataaagtgttagaactgggggttgttgttgatcgacggtgaagtgttgactgacaataacgaaggaaggttagtaagaaacctttggtgtttgaaggttttctggtttgagggattttttctctctaaattcgaagcaatttggtgaaaggctgaaagtaaccaaatgaaggaagaatggtggcttttataggtgaaagtgcatgtggaacaggcacgatcacctaccaatcgcacagctgggaaggcacacgattcaaattcccaagatccaacggccagattggtttgtcatcaaggcggtggaaacgcttgagtgtccgtttgacacccattaatgcgtcgtatcaattaatggacgtgaaacgaatcgacgcctggaaaaagtgaatcgctgcagtaatggcgatcattaattacaccttcacgcgcccgaggcacgtgccaggaaactgaggagccaactggaggcatctgaacaagccttgttcatttttcaattaaacaaggcttgggggtaaatgttgcccctgattttgcccaatatacgtggaccaaccagacagggacacgtggacacgaaggtcttaaacattcaaattaatggctaagtccctgtaacgaaaggcgttatccgggagttacctcccggagaaggcatacaaagtcctctatgctctcggaggcctaagtgatatcaaagcacctccgggacatgtcaggcttcctctgagcagtcatctcgcatttaat

SEQ ID NO: 281744 - DNA, 403 bp, Cannabis indica
gcagcttataccgggaacttcgatccaagcaaccacctgtaggaatggttcaagaaactggagccaggatccgtgggctgttggaataagttacaaaccaactttcggagacagtttgtcgccgcaagaaaggtcaatctggaggtcagcgccttgactaacatcaagcagctgcctacggagaccttaaagaattatataaagaggttccaggaggaagcctcgaagactaagaaagttgatgacggacaacagcttgcccttctccaggcaggcatccgtaccgggactccattttggaacgaactacaacaggaaggagctgcaaacctttaggatttccacaagagagtccaaaaatacatcaatcttgaagaggcccaaatagtggcctatggaggat

SEQ ID NO: 281745 - DNA, 512 bp, Cannabis indica
aaacttcgagaagtctctcacggacatttcagctttcattggaaatctgaatacacgtgtccttttaaggaggaatctggtctcgagtttctaggtgagagaaatctcactataacaattgggatgatgaacgtaccattatctggagctggagtgccatctgtggacgttattaacggcggagtagggagaagtagtatcagacctctcaacctattcccagaaacgactgaccctcaagtcggggacacatccacgccaccagcaaccatgcattttccccctgtcactccggcagttgtatccgagggaatgatccagctcaccactgatcaatatgctgcgattcgggatcaactgcgcacgttacaagccgaagtagatggacaaaaccgagcccgacgccctcctcgagttcctgctattcgcaccaataaccctcaggtaacgacttctagacgtcatactaactgtgtacgcagggaacggagaaccaaccctgaaggtttaga

SEQ ID NO: 281746 - DNA, 450 bp, Cannabis indica
atatgaaggtctggaaggtttggatttggttaggatttagattcttttaggttttctgggtaaaaccggctacccggattttgcagtagggtatcccaaaaattcaggttgtcgattcgtgctagtttcaggtttctggttggttaattccctgctactttagggtattaccatgttaagttgcagtagatagggttttggttttaaacctaagttctggttgtgatttagcgagttacttatccatgttgttatcgatgtgatttaggagcctgtaattcgccgagcagttgttccactcaggttgaccggcacacctgaattcagaattgaggtaagattagtttagtgtcatgcatatgttattacatgtttagcgtacatgttgtttatgcctgttagattacattgatggcagtaatagtatacatagagttgtaccgattactg

SEQ ID NO: 281747 - DNA, 587 bp, Cannabis indica
gataggcgccgggttttgctgcagcaaccttggacttatctcaaccaagcaatccttatggacatcccgaactctttggatgttctcaatggagacagtcttttgaaacttcctctatgggtccaagtttttaatacacctttcctcaaacgatccgaggaactggcggttcttgtctcatcctctcttggccaccttctggaaatttaccggccttcgctccgagaaacttggggtccctactttcggcttcgagtcatgtttgatgtcgcccaccctttaccacggggattacctatccacttctccggcataaacaaagtggtttggttggaactgaaatatgaaaacctcccggacatctgcttcttttgtggccgaatgggtcatagctacaacaaagggtgtatggattacatgaaagcttgcgatgaagccccgttccctccggaactaaggtatgacatcaaaactatcatgggtaaagttaaggttacaactaacactttgttatgtaatgatcagcttaatttcacaaaccccccggtggcatctttcatgacttccaatccggctagtgctgtttg

SEQ ID NO: 281748 - DNA, 495 bp, Cannabis indica
ttttttctttagtgtatcctttaaggttttgttgactgcctcaacttgaccgtttgtctgaggatgcaccactgcggagaaacttttgatgataccatggttcgcacagaaatcagtaaaggattggctgtcgaactgcatgccattatctgagactactttgtacggtagtccaaactggcatattatgttcttcacaataaagtcttgaactttctttgatgtgatggttgtgagtgattcggcctcagtccacttagtaaagtaatcaaccactaccactacatactgcactccacctttacctttaggtaattgtccgatcaggtcaatcccccaaatggtaaagggccacggactttgcatttgtgttaactcgttgggtggagctcttggtatctttgaaaatctatagcatttgtcacacttcttaacataggcttttgaatcttcaatcattgtcggccagaagtaacattgccttagaattttctt

SEQ ID NO: 281749 - DNA, 676 bp, Cannabis indica
atgtctagcgatggcacagcaaacgagcacgggtttacctgcagcagcaggatttggacagcctacgggcaaggtatcagcgatatctagacagatatatatgtctagtttggatggaaggtagcgtctccaccacttttcaagctcccaaatgaagagtccatagccttgaccttcaagtctggaagggagaaaagtggtgttgcacctcgggttctggggaaggtgtgtgttcactacttatttcccaatattcgaagctagagttggaaagattgtcactggatgaggacagactcgcacaaaggtgaggatgatcctcgtataagacttaaagtagatcctggtcgatatggtgttcgcctccccagaactcactagggttcatctacaaaaggtaggacacaagatgagaatttggtcggggtaacgagcggaaacaagttggtcataccaaccaagttcgatcaagggatcaaaaatagaatttttgcacaacaatggaatttttagtcaagaagttcaaaattttgaattaaggtctgattctcacaaaaccccaaatggataagtgaaaatgagtgtcgtggggttgaaattaaaatgaagttatgataacgcaacgttattaagcataatcaagatttctaaatcttaaatctaaaatttctatggt

SEQ ID NO: 281750 - DNA, 484 bp, Cannabis indica
gactcaccgggttcttgtttgatattggccagagttgtataaggtggcctataggtcatcgtggcctggaagtgcgtgaggaataagtcgacaaaggtttcccatgtcgatatcgaagcctcaggcaattgggtaaaccaatcatgggcattttcctcgagcgttgccgcaagaatgcgacattttacaagctgtggtacctgatccacttccattatagtattaaatttttcgagataatctatagggttagaggtacctttatattttagggattcggatagatgaaatcccttgggaagttgggcttgtcgcacttccgtagtgaaaggagaggtcccatgcagcttgtatatgggctttcgttgctgctcgagcattttcaaagcttgcagaagcatgctttggtcaatccctccagccacaggagtcgggactgctgcgactgcaggagtcgcaactactgcggcgaggttcgctggga

SEQ ID NO: 281751 - DNA, 491 bp, Cannabis indica
cctgtgaactttcctttcttcccattcccttgcttgttgttgttgctggaacgcttaccacctgagctcgaattacttgggtagtgaggaagttgggcggatgttgcagtagaaggagcgtttgacttgccaggcttttgctcaccttctgcttgttgaatggcttcttcgagcttcatgaagccttcggcacggtcaagaaaatcactcattgagtctaccggcccgttcttccttatatcctttcaaagttcaccgaggacttcaatgcccttgagtatcatggataactttccatcttcacatactcgtgaaactttggtcacctccgtcatgaatctactgatttatgcctggagaggctcgcctggtcgttgcttaacttcgaccaagtctcccaaatgcaatggaagtttgcgtaaggaggagaattgtgcatggaattctgaagagaaggttttccataaactaaactttcaaggagccaactt

SEQ ID NO: 281752 - DNA, 540 bp, Cannabis indica
aacctttcacctgtctctcgagtatagtttcccttgtgaccgcacctgtcacaccgcgaaactagaggcatgtgttatagtgagatttctctcacctaaaaactcgagaccagactcctatgtagaggacacgtgtacttagatttccaatgaaaactgagtcgtccatgggagattcctcgaagttttaaacctcgctcaagatagaatcagcgagatacagcgagcatgaccaaagtctgatcgcatgattataactcgtattatgtgagacaagagaataactcgcatatatcgaactatgtgcgagtatcctctccatgttcttgtataaacatggagaccgactttctataaatgtgagttggtcccaagaaccccgcagctttgataagccaatatagactcgcatgtctaggttctgttagctcgtcatgcgatgtccacaaaggcgactatctaagaacgcaaacatcttaaacgtaattaaatgataggcctgcgagtttaacatcagaatatgaatagtcaactcgcata

SEQ ID NO: 281753 - DNA, 615 bp, Cannabis indica
cggctcccgtgattgtagcacccgattggtcattgccctttgaactcatgtgtgatgcaagtgattttgccgttggggctgttcttgggcagcggaagaataagatctttcattccatttattacgcaagcaaaactcttgttgatgcccaaattaactacaccactactgagaaagagttgctagcggtggtttttgcctttgagaaattcagatcgtatcttgtgggaaccaaggttgttgtgtatactgaccattcggcaatcaagtatttgataaccaagaaagattctaaaccgaggcttattcgttgggttttgttgctacaagagtttgacttggaaattcgagacagaaaagggacagaaaacaaagtggcggatcatctctctaggttggaaactaacaatcacagcagccacttagagggagaattacaaattcaagactcattcccagatgagcaactgctagtggtagagcaaacacgggtaccatggtatgcagacattgtcaattacttagttggaggtgcctatccacctgattttaccaagcagcagctcaaaaagttccttcatgatagcaagttttatttttgggatgagccatact

SEQ ID NO: 281754 - DNA, 565 bp, Cannabis indica
gtgccatgatagttatgctcgtcaaagcttgtccaacagtgaggggtagctgaatttgtcctagaggtgcaactccttgaccggagaaaccatagacaggctggaggcatagaagttagatcattgagttggagtcccatcttttcgtaagcagtcttgaacaaaatgtttgaagaagctccattgtcgatcatggttctggccaccattttattggctatctggacttccacgaccaacgggtcattgtgcggaaatctaattttgacagcgccttcatcgttgaaagttatcgtttgctctcctgctcgtggaactttgcgcttcctttcttccacagccaggatgacttcttcttgctcgtgctgtgctgtccgggcatacctctcgcgagctttgcccgaatctccagcaatgtgcgggcctccaataatgacttgtaagtatccatctactggtggaggtagcaaatcttggttgttctgaccttggttggtcttgacatacttctgcaagtgtggattgtttttctttattagaaattcaatttcccgcttcagattgt

SEQ ID NO: 281755 - DNA, 557 bp, Cannabis indica
aagccaccatctttccttcattttggttacttcccatttcttgccaactttgctcgaatttcctagagagaaaattctcagacctagcacgaagcctttgaacactttgcgattttcccagttctcccttgctcgctgctaccagttcttctcgtcttcacttgactcacatcaggacccccagttcaacacttcattgtaagttttttgcatcctttggtattgttgaatggcatgctattactagttctgtttgttcttttctgggtttgcattcgagatttctgggcatgcaagtgtttaagttattcatgtagtctgttttgaatttactgctttagttgtaggatcgccattatcatgcctctgttgttattgtgtattttcattgtagaagaccatacgctcttcgttcaatggttgcttagggcatagaataggatcttttctttctgtttcctttatcgtgtaaagccaccttctgcgatttcactgcacccgacacttgttcagggaatctttctagggtttcccgtgtgacacgtgtccggaggggg

SEQ ID NO: 281756 - DNA, 1015 bp, Cannabis indica
ttagaattataacaatagataattaatagcgtgtctatatgagatgtagaaatgataaaacatcaaaattgcaaaagtggggcccaatatccaaagccttggccggccacttatgtaggcatttatcatttatttttttattattttaatgccaaataattctaacctaacccttggtggcatactataaataggtagtgatggcttcagaaaaagatgatgcatcttattccttcagagaaaaacctgagtgccttctacctaacctagccgccacctcccttctctcttcttcactattgaaccgaaccccttgagtgatagagtgagtgcccacatacagtgctatctttgctaatcaaagtattttctacaaaaaaacgtgtacaaaattaaaactttataataaatattaaactttatagtttacatagttatttacaaataccgggatcccgtttctaaagttttatacaaaatgtaccaaaatacataaccaggttacacaacgactacaaaatactaaaccccagatgtcgcgctgccatgacatgtgcaacctcatctcagccaggatcaatcctgttcagctttcgcctttcttttacctacacatggaagcagaactgtgagtcgacagactcaataagaaaagcatataacatatcatataatactgacttgtatcaaggcgcccatacacctatttacaaggcttaacgaatgagtaagtacgttctaactaggatacgaccatgtaccatgtaccacatgcactcaatataccttcgtactagtgtaggtaacgtatagactgcaccttgagtactgttaggtgttgtacaacaaacaccttgtaccttcccgtacaagtgctggtaacaccacgatatactttcaaacatcatacactttaccaatgcactttgtaccgcaaccgtacatgtgttggtagtgtatgaatcacaacatatcagcatgcatatacactaaacatatacatacattcgcatac

SEQ ID NO: 281757 - DNA, 568 bp, Cannabis indica
ttattaataaaatctacaaataagaagtcttttttaggataaatgtccccaaattgtttattatttgaattcagtttctaagaatcacagtacattcagtttctattattatgtgaactcagactaaataataataaaaaaagtctaacctgattatagagttcacatttatttagtctaatgaaatatactgcagaggtgtagtttttaaaaaattaaatagttttacatgtctttcataagttgattttttaattaaataaattatgcacaccatgtctaatcatcttacatgaaaatacgtgttctagataatccagatatatgcggacccggctagaatgaaaagtgcaaaatacaaaaattacactattgtctctatcaaagaaaatgaagattgaaatccaccaatgactatcattagttttcttatctacaatttttagactaatgctatcttcaattatcaacaatttagagattgatttttaattttctttttatcttcccccatttaagtaatgtttctttaagtattggaacatcaatttttagtttatttttagat

SEQ ID NO: 281758 - DNA, 630 bp, Cannabis indica
atccgtactgaatctcatgtcattctcctacatgaaccaactcatcctctttctgtgtccactttcagttttcgtaagaggaggctgtggaccaacgcgccggagaaagtcaactctccagcttcccaaaagtgtccgaaaggactagccttcactgtgtcaaccaaatccatctcagtaaacttggccttgatatatctgaacctatctgtaccccgataggtaagacgtcccgtgaaatgagaggaaattggaagtttaagttcaggagccatctgcaaaattgtcaacaaatttgttagaagtatgtcgcgaaacatgtcgcagtatgtcgctatacatcgtgaaacataatcctaatcaaatcgccaaatatgtcgctaatatatcgctaatgaatcgctaaacacaaaaaagaggatgaaaaactagtcctacgtataactgttatatatcgctaatatatcgcaaacatgtcgccaaacacacatacaagtcgataaaaatcatgaaacctacgtactaaatgcaatatcgcgaattatgtcgctagtatatcgccaacacgtcgtgaaaaccacggttatcagaaaatccccaacttttctagacgatatcgcgttatgtcgt

SEQ ID NO: 281759 - DNA, 619 bp, Cannabis indica
aaagaaccagaagtttgtttggactgataggtgtgaaaaaagttttctggagttaaagcagcgcttgattaccgctccagtactaactcttccttcagataaggaaaagtttgtagcatattgtgatgcctcaacatagggtctcggctatgtggttatgcaagctggaaaggtaatagcctatgcttctcagcagttaaaggactacgagcaaaggtaccctactcacgatttagaactcacggcagtggtttttgcgctaaagatttggcggcattacctatatggggagaaatgtgagatatacaccgatcacaagagtctgaaatacttctttacccagaaggacttgaatatgagacagagacgttggctagatttggtgaaggattatgactatgagatcctttatcaccctggtaaggccaatgtggttgctgatgctttgagtagaaaaggtcagagtcagttgagcactgtgaagcaaatctcccaacaactagcaaatgagatgactcaagctaagattgagttggttgtgcggcaattggctaatattactctgcaatccactcttttagagcgaattaaagaaacacaaaagcaagattcataactg

SEQ ID NO: 281760 - DNA, 976 bp, Cannabis indica
tatatgagctcatgacagagcctaatctagaaatttggaaagactggtatgatagtgaagaggatttggaaagtatatggcagacatgtactcagagaaaacctgcaaagattccatcttaaaaaccatctagaaactccggagtcaagttttggggtagacgagatataaaggatcaaaagaataagaaaaggattggaaagcaaaaggtcgtttccaaaagaaacgaattcgaacaaccgaaacgaaatttagtaactttggaggagtttttaccagaagagttacaggacaaggcaactggttgtgatggcagtgtgttggattgctgcatgactttgttaacaaaagaagatcctgaatttacctcacttgaaagtgaaaaagaggtagatgaaattaccttgcaagatatgcgatggaaaatttttgcaaagaaggaaaaagaagcgaaagagcttgaaacagctaatcaagaccttcaaaatccttcatcttcgtccaaccaagaattcactaatgacaatcgaagaggcaaaagcactggtgaagttgaaatgacgcgagcaaaatatgatatattggctcatctaaagcgcatctctactcttttaagcatttatgatgcactggaaatgtctcctgagcatagaattgcacttgttctcgcattgacaagtcctgaattttatacggagaaaatagaaccagtgaaacctgcatcagttgaaacacatacaacttgtatgacatgcataacttttgatgataaggatcgtcagttgggagctgccttacatgattgacctctctatgtgacgggtatggttgttgatattcgcgtaagccgcatcatcttggattgtggatcgactgtgaatgtactcccccttagaaaccttgagagatgttggtttacacccacgtcaattgtctccatcatcattgacaattcaaggttttaaccaagctggag

SEQ ID NO: 281761 - DNA, 650 bp, Cannabis indica
tgtgatgctgcaagtgggtcaacaccacactcatctggaactgaagctgcagatgggtcaacaccaaacccatctggaactgcaggcggtgcacgtggtggagacggtggaggtggtgtagagtctttaaatattcgggctgcctccgctcgttcttccaatgtggaggtaagcttttcgacctagcttcgcaaagcatcctatgtttgttgcccatcctcacccaacacaagttcctccaagtcaacaaataacggaggctgacccccggttatgtaactcacaaactcaatctcattcggccgaggacataacatggagtacactgtcaactgaaaaatataacaaatatattaatataaaatatgaaaattaacatgaattcaacataaagcgtaacaaacttacatttttagcaaataatctggtcacttcatccttcccgagtgtagtgttcggcttactctcccagttgaccattctcggaaagcgatgcgacctcctcactgcatactcgttgcccagctgtaatatggcctcgtatgcccaatattgcaacgctgcagtatagccgtaggctgagtattttgcctccttctgagtgctaacttctcaatctttttcaacatcttattcttcacatccaagta

SEQ ID NO: 281762 - DNA, 328 bp, Cannabis indica
agtggttgaattggaaaaatagcatttttgagaaaataagataaattagttaaaaatggcaaaattgcaaagtggggccccacatcgtatggccgaccacttgaagggattttaccatttattttttcaatattttaatgccaaataattcaaacctaaacctaggtggttgcctataaatagatagtgatgactttaaatcaaaagatgatgaacacacttgcctttagtcaaattttttagccatctatgctaccctattcaaaacctctgtgctctcttcttctcttcataatttcaaaccctatagtgatagagtaagttccca

SEQ ID NO: 281763 - DNA, 656 bp, Cannabis indica
ttctttgatttaagctttgaatcattactgaattttatttgagattcttgctgaatattattgttgaaaaagcagaaatatgatgtgggttgtgtttttgagtttgtgatgcatgttcttggttgttggggttgtcttgagcatgcttagagctttaaattcataagtttgtatgggttaagtttgggcagaaattagaggatttgatgagtgtaattttctgttgttgagctctgaaatttattgtttgaaattggagttcaagctcttgttaatggaagtttgtttgagatgtagctcaagttaaagctttgatttttatggatttgcaatctgaaattatggggttataatgttggattttgatacttgagcatgtgttttaaactccctttatgatgattaaaaacctattttatggtttgggagttttagttgtgaattggggtgaaaagattggatttttcttgctgaaatcgtgttcttgctgctgtttttctgggttttgaacccagatgccgcggcatggtatttagcatgccgcggcgcgctcatttctttctgggcagatccttttagcaacttcaaatggccataactttgtgatccggactccgatttgggagttctatataccgttggaaagctcttttcga

SEQ ID NO: 281764 - DNA, 299 bp, Cannabis indica
ggtacaaagtctaactggtcgaatcgctacacttagcagattcgtgtcaaaatcaacggataaatgtgtcccattcttcaacatcctgcaaggaaacaaaaagtttgaatggacagaagaatgtgaaagagcttttcaagacctaaaggcacagctctcaaaacctcctgtcctttctaaagctctggacggtgaggaactggggatatacctagcagtttctgagcatgccataagctccgtactaatcagagaagaagacggcatgcaacatcaagtctattacgtcagtaaaagaa

SEQ ID NO: 281765 - DNA, 489 bp, Cannabis indica
acagagagataaacacatagaaagaaaaagagagacaatctgaaataccagtcaaagttctgtgacttggatttctcaccttttgtatcaatcttcatcaaatagtgcagatctgtagatcgtcttcaaggcgagctcaaagaggacgtacccctgatttagggcgaacctctataatctctggtgttaattttctaaccctaacctaatgatctatgttcgatatttgtatgtatgtgtgtgtgtgttgtttctggggtgattttctgggttagatcgatcaagagatcgagggagatctctggttctagggtttgagaaccagagagaaggcagagagagagagagagagtttgaaactctcgaaggttcgaagatagaaatgagctagggtttgctctgaactctcttggttttattcgagtaagaacgacagatcgtttttgatcaaacgatctgtcgtgcgggtaaggaacgacaagttccttt

SEQ ID NO: 281766 - DNA, 496 bp, Cannabis indica
tgctatggtcttattccgaaggacttttctttctatccaggatctgcactggctgttcttcatatgtcatgtctggctgcagctcaagactctcataactaagtatatgagtaggatctgaaacgtattttctcaacatagagacatggaatacgttgtgaaccgctgaaagagctggaggcaacgctaaccgatatgccacttgaccaaccttctcgagaatctcgaaaggtcctgtaaacctagggcataacttgcctcttttcccgaaacgtttgatccccttcattggagacacccgtaaaaacacatggtcccctacttggaactcaacatctctgcgtttcggatctgcataacttttctgtctactctgagaggcaagcattctagctttaattttctcaattgcctcattggtccgctgcactgactctggacctaggtattttctctcccaagtctcatcccagtggatgggagacctacacttcct

SEQ ID NO: 281767 - DNA, 530 bp, Cannabis indica
ttgcatgctttgttgtctcctaacaagactgatccaccatctaatttcttgaaagttgtgaacagatctcttcttggtgtcatgtgaaatgagcaccctgagtcaagaatccatgaatcacctgattcttggcttgatacaaccaaaacatcagctgactcatatccatcagtagccacaccagcatctcccctatctttactcttttctctttgaagtttagctttgagagccctgcattcatccctgaaatggccctctttcttacagtagtagcattgtttccctgcctttgagttaggctttgacttgtgtgactgacttgaacccctgtactgtttgtttctgtgattggatttgtgaaatccacctttgttttctctggtttctgatctacctctgacaaacaaaccttcaccatagccatttgacttgtcttcatttcttttctgaatttccttggaattcagtgcagatttcacttctatcatggacagagattcttttccatagagaattgtgtccacaaa

SEQ ID NO: 281768 - DNA, 922 bp, Cannabis indica
aataggaacacttgaggaatatcaagttattttgttgtgtccaagttagagggtggtgcagcacaaggtgggagaccttgtccaggacaatggaaactgatgggatgacttggcgagaatttgaggaagttttcagggaacaatattttagtccatctcacaggagggctcttattggagtatttgatggtctaagacaaggggatatgactgtgaatgaattttacatgaagtttgtagagctatcctcttatgcatatcctggtgttgttgatcaacccttggtgattgaacagttcatgcgtcgtttgaggcctgcgatacgtggtcctatagcccctttgacctttaacaacctgactgagtgtgtgacagcagccttgcgaactgaggctcatgtagaggggaatgagaagaagaacacaagcagaggaagaggaaatgaccgaaagatgaccaagaagaatcaaggacagtggtccaaggacaacaatttagtgggggtagcactagtagtggttcatctggaaagactcgtagtggaccatacgggtgtttcagttgtggtcaacaaggtcataagaagaaagattgcccgcaacgacaacaaagatttcaagcatctcatggaggacccatagggagctatgtagagtctactccttttcatggacagcccaggacaaaccagtctcagtcttcatcctatggtttcacaccccaatcgggccagcagtctcagtatcaacatcagttcaggccacaaggttcagggttcaacatggggtactcacaaggtttccaaactcctgctcctagtgggagtcaaagagggtacaatcaaggtggagggtctggtgcaagtacaagctatcctagtcagggaaagggaaaggcaaaagcaaagtcatccgctcaagcc

SEQ ID NO: 281769 - DNA, 612 bp, Cannabis indica
tgggtcgggtactatgtcttgatcctagatctttttcccaggtccctatcattattcttgatccaggtcccggttattgcgtgggtttttgtcccggtcaaggttcgggttagagtcctagtttgacttcgcgtcagagtttcaatcttggtctaagtttgggttctggtccggatttcattctaggtccagattaagctccgggtgtgggttcgcgtcctggttcttgatctaggttgggtccgagtccagagttccaatcccgatctgagtttggattcaattctggttctaagtcctttgtttctatccttctatgggttcgagtttgggtccggatccgggtctagctttcggtctgattctaggtgtgggtttgagttcaggtctgagtctgtgtccgagtttgtgtccaggtctggtccgcgatctaggtcttggtttgggtccaggtccaagttggggtcttcagtgcgggtccaagtttgggtatgggtccggatctcggtccaaatctaggtctagcatttcgatccaagtctggttcttggtctgagtcgaggttcgtattcggatccctatctaggtccaagtctgtgtttgggatcgggt

SEQ ID NO: 281770 - DNA, 624 bp, Cannabis indica
gtatacttgcaccttagataagtgttatgtcctttccagaacattaacaaagtttaccaatatcggatgtatggagtatacattagattagacagatattgttcttagataagatatcataaacatattgctacatctttctaagtcaatatcactggttgatcttaggtctatggatcttattcctgatatggttagtgtgacagtcagtagtctcctgatctgtaaggagaaatactggatatgttgtgcaatctcacaccgcctaaggaagttcaagtgtgatgattctgagactgtgtaggtatgggactacatagttgaagagggcttaaatggattgattggtactacctatatcaacaaggtgcatcttgttttttttcggtagtccatcacaaaagaactccacaattaggtttgcttcactcggagtaatttcaggataggtgacttcctggaaagctttcccaagaagtgtacgagtgaggacaaagcatgctagaaacactcgtgtgggtttgtagggtcagtcgtcagtctatgaagcagttagagtgacgtactcgtgtataggagccattattctgtgggtgtaagggcctaatggaggcttgaagcagg

SEQ ID NO: 281771 - DNA, 470 bp, Cannabis indica
caatatcaatggttgatcttaggtctatggatcttaatcctgatatggttaggttaagcttaattgtattatttatgttcttaaagttgttcgtggatgctaacatatggttctggcagatatttacatattgggaacatggtagttcaattgagtgggagcactgatcatagatatagaatctatagcttctatacgtatttagaggtgaaacgatgatttccttcgagcttggcttgatagtgataaatgattgagatctcatttaagtaatcatattagtttattgaaatatcatttataggtagctaagtattttaatgataaaatacattgaagggaagaacggtaaatttgtccttattcgatgtagatcatctatagaggatctttgactatttgaattaaaacgttggatgtaacgccctaataaaagctgcgctacgaacttgttgggttttgtaccctaa

SEQ ID NO: 281772 - DNA, 918 bp, Cannabis indica
caacttcgtctttcagggctactgctcgttctttatccagcaatcttcgtttttgctgaactggccggatattaggatcgatattcaggacgtgcgaaataatagaaggatcgattccgaccatatccgcatgtgaccaggcgaaaacatctaggtttgctctcagaaattttatcaattccgattttactccgagcaacaaaccctttccgattttcagcttttggccgggatagctggatcgacctcgatctcttctaattcttccacaggtccaacattgctgcttgggtccccaagtcgaggatccacatcttcatcctcgccttgggcggtttcctacttgggaatatttattcccttgtccgggctctggctggaggatacttccttcttagccttggccactgcaaggttgtaacattcccgagcagattgctggttccctctaagacaccctaccccgtttttggttgggaacttcaggcacgagtggaatattgatgtgacagcttttaagtcatacaaggctggtcggcctagcattacgttaaaggctgaaggaacatccaatatcaggaattgtgccatgatagttatgctcgttggagcttgtccaactgtgaggggtaggcggatttgtcccaggggcgcaactccttgaccggagaaaccatagacgggctgaaggcatggagttaaatccttgagctggagccccatcttctcgtaagcagtcttaaacaaaatatttgaagaagccccattatcgatcatggttctggacaccattttgtttgctatctggacttccacgactagcgggtcgttgtgcggaaatcttatctggacagcatcttcgtcgttgaatgttatggttggctctcctgctcgtggaactttgggcttcctttcttc

SEQ ID NO: 281773 - DNA, 705 bp, Cannabis indica
taagacatgcaagttctaagctattcaatcaatcttaccacaaaccatagtaaaacaattataacatatttcacagatcgtcaaattgcattcatacacaggctttacaagcatccaaactaatccaaagagttaaaagaattaagcacacagtttcaaaatttcaggacatttcacaaataacaacagcaacaaaattgatcttggcttaattaacaacacactaaaccacgacaactaaaaaaaactaactaaacaactaaacaatcaaacaaataaaaaaaattaaaattaagcccctcccccaaactaatttttcacattgttcccaatgtgaaaataaaacttaaagagaagaaagcttaccttaggtccatgtcacatcaacaagcggttgacgcccataataagcgtcatgcaagacaacttgaaagttgtttttgaagatgccctcaagcttggcatgtaatgagtttgaaccaaaatctgcaccaacaacaaaagaccttggatgatgagcttggggagaagcctttggtaactcgaagagaatacaatatggagaatgcggtattagtggaaaataagggtccattggtggttcataatatagtggtgttgacaacctcaaatcaacaactacaagtgattcttctgccaccaatggcacctctttcttgcttttctcaaataacctctcaattg

SEQ ID NO: 281774 - DNA, 505 bp, Cannabis indica
taatatgatgttatcaataaaagattaaaattcagttatgtttatatgtagttttcatgtttatggttcaatatatacaaaatctgttaagtgcagaacatatagttactcacaattacaatgatgtcaacacagtgaaatgtgattgtgattatatgcttcaaaagacaatgtccctgattcatcaatgcactatatttacactgatgtgataatcagcgataaagtataaaaacaccttgaataagtgttatgttctttccagaacattggcaaagtatgctagtttcggatgtatggagtatacattggactgggaccaatattgatcttggtaaagatattataatcttaccgttgtatctttctaagtcaatatcactggttgatcttagatcaaaagatcttaatcctgacatgcttagcttcaatcttagaagtgttattcgtgttctttaatttgttagttaagcctacttttttgtcaaggtgatacgtacatttt

SEQ ID NO: 281775 - DNA, 647 bp, Cannabis indica
ttgaacatggccgttctttaatctgttgggtactcctggtcggcatatttgcttgtttttcgtttgatactccatccaacactcatcttgtgtgttgtcttttgtagatgaacccaggtgagtcttgggagcccgagcatcaaatcgaccaggagctgcttcaacttctgcacgaagtccaccctcgtcttcgtgctaactctccttctagagaaggaaattcttctgattccgtacccagccataggatgatggctcgtacgaagaaaaccacgcgtctggctgacgcttctgacccccaagtggctcggctcgccactttgcccgacgccgaacaggatttggcggtcccgatggaggaggaccgtgagggggacgctgaagtccaggaggttgaggagctggacgaggcgcgtccgggcagtcctcccgctgctgagggagaggaagagattggacccccctaattttggggagtacaatgaggctgggcaaccagtcaatgctgacggggcgtcctggttgagggcgttgactactagtcagtgaggagcttgctgagccggatccgtcacaggaggcagcgtgccttgggcgccaggtgggtaagtcctccgtccaagatttcggaggcacgcctccgcact

SEQ ID NO: 281776 - DNA, 499 bp, Cannabis indica
ctaataccccagcagccttcatggatatgatgaatagggtgttcaaggagtacctagataagtttgttgttgtattcattgatgacattcttatctactccaaaactgtggaggaacatgaggaacacctgaggatgactctaaaccgacttaaggagaaccaactatatgccaaattcaagaaatgtgaattctggttagagaaggtggcattcctaggccatatagtttccaaagatggagtcgaggtggatcctacaaagatcgaagcggtcaagagctggccaacacctaagactgcaagtgaagtaagaagcttcttgggtctagctggttactatagacgctttgttgaaggattttccaagatcgcaactcctctaaccaacttgactcgaaagacgcaaaagtttgtctggtcagaaaagtgtgagggtagcttccaaacacttaaggacaaactaataacagcccctgtattatgtgttcccattaacaa

SEQ ID NO: 281777 - DNA, 684 bp, Cannabis indica
ggacactatgagttttttgtaatgtctttcggactaactaatgccccagcagccttcatggatatgatgaataggatgttcaaggagtacctagataagtttgttgttgtattcattgatgacattcttatctactccaaaactatggaggaacatgaggaacacctgaggatgactctaaaccgacttaaggagaaccaactatatgccaaattcaagaaatgtgaattctggttagagaaggtggcattcctaggccatatagtttccaaagatggagtcgaggtggatcctacaaagatcgaagcggtcaagagctggccaacacctaagactgcaagtgaagtaagaagcttcttgggtctagctggttactatagacgctttgttgaaggattttccaagatcgcaactcctctaaccaacttgactcgaaagacgcagaagtttgtctggtcagaaaagtgtgagggtagcttccaaacacttaaggcaaactataacagcccctgtattatgtgttcccaataacaaggataagtttgtggtgtactgcgatgcatcgaaacaagggctgggatgcgtgttgatgcaaaatgacaaagtagtagcgtatgcctcaagacaacttaaggagtatgaacaaaggtacccaacacacgatctggagttggcagcagtagt

SEQ ID NO: 281778 - DNA, 620 bp, Cannabis indica
ctttctctctctcgaaaatcctacggctgctagggttgggttttgttcttccattcagcaagtttccatcaatcttagagtaattaaagtggaggtaatctttgttcaagctttcctttgttttcttgaagtttaagaaaaaatgaattattgcatgtttgatgaatttgtcgctgtggatgttgttattgtttatttttgttttcttaagtttaaatatgtttaattgagtagaatagaacaggttttgatgcatgattagttgattttaagcgagtatggagttttgaactcaaactttggtttttatgagtgatatgttgttttagctttgctgtagctgctgtggttgttgttgttgcgttctgcagtttagatatgagtttttatgtggtctaatgcatgagttaggggttgtttgaagggttagtcaagttttgagtttttgaactcaattttgaaccttcaatggtgaaactcgtttctgtgattgaagctttgttttatcacttggaatatgttcattggggtctaattagcaggtctggaaggttgcatgaagtttggggttgaattgcatgagaaatgatttttttgaggtttcctgcactgaaccgaaa

SEQ ID NO: 281779 - DNA, 1080 bp, Cannabis indica
aaaaaagaaccttgaggataataacgggccttataaccccggctaacagagaagatcatttgtaactaacctccaagcttgttttcccaacatggctaagttgaaatccctgagatgtcgaaagccaagccccccatgatgcttatgacggcataacttcttccaactcacccaacttaccccacggttttgattggatcccgaactccaccaatatttgctcatcataccttctaacttattacaagtttccaccggtagcaagaaaacagacatagcataggtaggaagagcttgcgtcactgttttgatcaacacctcttttcccgcttttgagagcaaccgaccttcccaactctgaattcttttctgcatcttgtccttcaaaaagcccagaataacattcttattacgacccataacacaaggaaggccaagatacaaactattttcaggagcttcattcattcgaagaagatgacacatttcttgtctagaggccgaagttgtgttgaggctaaagaagatagtagatttagagtaattaacacactgacctgaggcttgttcaaatagttgaagcagaagaagaacactacgagcctccctttcaatagccttacaatagatatagcaatcatccgcaaacaacatatgagaaattatgggggcaccattacacacacggcaaccatgaagagctccccgagcttcaaatctttttatgagagaagaaaatccttcagcacacaaaagaaataaataaggagagagcggatctccttgtctaataccccttccaggaacaatcggccccatctcacgacccccatgagtaatagtgtacgaaaccgttgagacacaatgcaaaataagatcaaccacacgcgcatcaaagcccatttttagcattatattcttaagaaaaagccactcaacacggtcatacgctttactcatatcaagcttaagagccatataaccttcctttccaactcttttccgcttgagataatgcatcacctcaaacgaaatcataatattatcagttataagacgcccaggaatgaaagcactctg

SEQ ID NO: 281780 - DNA, 586 bp, Cannabis indica
ttttgaagaaaaataattgcatgcttggtgaagttggtattgtagctgctgttagttgttgttgttattttctatagcttaaaaatgattaattgagtgaaataggataggttttgatgcatgctagttacttttgttcaagtttggaattttggctcaaaatcttgattttaatggtgaaatattgaagtagcttgctgtgcttgtggtatttgcttgctgttgtttttagaggcttgtttttgtatatttgagttgattcaagcaggttttgatgcatattagtggggtttaaccaagcttgagttttgaactcaaagcttggagctttaatggtaatttttgtatctgtgcttactgggttgttttattgctttggaactgttatttggggtatttagagcaggtctggaaagtttgaattagtttggggttgatttggtcgagctatggaattttgaaaaattcctgcactgaagtggaatttcagttcagtatggcctgtaggaaccagaattccggttggtgttttgggttcttccagaaccggaattccggttgtttaaccggtctgccggttggggaa

SEQ ID NO: 281781 - DNA, 584 bp, Cannabis indica
gtcttactttttgaggaatcaaatacccagttgaaaccctccaaagtccaaactccatcatacagtacaggcacaaatacagatgaatctgtcccagagaaatacaaacaaataaacagaaaaaatcagcatacaatatcgcacatacatcgcacaatgtcgcctaatacaacttcaatatgctggagtatcatgtcgcacaataatcacacacaaatcgcataaggtcgcagattaaaacatacatgttaaaatcgcataatgctgcacaaatgtcgcacacaaatcgcataacatcataatcgcacactaatcacataactattacaaatgtctcatacaactataatatgctggagtaacatgtcgcacaataatcgcacacaaatcgcataaggtcgcagatttaaacatacatgacaaaatcgcataatggtgcacaaatgtcgcacataaatcgcataacatcataatcgcacactaatctcataactatcgtacaatgtcgccaaaattaatcatgtcacccctaacctcaggttcctcgatgaaaatcgcacaaaatcgcacaaagtcgcataaaa

SEQ ID NO: 281782 - DNA, 137 bp, Cannabis indica
agaaatcttacattgggtgcagtggaatatatgtctcctcccactcagatctctatcactcatagaatttcgaaaacagagaaggtagagagagagagagtggcggcttgaagtagtttttgtgtgagaagaaaatt

SEQ ID NO: 281783 - DNA, 530 bp, Cannabis indica
aagcgaagtcaacattttggtgctttcattgagagaaaaatcacagatcgcactttcgacacgatggtacaaactcgtagaggcctgtccaacccaacaaactcacagacgctggatccgacgttgcaggacccagggagttcgagggttccacctgctgtcaatcctggacagacgggaagcgtggtgaatggtgagacaactcctgttactgaaattgcgcctgttgtgcaagagaccggaaacaacggttccgcacacagccagggtgttcataacacgactgttccaccaggcatcaatgcccaaaagaccatcggagacgcaaccgaaaggcaaaacctctgcggtgcgctcggactcatgcagggtcacaacaataccctgcatcatgatcaggaggaattacgtgtcgcagtatacctcgcatttgacgaatagaggcgtatgttcgccgagtggagggacaaagagatggaggcattaaagggctcaccatgcagaaatcgaagatcgtagtcggcaagcca

SEQ ID NO: 281784 - DNA, 645 bp, Cannabis indica
gcacttctaacggcctcactgtaatattttgcattgaaaagttcctggaacctttcccaggtcatagttgtgacgtcatgaatctgggacaccatgtcccaccagactaacgcgtcctcttgaaactgaaaggtggcacacaccaccctgtcattcccggtgacacccataaaattcaatatcctagtgatcaccgttagccactgttcggctttcatgacgtctggacctcccaggaaaaccggaggtgcctgcttctggaacctttcatacaggggttccattctgtttgtcgctaccactatctcggcctgagcaccaggggcaggtggcacaggaacttccggcaccggcactacaggagcaccctgctgcctcaatctctcaatctcatgatcttgctcctctatttcggcttgcattttagcaaacctaatttcccaattctgggcttcctgattggcttgagcagcctgggcatcttgtggcagattatcatcacctcgaccacgagctctgcccctaggacctctaccgcggcccctaacatttgggggaaactgagctccttgaccccaatttgacccgactgagttgccctcactcctggtccttcgcctggcgtccatctagtctgaacagcct

SEQ ID NO: 281785 - DNA, 705 bp, Cannabis indica
aattgcactctcaattatgtagaacgctctatatgttccacaatatagatacgcaataaaaatttaaccatcgttctaatcctaatagtcaaagatcctctatagatgatttacactaagtagggacaaatttatcgttttacctctcaatgtattttatccttaaaacacttagcttcctataaatgatattttagtaaactaatataatcactggaataagagttcttccatttatctctattaagccaaactcaaaggaaatcttcatttcacttctatgtccagatagaagctatagattccatatctatgattagagttcccactcaattatactatcatgttcccaagctatatgtgtgacccaaaccaaatggtaggctttgactaacaacttaaagaacacaaatattactcttgagatagaacctaaccatgtcaggattaagatcttttgatttaagattaaccattgatattaacttagaaacatacaacagtaagattataatactttttaccaggatcaataccggtcccagtcaaatttatactccgtacattcgatactagcatactttgccaatattctgaaaagaacataacacttattcaaggtataagtaagctttatcgctgacgatcacatcagtataaatccaatgcactgatgaatcataggacattatcttttgaagcata

SEQ ID NO: 281786 - DNA, 725 bp, Cannabis indica
ttttttctaaactatcaaacaaaataatttcagaacgaaaattcaattatttttcataaaaatttcacaagcagcaattaatcatcaaataacacacagatcaacatgaaatcatccaaatcacacacaaatcgttttaagtccaaatttcttgaaagtaaatcaattaccatggctttgaggtgagttgttggaattatttgatcaggatcttagatttactaatcagtatgttatttaacatgctaaatatgaacttctaaaacgatatgaaataaacacatataaagtataaaaaactttacagtggttgcagcgtaatataatgcctccttccgctcagatctctaacccttgtatcctttctgtagcagggtatcaccaagatttaagcccgaatctccttctcttgaaactggattcttcatagccttacacactatgattgagtactacttgatgtgtgtgggcactcactctatcactataggctcagtttagaagagaggaagagaaagagaatatggtttcggctagggtataggaagaaggctcaaattttatctgaaggaatgagatgcatcatcttttcctttaagccatcactacctatttataggaaaccacctagggttaggttagatttatttgacatattaaaatgatgaaaaaataaatgataaaatccacacaaagtggcccgccatggaatggataatgggccc

SEQ ID NO: 281787 - DNA, 583 bp, Cannabis indica
cagaatatgcaaaagtatgcactgtaggggctttcattgtccgaatggacatggaaggttctctaagaattcgctggccctactagctagtgtaagaaaaacctatccttaacacccactggttttggatataaaaatcgtttaggtgttgatagttgttgagcacaacataaggtgttcttgctcaccttaacaaagcatggatgattgatcacaatatgcgaaagtactagattgatcggctacgagatcagcataaccattgatagaacaacttggtcatatggaacaatggaatggacacggaagtatggaggattgatcagaatgtgcaaaagaatgcactgtaggggcttttattgtccaaattggcagtgttggcgggaatcaagctttaatggaggaaagaagaaagacaaaaaagggaatggcaaaatttagctattgctgaagaaagaagtgcatggttgaaagctaaatgcaagttagcatagagggtgatgctaactcgagattttttcataacatgttgaattcgagaaaggcaagaaaacatcaagtcatggagtaagtcgactttcgg

SEQ ID NO: 281788 - DNA, 577 bp, Cannabis indica
ggaatcaaggtgacctccgggatcaccttgaccaaaagaaatacgggcccgcggtctctacgggaacgataaatgaaggaatcatggcggaactcgccatactccaaaaagatatcgcccgagtctcccggagatagaaaggggacgactccgactcagactgtgaggaccgggagccatgtgctaagcacatcctggaagtagagctccccaagaactttaagatgcctaaaacggcagcttatactgggaactctgatccaagcgaccacttgtcgcggtttaaccgtgtcatgacggtcatgagagtcaacaatgacgcaaaatgtctgtgcttcccacttactctaagtgggtccgcggaggaatggttcaagaagttggaaccaggatctgtgggctgttggaacaagttatagaccaacttccagagatagtttgtcgctgcaagaaaggtaaccctggaggtcagcgccttgactaacatcaagcagcttgcccttctccaggtaggcatccgtacatggattccattctggaacgaactacaacaggaaggagctgcaagccttcagga

SEQ ID NO: 281789 - DNA, 507 bp, Cannabis indica
agtccagcggagattgtcttgggaagacaacctctgacgccacatgaagtggcaaaacagaaatctcaaggggtttgtcctgcagcttatcggttcgcgagggatagaactgagttgctggaattggctagggacagcctgggaaaagcttcacggaggatgaagaaatatgctgataagcataggagggatttggaattttctgttggagatcgagtgttgctgaaactcactccacagatttggaagaagataaccgataagaggtatcataagggcttggtccagaaatacgatggtcctttcgaagttgtccagaaagtgggggctgtagcatataagttgaagctgccggaacgtttcaagctacatccgactttccatgttagtttcttgaagaagtaccatgaggacaaagaggaaggaagacagcaaggggtgagggcaccgcctactgtaaggaaacaatttgagaagaagttgtcgaagatccttgatcatcgcact

SEQ ID NO: 281790 - DNA, 500 bp, Cannabis indica
tgagttttagaaaaacttacagtgtaatttgcatcacaaagttgactgatgcttatcagatttgccttgagtcctttcacatacagtacttcagtaagaggtgcagctctactcatcaccaagtctccttttccaataatatggcccttatttccatcaccaaaagtgacagctccctcctttgcttctttgtaattgactaacaatttcttgttgcccgtcatgtgtcgagagcaaccactatccaagtaccactgtccttccagaaatgcagacagtgaaacttgagctaccaacccaacattcgattcacgatcagccctcaatccccactcacattgagatcctccctttcgagttttattgggtttttgaaaactcttaggtcgattgatcatagctttcaagtagttctgcagcttatagcatctgggtcgaatatgacccctcctgttacagaagtgacacactgggatgaatctctccatctgagatatatt

SEQ ID NO: 281791 - DNA, 983 bp, Cannabis indica
attctttgatttgtccaaaattatataagtgattaataaattaatcttaccgaattagttataatttttattgttaaatttatcatcaaattaaattttgtaaatgtctaatatatttataaatttgaaaagtaaattaatattattttttaataatatatctatattattaacttatttataaattatacactttataatctttttcttctacttcataattttatagaaaggtaatgattttagttttttagcataatttattttattttataaatttgtgtgtatatattaagaaatatgacttaatttttttttcttacaacatgaataatatacttttaaattatcaatcaattgataacttaagtcatgccttattaagagtttatcatcaaatcaaattatatccctgtttaataaatttatattcataatttttaaaagtggattaatatttttttttcaataatatatattatttagtgatttattaattaaataatatcactataatctatatctatatctatctatctatatatttatacatatactagatgaaagtattaattttatttaagttctagtggtttttgtttaagaattcggtaactaattgtaatttttaaacgatttgttttataaaaataaacttgttaaaaatgtcataattgtatatataaatctatgctatacacattgttattaataataaacagtaagtttatctcaatttatttactcatatagtaattattcttactgtgatgaaataatttaagataagtcataacaacatatgactttaacatttactcttagtttcggaaaaattaaaaggatcaatatatttgtttcggaaaatttaaagaaaatattatgtattctgataaccaacaataccttctgtccactaaacttttatctattaaatacaaggcaataaaaaacaatcagttttcacattgaggataaccaac

SEQ ID NO: 281792 - DNA, 678 bp, Cannabis indica
tattaacaatttaataaataatttaaataaactaagatattttttttaaaaaaaaaattcatcatctttattaattgcaatccatagtgattacatgattaaaatctagagtaacatcactactcctgataacacgatcagcaactaaataggatgctcgagctaagaaatgagcaatactatttgcagaacgtctaataaaattgacataaacatctcgcaagtcatttaataacatcttacaatcagaaataatactcccaaaatatgaaaccataggaatagagctacataacgcctgcaccacagtaagactgtcagtttcagtgacaaccttcctccaatctttccgtttaacccaactcagtgcctccttaacacccaaagctttcaccatttcgggttgcaacacccctgaccgacagcaggtaaaagcttccaccaatgggccagtttcatccctaatcacccctgcaaagctataagttgcagttcttgaaaaaatggcagcatctacatgcattaatcttcaaggtgttttcaactggtttggcccaagtttcagcaccatcgacaacagtaaggaatgcagtcgtaggattaaatgttcaatcttgagcccaagtccaatctgcgagtaaagcttgagacgtaagtgagcaacactcgcaacagtag

SEQ ID NO: 281793 - DNA, 511 bp, Cannabis indica
aaagactctggctgccacataagaatgtgtagccccagaatcaaacagcactgagtaatacgagttattaactgaaagctgacctgttacaactgaggggctggcatctgcatcagcctgagtgatggcgaacaccctagctggagtgggtctcgccggagccctcggtgcctctgatcggagctggggacaatccctcttgaagtgtccgggcatgccacactgaaagcatccctgacctttgcactcaccctgatggtgccttttgcagctggggcactcaggataagaaaaccgggtctctgcaccaccctgacggctgcctctactctggttcccccggaacctcttgttctgactcgagccaccggatgcagtggatgttctcctcttctggtccatggccgaaccactacctcccctgctaaagcctgatgcaggaggggtaggagccccgccactcgctggagtactagctgactccgacatacatccaactgcgccctcagct

SEQ ID NO: 281794 - DNA, 641 bp, Cannabis indica
gttattttattctcatcatctaaaccgtctttttctaatttttcacgctataatttttgaataattgaattaacatagtcattgtaggatcgattcttacttacatttatactaaaataattgaaagtattggaatcaaaacaatagtaaatttgatacgacatatgataagtgatgtgacacgcatgtctaacacgattaataaacaggttgtgtccgggttgacacagctaacacgaaactaacccattaataacatatttaaagttatttagtactttaaggactcgtttggtacgccgcataagggtcgtattgtattaaataataaataacactatatttggatataataatgtattatattaattactacgactaaattttttaaaacaatatatgctgtattatttaatacataacagatggtccgtattagcttgtattattatatttacaaaagattcgggatcaacaccaatctccaattcggacttgggacccggacccctgccccgacctaaaatcggacttggaccccgaccccggacctgggaccctggaccccagacctaggacccgggagccgagacccggaccacgactcggaccccgaccccgaccccgaccaccgaccccga

SEQ ID NO: 281795 - DNA, 602 bp, Cannabis indica
tacaggctcctaaaccgtaaaaatcacaacccgataagtgacacgctaaatcacaatcgggacaaaggttttaaaatccaacttgacctactgaaacttaatacaaaaataccccaaactagcagagaacaaactgcctaaaaacccgaaactagcacgaaacgacaagttgagaaaaactggtttcataccctactgcaaaatctgggtaaccggttttacaagcagtgtaaaaccggttagccgattttacccagaaatctaacaaaaataaaacccctaatcacaacgtttccaaactcaaccgaactttccagacctgcatattagaccccaataaacattttccaagcaacaaaacaacaaagcttagaatcaaaattcaccattgatgagtcaagcttgagtttaaatactcaaagcttgctcatccaattaactagctataaaaatctgatcaaaacactctataaaaacataatttagcttcagcaaacataaatcaacaacaacaacaagaatagccactaaactttaaaaaacatgcatgattcactatctttaaaatcaagaaaccaaaagagagttgctagagccttacc

SEQ ID NO: 281796 - DNA, 476 bp, Cannabis indica
cttttgggatgctttcagtttttcctgcgcattccaccataaagtcagccaaggcttggcctttgatagttgttcggggttggaaattgatttcgtactgccccaattccaccgcccacttgactaatcgcccggaggcatctggcttttgcagtagttgccgtagtggttcgtcggtgtacaaccgaacaggatgagcttgaaaataaggtcttagctttcttgttgctaagatgatgcagtaggcgagcttttctatcaacagatatcggccttcgacctcgatgagtcttttactgatgtaatagactggatgttgcacgccatcttcttctctaattagtacggcgcttatggcatgctccgttaccgccaggtatatccccagttcctcaccgtccagaggtttagtgtaacaccctaactaacataggcgtattacgttatttttagacatgttgtgcagctcgttgcta

SEQ ID NO: 281797 - DNA, 694 bp, Cannabis indica
aggtttactccctttcttcttgggtcctcaaatcaaattttcatatgtctgaaggtcattgactaacgtgtgaaagtcttgttctttcttattcatgacataatttgatgtatagggcagaaaagctggagtcagactattcaagatgagactcacttgagttgtctgatacatttaagcaccatgattctgggcttcttggaaataactcgccatttggagaaggtgatcacgcacattctgatggggttccatccgtgcatttataaatttctttgtcgcgtcaaagcgagactgaatagatgccattccgaatagctcagttaacttcgtcattatttctgcagtcgtgacagtgtttgcaaaccttgctttccaggtgtgaaccatgatggaaagcatgaagtatcgagctttgttgttagcattctgccaacgctcgaacttctctttaacagctttagttacattgtcacacggctgttcaggagaaagctcagttaacacaaacatggcactttcacctatgagagcaatattaatgttctctttcaatttagggaagttagatccatttagcttattttcagtcaacagtgataacatgggatttgacatagttataaggatactacaaaaataataaatagaaatcaattatggtttaacacaaaatcttattcagaaattatta

SEQ ID NO: 281798 - DNA, 470 bp, Cannabis indica
ctcgtagtgagaatgggaatagcttcaaccttagcacctcttcactcactccttggatcttgaaagtatcactcacctccaagaatgaacggagatggaggtgagaatcctcagttggaatcccgttgaattgccccacgctttggagcattcgaaacatcactggcttgagctcaaactgcggtgcttgtattttaggcctcacaatgcctggattgagctcattgaacatgggggctgcatactctcgtataacccttgctcgatcatctgctaatatgatgggattaacaattttttgggcaatcccaccatcatcaagattctcagccatgatgtctcggcccttaaccttttgaactctccttctccttcggaatgtgcgttccatctcgaggttaataggagcaagttcaaagtcctcttgttggttcaaactgttgggttttatgccctaaataaaactcttt

SEQ ID NO: 281799 - DNA, 543 bp, Cannabis indica
atcttccacgttggcatcttgaacttgtgaggtagtggcaggagattgatctctggtgagaagggagttccgcgcgcacggtctaactcaagatcattgttacgctgcccggccatgccatgaaacatattcttcagttcgtcgagctgggcctgtacggctgggctgacttgattggcattctggtcgggttggactacgtcagcgtctttctgagcggggatttgagtatgggctccggactgcacgttcgttgtagtattctgctcgtctgttccccttcttctgtttagatcgtcccttaggtcatgggttgttcccaacctatcgaacacagaagaacctggctgccttagcgattggttcgcttggttggcaggtggaatggctccattattttgcgtggatccgtcgagcatgactcctcctgatgaattcccggacaaggtctgtccgcctacctcttggcccacgagtggaactcgtgaccggggattggacggctgaccgttggttgtcaggaaagcattcaccgttgggtca

SEQ ID NO: 281800 - DNA, 613 bp, Cannabis indica
atgacaacttatatttgcttgagcttgacagtgttgcttcttataatgaaaccttgaatgtggaatcacgtggtactaagcgtaaaatggataatgaaaaatcaagttccttatggcacaaacggttaggtcacatctctagaaatagagttgagcgacttgtgtctgatggaattttagattcaattgatttttcagactttgatgtttttattgaatgcatcaaaagaaaacagaccaaaacaaagaaattgggtgcgaaaagagctatagatgtcttagagttgatacatacgaatatatgtgggccatttcctttcttggaatggtcaacaatattttgtatcattcatagatgattactcaagatatgcatacctatttctacttcatgaaaagtctcaagtcttggatgtgttcaaatcttttaaggctgaagttgagaatcaacttagcaaaagaataaagcaagtcaggtctgaccgtggtggtgagtactatggcagatatgacggatcaggtgaacaacgtccaggaccttttgccagatatctagaggagtgtggaattgtcccacagtacactatgccaggatctcctagcatgaatggtg

SEQ ID NO: 281801 - DNA, 442 bp, Cannabis indica
agaattatgagaataagatagtagaattcgtgcatagtctattcgaatgacctgggcaaagattcctaatcctcataaaaattttatggtatcttaatttgattacttaatctctagcaagtattttatacttcatttaaaatactaaattgctatgttgatgacttagtctagaactttcagactaagataatatgtcacaactagatatccctcaaaacaatagtaagaggttaaatgtaattttatgtataatttaaccagacatctactgttgtgtgggagccatctgagatgtaatcaaacaaggaacattaggggacaatcaagaaagatttatcaaagtgacctatatgttagataataaggaactatatattagtagtccttatatctacaccaactcataaagaattcgagatggtggttactctgggggtgg

SEQ ID NO: 281802 - DNA, 489 bp, Cannabis indica
agtgcctgctatgtacctcatagcccatttcattacttgccaatgctctttcctagggtttgccatatatttgcttaggatactcatagtgtgtgctagatcaggtctagtgcacaccatcaaatacataacagatccaacagcatttcaacagggcacttcttgtggaaatattttactaggatctagatttactaccatgtatgtttcattaaaatcctaatatgaattctaaaacaattcctttgatgctgattctccttcttgttgattgaattctacacaatcttccacactatgattgagatacaacttgatgtgtgtgggcactcactcattcactcaaggtttgaaaatttagagaagaaaagagaagaagagggtggcggctatagtatagaataggaggctcaactttcatctgacaaagttaagtgtgaatgtgaccatctctatctatttataggtaaccacctaggtttacgttag

SEQ ID NO: 281803 - DNA, 840 bp, Cannabis indica
tttccaaaatagtaaaaataagatcctgagctcaattttcaacaattttatttttttatatatttttaactttaaaacaatttctaacacgatcagatataaaaaatataatcagttttgtcataacatctctaaatcagattattattaagttttattttgacaaaaaatcagttcagagtcctaattgtacaattttagaaaatacaagatctattttgtcatttaacaaaacagaaggtccaattaataacttttgcaaaacacagagtccaaaatagtatttacccatataattataggtatatattaattattattttggaaaaattatggttgcatatttttttttttaattttttaattataaaaataaaagtaaaatttgtattttataaattttattttgaaaaagtgaaaatgtgttatataattaatttttattttttgtttttaaaaattaaaaaacaaagtataattattttttatatgaaaatacaatgtaatactgtgacatttttaattttgaaaataaaaaacatgaattttgattttttttcttttttattttattttttttaaattaaaactaatgtttatcgtttagtttatttttaaattaaatatacaaaaattataataataaaaaaattaaataaaaaaataactcattagcatcataaaaaaaatactaagtaatttaaaattaaatcttagacttattatctatcaataacataatacaaaactagacaaaatacatacataaaaaaaaataataatatataaactaataaattgtccattttttaaagtaaactagtattaaaaaaaattaat

SEQ ID NO: 281804 - DNA, 546 bp, Cannabis indica
tctcaaatcccagtaatttcagtactaatagccagggaattgctacgagatggatatctagtgtttctggccgttgtattggacaccactcagcctgagtcaattcggccatagaacatcaaggttgtttgggaattgttagatgttattcttgatgaactcatgggtttacttccgcaaagggaaattgattctgttattgacttggcacctggagcagaactggtttctaaggccccttatagaatggatccagtagaacttaaagaactgaaaattcaacttcaagggttgcttgatatcgggttttcatggcctagtgtgtcaccctgggaagctcctatactgtttgtcaagaagaaggatggatctttgcggatgtgcattgactactgggaattgaataaactgacaatcaagaataagtatcctttacctaggatcaatgatcttttcgatcaactttaggggaagatgtcttttcaaagattgatctctgatcaggctatcatcagttgagaatccgagaggaggacattccgaaga

SEQ ID NO: 281805 - DNA, 768 bp, Cannabis indica
atcttaaatttactaacaagtatgttgtttaacatcctaaatatgaacttctaaaacgataagaaataaacatatataaagtatgagaaaccttacagtggttgcagcggaatatgatgtctccttccactcagatctctaacccttgtatcctttttgtcgcagagtatcaccaagatctgagcctgaatctctttctgttgaatttggattcctcacgatcttccacactatgattaaggtaacacttgatgtgtgtgggctctcactctatcactcaagggattcggtttcaatagtgaagaagagggaatgagagtggcggctaggtttaggtagaaggcactcaggtttttctctgaaggaattaagatgcatcatcttttcctgaagccatcactacctatttataggatgccacctagggttaggttagaattatttggcattaaaataatgaaaaaataaatgataaaatcctacataagtggccggcctgggctttggatattgggccctacttttgtaattttgatgttttatcatttctacatctcattctctcaaaaaaaagccaattttcaaatttaaccatttaaatgccaattccaactatttaataactaaaaaattaagtattaaataatattgaaatttaatatatttattaattagaccaaccaaagtctcttaattaacaaatgtaccctagaaactctttcttcacaattttgcccgtgcttagtgaaaattcacaaactagacata

SEQ ID NO: 281806 - DNA, 301 bp, Cannabis indica
atggaaatagcactgtgagtcaaaagactcaaaaaaaaacataacatataacataataatatcccaagttataatcaggcgtccatacacctaaccataaccctatcctcgtgtcgcacacggtactgagtctagaacattcatacaacaatattatcgaccatagtgtcaacttatactcaacatgctagtcatactctagccatgttatgtgacagtgtcgggtgttcattggatcacatccaatgtttttaagcctatccagatccgatccaatcatgtattggatgttagattttac

SEQ ID NO: 281807 - DNA, 764 bp, Cannabis indica
tcaagcagctgcctacggagaccctaaagactacataagaggttttggagaagcctcgaaaaccagaaagttgacgatggacaacaacttgcccttctccaggcaggcatccgtacagggactccattctggaacgaactacaacaggaaggagctgcaaaccttcaagatttctagaagagagtccaaaaatacattaaccttgaagaggcccaaatagtggcctatggaggatattatcccaccgggatagcgggatatgtgcccggagcccagccctcgggcactgtgccagcagcagctccacctatgagcggcatacagttctctgctactcccggatatagctagggccaggccttggcccccgcatcgtcccattttggaaatacctcagggataaacagacaagccccctcgcactccgctccgacagccaacctagcctgtccttcacagggctcgaggagtagaaggtcctccaaaggcagcacccggacggaggaaaagcgacaaaaaagggggtacactccccaatatacccagtacacggagttaacagactctcaagaacgtgtgtactttgctactaggcaaaatacgcactaccggagaccacctcctctgtacagagacagctcccggagggaccccaacaagagatgcgagtaccataacgacattgggcacaacaccaatgaatgaaaaaatctcaaagacgagatcgaaaacttaatacgattgggacacctctacgagtggat

SEQ ID NO: 281808 - DNA, 764 bp, Cannabis indica
atatttttgggatgattattaaagttggtataaaaaataaataccaagcattagtgaagtttccgtgtataatctatatacatatataaaattgaaatataaggcaatgatgtagtagtctaaatctattaattttatctatttttaagtctacttatatagttgaggtatgagacggtaacattacagtctaaaattgtttcaaatacatctatttatcatatctttaattcttttattttttttatttactttaaactaggtaatatagtcgttttttgtgcgactattttaataaaaaaaaaacattatattgatataataaataataatttttaaaaaatattttaatatttaataatactgaacttacattatttagtatcatattattattattaataattttatttatatataaaaaaaaattctctataaagtaagaagaaattattcttcaagtatattcacaatattattaatattaatgagaattattattatataaatatttttatcatttttatgagttgataaagttctctcgctaactaattatttattatttattaatataatatttttttattaatatgttttaaaaaataatttttaattgttaatatgaaaataagttctaatttaaaaaagatcatttatgtgacaaaaaacaagaataattaaaaaagtaataaataaataaacagggtgttgctgaaaaaaagtaaaatgttaattattattattagggtaaatagcggcat

SEQ ID NO: 281809 - DNA, 564 bp, Cannabis indica
aattccagtcacgttcattgcgataataaaatcgaggacagccagaaagagaggaagggacattaccagatgaaggatcttccatgggctgcttgcctttggcagcagcagaggcctttgctgcagaagcagattttggtcgaggaagctctggctcgagttctgtgtcctcactgtccttctcagagtgaagagacactgatttgtctgaagaaacttccattggatcctcttcttctgaactggaacttgatgaggccgagggtggattagtcttgagtttcttcttggctggagggactgtcttctcacgagattgagaggctcgaagttccttctcagcagaggcttgctgggctcgagttcgagtagaagggcctgttggagtggagccaggcattgatgcagcaggaggtggaactgccaatggaggaggagattcctttgaagattcagaagaggaagtccaggtgcgaatgggtcttaccgatttgcgagcaacttgcttgggtggacgttttggcttctcggtttgagattcacgctggggaagcgatgaatctc

SEQ ID NO: 281810 - DNA, 758 bp, Cannabis indica
ttttaacacaaagtacctgcaaattaaagttcacaagtactaaacaaataactactccccctgagtaacacaatcgaaaaccaaaaataacaaaataaacatgctaacttttaaaccaaagaagttcacaagtactaaacacaactcccccaggaaaaagggtccagagttggtccaaacaagcagttaaaaatcaaaatactactccccctttttgtttatctaagggccaaagataacaaataagaaaatatagtaatatgtccaatcaaaagcaaagaaagaaaaagataaaaacttagtctctgtaaagcttgaccaaggtggacagctgctttgacatctcttgctgaagttcctccatggcagcaagacgattgttcaccagctgaacctcattcttgacttcctggatttctgcagcagcagaactcgaacttgcagcagcagcagcagcaacaccagctttaggccccttttgaaacactccatcaaaatactccgagggttggaatgttgttccactcaatgaaggctcaagagtttcatgagattgtgtcacatttttctgagaggataaaaccttaaaaattaaatttggaaacacaagcttaaaagttggctttttacctcttcgaaatgaaacaattcggttcaaaatgtgggagaccaagtcaatagtgttgggttttatgccctaaataaaactccatttcaatgtaatccagattattcagtatcaataaagtaacagaagt

SEQ ID NO: 281811 - DNA, 675 bp, Cannabis indica
ttatgtttcctcttgtaaaaaaaaaaaaaaaaaaattaaaaaaaaaaaaaaaaaaaaaaaaaaaaaaatagaacaagagcaacatttcgttattgtattttctttttacaaaaaaaaaaaaaaaaaaaaaaaattgttccatataaaaaattgaatgaaagaaacatcacttcatgtgtttcttaaaaaaaaaagtgttcttttctaatatttacaattttcttttagttggctctttattcttcaagtctcttgtaaatcccaaaggttgtttgtcatttaaattctaattatttgattttcctatcttatgatcaatatttgttcaaattgtttgtcctaaaaagtttgtcttctctcatttgagcgttaattgttacaattccaactccaagagtgtcatctctcccataaaaaaaaatactttcaatgcctgtgaggaaattggagttgagacctttacgcttttgagatttttcgatgctatttgtgttatggcttgtggtaagaaatggatatggtttggtgcacacacccacaactctggggttacaactaagtagtttgcttagcaatttctgatttcttgatgatattttaaaatgcatggctggttttgattggtgtgacttgattattcagcttgataattttcttctccgcttgaattgctag

SEQ ID NO: 281812 - DNA, 610 bp, Cannabis indica
tcgaagtctggaactttggaaagagtggtgtaaatgtaatcagaaactgcctgatcatattgtttattcccattctctttctcggcctccaagtcgcgagtcatctcctcgatcttcgcccgcgagttcttggcctcgagctcagcctgctccttagccttgcaaagttcttcaagctctttatccttcctagccgcctcttgcttcagcctcttcatgttctcctgaagctgggcattgtgcctcttcagcgagtcggcttccttcgaacctgcggcagcagcttttatgaacagggtcatcgactgcgaggccaactccacagagcgcggaacaagctcctcagaagggatcttctccgctttggacatgaactcctcgcccacgaacttctcctgcatggccagaaagtcgcgagctcgaacagttggttcgatcaggactttcttccccttgtcctgcatggtcttggccagcttcttggaagagtctgcggcaagggtagccaccacatcgctcttcctcttctgggcaacaacgggagaggtcgtcgctgctccacccttcgacttgatcttaaggacgggcgcagacttcaaaaaagtcatat

SEQ ID NO: 281813 - DNA, 587 bp, Cannabis indica
gtgcagtctcatacctacacagtctcagtatcatcccacttgaccttccccaggcagtgtgggattgcacagcttaatcggtatttccccttacagattacgagactactgactgtcacaaaatgtgtgtttgaagcaacttttagttcagctagtgctataagcaaccagactaaactttgcattaaagctagaatctattattgtaatttgtctaagctttcttttagagaggaaaatgtaatagccatgttaaacaatctttgaattgtttggttgccgcttttgcaatatgtattgttcggtggttgttagaataaaaaaaattcttctaaaaaaatttactatttttttgttaagattttttgggcttgggtatgggccaaatgcgtgggcctctacctcctcacctttgagccgacctctaatacacactttatattttaaaagagaatataattattatgatgtataattagtaatgggtaaattgcggtataaatacctaatgtttccgattttatacacttaaatacctattgtttattttttgtggcaaaaatacctaatgttacaattctcttaca

SEQ ID NO: 281814 - DNA, 422 bp, Cannabis indica
cccaacattctaaagtggtatgaccaatatctttatggtacttacagaactttttggggtctcttctgtcgcggtttcccctgatggggggcggcttcttgaagactccattcctctcttcaatcgcataaatgtggtctcggggcaccgcgagttcggtataattaacaaaacgcggtctacccttcctcttcggagaggactccttcttgggaggagatttggccaactttggacttcgttgtctccgtgggctgcgtcttcttgggcttcggcctctggaattcttccctcggggactgcgagatcttgatcgcggtattggtgatttacgtttatccttgcccttctccaactctgctagagaattctcgattctcttatgaggttcagccatagcaaagaattcgactagcgattct

SEQ ID NO: 281815 - DNA, 715 bp, Cannabis indica
atccttctatactgtcatggcctttcgaaacttggggaatggacgtcagttggcctttttacgccaccctcttccaaagcccataagtatattttggccatcacagattacttctctaaatgggccgaagccgtgccactaaaagaagtacgggcggaagacgtcgctgattttataaggacccacgtaatttatcgatacggggttccttcaaaaattatctccgacaatgccatttatttcaaatgtaaggcaatggtcaagttgatgaacaagtacaaattcaagcacagtttctcagctagttacaacccgtcttcaaatggtcaagcagaagcatttaacaaagtgttatgcaaaatcatgaagaaaaccgcaacaaagaataagagggattggcatgaacgcctcctagaagctttgtgggcttatagaaccactgtgaggactgcgactggttgtacaccttataacttggtgtttgggtctgaggcagtgttacctttggaggtacaaataccttcattaagaattgctactcaactaacaaacccagatgaaaatgtgcaagtccgtctagccgagcttgaagcattagatgaaaagcggcttgctattcaacaaaagctcgaaatttaccaagcccaggtagcgggggcattcaacaagaaagttaaattttgatctttttcggttggagatctagtgcttactg

SEQ ID NO: 281816 - DNA, 605 bp, Cannabis indica
agaaacttcaaacagtaaacccaaaaaaacagatgaacagtaaagcatgccataaacacaaaagtgagggatgcgaaaaacttacataaagtgttagaactgggggttgctgttgatcgacgaagaaatgtagactgacagtaacaagcaagggttaataagaaatctgtaagtgtttgaaggttttctggtctaagggtttctttctctctggaaaacttgaagaaatttggtgaaaggatgaaagtagccaaatgaagaaaaggtggtggcttttataggccacgacgcatgtggaataggcacagtcacctaccaattgaacggttagggaggcgcacgattcgaattcccaagatccaacggctagattgatttgcaattaaggcggtggaaacgttggagtatccgtctgacacccattaatgcgtcgtatcaatcaatgggcatgaaacgaatcaacgcctgcaaaagtgaatcgctgcaataatggtgatcattaaatatgccttcacgcgcccgaagcacgtgccaggaaaccgaggagtcaaccggaggcatctgaacaagcctgttcattttttaaaataaacaaggcttggggg

SEQ ID NO: 281817 - DNA, 759 bp, Cannabis indica
aacttggttgtatattcagttacagacattccttctccttgtaccaactcaataaattcctttcgctttgcactgcagaccgcctcattataatatttggcattgaataaatcccggaattcctcccaggtcattctcgcaacatccctggtaagggatagcatctcccaccaaatcaggggatcctcttgaaattgaaacgtggcacatgccaccctatcattcccgatcacacccataaagttcaatattctttcaataacagtcaaccactgttcagttttaagaacatcaggtcctcccaggaacactggaggtgcctgcttcctgaatctctcatataaaggctccatacggttaccagcaacatgttgctcagctggcaccgcacgggctgcaggaaccgcagcaggcggttgtgggggaagctcaacaggagcatcccgttgcctgagtcgtcggatctcttcttcttattgctcaattctcactacaagaaaaccagcttttaccggcgcattgttgcgccggcaaaagtacactgactgcgccggcaaagctttgccggcgcagttgtgcgccggcaaagcttatctgggaagcttggtcggtaaaggactttttaccggcgcgtacattaactgcgccggtaaaacgtccttttaccggcgaggaataacgccggcaaaaaataagcgccggtgttaaaaaatgcccttatccgccttgaacctgctatgattaggttttgccggcgca

SEQ ID NO: 281818 - DNA, 566 bp, Cannabis indica
acttttgcttttcgacgaatgccatttgggctgtgtaatgctccagcaacatttcagaggtgtatgatggccatattttcagatctaatagaaaaatgcatcgaggtgttcatggatgatttttcagtgtttggttcatcgtttgaccaatgtttaagcaacttggaattggttttaacaaggtgtgaagactctaatttggtgttgaactgggaaaagtgccatttcatggttacagaaggaatagtgctgggacataaaatctcgaaagaaggtattgaggttgacagagccaaagtatctacaattgagaacttgcctcctccagtttcagttaagggagttcgaagctttttgggtcatgccgggttctatagaagatttatcaaagacttctccaaagttgccaaaccgctatccaatcttctcgctagtggagtaccttttgaatttgggaaagattgtcttgaagcattccagattctcaaggataagttaatctcagcaccgatcgtgactacaccaaactgggaattaccttttgaaatcatgtgcgatgcaagtga

SEQ ID NO: 281819 - DNA, 568 bp, Cannabis indica
gtctgcgattaaagtcagtcctaatcccaggaaccttaaagacgtaaaaccacttcgacttccagtcacccatgttcgataccatcccctcaacaccgtttatttcagaagtcgcccatttgctaaagcagtagaagccgttatggaggcccacgctctttatatcgtagaagtaactaaactcttctactgacggagccctatggacatactccatgtacatcgcatagaaagccaatacagtgcgataactgttgggtgtcagctgaaagggcgatacgtcatatcgcctaagaatggctgcgacgaagggatgaaaggggaccgatacaccacatcgaaggatgggtattgagattaccacatcctctgtagggatgatcgcagggttggtgaatggaaggtgcgctctctgagatggtttaggacgttgaaacgcgagtcgcaacaaattcaacctcacaaaggtggtgaagtcagatttggcaaccctcgagactaaatcctcgcacgagaagggctcgttcaattgggagtcgtcgaccgaatccgtcccactcccttccgc

SEQ ID NO: 281820 - DNA, 501 bp, Cannabis indica
tgagagatttttttaattagataaaaaatttaagcataaaaacttaaaattttctaattttacccattcatgggtaatacccattaagagtgcacccatacatatatatatttttatgattatagtgtcgtcagcacagtggaatataattatgattacatgtccaaaagtttaattctcataatttatcaattcactggatttagactgacatgataatcagcgataagtacttacaccttgaataagtgttatcctttctagagcattgacaaagtttactagtatcgaatgtatggagtatacattggtttggaccgatgttgaacttggataagatatcataaacttactgttatatttttctaagataatataactatttgatcttaggtctatggatctcaatccatatggttaggttcaacttagttgaattatttatgttcttcaagttgttcgtgaaaactaaccaatagttctggcggatatttacatctt

SEQ ID NO: 281821 - DNA, 445 bp, Cannabis indica
ctggatcttcttttctccttctagaaattccatagtcttccatactatgattgagataccacttgatgtgtgtgggcactactcatcactcaagcatttcgaaattacaaagaagaaaagagagagagaaggtggcgtgtgaggcttttctgagagaaacaaagtgatcaaagatgtgtgtcttagtttcctcaagccaacactttctatttatagaaaaccctctaggtttaggttagaattgcatggcattaaaataatggaaactacaaatggaatttcctatgcaagggccggccatacaaagggtattgggcctcactttgcaactttcccattttgttattttccattcccattttctcaaaaatgccaattttccaatttaaccttttaaatgccaattctaattatctaataacttggaaataattatcaaataata

SEQ ID NO: 281822 - DNA, 409 bp, Cannabis indica
taactgctaatttccaaattacactaagcgggctttacataaaataaaataataagtcctgtttgttaaaagaatatagccacgtgtatgtttttgatttagtcaaatactcatatcattcaaaatttgatttagtcattcaattgttgagaatcatggagttccatctcaaaaccaattggcaatgagtggagtagcccatgttcttatatatggctcaattctctaccatttattccatgcgggacattgtccacaatattcccctcaagtcagagtggacatggtcactatctgtataggtgcggatcagatatgatcacttgcgggatatggctctgataccatgttgagtaattcatggggttccatctcaaaaccaattggcaatgagtggagtagcccatgt

SEQ ID NO: 281823 - DNA, 53 bp, Cannabis indica
aggaaaataacacacttctgaatcagaaaaacctgagccccctctctctcttc

SEQ ID NO: 281824 - DNA, 562 bp, Cannabis indica
aaacaccatcccagatgtagatttcctgtcatcaagacatgcctggaaatctgaatcagtatagcctacgggatttaaagcaccacccttgtagactaacatgaattgccttgtactcttcaagtattttaagatatgcttaacagctttccaatgttcctgtcctggatttgtctgatacctgctcacgattcccactgcataacagatgtcaggtctagtgcataacattgcatacattagacttccaactgcagaagcataaggaactctactcatgtcctctatctcttgaggatcagtgggacactgttccttagacagattgataccaaatctagaaggcatatgcgcccctttggcattggtcatgaagaatctctctagaactttatcaatgtaagcagtttgagagagagcaagtgatctgttcttccggtctctgataatctgaataccgagaacataggcagcttcacccaaatctttcatttcgaattgagtgtctagccattccttgatgtcagtcattttcttgacattgttgccaatgatcaaaatg

SEQ ID NO: 281825 - DNA, 614 bp, Cannabis indica
cataatgttgggtcgtccagcactgattggactaggggtagtcagttcgatcaagcacctatctttgaaattccatacacaagaatgtgtgggagtggtgtgtggaaaacagatgctggctcgcaattgctatcgcattgagttgcaacataagaaagtcgatcattagttgatggcgatcttggcacaagaaaatgagaagaaagacgaagatcttaagccctgagtccaagatgagtgaaacctattgaaaccaattgaggaattggaagagattattctcgacccaggaaatcccacaaggtgtgtatacatcaggaagaacctggacgagcagctcaaatagcagctaataagttttttgaaggcaaaccaggatcaatttgcctagagccatgaagatatgataaggatcgaccctaatattatctgtcatcatttaaatgttgatccaaactactcagtgaagagacagaaaaggagaccctaagatttcgagaggtaaggggcattaaaataggaagttacaagttgttagtcaatgactttatacgcgaggtgttttatccctcgtggatagccaatcctgttctcgtcttgaagcctaattgaac

SEQ ID NO: 281826 - DNA, 559 bp, Cannabis indica
gatgcatgttggttggattgaagtaagttggaatttttaactcaaaacttttgtttttatgagtgaaatgttgtttagcttgctatagttcctgtagttatttgtggttgtattcagaggcttagttatgagtttctatgtggatttatgcttgatttgtggctgttggttgtttgagcaagctttggagttttgaactcaagcttggctcattaatggcaaaactcgtttctgtgattgaagctttgttttatcacttgaaatatgttcattggggtctaattagcaggtttggaaggttgcatgaagtttggggttgaattggtggagaaatggaattttgaaaaattcctgcactgaaccggaattctggttcagggaggcctgtaggaaccggtcgaccgattggcttccaggaatttttccagaaccggaattctggttggggaaccggtctaccggttgcggcaaatttgggaaccctagttcttcccatttttgtgttgtttagggtattgtcatgctttttatcgatagggaaacttttagtttctagttt

SEQ ID NO: 281827 - DNA, 665 bp, Cannabis indica
ttttgtaactagtcgctaggcgactaatattttgtataaaagtaacttttgaaatgatttgtaatcgggatcccgagtctttgtataaatattttacaagtttaattaaaaagcaaaaattttataatcacgttttccataaacctcattgattagcaacgagctgcacagcatgtttaaaaatcacgtaatacgcctatgttagttagggtgttacatgcttgccccctgaaccttacccacaaacaccgctgggttagcactatcaagctcaaacaccaccatcttccgcttacagtcaatcgttgtcccatacttagatagaaaatccattctcaggattatgtcaaaataagacagttacaattcaattagattggtggtcaattcacaaccgtcaatccagaaggacaaagaccgaatccacctagtggatactataaggtctcccgagggtaacagagtgccaaaccccgaagcataaatatcacatggcttatggaaactttctataactctactcgacacataagagtgagcagctcccgaatcaaaaaacacagtataagaacaaccattaatagacaactgacatgtcactactgacggactagcatcagcgtcagcttgagtcatagtaaaaagtcgccccgggttctgtgtag

SEQ ID NO: 281828 - DNA, 501 bp, Cannabis indica
cgcttagctttaatttggatattagcagataattaggatttaattatgggatatttattaactgtgaattattaatttatgatgatttatttgaattcagaatgcatttttatgtcatatataaaaattttataattttgcatgttttgtgtccggcaacattagaacgcggtgtttggctattagaatcacatcctagtatttttagtatagcaggacaatatagttagacattggcaattttgggaatagtcgggattttggaatttcccaaaatacccctacgtgcattttaacccttttagtgtaggaggggtaaaatggtcatttttccccataagcttttgtctttatgtgaatttaattaaataaatacaatcagtttttattaatgttattggctgagaatgatttaataaaaccattttttatttcattcatttttcaaaaataagaaaaattggaaaaaactagaaaactcttctctttcaactctctctc

SEQ ID NO: 281829 - DNA, 567 bp, Cannabis indica
ctagcatcaaactgagttcctgatgggagaaaatagggggtgagcttataaagcccagtaggaaaacaactaatatcaaaggacccttggtttaataaaattcctgcatggttagctttataaaaataaaatgtctcatcaacagtatcaatatgtacaaataaaatagagagaccacaaataatcacaaatcaaacgtcaaatgcatatcacaccgtccactagacccctagctctcaataccaatcatagaaaacgacatccaaaaccgggtagtcgcatctgatatccaccataaataccggggctcagatttaattcactccctgtacagattctaggtctttcacctacaggtgagtgcacacctgatctacctatgatgacacagagactaggtcgtgaaacaacaatatgcatcgaacatgatcaacatggctctcatcaatataaccaaagcaggcaaataataagcataacaaaagaacatattcctttttattttctagaaaattcggcagcataacagctgtattttgaataaacccaaaaatcataacctgcata

SEQ ID NO: 281830 - DNA, 613 bp, Cannabis indica
ttattttccagtttttgttgattattttcccattcccagtcgagtactcaccattctaggttgaatactcgcacttgtcattacccataaaattctctttcatattaataaaataatataatttggtgttgcgaaattcactcgacaacatttggcgccgtctgtgggaaatcgactaagatttcattcatttcaaagaacaatatcatcatggctggaaatcacgccaacggagctaacaacgggtccatcaacattgggatgatgaacgtaccattatctggagctggagcgccacctgtggacgtcattaacggcggagtagggagaagcaatatcagacctctcaacctattcccagaaacgactgaccctcaagttggggacacatccacgccaccagcaaccatgcattttccccccgtcactccggcggtggtatccgagggaatgatccagctcaccactgatcaatatgctgcgattcaggatcaactgcgtgcactacaggccgaagtagatggacaaaaccgagcccgacgccctcctcgagttcctgctattcgcaccgataaccctcaggtaacgacttctagacgtcatactaaccgtg

SEQ ID NO: 281831 - DNA, 534 bp, Cannabis indica
aaaattcttttgactgtagagagatgggactgtttaggattggcttgatatctggcacataaacctacactgaaggatatataacgacgactcgctgtgagatacagtaagccacctatcatacttctgaatagagtggggtctacagggtcaccagactcatctcgtgacaatttggatgtgctgcctattggtgtatgtgcatgcttgacctgtgagaatccaaacttatctaacatagacttgacatacttggactgtgatatgaatgtgccatgatctagttgttttatttggagtcctagaaagaaattaaggtcacctattaaactcatttcaaactcattagtcattaaggtgacaaatgtatggacttcactatcacaagttgagccaaaaacgatgtcatcaacatatatttgggcaacaaaaattcctttttcaatatgtttaatgaatagagtgctatctgcagtacctcagatgaagccatgagagatgagaaatgaggtgagtcgatcaaaccaagcacgt

SEQ ID NO: 281832 - DNA, 969 bp, Cannabis indica
tatgtgtttgtagcatttcttttggctgaagtaaagagataaaatagcattttattttctcattattcaaaacaatttcaaagttagaaaagttagaatttcaagctctttctctctctctctctcttttcggccaagcttggggggctacgagggctgtgattctttgcaaaattcaagtgtttttctcaagtttagagtgattttagtgaaggtaatccttgctcaagcttctcttttagtttcttggttttattttggaagaatttgatggtttgcatgcttagtttaggttgatattgttgctgtgattttgttgttgtttacagaggtttaatcttgttattttgagtagattagagctagtttgatgcatgttagtagctttgtttcaagcttggtagtttttagttcaaaactatagttttcaaagaaagatgatgaagtttgttgctgtagttgttgctgctgtttaaatgtgtgttctggagttttattatattgaaataggttgagttatgcatgattttgtggctgtttggagggattagtcaagttttgagttttgaactcaatcttgaacctccaatggtgaatcgagtttctgtgattgaagcttggttcttttgctttggatttgttcttaggggtatttagaacaggtctggaaggtttggtttgagttggttttgatttgagggagttatgaatttttgagtggttcctgcgaggaaccggaattctggatgtgcaaccggaattctggatgaggttcaagaatttccaaaaccggaattccggttgtacaaccggtgtgccgattgggaaattttcaggaaccctagattttctcgtttttttgttatttggggtattgccatgctttttatcgatagggaaacttttagtttctagtttaagtccccgggaagtgatttagcaaatcacttattagtgttgtgattgtta

SEQ ID NO: 281833 - DNA, 700 bp, Cannabis indica
tggaaggtggcacacaccaccctgtcatttccggtgacacccataaagtttagtatcctggtgatcaccgttagccactgttcgactttcatgacatctggacctccaaaaaccggaggtgcttgcttccagaacctttcatacaagggttccattctgtttgccgctaccactatctcggcctaggcaacaggggcgggtgccacaggaacttctggcacaggcactgcaggagccccctgctgcctcaatctctgaatctcctgatcttgctcctctatcctggattgcatttcagtaaacctagtctcccaattctgggcttcctgatcggcttgggcagcctgggcagcttgtggcaggttatcatcaccccgaccacgagctctacccctgggacctctaccacgacccctagcatgcggggaaacagagctctgtgaccctgatttgaccctaccgagttgcccttactcctggtgttccgcctggcgtccatctagtctgaacagcctgcgaaaccaagagttggcacatcaggtcatgatcaaagagagcttactaatgccgcttaatttgaaaattaaaaacatgcgcctattctactatcaggctactaacatgcttcctatcaggcttttcttatttcataataattaaataagctactaaagcaataaaagcttactgaaccgtagaa

SEQ ID NO: 281834 - DNA, 790 bp, Cannabis indica
tgctcttttccttttgcctcactagtgctaggtgaatttccttgagcttgttttgccacttgagtagccaattgttccatctgagtttctagagttttaatagaggctttagtctccatcatgaattggagcaataagtcagcttggatatttaagcctccactaggactttgttgttgcagttgttgttggttttgttggggctgatttctctgctggtagaacccctgttggttgtgcccataattattgttttgagaatagttcccaatggcctttgcttgatccattggcaaactgttcacatccaccgggcatgtgtcatatgtgtgagggcccccacatagctcacaagtaacttgagcctgtttcacctgagcagtcatcaacttcgtcagggcctccacttgggctgtcaacttggtgatggcgtctacctcgtgcataccagcagctttcttcgtttggcttctttcagttggccattgttggttattcatggccatttcttcgagcagatcataggcctcgtttacactttttctcataaatgccccaccagctgcgacatctatgatggttctggtattaccaatcagcccattgtagaaattatgaaccaacatccacttttcgatcccatgatgtggacattttctgatgagatccttgaacctctcccaagcctcatagagagattcattgtccagttgacaaaaattataatttcacctcgcaacttggcagcttttgctggaggaaaaaacttggacaagaactttgtcgccaa

SEQ ID NO: 281835 - DNA, 635 bp, Cannabis indica
aagcccttaggagggttttgcgggttgaggtacaggagagtatcaacaacccggagtaccaggatccgtgggaccttaacttggaccccctgtcggactggttccgtcgcttccttgggcccaccttggctcccttcgccgcggagatgactggcgagtttgcttctcagcttacccggtgcgcgcctaagcggttcgcaacttgcgcctccctgaactctatcttccaggtccaggacctcagccactccctcaccgtggtaagtactttgcaattttgcttttcccttcatttttcttcttgggaattctttcttacacttgtgttattgttcagcttgctgctgaggctggccgcctctccaagaacatcattaatcacggcttcgttctgtctgactttggggacatgaacgacgtcaggaaggtccttcaggaccttactgcggagaggcagctctaccaggaggctgctgagcgccgggaggcggctgccaaggccaatgaggaggaggccaaacggagggaggctcaagcggaggccatgatccgggacgaggcccaacggagggacaggctggaggcccagcatcaggaggagctgagggcacaaagcgaggctgctgataaggcca

SEQ ID NO: 281836 - DNA, 531 bp, Cannabis indica
tttttttaaaaaaaaaaaacacatccagttattgtcttatggtcaaatttttggtggttactttatacaattttttttttgttgttgttgttttcaaattataattttctctctatatttttccctatttatttgttggttttttatataaatactttgcttgttcattatctatggctattactctatcaaagtcttcttctccagttgtaaaaaatcccccaaaaatgcctcagaaaaacttgtgtcgatccttaatgggtaagaggaattttaaggaacacccccaagccttacctcaccagttccaagcaaacgtaaatttcttggtgaaacttcgaagaggaggatgtccaaacgtccttgtcctgtggttgaaattcagactcagattttgagttggacaatgaatttttacatgtgtccaagcttgataaggtattttttagttgtttttgtgttgttttaggggttttcttgtaatttatcttacttactcctatatttctatgggatgtattactttcatat

SEQ ID NO: 281837 - DNA, 642 bp, Cannabis indica
attggtatttttataatgtgcggtgcggtgcggtttgaactgcatattaacaattcaaaaccgcaaaccgcaccgcaccgcgcggtttaggaaaaattcaaaccgcgaccgcaccgcaaagaatttcaaaccgcattttttatacggtgtggtgcggtgagggcggtttgagcggtttggacggtttgatgaacacccctacaatgaatatcatgtatagtcaaattctgaaagaatcgatatagttaaaggaccaaatccaacacctcctctttctacagcatttttaaaaagataaggattatacgaggtactgatgcaacagttgatgataccttatatgtgccctgtttaagacaatatcagagtctgtactgataaaactgaaagaaaattacagttttataaactttgggtacttatgccgctatttaccctaattattttgtttttttattcaaaaattattttttactaagtcttgaggttgtttttgtaatatcccgataagcctaatggtaaataattcgagtttatatttatactatgggttaatcaggtaattagtgggattatgatcttactaatctatttcagtataaaatttaaattttgctataagtgagtaaataatcgtaattt

SEQ ID NO: 281838 - DNA, 552 bp, Cannabis indica
tactaaaatactacttacactatattacttacacaatcagacaatggttgcatcagacgaaaatttcaatcagacgatggttgtagaatggttgctaggtggttggctaaaggttgcatcagacgaaggtttcaattatacgaaagtttctgggtggttgttgggcggttggccgaaggttgcatcagacgaaagtttcagttagatgaaataactgttagtaaaatatttatgcaaccgtaatacaactgtaatgcaactgttgtgaaacattaaatattaaaacaatgtttctatgtacgtaactctatctacatgtctttttatgatttaatatgaacaaattcactattaaaaatttgaaaaacaacaaaaatataccgagataaacattttactatagtattgatgtattttttttggattatcatgagttggattgtttgaaaactcgagttcaacttttgaagatctgcctttcatagatctaaaaattaaagttaggacattagttttatgtaaattacactgaattttcggttgaattttagt

SEQ ID NO: 281839 - DNA, 509 bp, Cannabis indica
aaaatgacatgaattaaaaataagttacttatccgtaacacttggagaaaacatgacgccacttattttacgaggggatgaatgtcttgcagcttatcttttgggctgtggagagaataattgcataactgcactacctctggagcttaataaaaaaaaaataaaaagacagaggtgaaaaggatattgaaagttgcacaaagaaattgagcaacccttagtagataactacattgatcgtgaattctactttgaagaaaatgtttgtgatattgcttctacaccacgtgaaaatggtgttaatctcgattgtgaattttcagatcatcttaacaaaagcacaacaggatcatctccaactccaaaccattcacaggaagaattgatgactgaaaatcacatcaacccatttgactatccgttggagcactcagaccaacaaatcaactcataagtgaagatatatttagtttcacagatgggtcgaatttggcgattggtcaagaatt

SEQ ID NO: 281840 - DNA, 608 bp, Cannabis indica
tttcgccattaccaactttaagtttcaactctctggatttcaaataattccagttttcaagcaattgcaatgatcaactgacatggtttgtagatccagaatcaagaatccaaatggatttatcattctctaaaacacatgattcaaaaactaaagcatcattgcttaatcgtttttggattgttcttattgctggttcaatctgttgtgaaggataatctgaggaagtggaatcactttctctattcttctcaactaagcttgaaatagtaggattgtcggagcaatgaactctctgctcttcagacaaaacaattcccagcttatctgctttctggaatttcatgttcatcatgagcaagtgtgaagtgatactctgaccaggagtcatcttcacactttgaagttcattcttaaaggcatattctagatgaggattagggtgtgggttgtacattttgacactacaaatatcaataaacagatgtaaatcatttggttcaataaattcatacacaaattcagaaaataacaagtaagcatatatgtttgcaaaaataccaaaaactaaacatatttattattctccaaggtttccaacataatga

SEQ ID NO: 281841 - DNA, 504 bp, Cannabis indica
gaccctagaacaagactaggaccgtgaccaggaccctaacccagacctataaccgaacaaagaccacctagcctcatacccaaactgagactggaactcgggctcggacacggtcgtgtacccagactggaactgagacccggacctggacctaaatatgggacccgatcccaaacatagacttggacctagatagggatccagatacgaacttggactcggaccaagtcccagacatgaatcaaaatgctggacctagatttggaccatgatcccgacccagacccaaaacttggaaccgcactcgggaccccaacttggacttggacctgaacctagacccaaataggggtccagacccggaaacaaaccaagacacagtctcggacccgaactcaaatccacaactagaatcagacacaaagctagacccggacccggacccaaacccgaacccagaccaggatcagaactaaggacttagacccagaactgaatccagac

SEQ ID NO: 281842 - DNA, 538 bp, Cannabis indica
ggggccatttcaacaaattttaacccaaaaccactcttcatattcatttcttaaacgagtgtaagagtaaggaaaaacttgtaaaaatttcccctgaaaagaagaatattttcaattagggggccatttcaacaaattttaacccaaaaccattcttcatattcatttcttagtagtacaaattgattgtgactagtggcaaaaaaaattaccgagattggtccgggccacatttcacaaaggggtaccactatcagaaatgtgagattttcactatttcgattaaaacgatcgttagtgcaagaaaactaatttttctctcaacgtgtccaagagaaaagtgatgcacaacgtacgttcgtcggtaagggcccccgtaaggaactttaccaactagggggaattacggtttggagatgtgtaggttgagattttaacagataaataacgagtgtaagagtaaggaaaaaacttgttaaaatttcccctgaaaagaagaatattttcaattgggggccatttcaacaaatttttaacc

SEQ ID NO: 281843 - DNA, 526 bp, Cannabis indica
ctttaggcaaattagactaagagttagattagtagtggtcgtccaagaaacaatcattactcatgtatatttggtataaatttaagtctttgacattaaattttagactccaaatagaaattttttatttctatttcaaaaatacaatacagttcaactttcacaagttattaatatccattttctatcaatagattcaaactgtatgttaaattatggaatatgagcttagtattttgtgaccaaaatgcacttggactattctaagaactctttaatgtcactagagtcaataccatgaccaaaatgcacttggactatcaaaataccacaaccacattttttgatatatctatggcatttgtatcttgttcatagtggttttgacaagatccttctctgcaaagagtcaatgtgcctatatccactgaaagtataatcatctcattcacagatggatgtacattcaggggtggatatgagttttccttatattcttaagacgatcactctagattttacctta

SEQ ID NO: 281844 - DNA, 580 bp, Cannabis indica
aaataaattagttacacatagaattataaatgatactttttttagagtgtgtttgaagcttatgtgaaatttttttgatctcttcactactattttttatctctatttttttgtataaatatatatgtatatagaaaatttatattaaaaaaaatgaaaaatatacgtacatatattttattgttgttaattaaattcaaaatagtatagcaatagagaaaatttagaaattagatttttattatgaatttttatttatttaaaataattaagtttaataaaaaaaaattagaaaaaatgagagatatacgtacaagattaggtatatatattttgttggttttaattaaattcaaaataggatagtaatggagaaaatttgggaattagatttttatcatggatttttatttatttaaaataattaactttaataaaaaaaattagaaaattaaaatgagagatatacatacaagaatataaaataggatagtaatagagaaaatttaggcttttaaattattgggcaccaataatttctcataaacaaaaaattctattatataggcacattttatat

SEQ ID NO: 281845 - DNA, 788 bp, Cannabis indica
tgggacggttatttagacattgggaatgtcgggagtggtcgggaatttagaatttcccaaaaaataccctttagtacctttgtatgttattttagtgtggaggggcaaaatggtcattttgccacattattattttgtccttttgtggacttagtgtgatttgaatatgtgactatgtggcatttgttttggctgaaataataaggaattaagtttatttcatttttattcaaagtttcaaaagtgagaaaaaaatcaaagttaaaggaaaaatcattttctttcaaactctctctctattttcggcctccttgagcagcaaggattcttggcttctctcttaattttcaagataattttagcaagagttggtgatcacaagttgttggtatgatttctatagctctcttttaagtttcttggaatttttggaagaaaatgatgatttgcatgcttgatttggttgtgttgctgctgttagtttttgatgatgttcaaaaaagtttattcatgattatttgagtaaataagagctacttgtgatgcatgttagtggtgttgtttaaagtttgggaatttttggttcaaaagctatggttttcaaagtgaaaatgtgaaattggttgctgtgtttgttgtttaagtttgagaattgatttctgcagttattatatgcatatttaggtagctttgagctggtttggatgcatgttattagatttaaccaagtttgagttttgaactcaaagcttggagctttaatcgtgattttttgattttgtgcatga

SEQ ID NO: 281846 - DNA, 701 bp, Cannabis indica
taactcgtctttttgctataaactggcgggtaggattgtgactttttacttatctgtcatttgtgcttgtagatatgactttcttgaagtctgcccctgtcctgaagatcaaacaaaagggtggaacagcgacgacttcgccggtcgttgcccagaagaggaagagcgatgtgatggcttcacttgtcgcagactcttccaagaagttggccaagaccactcaggataaggggaagaaagtcgtcatcgaccctccagttcgcgctcgcgacttcctggcaatgcaggaaaagttcctggctgagatcccttacgaggatctcgttgctcgatccactgaactggccgcgcagtccatggctctgttcataaaagccgcggctactccttcgaaggaagccgactcgctgaagaggcagaacgcccattttcaagaaaatataaagaagctgaagcaggatgtggcgaggatggagaaagagcttgaggagctgaacaaggccaaggagaaggagctcgaggaactcagcagggcgaaagaacaggcggagctcgaggtcaagaagtcgcagacaacgatcgttgagatggctcgcgacttggaggctgagaaagagaatgggaagaaacagtacgttcaggctgtgtctgattatatctataccactctttccaaaagtccccgacttcgacttctcgct

SEQ ID NO: 281847 - DNA, 520 bp, Cannabis indica
acttcgcctccagcacctcttttcttcttgaagacccacttacatccaattggacgataatgatcaggtgcttctacatattcccagactttgttcttttccatggaatctatttctaaatccatgccggctaaccattgcttatgttctggacttttcattgcctgtttataggttaatggatcgtcatcaataccgtcaccaaagaccttattgatttcaccatccaagccataatgagatggttttgtggaaatcctcccactacgacgaggagccgtgatcttctgaacaggaacattggtggcagaattctcgattgtatcaacttgcaaaggttcaaccgaggaagtgggattatcctctacttgagtagaagatgatagaacattagaaggagtaatatctgaaagtatttcctccaatactactttgtttgcggcttgaaattcttaatatagtcatcttcaaggaaagtggcgtttgtagaaatgaacactttatcatccttgcgactata

SEQ ID NO: 281848 - DNA, 493 bp, Cannabis indica
cccttcagcatagacttcttcatcatcaccttgagtttatgataactgacatgtcctagccttgcatgccacaaatctgttgtttcattcttccgagtcttgtctacataagcagactctgctgacattacatagacagactctaagcggcgtcctttcatcatcggtgttccagagatttcaagatctttgtagatcttgacatcttgagggccgaatacgacatggtggcctgtcgccgtaagttgcgccactgatagaagtttttcttcatcccaggtacatggtagacatcctggagtgaaacttcttttgggctgaatctcgggatgattttgttttaccgatgtgcgcgatcggtaatcttggttgttggctgtcaccacaacgcgaccacctttatattctgtcatatcttgcagcttctcttcatctcctgtcatatgatttgagcagccagagtcgactatccaatcattattgtagtcgatct

SEQ ID NO: 281849 - DNA, 703 bp, Cannabis indica
tcaactcatgagttaggtcatgctacagtggtttttgctttaaagatatggcgacatcatctttacggtaaaaagtgtgaagtttatactgatcataagagtctcaagtactttttcatctagaaagatttgaacatgaggcagagaagatggctgtaattgggtaaggactacgattgtgagattttatatcaccccaggaaggccaatgttgtggctgatgctttaagtagaaaagggtttcgggcaagttgtactactgttttgttagccccttaactagcctttgaaatgattaacgcagagattgaattcgtagttggaaagttacatagtttaacacttcaatctgatcgattagaaagaattagaaaagcgcaattggaatatcctgaattagttgaggtttgaggcaatgtaatagccgatcggcctaaagactttttggcctcgaacagtggaatgttgttatttaaagtttgagtttgtgcttctaatgttgaagaggtcaagaaggaggtacttgatgaagttcataccacaccttattcattgcatccaggaaccaccaaaatgtatcaggatttaaaatcctatttttggtggtatgagatgaaaagaaaagtggtggattatgtgttcaagtgtttaacctgccagcaactaaagctgaacacctgaggccggaatgggttactgtaat

SEQ ID NO: 281850 - DNA, 548 bp, Cannabis indica
gcttccaccaagggaatattgatatggagctacttcaacacatctaaaaacttcttgaattgcccatcttgctgctgttttcgaaatctttggggaaatggaaggggtggtttaggactagaacatactagtgcaaattgctgactgtcaggttgctgaccctttgctgtatcaactgggctagtttcagcaatttcttgggcagttttgttactcaatttttcgtcgatttggattgaagtgggctccccactaccctttatttcctccttagaatttttcagatgcttgccactccttagttgaatggatttacattgttccttcccatccttccttggattttccgtgccactaggcaaagaaccttgcggcctagcttttaatttattggccaaatgtccaagttgcaactcaaggtttcgaagagaggcagcttgactttgtatcaccacatcatttttggccatataatcccgcattagactctccaaagaactcgattgggaattttgagcatgttgtaatgtcgcggttgttgtgaaaaa

SEQ ID NO: 281851 - DNA, 733 bp, Cannabis indica
gaaggttgcctcccccaccttgagtctgagtaggcgacatggcacgaaaggcctcagccatctcagcagcttcagctccaagaagagagaagtcgaagtcggggactttggaaagagtggtgtagatataatcagacacagcctgatcgtactgcttcttcccattctctttctcagcctccaaatcgcgagccatctcagcgatcgttgtctgcgacttcttgacctcgagctccgcctgttctttcgccctgctgagttcctcgagctccttctccttggccttgttgagttcctcaagctctttctccatcctcgccacatcctgcttcagcttttttatattctcctgaaaatgagcgttctgcctcttcagcgagtcggcttccttcgaaggagtagccgcagcttttatgaacaaagccatggactgcgcggccagttcagtggatcgagtaacgagatcctcgtaagggatctcagccaggaacttttcctgcatggccaggaagtcgcgagcgcgaacaggagggtcaatgacgactttcttccccttgtcctgagtggtcttggccagcttcttggaagagtctgcgacaagcgaagccatcacatcgctcttcctcttctgggcaacgaccggcgaagtcgtcgctgttccaccctttggtttgatcttcaggacaggggcagacttcagaaaagtcatatctgcgaacataaatgaaagata

SEQ ID NO: 281852 - DNA, 523 bp, Cannabis indica
aaacgtttccaccgcctttatggcagcttgatctgatccgttgattttcgggaattcgaatcgtgcatctcccccaccgtacgattggtaggtggtgacgcctgttcctcatgcacttttgcctataaaagccaccatctttccttcattttggttactttccattccttgccatttttgctcgaatttcccagagagaaaattcttcaaaacagcacgaactgtcttagcacttagacatttcttccagttttccagtgtttgctttcaccagttcttctcaacttttactcgaccacattcaggacccccagttcaacgatttactgtaagtttcttgcatccttagataataacatgcttttacttgcttcgttcgtttttctgggttcgtactctgagatttctgggtatgcgagtgttgaagttcttcaagtgttctgttttatgtctactgctttagttgtaggatcgccgttatcatgcctctgttataatgtgcatttttgttgaagagagtcat

SEQ ID NO: 281853 - DNA, 959 bp, Cannabis indica
taagatttataggcttgggttgggctcatatgtatgggcttaattaaataaacataaaaattgaaatttcaaaacatgcggtgcggtgcggtttgaatcgcggtttaataattcaaaaccgcaaaccaaaccgcaccgcgcagtttgggaaaaattcaaatcgcaaccgcaccgcgaagaatttcaaaccccattattttgcggtgtggtgcggtgcgggcggtttgagtggtttgagcagtttgacgtacacccctacccggtcctagttctgtttcaaaggtccctatcctgattctgggtccaggtcccagttattgtgtgggtttgggtcccggtccaggtttgggttcgagtcctagtctcagttcgggtttaggtctccgtctgggttttgatctgtgttcgggtttgggtttgggtttaggtccttgtcctggtcctagtccttgtttggttctagttccatttacgattctgagttcaagtatgggtttgagttcgggtcggagttcgagtccaagtcttagttagggttcaccggatttaaatctaggtccagatcaggctttgggtgtgggtacgcgtcgtgggtcttggtctaggttgggtcggagtcccaagttccaatcccaatctgagtctggattcagttctgggtctaagtccttgtttcccatcctggtctgggttcgagttagggtccgggttcgggtctagctttgggtctgattctaggtgtgggtttgagtttggatccgagtgtccgggtttgcgtctaggtctggtccccgatctgggtctaggtttgggtccaggtccaagttcgggtcccgagtgcaggtaaaatttaaggtctaggtcaagatctcggtctagatctggtccagcattttgatcccagtgtgggtcttgatcctagtccagggtcgtatccggatccctatctgggtccaagt

SEQ ID NO: 281854 - DNA, 691 bp, Cannabis indica
gagataaccaattccccgctaggcattagggttccaaatcctcttacaagaaaatcataaagtctatccaaaagaataaattctcttgataccacatacgagtatatagtcccaaagtcaaataatacattaaaatggaagttgttgataagaagctaacctttcaccatagaaggactggatgcaacatcagcctgagtgataacaaatgtctgagcaagtacaggctttacttccagcttctgcttatctttctttgcctgagggcaatttcttttaaagtgcccaaccatgccacacaggaagcatgcttttcggttgcactctccgggatgatgtttcttgcatcacgggcactcagggtaagaataatccttgcgtacacccttgccttgatttcctcggaaccgcttgttccgttttaaacccaccactgacgacgtaggtttactcttctgctcaaccatggagcccctaccacctctgccataactagaaatatggcaagcggtatcccgatttcgtggcataatctcttgaggtcctaaaatacattctttagggctcccagtccaaagagcattcttcatatctgaatctccgtgaaggactgtaggtttatttatccaaattttctcatgcaatgatcctacttggttatcagccatactatgctctgctggtaataccg

SEQ ID NO: 281855 - DNA, 547 bp, Cannabis indica
atgatggaaatgaaatcgtcatacccaaaccatgagtcaatgaccactgttgaaatggaaagagcaaatttcaactcaaaggctcttcatgccttgttcaacgctgtctccactaaccagttgaaggttatagccaattgtgaaattgctaaggaagcttgggagaagctaaagattaagaacgagggaactgatgctgtcaagaaatcaaggctgcgtgccttggcaaaggctttcgaaaatctcaccatggaggaggatgagtctgtggctgaattccatgcaaaactttgtgacatctctaatgaatcatatgctctggggaaaacttactctaactcgaaactggttcgaaaggtgcttggtgtcctccccagaagattcatgtccaaagttacctctatcgaagaaatgagaaacattgaggaactcgatcttgacgaactcatcgggtcattacaaaactatgagctatcactgtctaggtggaagaaaaccaagaaacaaaaggagatggtgaaagaaaaatcagaggttggcgttgcac

SEQ ID NO: 281856 - DNA, 601 bp, Cannabis indica
cggacctctatcgtccctatatcgagcaaccgttgggcttaaatgaaaaggaagaaaaaaaaaccataaaccataaaatcgcaaaaaaaataagagaataacagttcatagaaaaatcagtaaaaaacaccagtaacccacaaatcaaatatctaaacaacattctaaaacaaatataataaacctaaaaaaaaaaaaacaccaattactcattgattcctattgatgctttcggtggttcccctcaacttactgtgtacctcgttccacctccaatatgtgcttggtgcaacaataatcttcacttttaagcaagattttagtgatatttagtaaaaagaatgaatgagagggttgggggaggagatggtgagaaaatagagagaagagaaaagaattgatattaattgtaaaaactagcctacatgtatgacattgtacatgggtttaattatcaattttaccctataatgatagaaaaattaaatttctcttatatttaaaagttttttgttcaattttaaatttaggtggcgcttaattggaggtaatgagatggaattgagagaaaataatttttattctattgttttgtttggtt

SEQ ID NO: 281857 - DNA, 617 bp, Cannabis indica
aaaatccgattttctctctccacggttgacggctgcacttgattatttttgatttcccatattcgcttttaaggagggaaactgaggcgtctgaggttcctttgagataattacctcttttcgtgactttcctataaatatcaaacaacattggcacgtaaactcattttcatcacccttctttgctaagtaagcttcagagcaaaaagagagattcttggcttcaaagttgccgaagtgagttcatacaaactgcttgttggattaacgttgctcgaacccagacctctgactctcgagtaagtttctaatttcttttatgcttatctttgcatgtttatatgtcaaatgcaccttctactttgctgtagaaaatgtttaggaaaccctaggtccagaaacctctgcgattcttctttatcatgtcttcgttcaattttacagtcataatgcttatttctaaactgcatatcgtctgtctttcatcttgcttattctaagcttcatgaactttttggccctaactcgagaaaatttttgacttcttgagttctgacttttcttcaaacataatcgttctttaatctgttgagtactcctggtcaacatatttgctt

SEQ ID NO: 281858 - DNA, 486 bp, Cannabis indica
tgtcgcacatatatcgcatacaaatcgcaaatattatcaaagttgaaataataacttgcttagctcgctaaaaatgtcgcacatacatcgcttagaaatcgtaaaaagtagacagttagtatattaggcatgttaccagtgaaatcgccaaattcttcttcactttagtcacaaatagtggcaacaagttgtccacactcatttttgccttcatgctcaagaacactcgtagttgactatctttcactaaaacctcaggtggaaacttagtgcctttcatgtacatgtaaagaacttctaacttcaattcatacaccaaggggtccacctccaactcctcatgcaaaacttcacgcaactttttcagtgtacagtcaatgtccaatatcaatgtcttactttttgaggaatcaaatacccagttgaaaccctccaaagtccaaacgccatcatacagtacaggcacaaatacagatgaatctgtcc

SEQ ID NO: 281859 - DNA, 737 bp, Cannabis indica
cttttactctcacctaccgggacactgtaccagtttattggaaacctttagaaattattttagatatgtttgttttgtattttcacatgtttttcttacttgctgaatgcttaataatttttgaattgtgtatgaatttatattgaaccatgttgttttctgttattaatgttgtagtataatttcgaatcttcattgttggtctaacttaacttgttgttttaatgggaccaatcccaaaggattgtcatccattagacaaacataatagtgttagatctcaacatataagtcttttgtaaatgtaacatctagttgtacatccaaagatgacaacttagacttgtatttataatatgaaacaatgaagaagttgataaaataagaatgactttgactctcgcctaccgggacatcattggattcttattttaatcaaaattatcctttatttttcctcttagctatttcatttaaaatttgcttaaatagtatatcattggatgaatggtttataaatcatctgcttacaatgtcattctactttcttctatgaaattgaatggcacagatgactatattctcgacatttgatcccaaatgatataaatcctagatcttacaaatctcctacttgtacatgcttactttaggcaaattagacttagagttagattagtagtggtagtccaagagagaataattactcatgtatattttgttggatatattttacc

SEQ ID NO: 281860 - DNA, 945 bp, Cannabis indica
aaactatatgataaaagataagtagtattaactacggggtccccctgttttcaaaatatttacaaactggtttaatagtgttttttacaacataaactttttcttcccaaaatacattcaaaatagagcatcctgctcactgggccgtgccactgcggctgatatgtacattgctgctacgacctcgaactcatggctgctcaacctttgccttccctttacctgcaccataaaacacccgtgagtcacagagactcagcaagaaaagtgaataaaacaataaccggtaataatcatcaattcaatctcatatcaacatgtatacacatttacacaatatcataaacacacaatcctggtactttataaagtacccctttaccactcgttaaccacgagctgaatatgtcactatcgtttcccgatgaagccaatgataagtaagaaacctatttgtggtttcaggggtaattactcataacggtaataaccgcctccaacctatcgtgccctgctgttgcatctacgagctgatcgatccttggaagtggaaagcagtctttagggcatgcttcgttgaggtctgtgaaatcaatacaaactcgccatttcttgttcggcttgggtactagtacgggattcgcaacccaagccgggtagaaggcttcaattatgaaattgttgtttcacagcttttcaacttcatccttcaaggctactgctcgtgctttgtctaatagccttcgtttttgttgaactggctgaaagttgggatcgatattcagaacatgtgaaatgatagaaggatcgattccgaccatatccgcatgtgaccaggcaaaaacgtctaggtttgctctcagaaattttatcaattctaattttacttcgagcaacaaaccttttccaattttttagttttctggtcgggatatctagatcgat

SEQ ID NO: 281861 - DNA, 545 bp, Cannabis indica
tgttttacagttttcgtccccctttcctagtgaacattcctcactatttatagggcaagaaacttgaggaggaggagtttcctctctcgttacaaagcgcataaacataaagatggtgtgatcattgctgaatgctaggatcgtgggattgaggctgtatacaccgatagtggaatcgtgtgtatgccacatccacgcaagttgatccctgagttatagggattgagctggtgactcacgaagtgcttggttgaattcgctaagtgttgctcattctgcacggttcgttaagtattccatcatggatatgccagcgaggcatcctgcccggcatgctcatctgaccaggtgctctaagttgatgccacttgtcaccattcttgtcattccacgtcagagtgccaattttgggataacaaagttcaaatatattaaaaataatattttattttaatttagggtttgaaaatagaaaaaatctaaaattggaaaaaaaatccctaaaaaattgggtttttggggaaggcagcagctaggctgcacgt

SEQ ID NO: 281862 - DNA, 724 bp, Cannabis indica
gctaagtaagttcagaacgaaaagagaggttttgggcttcaagttttctaaagtgatttcatcaaaatggctggtttggcttgacgtaaccttaacccagatgtttgattccttgagtaagttctcgatttcctttatgtttactttgcacatttgctttctggatatactttcgattttgttgtagaagatatgtaggaaaccctaagtttagaaactcagggattttcctttgtaacgattcatgcgatttcatcgtccgtaatgcttgctttttgaactgcataatgcatgtctttcatcttgcttattctaaccttcatgaaattttttgccctaactcgcgaaaatttcaaacttcttgagttttgacttttcgttgaatattcttattctttaatctgttgagtactcctagtcggcatatttgcccgttttaacgttcgatatcccgaccaaacactcatcttgtgcattgtcttttgtggatgaacctaggtgagttttggggaagcgaacaccaaatcgaccaggatctgcttcaactcttgcacgaggatcatccttgtcttctttctagttcaacttcttcgagtgacaggcatttttccttaagtcttttgtccagccataggatgatggctcgtacaaaaaagacaatggatggggtcgacgcatccgaccatcaagtggcccggcacgccaccttacccagcgccgaaca

SEQ ID NO: 281863 - DNA, 761 bp, Cannabis indica
attcctctaagagagaagttgtttcccaagttgaagtgggggagcccactaattcatgtgtttgaagaatcagggtacttgttcagttttggtgtgtgaatccagagggaaacactacaacagattggttgttcagggtgaagacttgcatgattgctgcaagctgcagatagacaatatgcaagggcgtagactgagatcaagactgagctagtttgcggcatgttatgggcatgttttgtgtttatgggaacactggtgttgtatgggacactgtaagccgaatggttcagagaacatatgccgatgggagatagcggattgggatgacttcaagtcttaagagtaagactgggtgtcatcaagtttatcgaaagttagcgagtcatcagaggatgcagggttgattttgggagataaacttgtgacacaattttgggagccgacacaagcaggagctcagaggagcgagtgtgcagtgggtcagtgggacctttgcatgaagccgtgggtatgcggttgggccggagggccaatgttgtcaacttcgcgaagaaattgggtgcaagagtgcacttggtgctgcattgggtgcagttggcttgcgagcctcgtccaggtgggacgcaccaaactttatcctgcgatgagagtgtcttgctcgattgccatcaggaggatggtgcgccatagagttggcgtgtgtagtttccgaagggacttgtccagagggacttggcttcagtggaagcgtgttttgt

SEQ ID NO: 281864 - DNA, 508 bp, Cannabis indica
tcgcacactggtatttcttcgacgtcctccattggttccacgaccctttcggatcctatgcgaggatccaactcatcctcttcagccttctctatttcaggggattcccggaccatgagtactggtaagtgggtggcaacattgtaacattgcctggcctctccctgatttcccctcacagttccgactccggcttcctgggtagggaatttcaggcacaggtgtcggattgaagtaatcgcaccaaagtccactagggccggtcggcctaggatcgcgttgtaggctgttggacagtctaccaccacgaaggtgcaatacttaaatgtgctctggggggtatccgggcacagggtaaccgggagccttacttttcccatcgggattagcgtcgtcccgttaaaccccgtgagctgtgacccactaggcgagaggtcccggtcggtcaaccctatcgcagtgaaggcttctttgaagagcaagttcacggaactcccattgtcaatca

SEQ ID NO: 281865 - DNA, 607 bp, Cannabis indica
aggcgggccgtggcatgctaataccatgccgcggcccgtgttgatctctgcacccaacttccacttgtttctatctttatccgaatttgattctgatattttccaccaggatattttcattcgatattttatcctttttcttctgatattttctaactcttcatctattttaaatctgcaaaactaaaagataaaagcgtaaaaatgctccaaccataatttaaattaaaccgaaaaatgtgctaaaattaacctaaattaaatactaaaaatatcctaacaaaattcccccaaactaagcttttactcgtcctcgagtaaaacactcactaaacaagtcaatctccaaaacatgagaaatttcaagtagtctcaataacatgattatgaaaaaattcacttatgcatataatccagaatttcagttcaattacacccttgacagatttcaatttattttcatttagctcatgaaaccatagaatgcaattaactaacaattaaaccactttatgcatgccaattacaatcatcaatccactaacccaaaattccatatgcttgcaatacttactattctccactaatatagattaatgcacaacca

SEQ ID NO: 281866 - DNA, 859 bp, Cannabis indica
ccaagcatgaagaatgacatcgctgagtttgttgctaagtgtcttacctgtcagcaagtgaaggctgaacatcagaggcctgcagggttgctgcagccattgaatatcccagagtggaaatgggaagacattgctatggactttgtggtaggcttgccgagaaccacgggacagttcgactctgtatgggtcatagtggacaggtttacaaagtcagcgcactttttgcctgttcgaacgaacttctccattgatcagtatgctgagttatatgttagagaaattgttcgtcttcatggtgtcccaaagtccattgtttcggatagagatccgaaattcacatcaagattttgggagagtctacatcgagctatgggaactcagttaaagtttagcacagcatttcatcctcagacggatggacaatccgagaggactattcagatcttagaagacatgctacgggcatgtgtgcttgactttgaaggatcatgggtaaagtaccttcccctgatcgagttctcgtacaacaacagctatcaggcaacaatcaggatggccccttatgagcttttatatggaagaaaatgtagatcacctattcactgggatgaggtaggtgaaagaaagttcttgggtcccgaggctgttcagagaacaagtgaggcagttgataaaattagagcgcgaatgctcgcggctcagagcagacagaagagttatgctgatccaaagcgacgggatattgattttcagatcggggacatggtatttctccgaatatcgccgatgaaaggcatcaagcgctttggtaagaaaggaaaacttagccccaggttcattggaccttttgaaatcc

SEQ ID NO: 281867 - DNA, 968 bp, Cannabis indica
tcttaccagcccaaggactcttcctgttcttcatcaaccaagcatcagtcgaagggttttcaacttcactcacgtcaacaccagcctcttcttcatcctcattctcagtagattccttcttcttctccagctttctcttcttctgctcgtgttgcggaatgttgtatacagaaatggcgtcgttcttctgaagggcatcaaaatctccaacgtaattgtacccagcagcagcagatgggtcggcggcgtagccatacttgtggaaagtattgtattgttcgtcgaacacaaagggctcaatagaagcgtcctcgacaaagccaagcttgtgatttctcataccttgagcgataccgtccttggcgtaagggtgagatgggccataaatgggagcccagagctgatcgtaagtgggattgaaggcgacagcgtgctgagtgggatcgataggtttggagagagccttgtggccattggtgccactgacagtgagagcaagcatggtgtcgtcgaccttgggggcgcggacttggaggtgagtaggcgaggtggggaagcgtcaggggacgatggattggaggtagtagggtttgggtttgggggctccggatcggtccattttcgtcgtcgttttggtcctggtagtttcgaaggagatccatggtgaagatgaatctgggatgaatgagaagggagagaagtaattaactaattatataagttagggtttctgggttcaaatttcaggcaactgatatttacacccaacaaatatacatctcttttttttcttttctaaaaaatcacttaatcacttatactaaactagagagatttgtattttattttgtgataattatttaaataaaaattaaaaaatatatattaaaaatataatgaaaataatgtttcttttgttttttagtctaaataaaaggtaaaacaaaatactattatttttttttttt

SEQ ID NO: 281868 - DNA, 523 bp, Cannabis indica
tcgatgcatctaacaccattcgagaagctgcattcaagccattataaaaagtctccatctgaatacaatgtggaatgccatgatgtggacactttcgcaaaagttccttaaacctctcccacgcatcacttgtggactcatcttcaagttgctgaaaagacatgatctcacttctgaattttgcatttctagtaggaggaaagtatttcctcagaaacttctcagcaaggtcattccaattggtcacagaatcaggcggcaaagtgttgagccatgatctagctcggtctcgtagtgagaatgggaatagcttcaaccttaacacctcttcactcactccttggatcttgaaagaatcactcacctccaagaatgaacggagatggaggtgaggatcttcagttggcatcccgctgaattgccccacggtttggagcatttgaaacatcactggcttgagctcaaactgcggtgcttgtatttcaggcctcacaatgcctggattgagctcattaaacatggg

SEQ ID NO: 281869 - DNA, 576 bp, Cannabis indica
ccttggcggacttcatcaccgaatgtaatgaagccgaggcaaccgcgaatgcgccgataccatcggtccccacatggaaagtatttatggacggagcctccaatgaaaacggatccggagcgggggttgctatgatatccccgaccggacttcgactccaggcagccctacggtttgacttctcagcttcaaacaacgaggccgaatatgaagccttgatagcaggattgagattagcaaaggtcgtgggggccaaaagagtagaagtctacagcgactcccaactggtggtaaaccagatatcgggagagtatcaaacacgcggcgagcgaatggccgcatatgtaacaatagtccgggaactgctccacgagttcacggactacaaagtagaaagaatcccccgggaaaagaacgctcacgcggactgtctggctaagttagcttcagacagtgaaatcgaaggactgggggtagtacccgtggaacgcttggcagagccaagcatcaaaataaaagaggccataataacggttgggcaagaacccaactggatggtccccatcataaaataca

SEQ ID NO: 281870 - DNA, 475 bp, Cannabis indica
tagattccgtatttatgattagcgctcccactcaattgaactaccatgttcttaacctatacgtcacgtgaagaaccatttggtcgactttaactgatagattaaagaatacaaataatgcaactgaactagaacctaaccatctcaggattgagatcatttgatctaggatcaactaggtgatattgaaatgaatagatactacggtaaatttatcatatctaatccaagttcaatatcgatcctttccgatgcatactctatacatccaacccaagcttattttaaccaattccctggaaaggacataacacttattcaaggtacaagtaaactacgttgtagattatcatatcagttaaaccctgtgtactgataaatcataggaacacatttaatcacacaatcttgattatttttcactgtgttcacaacacaataaacaagaatatcagtgtgataaggatttggatga

SEQ ID NO: 281871 - DNA, 514 bp, Cannabis indica
aaaaatgtgaaaaataactctaatttctagagttatcagtaaccgagctatatgaagctcaatccatctctttgcaaagtttaatcgagcaataataaaagtttttcctctgcttttgctctgttctctcctttctcatatggtatcagaagtaattccgcccacagcttcaatggcgcacccttcaactcgatcgcagaatggtgatcctccatcatcgatcgacaatccagctacagagatcaattccgatcccactccagcttccaatccttcagcgattcctccccgtaatccacaaattagggtttcaactcagaacacagatcccctttctcaagatcctctcgccattgttgatgacaactcgaaccaggcactcacctctcgatccgtggctgacgatcattccaaccccttcttcctcagcaccggtgatcatcccggtcttgtgcttgtctccaccgtcctcaacgcaccattaccagccatggaagcgaggcatcaccatggc

SEQ ID NO: 281872 - DNA, 501 bp, Cannabis indica
atcatagagtaggcttcactcttctctcctactggctaggctactggtcttctctcacggagctcggaacgaagcctcagacattgccaattgccactgctgcctgagattttatttattgtcaaaaacgacaatattgcgaatgagtcttctatgcaaccttaaaggccaatcaaaaaaaaaagaagtgaaagtttgggttagatttaaaaataatgataacagttaagaaaattaattaatagtgatacgatcgcataccatattcttcaacaaaaaaataagtccatagagattagagatctcttctagttctactcctccaaagtcgttggacactgtcgtttaagagtaaacgacatgtcactaggtgaaaacaaaagggaaaatttgaaattgcatgcttataatattttaaaaaaaaaattactaaattcataattagtaaaattggtcaaatacgaccacattattattttcccacaaatactcctcccattt

SEQ ID NO: 281873 - DNA, 641 bp, Cannabis indica
attggcaagagtagtccttaatcaatggagaaatgctcaacaaaggagaatggggtctttacttgttcctacgggttcaagagaggacttagagcattgggtgaaaccagttatgggaaagattaaggttaatgtcgatggtgcaatctttgcaagtgatggtcgatttggagcggcaggggtggcccgggattctcagggtcgattcattgaaggcttcacagttttacgagtggggtgtgtggattcggctatggctgaattggtaggggttaaggaggccttgagttggataaagaggaaacattggggaccggttgagcttgaaaccgattctttggttgttgtccaggcagtccaaagcacggtggagataccttctccttttggccttcaggtggcggtttgtcgttctcttttggccgatttgccgttagtctcaattaattttgttaaacgttctgtaaacaaagctgcacattgtcttgctcgtagctcttgtttgtatccagatcgtatttttagtgaggatgatgttcctcctgattttctttctattgtaatggttgaatcttcttattaataaagttaccattttccttcaaaaaaagatataaattttaaataaattattaaaataa

SEQ ID NO: 281874 - DNA, 543 bp, Cannabis indica
aaacggttcttcaccttctggttggaagattaccatcttcctcttacagtcaatactggctgaatatttggatagaaaatccattcccagtatgatatcaaaatctgctaagctcacttctattaggtcagcacttaactccctatcgtcaatcctgatcggcatagacctaatccaccttttagagataactaactctatgccaggtaatagggttccaaaccctgattcgtaactatcgcgtggtctatccaatttactaaagattgtggctgccacataagaatgtgtggccccacagtcaaacaatacagagaagtaaaagttgttgaccgagagctaacctgtcaccaccgaaggactggcttctgcatcagcctgagtaatggtgaatacccttgctggagtgggtttcgctggagcctttggtgcctcggttctgagttgagggcaatccctcttgtaatgccctggcatgccacactgaaagaacccttgtcctctacactcccccagatggtgccttttacaactggggcactc

SEQ ID NO: 281875 - DNA, 564 bp, Cannabis indica
aaataaaaaaaaaaactattgtttatttcttttcttttggctctaggtactgtaatgaaattccgaaagctaacttgtcatttgaatttcaaaatatttttgtttagcctatctatgggtcaataattatttgcattgttcgtcctaaaaatctttatccatttgagcgtcaattaataaatctttccaactccaagagtgacaacccttcctcttttcaaatatttcaatacccgtgaggatttggagttaagactttttactttaaagatttttcaatattttctgtgttatgaattgaagcaaagaatatgatttgaagcacgcacacaaaaaaatctggaattatatctactataaatttttagatagtattttctagagtatccactaatactttattttatttcgattagatagagtttcttttgatctgttcatcttggtaatattttgttatccgcttgaattgctagggactagcaataagctagttgggggttgtgttaaatgccaaaatattacatattttatagtataaaaatataaaataaaattaattct

SEQ ID NO: 281876 - DNA, 728 bp, Cannabis indica
gggcctttttcttttttagtgtgttggcgcactcagcctgaatgtgaccatatccatcacattctctgcacttaattcctcgacccttttgatcagtagaggcttgtcctggtttgaaatttactcctttgtttctcttgagaagattttctttgtcagctggtgaattttttctgtagttctttttcaagaattttgcatagtttctcgttaacaaggcaaccgtttcatctgtaatgccattcaaatcttccagaacaggtttcttgttttcttggtgaataagtgcaatgctggcatctgacttttctttcaccacctccttttgtttcttggttttcttccacctggacagtgatagctcatagttttgcaaagacccgatgagttcgtcaagatcgagttcctcaatgtttctcatttcttcgattgaggtaactttggacatgaatcttctggggaggacaccaagcacctttcgaaccaattttgaattagagtaagttttccccagagcatacgattcattcgaaatgtcacacagttttgcatggaattcagctacggactcatcctcctccatggtaagattttcgaaggcctttgccaaggcacgcagtcttgatttcttgacagcatcagttccctcgttcttaattttcagcttctcccatgcttccttagcaatttcacaattggctataaccttcaactgattagtggagaca

SEQ ID NO: 281877 - DNA, 447 bp, Cannabis indica
ttaaacaacatacttgtgagtagatctaagatcctggtaaaataaattccaacacctgcctcctatgagaaaccgctgaagcaagctcctcactgacatagtccacgccctcaaccaggacgtctccgtcagcatcgactggctgcccagcctcgttgtactccccgaagtttgggggttcaacctcttcctctccctccacctcggaaggactgcccggacgcgcatcgtccagctcctcaacctcttggacctcagagtccccctcgcgatcctcctccatcgggacggccgaatcctgttcggcgctgggcagagtggcaagtcgagccacttgaggattagtagcgtcgatcagacgtgtggttttctttgtaccagccatcatcctatggctgggtactgttggaattatttttaccaagatcttagatctactcacaagta

SEQ ID NO: 281878 - DNA, 575 bp, Cannabis indica
tggtcaaatagatccgcgatcaatggaatggggtatttgttgcgcacagtcaccttattgagggcgcggtagtctatgcacagtctcaaggtcccatccttcttcttttggaacaacacaagggcaccaaaaggtgcctttgagggtttgatgaattctgcctccaacatcttcgttagctgactcttcaactccttaagtgctaggggagacattcgatatgctgctttagctggggcctttgcacccggcaccagctctatttggtgatcaactcccctcctgggaggcagtctctttggaagctcgtccggcatcacatctttgaattcatctaagaccttctcgattataggtggagtagactcctccaatttttcatcgtacacggcgggagcgatgacaaatgtttgcctcttcttcttcaggcccctctttagctgcagggctgatagtagcttgacttctgggggctgtctcactttagcgggtaccattgaaggattctcacccatgatcaggagattccctgttgctggaattggaatggcccccttctctgctagaaactccat

SEQ ID NO: 281879 - DNA, 698 bp, Cannabis indica
gcccccacacaactcgtctggggacaggggcttagtagtgtgtcagagacgcccgaccacctctaccgagagagaataggtggtgaagcatacaacaggcatatttgggagcttgaaaaagggatacgatcttatctgccccgagagtggacatacactcttccctttggtgaggtcaatattccagtaggggtgcccatcggcccgtcaggggggcttcccttggccgagactgctataaccaccgcaaaactacctaccatgttgaacgctatggctcgcactaaaaagaagagtcgggttagctcttctgacagttcccatatggcggaggtcattactaaacggagggtatctgacgatgttgagactgattctgacgatggagccatggaggagatagtcaaagagtttgagaagtgggtggaagaggaagccaagaataccctttacaaagccgccaaagagaaagaaccaaccaagggttcccaaccagccactctcaaaatcagtgatttcgcccctaaagtgattaaggaagttcgcacttcccgctgcaaaaccaagcagaccccctttgtggccccttctagcagtctcaccgagacccaactccaatatgtggaggagttgactgtgaatggcaaggattgccagttagtactcccctccccgaatcagttggcgcatgatcctag

SEQ ID NO: 281880 - DNA, 718 bp, Cannabis indica
catatatatcacatggcttatggaaactttcaataactctacacgacacataggagtgagtagctcctgaatcaaataacacagtataataacaaccattaatagacaactgacctgtcactactgacggactagcatcagcgtcagcctgagtcatggcaaaaagtcgccccgggttctgtgtagtattcttctttggctcctctttcttggcttgaggacaatctctgataaagtggcccaccatgccacacaagaaacatgtcttggcccgacactcacccggatggtgtttcttgcatttaggacactcaggataagatcggaatgagaacccgcggccctgacggccacctctatttccccgaaactttctattattccctgatactccagaagcctcaacctttcgtttgtgatcagggttgccaccatccgtccccttactaacattaccactagcaggaggattcgatgccatcacggcatcctttgcaatctgctctttcgcaacatggttatgttcgatctcaagagtattatacatgttctttgatttgttagtcaagcctactttttggtcagggtcatacgtacattttgggaactgattattttagttcatttaaatatcatttataggtggctaagtgttttaaggataaaatacattgaagggtgtaacggtaaattaatccctatacaatgtaaatcatct

SEQ ID NO: 281881 - DNA, 539 bp, Cannabis indica
cccgaacccaaactcagaccaggactcgaactccgaccctaactcaaacccaaactcgaactcataatcgcaaatggaaatagaactgaactaggactaggaccaggaccaggacctaaacccaaacccgaacccagatcaaaaaccaaaaagagacctaaacccgaaccaagactaggactcgaacctgaacttagaccgggacctaaacccacacaataaccgggacctggacccagaatcaggatagggactttggtaaaagaactaggacccggacctggtatccgacccagacccgaacttgaacctaggacccagctcgtgactcggcaccacaaatagaactagactgggacccgagcttgggatacggatctggagcaagggtctggacaaaacctgttgtcggtgtctggatttgggacccagctctggagccgaaccctgagatggacccgaacccacaaccggacctgaacccagtccaaaacccaaaagtggacccgaacccgtaccctctgacccaaaattggaac

SEQ ID NO: 281882 - DNA, 632 bp, Cannabis indica
atctcgagtcaacaccacagccgagaagcactcactgaaaacaagccgacctggaagctgcatgtggaagggtcggccacagatcatctatccggtgcaagaattgcccttgtcacacctggggggcaacacctgcatgcagcagtcaaatttggattcaaagcctccaacaacgaggccgaatacgaagcactaatcgttggattcaaactagcgaaagagatgaaggccgagcacatcgagatccgcagtgactcacagctagtggtaaatcatgtatctggcgaatacgaggctcgaggagaaaaaatgatagcatatctgagcaaaatacatgatttgctcgcacaattcaaaagctatagcctcaggcaaattccaagagaagaaaatacaacagcagatgtgctagcccgattggcgagcagcaatataagtgacaaggcgaacctggtcccaatccagtttcttgaagagcctagcatcaccagcacagaagaaatcaaaatgattgacacatctccgaactggatgacaccaatagcaacctacctcaactctggggaactcccagataactgaaatgaagctcggaaaatgagaagaaaggcagcacagtacatcatcgtaga

SEQ ID NO: 281883 - DNA, 490 bp, Cannabis indica
gcattcctagctgcagcattcattttcgcagtcctcaaagaattatacagaaacagaatcccttcattcaagtcaagacgaccaaacacccaatgactttcccttcttagattgatgatgaataacacatgatcggcttcataccaaggcttggaacagggaatgcgcatacctcggatgtaatgcgctattgggtgggcagcgtgaatgtgtgacatcttagtcttcattgacttggctttgttatatttgtggtacaaagcttggatggaatcatcaaagagacaatcagtagttgcaaaattcaacgtcacagcggaagaatatttaccttttttccgaaggtaatagaatatggtgttcatatgctgaaaaaaaaacaacacagaaacacaaatgaaaaggttgaacaattgttaaaaaactgtaatacagtatcaaaacttaaaaacatttataaagcaactgaaaacaaactatcataactaca

SEQ ID NO: 281884 - DNA, 410 bp, Cannabis indica
tctcagttgtccgatatgaccatagaacttcaggaagctcttccggccaatttcctttggcatcttcgagttttttcttcagtgtatccttcaagctcttgttgactgcttcaacttgaccattcgcttgaggatgggccactgctgagaaacttttgctgataccatggttcgcacaaaagtcagtgaaggattggctgtcgaactgcttgccattgtctaaaactatcttgtacggcagtccaaatcggcagattatgttcctcacaataaagtcttgaactttctttgatgtaatggttgcgagtggtttggcttctgtccacttagtgaagtaatcaaccgctaccactgcgtattgcactcctcctttacccttgggtaattgtccgatcaggtcaattccccaa

SEQ ID NO: 281885 - DNA, 970 bp, Cannabis indica
catgaatcttttgttttgtgctgtaaactctgttaaatctatgtttttatttaaaatgtaatctattatgtgtgcttattgtgcagagcaagttacttggaagaacgatgactgtggagaggatggcgaagcagcaagagtggtccactctttattacgatgcagatttgagtttatgtcacactgtaatttgcattttcttgaaacttttgtgttgaatcaaatgtgtgtagttcaattttccgatgacgttgtttgttttactttgtcgcagatggtggtacccctactggataccgagagtgctccgcactggtttgcggcgaatgtgagcatggttaatacaacagtggaaattagggactcgttgtcttctgcaatgcataagaggtcacgtcggagcacctgcgtagagatggtatgcacgtgtgtacacggtttgccgttttattagtgtaattgcactaatctcaactgtgattgttttaatttttttgcagctccagactttggaccaattgtttgcccctgtcaagccaggagacctgaatttcagcgagtttgtaattatttcttcaagcaaggactacccacaacaacaaaatggccacgattgtggaatgtttgtaatgaagtacatggaatcactgttcgaggaaaatgaaatattggaagaggtaatgtaatgttgatttctttagtttaagttttcatccagttaactaactgtttatattgtgaaaattgagttgtcaatctattttttgatggatttgtttctatggatttggttgtcatgtgtattactgaattggtttcctaatgtacactgcagtttgatcctattgaagccagactggattgtgttgggaaaattgtcacccacgagagtaacaaggctaaacatgctgtgatggagggagttaagaagcaattggatgagcaaaaccaaagttcttccatcaacatc

SEQ ID NO: 281886 - DNA, 465 bp, Cannabis indica
agagaaaatatagaatgacatgaaatgatttatagaccattcatccaatgatatgttattgagctaattcgaaatgaataagctaagaggaattaggataatttcgtatttaaataagaatccaacgatgctccgattagcgagagtcaaagtaatcttatttatacaatcttcttgtttcatattgtaaatactagtctaaggtgtcatcaattgatgaacagctagatgttgcatttacaatatttatcattcagatctaacactattatgtttgtctaatgttgacaatccattagggatttgtcccattagaacaacaaaccaagttagaccaacaatgaagattcgaaattaaactacaatttaataacagaaaataacatggttcaatataaattcatacacaattcagaaattattaaacatatagcaagtaggaatgacaagtgaaaatactaaaac

SEQ ID NO: 281887 - DNA, 527 bp, Cannabis indica
tgttcgtcaaatgcgagatttactgcagcacgtaattcgtcctgatcatgatgtagagtgctgttatgaccctgcatgagtccgagcgcgtcacggagattttgcaattcgattgcgtctccgatggtcgtctaggcgttggttctaggtggaacagtcgtattatggatgccttggttgggtgcggaactgttattcccagtctcttgtacactaggcgcaattccaataacaggagctgtttcaccattcaccacgcttcccgtctgtctgagattaacagcaggcagaacccttgaactccctgggtcctgtaatgtaggatccagcatctgtgaatttgctgggtcagactgacctctacgagtttgcaccatcgtgttggcggttgaatgtcgaatagagagcgatttatgatatatgataaagcaataataagacacatgaattttatagaggttcagccccgagtagttcggtaatagcctaatcctcgttatttgtattgacttaagatcaaggaagaa

SEQ ID NO: 281888 - DNA, 707 bp, Cannabis indica
cgcattgtaacgagagaggaaactcttcctcctcaagtttcccagccctatgaatagtgaggaatgttcactgggcaaagggaccgagagaaaaaaagtcgatacgcagctaagctaatactatattattatctaaaaaattatatatttagagatactgttgtaagagctataagaaaaggaatcttcttccttgttcttgagtcaatacaaaaagcgaggattaggctattaccgaattgctcggggctgaacctctataaaattcctgtgtcttattgtcgctttattatatattcattacgacatatcgtttatcgcttatcaaaaagactcattgtcgttggctaaaagcgaagtcaacacacctcttaaaaaaagtgtttaaaattaagtttggggtgtgccaccccttgtgaaaaaaaaagagcattatttttttagaagttggaactcccaggtgttatagcattgcttcagcaatctagagcagagacgcagaaaaaaaaaatgttatgctaagacgttgctataactcccgggagcatgttattttggaaaaatttgtggcaataaataatggcaacattaatactcaaattttttgtgggatattaagaggaagtaagtatgaggtctcattttagtcttaggaaaattaaggtgcttttaggtgatttgagccaaaaatgacttctcttaactac

SEQ ID NO: 281889 - DNA, 595 bp, Cannabis indica
ctattgccttcatggacgcgtacgccggttacaaccagatatagatgcacatcgcagatcaagagtgcactagcttcaggaccgataagggggtatacttctacctggtcatgcctttcagactgaagaatgctggtgcaacttacgaaagaatggtgaaccggacgttcaagggccttctgggacgaaatatggaggtatacgtggatgacatgctggtcaaatcaaaggcgtgcgctagccacgcggatgacctagaagaatgcttcgaagtggtccggagataatgaatgaaactcaacctgaagaagtgcactttcggggttaagtcgaggaagtttatgggcttcattgtcagtcagcagggaattgaggcaaatccagaaaaaatccaagctctcctgagcatgccttcccccaagaagcacaaagatgtccagagtctaaccggaaaggttgttaccctgagccgctttatctcccggtccacagacaaatgcattcccttcttcaacatcttgaagaaatgtcaaaaatttgaatggtccgacgagtgcgaggaggcattcaaaaaactgaaagagcacatggctaa

SEQ ID NO: 281890 - DNA, 792 bp, Cannabis indica
ccaccatcccacaggagattggcgtacaaccaagataccaatcacatactcctggccgaatcacttgaagaaatagaagagaagcgaaccacaacaaacttaaagttgatagcccatcaacaaaaagtagctcggtatttcaataaacaagtgaaggctcgaaaattctttgtgggagatatggtcctaagaagggtatttctaaacaccaaagactgtacggcgggtgtactcagacctaactgggaaggagcatatcaggtggtcgaagtcctcgaaaccagagcgtacaaattaggtaagtatgatgaaaaaatgcaacttgttctggtaccacagtattggaatggggaacatttaagaaaatactaccaataaagtacaaggtcggacgaccgtactaagtactaaaagaacatttacttttaagtgaatggcctactgggcggactacgctcaaaggtttcaacaaaaatgaaaaagtactcaagtcggatgatcaccatttaaagtacaatttctaatttctacaatttgttttatttcatgttaagctaaaagattagattagatcaactagctctgatgtaagttactacggtaacaaacacatttttgatcaataaatgaataatgatgtttatttcaaaattcaaattgagtcgaaattactaacatgttgctaatttaccatccattgcgtacaaaaggtcaggtcgaacccaagaccccgaacagataaaaaagtatacttgtaaaaaacaagtgtccaagagtcataagtctgctcgg

SEQ ID NO: 281891 - DNA, 692 bp, Cannabis indica
tttttaccccaatgatattttgtcttttagtgattttattaaatgaaaaataaatgtttatttatgatttatttggctaaaagtaagtgtgttatatgccttaaaattccttttcattcacattttcaacacttagtcaaaaatagaaaaatttcaaaaaaacactctctcttttcctctctttctctctcggctggaagggtgttccaagggctgggatttctgattttctagctaatttccttcaatctaagtgttcttcaatccttggtaaagtttctaaaccttttctttttgtaattttggaaaaaaaagtttgaaaagatgatgatgcatgcatgaatttttggttgttgttgctgctgtattttgttgttattttctgagatttaagcatgttgattagagtttaattaagcttcttgtagtgcttgattgttaggttatttaaagttatgatttttctatgctaaaactatgatttttgaaagaaatgtcttgaatctgttgctgtgatgttgttgatgtttgtagttgttttcagaggcttaattatgcatgattaagtagatttatgttggtttgattgcatgttagctaggtttactcaagtttgagtttagaactcaaagcttgagctttaatggtgatttttgattatgtgcaatctgggtggttttgaagctttagaa

SEQ ID NO: 281892 - DNA, 537 bp, Cannabis indica
tcagttcccgtcacccccatattatcgaggatacgggtaacagtgctcatccattgatcggccttaataatatcaatgcctcccagaaaagccggaggttgcagcttcacaaaccgctcgaacacagagtcccggtgcggcataatatacccttggttacccaccactggcacaggagctggtggtaaccttgattaactggggcagcttgttgccttaaacgttgcaactcttcctcttgacgaagtatgacacttcgcatttcatgaaacatctgctgccagtcagcaggaggattagcattaacggcccccgcattatcccccggattttgcggaggtggaggcggtgctggtggatcggttcgggtaaccccgggctctacttgctcgccctgtggtctagatgattgcggagggtccattactagtacccctgtaatcaacaaccccagcgagttaagcaccaataccacacttacgcacttattgccttaaacctaactcatctattacctcatacatatttacataaaca

SEQ ID NO: 281893 - DNA, 789 bp, Cannabis indica
cacgggacaatttgactctgtgtgggtcatagtggacaagtttacaaagtcagcctatttcttacctgttcggacgagtttctccattgaccagtatgctgagttataatgccagagaaattgttcgtcttcatggtgtcccaaagtccattgtttcagatagatatctgaagtttacatcaagattctgggagagtctgcatcgagctatgggttctcagttaaagttcagcacgacatttcatcctcagacggatgggcaatccgagaagactatacagatattagaagacatgctacaggcatgtgtgcttgactttgagggatcatgggtaaagtaccttcccctgatcgagttctcttataataacaactatcaggcaacaatcgaaatggccccttacgagcttttatatggaagaaaatgtagatcacctattcactgggatgaagtgggtgaaagaaagttcttgggtcccgaggttgttcagagtgaggcggttgacaagattagagcgcgaatgctcgcggctcagagtagacagaaaagttatgctgatccaaagcatcgggatattgattttcaaatcatgtacaaggtgtttctctgaatatcactgatgtaaggtattaaacgctttaggaagaaaggaaagcttagcccgaggttcattatgttggaaattattttattggttgcagcagaataatgtctccttccactcagatctctaacccttgtatcctttctgtcgctgagtattataaagatctgagcccgaatgtcct

SEQ ID NO: 281894 - DNA, 1169 bp, Cannabis indica
tgtttacaagtctcatagtccctgctttatcaaaccaaaaggcattactttgtaacagtataaccctcgatcagtaatgaacgaggtatgctcctggtcgggttcatacatcgggatttgattatatcccgagtatgcatccataaagctcagaagttcatgacctgcagtggcatcaacaagttggtcaatgctaggaagggggaagctgtctttgggacaggctttatttaaatctgtaaagtcaacgcatgtgcgccatgagccgttaggcttgggcacgagtacgggattcgctaaccagttagggtaaaacgactcccgtataaagccgcaggctaggaggcggtcgacttcttcttttagcgcttggtacctcgcggggtccattttgcggcgcttttgtcggacacctcgcacctcggggtcaatgttcaagcgatgacacatgacctgtggagatattccgaccatatctgaatgtttccaagcaaaaacatcaagattttgtttcaaaaaggtcgttagttgttctcgctgctgaaaattcaacttagaaccaatttttaaaactttgctattatctacaggatctattggtacctcaatggtgtcttccgcggcttgggctgcggcggcatgatcaaggattcttggatccaaatctggttcgtccacgtgcggtacctcttcgattctgaggacctcctggcgaggaggtggtgcctccaataggtagataacatttactgaccttttctccgcgagcttgactgctgcgttgtagcattctcgtgagtctgactggactcctcgcacagaacctactccagcgggagtagggaacttcattgtgagatgatagatcgaggttatgatcttcatctccttcaaaattggtcgaccaatcacggcattatatgccgaatactggtcgattactgcgaagtcagccattgatttagctgttattggggcagttcccaaggtgattgggagtttgatcattccttttaatgcgatgacgtcgccagtaaaaccgtatatgctcgacgtcacgggtcgcaggtccttctcttgcaaccccatttgtggtaaggcttggaagttcaaaagattcactgaacttccattgtccacgagtatacggtggacattatctccgccaa

SEQ ID NO: 281895 - DNA, 714 bp, Cannabis indica
attcagcagattcactgaactcccattgtcgacaagtatgcgatggacattatccccgccaatattggcgattataactagtgcatcggaatgcgggtgatggacccatctcgcatcactctccataaaggtgatgtcatcgcattccttcttgaaaagtttctcgggccgctcactaagattgttgacattggtgaacggcttttctttagcttctctagcatatcgctcttgtgacttgcgagagtcccctgcgatatgaggtcctccaataatagttaggatgttgcgaggtgttctggagccactcgcattctggttttctcctttgtcatccgcttggggatgactttcctcgctcttcttatacttgtcgaacttccctctccgaattagctcctcgatttcatcctgcaagacccaacattctaaggtagtatgaccaatgtccttgtggtacttacagaattttttggggtctctcctgtcgcgatttcccctgatggggggcggcttcttgaagactccgtttctttcttcgattgcgtagatatggtctcgggagactgcgagttcagtatagttgacgaaacgaggtccacctttccttttcggcgaggattccttctttggaggagacttggccaacttcggacttcgctgtctccgcgggctgcgtctccttgggcttcggcccctggagttcttccctcg

SEQ ID NO: 281896 - DNA, 618 bp, Cannabis indica
aaaaaagaagaaactaaaaagtccaaaccatttacaagttactgaccattactaaaacatgtgggggcaccatatagtatataataataaagaatggattatataaatagaatattataagaattggaaagtttggggggccatggcctctatagagtgtcaaatagatccgcccctgtttgtgtatcttatgtggcacttgacaaatctatatgatatttaactgtcaaatagtcattgttttaacaatattgtaacagaaggaacttttgctgcttttttcttattaggagttattaggagttacttaattaacggagaaaatgctgttgggttttataccctaattaaaattttatttcaatataatatcttgcatattcattaatcaataaaagaaacacaattattttattatttgtttaatgtattgcttggttcacatgtttgtttcatgatcatttatttgatttataaattcatcttaatctttatcacattattattcataattactgtgttgtctgcactcacactcacactttagccactatcaaaactgagcccatgttgtctcgaacatttgaacactccaggtctaaccgtccagatatgtac

SEQ ID NO: 281897 - DNA, 515 bp, Cannabis indica
gtcatacttgatcttcacattaagtccatcaagatatttttctttcttactgaaatcggttggcacaattcccgagaccaacctcgccaaccgatcaaactgcgtagtgtattttgtcacactcataaaattcaatattctcgtaattactgatagccactgctcggcttccatgacgtccggacttcccagaaaaaaatcggagctgtctactcgcggaacctttcatacaggggttccattctgtttgccgctactactatctcggcctgagcagcaggggcgggtgccacaggaacttctggcacaggcactgcaggagcaccctgctgtctcaatctctgaatctcattatcttgctcctctattctagcttgcatttcagcaaacctaacttcccaattctaggcttcctgattggcttgggcaacctgcagcgggttaacatcaccacgaccacgagccctgcccctcgggacctctacctcagctcctaacatttggggaaactgagc

SEQ ID NO: 281898 - DNA, 554 bp, Cannabis indica
atcctttgattatatccattgtaacgagaagggaaatacttcctctccaagcccatagccctataaatagtgatgcatgttcactgggcaaagggtcgatagattttacttgagagatattgtctaagaattcatattcagagatattgtcgtaagagctataagaaaagtaacctttctccttgttctttagttaatacaaccgaactgcttagggctaaactactggttgcttactaaattagactcattgtgtcttcatattgctttattatatttcaatcgttataaactacttgttgcttactaaattagacttactgtcgttggctaaaagcgaggtctacattttggggctttcattgagagcagaatcaagaatcgctcttcattctaaatttaaccacaagtgcgatggtggtacagactcgtaggggcctagttgatctggaaaatccacaggcggtggatcatgcatttcagaacccaggaaacacaagggttccgccaactgttaatcccgagcaaccatcaaatgcaggccatggtgtgac

SEQ ID NO: 281899 - DNA, 882 bp, Cannabis indica
aaaaataaaaatatgttcaataactatttgttttttaattttaaaaacataaaacaaaagtattttttttaaccgtttttattttctatttttaaaaacaaaaaggacaaattttttttttgctttttctaaattaaaaaattatgaattttatttatttttattttttagataaatatataaaaattataatataaaaatcaaataaaaaataatcattaacattttaaaaaaattcaagtattttgaaatcacgaaagtgattatctataacacaaaaccgacaaaaatcataataaaatatgaactaataattgcccactcttaaagaaaaatattaaaaaagtcctaacagttaataaattctactcattatcttcatcgttgttttgctctctatatatgattagtaatttcatcacagacattagccatttcacgaatttgatctcttgaagtatcattcaaaatttcgtgagtactttgtatagtagtatcttgcacttcaagaatgtcttcatctctatcaaaatatgttttttttcacatccgtctttatagatctcttaagaaccaatctgcaaaacaatctgattggaatacaggattatgatgattatagtttcaactacttcttttaataatatacaaaatattattataccgaacttacacttttatataagagaatgctgataaagtaaatctacatataattacaagactaatcctaaaaattcataaaaaaaaaaaaaaacgtacaattaaacacagaagaaatagcataaagattgtgcaaaccaattaaactacaatcaaatgtgaaaaacagtatgttctaaacttatacaagttacgtctcactctactcatgctaaacta

SEQ ID NO: 281900 - DNA, 570 bp, Cannabis indica
tatgacgaaaaaatgcaactcgttctagtaccacggtactggaatggtggacatttaaggaaatactaccaataaagtaccaggtcgggttgaccactttaagtacacaggtccgcttgaccacttcaaagtactcaggtcgggttgaccattttgaagtactaaatgaatatacgcttttaagtgaatgaccttctgggcggactatgcgcaaaggtttcagaaacaaagtactcatgtcgggtagaccactttaaagtacagtttcttatgtctgcaatttgttttatttcatgttaagctgaaagatttgattagatcaaataactttgatgtaagttactacggtaacaaatacatttttgctcaataaatgaataaagatagtatttcaaattcaattgagtcgaaaaaatgagcatgattataatttacctaaagtgcgtacaaaaggtttagtcaaacccaaaacaccaaacagataagcaatatatttgtgaaagacaagtgaccaagagtcatacgtctgctcggtcacttggggggcacctatacctgtacaaagcattt

SEQ ID NO: 281901 - DNA, 650 bp, Cannabis indica
tctttttgtgggttgatgtctatagaaattttcttgagattggtgtcaagataaagaccatcaaccaggaactttacataaaacacttctctccattcttcaatgtttcaaaaacttacaaagctcattcctttcattcatttttttacttgagttttgagagagaaaagtaagatatatataatgagaaattttttgcggatgtcttgagagaaaaaacttgaaacgatgatggagtgtggaggctctcttggtgaagagagtatatctcagtgagaatatcttcaagaagaacaatacagaggaagaagaagaacagtagacaactcaaactttctaagtaaaaaaaatctctttttttctttatttatttttttctagaacgacataaattttactagatttttgttgtttttactaattatgttttttttttcttttttggggttatagttagctctggttttgtgagtggtggtattgtatcttttgatggctcttatggcttattttgttattgtttttctatgcttgttttttatattctttattttttttgtgtgttgttttagttttattttagtagtgttttcttatgttttttttataggattgggaatccaagtacacctgatcggaatactaccatt

SEQ ID NO: 281902 - DNA, 617 bp, Cannabis indica
aggtaatccttgttcaagcttctcttttagtttcttggtttttttgaagaaaaatgatgttgaattgcatgcttatcttgaagggttgttgctgctgtgtttgtgaaatattttcagaggtttaatcttgattgtttgagtagaatagagctacttgtgatgcatgttgtggtgttgtttaaagttatggaaatttttactcaaagctatagtttttcaaagtgaaattgtgaattttgttgctgttgagattgtttgtgtttcatttcggtttctgcagttcttatatgcatggtggagtagatttaagcttgttttgatgcatgttagttagatttaaccaagtttgagttttgaactcaaagcttggagctttaatggtggattttgatattatgcatgaagctttgttttatcacttggaaaatgtttattagggtctaattagcaggtctggaaagtttggttgagtttggaaacgttttggttggagaattggtttttgtggggtttctgggtaaaaccggctaaccggttttacactgcttgtaaaaccggttacccgtattttacagtaaggtgcgaaactggttttttctcaacttgtcgtttcgtgc

SEQ ID NO: 281903 - DNA, 744 bp, Cannabis indica
cccccaagacatcaagagccaccacatacccacttttcacagtataagcaccagaagaactaaaatgccaacaccaccgatcagcaccaacgccacaccccaccggaataccaagaatagcatcgatatccatctgcaagaagtgttgagccaaagcctgcagattccaacccccacctacatcaatcaagtcatgaaccctcacactagctgaaggaacaggtgtaatagggcgaaaagtcctcggccgagggatccaaggatcacgaaatgcatcaatagaatgaccatccccaaccaccttccgcatcccaatccgtaacaactctaaaccccaaatcaaactggaccacagatgagacgaaccttggcgatccttagcctccaaaattgaagttcccgggaaatatttatgcttcaaaacccgaccaggcaacgaatccggcgactgaaataaccgccacacttgcttcgcgaccatagcttgattaaacaggactaagtccttaaagcctaaaccccctttcactttcggctggcaaacatcatcccatttcacccacgcaatcttcttcttatcaccctttgtaccccaccaaaactgaagaatgatcgaacggagcttatcacacgtcgcaacaggtaatcgaaacatactcataaggtaatttggaaccgcctgcagaaccgccttaattagaatctcacgccccccgctgagaagaaactccgcttccaaccccg

SEQ ID NO: 281904 - DNA, 476 bp, Cannabis indica
tctagcagtcagacgacttccgccaatcttcctcgcactcagcacgaacaaatcatggatcgcctagcacaccttgaggagaagcaacttacctactttcgctatgttcaggcgcgtgacactgcattagcaaaatctctaaagcgaatggcgccaaggccgatagttgacttcccagtgttcccacaagaagtgtttgctcgatgggctgatccagaagctccgaagactctagcgcttcagaggatgaccccgagggatagacagagggagtactttttctttcagcttcagtatttatttttcacttgtcttttctatttgtgttcttgttttttctgttatagttgttgttgtttgtcttgttgttttatgttcgggttgtatcttgtctttgttagtgttgtaggggggctcgatgacgatgtcgtgtttccacttagttcttgaaactgaatgttttcttttgagtttta

SEQ ID NO: 281905 - DNA, 712 bp, Cannabis indica
tgtccataccgagtacaaaacgcagtcttcaagatatcttcctcttgaattttcagctgatgatagcttgagcgaagatcgatcttggagaagaccgtcttccctttcagttgataaaaaagatcatcaattcgaggtaaaggatacttgttcttaatggtaagcttgttcaactcccgataatctatacacattcacagagacccgtctttcttcttcacaaataataccggagcaccccaaggagagtaacttggcctaatgaatcccagattcagtaattcttgcagttgtagcttcaattctttaattctgctggagccattcgatacggtgcctttgatactagttccgctcccggaaccaactcaattacaaattcaatctcccgggtaggtggcaatcccggtagatcttctggaaagacgtcaagaaactcacataccaatcttgtactctcaggtccagatgtcacaggttggctggtatccactgcagtaactatgaatcccagacaacctctactcattaggtccatagctttcaaaagtgttattcctggtatgcgtgccccctgaactttacccacaaacactgctgggttggcactatcaagctcaaacaccaccatcttccgcttgtagtcaatcgttgccccatacttagacagaaaatccattcccaggattatatcaaaatcagacagttgtaa

SEQ ID NO: 281906 - DNA, 544 bp, Cannabis indica
acgacgatgtgcagccagcccggagcccgtactcaaattcctgctaagaaagatactgatgtgattcaaatcgacctgaatgctgagtaggttagcccagccatacaggcacagctagacgaattgaaaaatatgtttcaaggcatggctggataatgaaataatgatctcgagctggaccgagcacgtgtaactcctctctctcccgagatgaatcttctggcattgccccacaagtttaaaatgcctacatggaaaatgtacacaggaagagaagatcctctttctcacctcaagtatttcaaaatgcaaatggatttgcaaggggtacaaggggacgggtgttgcagaatctttcctgctaccctgtcggaagccgcccagcaatggtatttctgttggaaatattttaccaggatctagatttactaccacgtatgttttattaacatcctaatatgaattctaaaacaatgaaaataaacacataagagtttaagaaaccttacattggtgcagcgaaatataatgactccttccattc

SEQ ID NO: 281907 - DNA, 307 bp, Cannabis indica
tcatatcagtaaaaccctgtgtccgataaatctaggaaactttattcacattagtcatgtttactttccaatatgagttttatttagggcatacatgcacgctaacatgcacgctaaacatgtaatacatatgcatactgttatactaatcttacctcaattctgaattcaggtgtgccggtcaacctgactggaacgaactgcacggcggtttacaggctcctaaacaataacaatcacaacactaataagtgatacgctaaatcacttcccgaggacttaaagttgaaactaaaagtttccatat

SEQ ID NO: 281908 - DNA, 617 bp, Cannabis indica
gatcaatacaaagtttccagctattagatatggagcctaaaagtatgtctaaaatcaaatttatgaagtcaccgaaagataatacaaacatgttcgttacttgatagatttaggctcatcgaactgatccacattcactgcagggtaaagaacagctggttgtattcctcgtgcgtcaagatgcttgaacgtatttgcaaaagtagaggccgtaaacttgctattaacaagaatcagatccgccattcctgcagtcctaaaagcaaataagaataagacatgcagtatatatattataggttaaattaggatttttgttcccgaactttttagctcgttaaaaattaatcccgaattattgacaattgagattgttggattcaagaaattttgtccagttccgttcaattttgtactaaatcgtgccacccaaacttcaatatatactaaattatgcttcctaaactttcatccacatcaaacgtctattagtaaaattagacaaaagtccttaaatctaagttccaataatctcactagtttaaggagaatttgtaaacggcctaaaaagtttgaggggcacgatttagtacatgttatagttcgggagaagaaaa

SEQ ID NO: 281909 - DNA, 603 bp, Cannabis indica
tgaagaatgctctctggactgggagccctaaagaatgtattttaggacctcaagagattatgccacgaaattgggataccgcttgccatatttctagttatggcagaggtggtaggggctccatggttgagcagaagagtaaacctacgtcgtcagtggtgggtttaaaacggaacaagcggttccgaggaaatcaaggcaagggtgtacgcaaggattattcttaccctgagtgcccgcgatgcaagaaacatcatcccggagagtgcaaccgaaaagcatgcttcctgtgtggcatggttgggcactttaagagaaattgccctcaggcaaagaaagataagcagaagctggaagtaaagcctgtacttgctcagacatttgttatcactcaggctgatgttgcatccagtccttctatggtgaaaggttagcttcttatcaacaactcccattttaatgtattatttgactttgggactatatactcgtatgtagtatcgagagtatttaatcttttggatagactttatgattttcttgtaagagggtttggaaccctaatgcctagcggggaattggttatctctaataggcgcatta

SEQ ID NO: 281910 - DNA, 195 bp, Cannabis indica
ttttacgtggaccaataaaattgtgccacgtgtatattgtgtccacgtggacaatccaacctggcagttaacagctaaatttggacggaagtgtcaaattgctaacaaaacacaagtattgggggttttaccacctaaatttagattttgggggttaagtgaaaccaaaatgaagttttgagggttttgccgcta

SEQ ID NO: 281911 - DNA, 526 bp, Cannabis indica
atcatgcatcaattagaggggttcaactaggtcttacttttccaagtaagatctagcttgctaaatgttaaaaatggccaagaattaacattcattcaacatttcatcacaactaattgaactaagtcaagattacttcatcattgcaaagtcaaaacactagtccatacaagggttcataaccacccaaatctcaaagagtttagttcataactgaaattaaaaactcaaaaccagaaaatatattgttcatggagttaaagagaaacttaaagagaagaaaatgatacaaaacgaagtggagagcaagagagatgagtggtgagctcaaatcctttctttggtagttgccttcttctccttcttctcaatcttcttcttctttctttgtactctcttctttctctgtacttagaaactttctgctgtaattttcgtactcctattcaagtgcagccagccacacttctaatgacctccttttctctttttgccccccaattagggtaccaaagtttaccctaat

SEQ ID NO: 281912 - DNA, 704 bp, Cannabis indica
tgttaggaagcatgttagtagcctgatagtagaataggcgcatatttttaatttccaaattaagcggcagtagtaagctctcattgatcatgacctgatgtgccaactctgggcttcaaggctgttcaaactagatggacgccaggcgaaataccaagagtcagggaaactcggtcgggtcaaatcagggctaaggagctcagtttcccccgaatgttaggggacgcggtagaggtcccaggggcagggctcgtggtcggggtgatgataatccgccacaggctgcccaagcgaatcaggaagcccagaatcgggaaactaggtttgctgaaatgcaagccagaatagaggagcaagacagtgagattcagagattatgacagcaggttgctcttgcagtgcctgtgccagaagttccagtggcacctgcccctgttgtccaggccgaaccagtagtagcggcgaatagaatggaacccttgtatgaaaggttccgcaagcaggcacctccggtgtttctgggaggttcggatgtcatgaaagccgaacagtcgctatcagtgattacgagaatattgaattttatgagtgtgaccgagtacacaactcagtttgatcgattggcgaggttggcctcgggatttgtcccaaccaatttcagtaagaggaaaatatcttgatggacttaatgtgaagatcaagca

SEQ ID NO: 281913 - DNA, 384 bp, Cannabis indica
tccatgaaaaagcatgaaaaaacgaagaaaaacgaaaaaattgcaagctgtacggacgggatgctgtgcatacccgtccgcgcgcgtgctggggctgtttgggcgtgcaaactcggcgcaggggaaatcagcatgatttccgcgcgcgcaggtggtgcagcgacacaacccgattttttcgaaacttcaaaaaatcataactaattcaaattaaatagaaattgagttctgcaaaaaagtaacttactttaattttttccatacaatccaataaaaataattccagaaacagatattcaattatttttagacgaaaaatttacaaacaccaatcaatcatcaaataacactcaatacaacatgataccatcgaaaaacaaacaa

SEQ ID NO: 281914 - DNA, 1085 bp, Cannabis indica
gtccaaaattattccaccatccccacccaaagaaacaccagacgcctccacatctgccactgtgcccccaacgcctgccactgtgcccccaagctctgctccagccaatgactccgactacctcttgttggctaagagattggagaaggtagaagcgcaacaacttgcgattctcactgcccagactgagatgaaggctgacttcaagagaagtcagaaagagatgaagaatcttatcatggatcaaattgcgaccgtgataagtttgttacagaagcagccttcggagccgacacaaccatcagggccggcacatcaatcagacccgacacatccatcagacacggcagagccattacagacggtacatccatcaccgccgacatatgatgatgatgatgatgtctacccagaagattggcaacctgacgtatgtgacgttccttctactcctgcaaacgccattgtcatttcgctgggtgatacagaatctcaggatgtggaagagttgcaggggccaccagctggggtggacttctgcagggttaggcgaaagcggaagccggttttcttgaatgactacacagctgggaagaagaaacaacgacatgggcccgtggtagtagacacagtgaaaccggcggactcccggctgttaaaatttttccagaagtggatcacttacgctagggacaacggccgtcctagggatgttcacactggcgtagccactcgatcctggttcgtgaaattgatggtgctgaacgaatggctcgacgatgctgtaagttatttcttaacagaattaatttattgtgtttttaaatgtttgtgcgacttatatgcgatttatatgcgatgtttgcactttctgttaaatctttatatgtgacttttatgcgatgatggtgcgatgtttgtgcgattattcattaatttatgtattatttttacgacttatgtgcgatttatattttggtaatttcttgtgcgatttcctgcgatatttgtgcgacatttatgcgatatctgtcttactgttttcttttggaacacaacaacttgatgccatggcgcacttattg

SEQ ID NO: 281915 - DNA, 574 bp, Cannabis indica
agatcgttgttccgctgcccggccatgccatgaaacatattcttcagttcggcaagctgggcttgcacggctgggctgaattcattagcattctggtcgggttgggctatgtcaacgtctttctgagcggggatttgagtatgggctccggactgcacattcgttgtagtattctactagtctgttccccttcttctgtttaggtcgtcttttaggtcacggggtgttcccaacctttcgaacatagaagaacttggctgccttagcgattgattcgcttggttggcagaaggaatggctccattattttgtgtggatccatcgagcatgactcctcctgatgaatgcccgaacaaggtctgtccgccttcctcttggcccacgagtggaactcgtgaccggggattggactgctgattattgtttgtctaggaagcattcaccgttgggtcatcctcggtttctccaaggggaatgacgctcggcgcctgctggcctagagtctgataggctcttcgtatcagcacagtggcttgccaactacgatcttcgatttttgcatggtgaacctgtt

SEQ ID NO: 281916 - DNA, 220 bp, Cannabis indica
atctaaaggcacagcttgcaaaacctcccgtactttctaaacctttggatggtgaggagctggggatatacctagctgtcacggaacatgtcgtaagtgccgtgctgatcagagaagagaacagcatacagcacccagtctattacattagtaagagactcgtcgaggccgaggatcaatatccgttgatagaaaaactcgcctactgcctcattctagc

SEQ ID NO: 281917 - DNA, 532 bp, Cannabis indica
ttattaatatttcatagaaaaaattttaaaaaaaaactaattgtttcttaatctccaataataataatttatttccatatctatttatatacaaattaaaccaatatatatattaatatatatatatatacttatatgtatgtattaccaaaataaataagttagtatatatatatttaaactttatgtgtatgtgtctatgtgaataaaaattatttttcttgtgttttttattacaaaataaataaaatgcactaactcaatatattactaaaaaagattaagaaattaaaagtttgtattttttttaattaatatatattatatattataatttttaaaattatatataattaagtgtggattggattggatcggtgtctttttgaggtcaaacaacatccaatccgcacaagtgcggattttagatttttcaatccaatccaatccgcacaagtgcggatatccgcattttgcggattggattggattggatcgtacagattggattggatcgaatactttatgaaca

SEQ ID NO: 281918 - DNA, 632 bp, Cannabis indica
aaggaatttaaaaaaaaaaaaagaaagcaaagcattttaaaaaggaagaaaagcttccttccaaggcaagtaaccaatttttctcaaccttcttctcttcttccttcgagcaaactgaaccagcctctagagggattggtttgcttcagccaacatcaattttcagagctaaactccatctccaagttaaccttgcaccctaggtaagttcatccttttagttttggtgttttcttaggttttcaagctaggttttgttatttttttgaaaattttcaaagctgtaggtttagtgagggtgtaggtttgttatccaagttaaatatggtttgttaatgcatgtttggattgaattcatggctgttgggattgattggtgagtgaggaagctaaaagaaacttgatttcttcacttgagtgtgtgatttcaagctagagattgaaccattgtgttttgcagcttaggttatgtcatatgtatgttaataaactgttctggaaagtttggataggtttggaagggttttggatcgattttggtgaaaaggaacttttgttcctggtctgccagaaccggtcgaccggatgggttctggtataccagaaccggtcgaccggttgcctgcagggga

SEQ ID NO: 281919 - DNA, 233 bp, Cannabis indica
gtaactagacctaagtcatcaaaagaccacaaccacaatttaatatatctatggcatttgcatcttgttcatagttgttttgacaagatcattctctgcaaagagtcaacatgcctatatccacttgaaagtaggatcatctgtattcgaatatggatgtacattcaggggtggacatgagttttcattatgctcttaagacgatcactctagattttaccttatgcaaagaa

SEQ ID NO: 281920 - DNA, 807 bp, Cannabis indica
atggctgctcttaagaagcatggcgtcggagggaagaaagcccttgggaaggggttgatgtttgtggaggccactttaaacggtaagcaggccaagagtgtactgattgacaccggcgcaacacacaacttcatctcagaaattgaagctaagagagtgggcctaaaactggagaaagatgcgggtcgcatgaaggcagtcaattcaaaggccatggccacaactggagtggccagaaaggtgaatgttaagattgacggatgggagggacaacttgacctcgtagcggttcgcatggatgacttcgatgtggtgttgggaatggagtttctagcagagaagggggccattccaattccagcaacagggaatctcctgattatgggtgagaatccttcaatggtacccgccaaagtgagacagcccccagaagtcaagctactatcagccctgcaactgaaaaggggcctgaagaagaagaggccaacatttgtcatcgctcccaccgtgtacgacgaaaaagtggaagagtccactccacctgtaatcaagaaggtgttagatgaattcaaggatgtgatgccagacgagcttccaaagagactgcctcccaggaggggagttgatcaccaaattgagctggtgccaggtgcaaaggccccagctaaagcagcatatcgaatgtctcctccggaacttaaggagttgaagagtcagctaacggagatgctggaggcagaattcatcaaaccctcaaaggcaccttttgggcccccgtgttgttccaaaagaagaaggacgggacct

SEQ ID NO: 281921 - DNA, 587 bp, Cannabis indica
gaggtcgagaaggagaacgggaagaagcagtatgaccaggcggtctctgactaaatttactccaccctctccaaaattccagactttgacttctcaatcctcggagcagaagcccctgagatggctgaggctttccgcgcaatgtcgcctacgcagactcaaggcggtggagggaatctgtttcccaaggaggctgaggctgcggacgtcaaggaagtccagaatgaagctatcagcaaagtcgcggatggatctgaatatttacttatgttagacccttttttttatatgcggtacaagggtactcgcgctttgtacttgaacaaatttacttttatgtttcttttgaacgactttatatcctctcggggatatttatctataacattctcgcagtacacgggcactcgcgttttttggttattcttgattgcgattgtataaatgcttcttatactttagaaaatttcagaaacttgaaaattttcgaacttgaaaaatttcataactttcataactaatcaatagtacatagttgtatataccccctatacttaggatttttttataaaaaatgactaagtata

SEQ ID NO: 281922 - DNA, 636 bp, Cannabis indica
tacttatacttagactatttttacaatatatttttcaaaaaaaaaaatcctaagtatagggggtatatatgccataatgtactattgattatataaaggaaatgcctcatgtttgttaaattttcaaattttgtcaagacttgtaaatatttctacttattacaccaagctgtaataaaagtcgcatatatatattaaaaacgcgagtacccgtgtactgcgaaaatgttaaaggataattatccccgcgaggatataaatttgtccaaagtaaattgcaaatttgtctgagtacaaagtgcgagtacccctgtaccgcataaaaactaaactagtaaattcaaaaagcataacagtttaaacatagaagagaaaagtcaagcatctggagcagcaggagcagtttcatccgcgactttgctaacggcctcgttctcgacttcctcagcatccgcaacctcggcctcctcaggaagattccctccaccaccttgagtttgagtaggcgacatggcgcgaaaagcctcggccatctcagcggcttctgctccgaggatagagaagtcgaagtctgggattttagaaagagtggtgtaaatataatcagaaactgcctgatcatactgtttcttccca

SEQ ID NO: 281923 - DNA, 1033 bp, Cannabis indica
catgggtgggttgaatcgagtctatgaatttttgaatccgggtgcgattgccaccgatgcaggggatgagagtaatcgttgccaagcactagtcgctcgaatgactaggatgactaattcagagaaatggcttattgccccatataataataggtatatgtagatgtaaactaaataatttcggtatttttaactcttcataaaatttattattatgtatatgttaacagttttacacttatttgtccgagcaggaagatgtttcactggatgcttgtagtcatccagccaagtacgcagacggtggcgtacttggattcaggcaacgacgacatcccggatgatttgaactttattatatccacgtaagttctatatcaaacatcccaatatgttagcgtgttctttatttataaatttatatatgctaattaaatttactttttgtgtagatcgttcacaatgtataaccgaatggtacgacgacctgatcgacctacccagtggatgactcctatttgtcctcaacaacccgatgacaaacagtgtggatactacgtcatgaaattcattgaaagtttcatggtcgtagaagatccaatacaattgttgacccgacaagataggttctccactccgtacactaatgatgagataaatattatgcgtgatcggtggattcattatgtgaaagcggaagcggagcgacaacagttaccgtgttagacagtgtgtatacatatacatatttagatgatattaattagcgttagttcaattattgtgactatacaaaattttaaatatatttagacgttagtttaattgttgtcactatgcagatttttacaaaaatttaaaaaattaaatgcagggaaaaaaaattagcagaaaatttgttttttttttccttatttttcaaatgtaccgaccgaaaaaaaccgtacgctaaaaaaattacaaaaacgaaaaccagcatataaggcacggtttaaaaccgtcgcctataactgggtataggcgacggttaaga

SEQ ID NO: 281924 - DNA, 629 bp, Cannabis indica
taggtccgatgtcttctgcatgagaaatggtgcaggagctcgccgaacctggggccattgatattcgagacagtgagtctacggtgtcagcccgcgattatcttattcactccaggcatgcccctgacgtcgaggtcgaggagacggatgacgactggacggccccagctcgcgaatcaggcgaggaggaagaagaggcagaagggagcggaactgactcggtggacgacacccagctgaacgagcctttttcgtgcgaggatttggtttcgagagttaccaaatcggacctcactacctttacgaggctaaacctgttgcgacttgcttctttgcgacctaaaccgactcagagggcgcaccttccttttaccaatccagcgattattcccacagaggatgtggtaatctcaatacccattctccgatgtggggtatcagtcccttttcatccctttatcgcggctatcctcaaacgttatgacgtgtctcctttccagctaacccccaacagttatcgcacaaccctggctttttatgcgatgtatatggagtatgtacatagggctcccacagtagaagagtttagctacttctatgatataaaaagcgtaggccttcacaatggt

SEQ ID NO: 281925 - DNA, 537 bp, Cannabis indica
gtggctcaagttcgacgggcagcatagcttcataaccgtacgccattgcgaatggtgtctgtccggttgccgttttctcaattgtgcgatatgaccatagaacttcaggaagctcctctggccagtttcctttggcatcttcaagttttttcttcagtgtatccttcaaggttttgttgactgcttcaacttgaccatttgcttaaggatgcgccactgcagagaaacttttgatgataccatgcttcgcacaaaaatcagtgaaagattggctgtcgaactacttgccattatctgagactattttgtacagttgtccgaactggcatattatgttcttcacaataaagtcttaaactttctttgatgtaatggttgcgagtgggttcggcttcagtccacttagtaaagtaatcaaccgctaccactgcatactgcactccacctttacctttgggtaactggccgatcaggtcaatcccccaaacagcaaagggccacagactttgcatctgtgttaactcgttgggtggagct

SEQ ID NO: 281926 - DNA, 788 bp, Cannabis indica
actagaaccgaactaggactaggacaggaccaggacctaaacccaaacccgaacccagataaaaacccagatagagacctaaatcggaaccgagactaggactcgaccccgaacctagaccgggacccaaacccacacaataaccgggacttggacccagaataaagatagggacctgggaaaaagaacttggaccgggacctagtacccaacacagacgcgaacttgatcctaggacccatctcgtgacccgacaccagaaatggaaccagacggggacccgagattgggatccggatctggaccaagggcttgggcaaaacccgtagtcagtgtttggatttggaacccaggcctggacccgaaccctaacaaggacctgaacccacacccggacctaaacccagtcccaaacccaaaagtggactcgaacccgtaccgtgtgacccaaaataggaaccaaaactggaagttgaacaggactggaactaggacttggacttagaatcataactgaaattcgacctagatccagaaccgtaaccggaccaagaccaggactccaaatcagactatgacccaaattgggagccgaacatggatcccaacccaaacctcgactcgggacccgaacccgatcatgaactcaggcccaaacatggaactagactagggacaaagaaccagggtcgggaccaagaatcgcaccctagtctcaatccccaacccaaactccgaaatgggacctgggacgtgaaccagaaccagaccgagacccgtgacagtga

SEQ ID NO: 281927 - DNA, 721 bp, Cannabis indica
agtactgtgcttctcaagtagcttatggtgagcccgatgcgactgcttcttcctctgcccagaatgttgatgtacctcccgttcaaacaacagatcccccagctcctaccggcccagaagatccgaaccgagagcctgggactccagctgtttaactactcttttatccttctcctttttttatatatcttattcggccataaggcctttttttaagacatcatgaccgaccaagaggtctttaaacttggaattatttttcattttacagacaacaggctgaccgggcagcttttaatcctggtattacgtgccgttgttatctttaaggaatttcattctctgtttatcatcatcgtgcaattgtgtttgttttatctttaccaaatgatttgtacaggtataggtgcccccaagtgaccgagcagacttatgactcttggtcactttttttttacaagtatgcttttttatctgttcggagtcttgggttcgaccagaccttttgtacgcaatggatggtaaattagcaacacgttagtaatttcgactcaatttgaattttaaaataaacatctttattcatttattgatcaaaaatgtgtttgttaccgtagtaacttacagcagggctatttgatctaatttgatcttttaccttaacatgaaataaaacaaattgcagaaataagaaattttactttaaatggtggtcatccga

SEQ ID NO: 281928 - DNA, 705 bp, Cannabis indica
actcctaatagtagtttttaaaaacttttttagttttaaaaaacagaaaacagtttttaaactgtaaagccaaacatcctcctagtttccagccacgaaaatgcatccaaaaacaccaaatttcatgctatatcaacccacaatcataccaaactttcacctagcataaacaaagtaattagagaggaattacacctaattcactctccaacaataccaaaaaccagcaacaaatttcagccccaaaattaaacaaattcaacacaaattttcatataattcaaagtcatacaccactaactagcaagttctaaaatagggcattaaaatacataaaacatgcatcaaaatccaaccatatacccctcaaagttcagatttaacaacatctaaactaagctccaaaccaagagcttaaatccataaaactccaacaataaagacttgctcatccaagtcaaaatctcaagcttcaagcaaaataaattcagagctataaatcataatataaacacaaaatataactcaattaatcacacccaaagcttacccaaagcaaagatcaagagtttaagacaccacaagttcataacatcaagaacaacccaattaacacacacatgcaattcaagaacttgaaaatccccacatgcttcaccatcatccaacaacataaattgggataaaaatcagatttctcaactt

SEQ ID NO: 281929 - DNA, 607 bp, Cannabis indica
attacttgaaaacgggaaaaaccagggttcgggaaaaattcccaaccggcaggccggttcccaaccggaaccccagatcctgggtaccaaccggtcgaccggttgcttgaggcttcccagaaccggtcgaccggttcttggctggaaacctcaaaaccaacccctacacctcaaatcattcccaaacttcctaaaaacctccagaacacctgattacactataatagcctcaaaccaacaaacagaacacaacaataatcacaaaatctcaaatcaccattggagccctaacctagagctcataaaccttaattgatacaaacaacacacaccacaacttaatctaaaccataccagcagtaagaatcatcacaaaacatcaaaatatagtttagaacaacctttaaacaagcagccacaaaatcagttaatttctactatcaacatacaaattattttatagaaaacaaaggaggagatgactagggattgataccttaagttgaaactttaaaattcaactagaattcagattacacaattgaagattcaaaatcccttgctgccttttgcaaaaatcgaaggagagagagagagagaaaagctt

SEQ ID NO: 281930 - DNA, 519 bp, Cannabis indica
tcatctcggttatgtgtaccgagtccaacctgattatgccttgagcgcataatccttaaattttatttcatttagcatggcatggcatttatatacatattccactagagtaataaccctaagctaacaaaccattcctattagggtaataaccttaatcccagttacaataactcgcatatatcaaattcacataagcgccaatgcgtatactctagaagtaaggtatatccagctatagaaggagattctgaatccccgggtgctcctgatcaggtgccggtaatcctagtcacacaaatccgggatcattcacacttagggttaacctctgattttcaactcataaaaattcaagcatggcatttataactcagataatcatataaagctcggaacgagctttccaaagatataaagaactcccaaatcggagttcggaatcaaaagttacgaactttcgaaaatcaactcaaaactgcccaaaaatacgagggcgggccgcggcatgcccagacc

SEQ ID NO: 281931 - DNA, 588 bp, Cannabis indica
taattaaatagaaaattatttttaagttggaaattttttttaacaacttaaatttgaataattttcaaaatatattttatttattttattaatcaatttttgaaattacatttcataatgcaagatgattttgagtatttcgaaaattgtataatttaatttaaattttaagtatttcgaaaattgtatagttttatactttaatttttcaaaatacaatatatattcttatagaaaatttaaatttgagttgcaaattaatttaaattaatacaacttaaattaaataattttcttaatatttattgaaaaattaatactaagatggaaataattcattttattttctataaccatctaagtataattttataaatattaaattaaattttatttagaattttattctaaattagaaattttaattagattaaatatatatttaaaataaataaataatagaagaaaatacattttaaataatgagctttattattattaagatattcgatctccattatggttttacaatagctaatgttttagtgtagtaatcctccctaacggaggaacgttcattagcaagtt

SEQ ID NO: 281932 - DNA, 513 bp, Cannabis indica
ttaatgtcattaaatcaagctctcgttgtataccaaaatggtacgttttacatttatcaactcgcaagcgcacgaatctttattgtagtatggagattgtgaagaacgaggtcgaacccatgggaattgcgtgaaatcgaagaaaatacttatttaatctaagctaataaaactctaacctagttccgaaaatggtgaggtttttggtaacaaaataaaataaagtgtttaaatgataaaaatgacagtaacagatattttcagaaatattttgggatattattaagggttcagaatccacttaagtgtatataaaaatatttatgtttatattgattctcataatttaatcagtaatcaaaccaattattttctaataaaaaatagattttccttcgctttaaaattataacttctaagcattaaatgtgaaacaatttaatgtaaatacaaaaaatcaaagaatattatttttaataaaatatggaaccaagcataaataatttctaacta

SEQ ID NO: 281933 - DNA, 555 bp, Cannabis indica
taaggtaaaatctagagtgatcgtcttaagaatataacaaaaactcatatccacccctgaatgtacatccatattcgaatatagatgatcctactttcaagtggatataggcatattatctctttacagagaatgatcttgtcaaaacaactatgaacaagatacaaatgccatagatatattgttgtggtttgatgaatcctaggtttagttacaagaaagagttcttagaatagtccaagtggatcccggtcatagaatacaaaactcataatctattcattaatatacagtttaaatctattgacagaaaatagatattaaacttgtgaaagttgtactatattgtctaatgtatttggaaactgaaatttaaaatttctatttagaatttaaaatttaaagtcaaagacttaaatttatgccagatatacaatgagtagttattctttcttggaccaccactactaatctaactctaagtttaggttgcttgaagtaaacatatacaagtaggagatttctaagatcgtggatttaatcattttgggatag

SEQ ID NO: 281934 - DNA, 906 bp, Cannabis indica
atagtcttaagtaaataatcagtataagaatgtatgtttaagagatttggaagttttagaggtacaattaagaagttaagatatgtttaggcgaattaaagaggactgcaagatacagggcatgaatatggctggaataatcaatggtatgataagtatgaagttatgtgatacctcagatagttagtattacagaagaagtgatcattgagcataactacaaatttatcaagattacagatttgaccactatcgtaaagtatcacaaaagtagacaaaagttattgtgtaaaactagctaatctcataattaagtcgacttgattggaagagtattggaggaccaagaaccagaggagagatcagcaaataagatacaatgaagtggtaaaagaatcaagagactacaataggaatcaaagactatactgtccgagaaatagcctaaaggaaactaagaagcgagctcatactgagtggtggttgaatggatcattaaaattatataaggaattataaagggcctgagtgcttatttcccaatgttatgagaacaagtatctataactgatagagtaacaactatgaaactataggtgacactgtaactctatggtggaaattaataaatagaaagttaagcttttgtatgtagtaacattcaacggaagagcatgatataaagagaagtttgcataaggtcttctaacctactctttgttgtttgttatttttttgtattgcataatgtgttctcaagtgacatgtaaggatgttcagaggagaataaatagttttactcttaatggcatgtaaggatgttcataagagaaggaaaacttttataatattacgagcatgcaattgtaggagcatgttttttttattaagtaaagtatagtagaa

SEQ ID NO: 281935 - DNA, 549 bp, Cannabis indica
agtaccaatcaatccatttaagctctcttcaactgtgaagtcccatacctacacagtgtcagaatcatcccacttgaccttccccaggcgatgtggaattgcacagcttacccggtatttccccttacggatcacgggactactgactgtcacaatcacccctccttacggggtccgacgtcctcgtcgaccacacttccggctgggtcaaggctctgataccatttgtaacatccctgtttcaagcctccattgggtcgtcgttggaatcgattttgaatgtagaattcgatgatgataattatttaaccatttgatggtataggtgagagtaatatctaagattggactaaacaattggagctcgagacttgagagcttaagatcgtcttttggacaatttgggagaggtagggactgaacttgattattggacttaatttttatatgtgttgtataacattaggcatattctaaatttttatgatttgcaaattatttaaaaaattaaaacttaatctgtatatttttctaaactgttctggggca

SEQ ID NO: 281936 - DNA, 657 bp, Cannabis indica
cacaaatttttcaataaaaattggattggaagtcttagaatcaatacctcaatgagaatcctcctttaatcatcctccattgttgaaagcttgaagttcttgagaaagaagaagatgaataagggttttgaaatttttaggtgaggttttagggatttggggttgattttgagtgggaatgagtgtttgatgagagaaataagggtttatgatgattgatgatgaaagtgtatggttagatttgattgaatggggttttgaatgggattagatgaagaaaatatggtggagaaggtgttttcggcgtggagaggtgaggatttgaatgtggtgtgagtttgaaatgttagggatttgccctttttaaaagcacactgaccattctcgccgcggcgagatatagcctcgccgcggccaaaatccgtgaaaataaccttctctctgtaagccttaaatggccgcggcggtatgttccctcgacgcggccagaattcgtgaaatttagcctctctctgtaaggcttaaatggtcgcggccatacatcccatcgccgcggccactggacacaatctttttttttttttaacaaaactggagaaactgaaaaagaaaaataacagtaaaacttaaaaagagttcaactaaatcataaagaac

SEQ ID NO: 281937 - DNA, 661 bp, Cannabis indica
tcagatttaatatttgattttttatttaataaaaatcctaatcttacgttaatataactgagggaatatttgagtctcaccttttttaaaggggtcaatattatacattttcagggtagctggaatcctatcgtaaaagtattaaagggcttaaaaaatctaaaaacttcataacaaacagggtaatcattaagattacctatcccccccttacacttaatgcattccaaacagcctcttaatgtaatgaaataatttatgataagtcataacaacatatgattttaacatttattttttgttttaggaaaatttaaaaagaatcaatatatatgttttgtaaaatttaaaagaaatattatgtagcgaaaatgaatgaaaaagtgtcatcttaaaatagaggaaaagaattattaattaaatttttaatatagaaaactctatgaaaaataaaactaaagcatagtgaaactttatctcaatcttcattcgactcagcagtttgaatagtgaattgattgtactttggactcatctgtcattttggatctatatacaattggattctatatttattggctgataatttctctatgagttttcggagaaacaagcgatatttctgcaaaatttaattttgatactacttttatgattattg

SEQ ID NO: 281938 - DNA, 629 bp, Cannabis indica
agagaatcgtatctattactagccatagcaaaaataaagaagcctccaaatgctaactcaagtgaaagacgttccgaatttcacaaactaataaaatcctaaaatctcaaattaaatacaaatttaacatacttgttgttgtcatgatacatagcttttgctatggctgtgcttacgaaattcaaattcattattcgtcataccatgataattatgtaaagcactaatcatctatagagtccaaaatggcagaaaactgtgcagggagaaaaagagaggttagggcaaaagatgatctttagttcaacctgatatatagagcaatagaaagacagtcctaaacataaacgagtaaaactcttgttatctacatacccaaaatgagaagtaacccttttatttatggaatgaatgaggtgacttaacaacaatacagacaataaggttagaccatctccaatagaaacattttttaaatatgttatatattttcacattatttaaagatattgttttcctgttatttttcgcactcttattttttaaaacactttaatagtataaaaatactataattatgatctcacacattattatatatataatttttttttattcaactaatatat

SEQ ID NO: 281939 - DNA, 717 bp, Cannabis indica
aagtccaaggttgtctcatttctggactccctacacaccgcaatgatgagaagtatcgtgtggaggctacgaaagaaatggtaaacttgcaaagtttcattgtttgatgtgaactcattcttcattgaatctaactaattgtatacgtttgcagttgtcgacgttggaccttttgtttgaggagaataggtcgaagaatgtgactttcgtggatttcagaattgacaggaaagatcgcgggcttcctcaacaagacaatgaccgagattgcggtgtatacgtcatgaagtacatggacgctgtggccaatgaggaagaagtagttgatgaggtataccactttttaaatatttcagaatgtactacgcaagtttgattgagattaacgttgtgtaatttaaattttattcggtgttttactgtcaagttgattagagttaattacattttctaagtttttgtttttgtttctgtattgtggcacagtttcacccggttgaggcacgtttggaaatcgctgcgaggatcataactgatgaacaaaatgaaattcgtaccaaagtggttgaagatcgtagggctgcacaaggcagctcatttgcatcatcctcggcccctttgcgtagtccgtcaaagtctccacgcgatcctcggttcagtacagcgaagtctcgcaatgcaaacatgtttcccccgtcaagagcctcccctaggttt

SEQ ID NO: 281940 - DNA, 594 bp, Cannabis indica
aaagtttaaaataagagaaagaggaaaagaaaaaaaccatgttggagttgtcacaatactccaagctttttcttgccaaaatcttcttcttcctcctttgaatatttgccaatctcaaaaataaaaatgctaaattaaaaccctaaataaaactctgtctctttttctttttcttcatttttctctttggtgtgaagctctgtagaagccgcctcctctccaatctctgtcacgcctctttgttgatgttatatatatttagattatataggtaataccttgcaatatcacgtggcctagttgtaacgcacgtacttttataaaaatactaattttatttacaagcgttaaatgcggaaaattataatgtcgcatttttatttaatacttgaaaatgttcacaactggccagttttcgtacaaaagacataataaataataactaaaataattgcgacataaacttaatagcgtaaataaataaataaatagagtgtcctagaccgcccgcagttatatggccctcagcaagttcacacacacaagcgtccaaagttccactcgccaccgacattctagactttcagttacctt

SEQ ID NO: 281941 - DNA, 605 bp, Cannabis indica
agcaatataaagacacaagaattttatagaggttcagccccgagcagttcagtaatagcctaatcctcattacttgtgttgacttaagaacaaggagaaaggttccttttcttatagctcttacaacagtatctctaaatatgtattcttagataatatccttagggtatagtctcgactaaactgtttgcgaccttttgcccagtgaacatgcatcactatttatagggctagtaagcttggagaggaagtgtttcccctctcgttacaagggatataagcataaagattacacgatccatacagtatacattgatcgtgggacaaatgttgaatacactgatcgtgggatcgtgggtatgccatatctctgtaatttgatccccaagttatagggatttcattgatgactcacagtgcgaaagctgaattcgctaagtgttggttgctttgcgcagattactgattgctttgctctgggcatgctagcgaggcatctcgctcggattgtttcctctgagtagatactccaagtggattccacgtgtcaccattatgcgatgccacgtcagagtgaaaaaattgggataacatttggcccccaa

SEQ ID NO: 281942 - DNA, 765 bp, Cannabis indica
ctcttgtgtcaagttatttatttttctgcaaatattttatattctgcctgttcagttttgctgtagcagaattaccttctactactgcaaatgcttcagtttttatattttcttatatacaactgacattttcaaaaacacggtttttcagaaaactgggacgcaaaccaccacacagggtgtgaatagcacagttcgagaacctagtggccttggtaaaaggaatcatggcccccaagtttttagagtttgaattggacaaagagcgacgctcaccgatctcagactgaatcaaatctttaccaatcccttcaaagtttaagagtccttcttggcatcagtagatcgggaaagaagactcattgttttaagagcttaacaaattctttttccctttttaagtgcctatgcaaataaaatttatattctggccacattaaccttttcacattctttcttgtctccctgcacattctcataaaaacaagaaaaacaaataaagttttatatatttaaaataaaagaaaatagttttcttaaaataatacaaaaaaatttaaccacttaaagctagctcaagtagccataaaaaggtacgtgtgtgttggaggtcctgaattcgagtttcaagttatgtattgttgtaatatataaacgcttaaattaaataaaaaaaaaaaaagcaacacaaaaagttaaaagtattacgtcaataaaagagctgaaactataaatcaaaatagaggctataataggaatgttaac

SEQ ID NO: 281943 - DNA, 746 bp, Cannabis indica
tcgtgatgtagggtattgttgtggccctgcatgagtccaagcgcagcacgcagattttgcaattcagttgcatctccgatggttgtctgggcgctgatgcctggtggaacaatcatgttatgaacatcctggctgtgtgcggaaccgttatttccggtctcttgcacaccaggcgcagtttcagtaacaggagttgttccatcattcgccacgcttccagtctgtccaggattgacagcgggtggaaccgtcgaactcccttggtcctggaacatcgaatccagcgtctgtgagtttgctgggtctgataggcctttgcgagtttgcaccatcgtgtcgaaagagcgatctgtgattcttctctcaatgaaagcaccaaaatgttgacttcgcttttagccaacgacaatgagtcttttaataagcgataaacgatatgtcgtaataagaataagtaataaagcaaataataataagaagacacagaaattttatagaggttcagccccgagcagttcggtaatagcctaatcctcgttagttgtattgacttaagaataaggaagaagattccttttcttatagctcttacaataatatctctgaatatataattcttagatagccttagcttataccgtttcggcgtatgatctctctttttcccccctgcccagtgaacattctgttggaaattatttacctaggatctatttactatcatgtatgttggattaacaacctaa

SEQ ID NO: 281944 - DNA, 490 bp, Cannabis indica
tttgtttgtctgtgcttccataagcgatgcagtcactccacacctcttgagttactccctcaggaggtgacatgtcggccctctcctgtccaagctcctcaatgttttgtatccactttttcttgcagtctgccctccattcacgtaaaccctttgacatctcgtactcaccgtagtctacgaatgtagggttatctcgtgggaggacaaacttggtttgcaaaaagttacaaattaatacattaattacaatttaataagagtatagtaatttagaaattaaaaaaattattaagacatacctcaagtctatcccagagtgcattgatgtcagctctactgacatcttcccatttgaatttattaatggggatagacatccgagtcatccatttggccatattgttgaatttttttccgtttttgccgacgggggtgccagtctctgcgtgcacctcaatcggtaacttggcagattgtgttttggaga

SEQ ID NO: 281945 - DNA, 635 bp, Cannabis indica
actaagctcccaactccgtcagatgccaaggtgcaaccgtcaggtgctaaggtgtaaagggctcctcagctgtcaaattatctcaaggacctgatgggcacgaaccgacccaattagctcccctcaggtacccatgaccatccgggtccgctaaatacgagggacgcgtgctgttagagctgctctgaaaatatagtcaaaaagtgataagtgaagagatatttattttttaaataattattttattattattttgtatcttgaacctaaccgaactatagttacgggagggcatacctatgtttaagggattttaaatcctagatgaatatctatataaggggggtgaaatcacttgtaaagggaccctgaaattgatactcacgagatcatactcttgagctccctctctcaaattctaaaaactcacttgaggagtgaactcttggagaacataactctggagaactcacctcaagcattgagatcaataacactccaagtggactagcctattaccgctgaaagggggtgaaccactataaaattcttgtgttcgtttatggtgaatttctttttgcaaaccggtttactttgattaactattgcttgtgttcatcttgctcgttttacga

SEQ ID NO: 281946 - DNA, 466 bp, Cannabis indica
tttatttgtgttgggtttaaattatgcatttttaattctgtatatgtatatgaaaaagattattattggtaaaaaaatttattcatttgtaaattttaagttttagcatgataattagaaatatataaatagataataaaaataaaaaaaagaaaaaaaaaatagaatatagtgacacatcatgtgtgtggctgttaccttttcagtctgaaaaaacctgactctatacgcctatagtgacgcgcaaaaaatgaatgtaaaaggatttagggacacgtgtgaagtgcactaaaatctgtctttcaagttaccctcattagtaacacgcgttgaagtgtcaatatatagttttagagttactcaatgtgtatcactaaaacccaatttgctagtagtggttatttgtgctttttatgaaacttcgaaagatgcttatattagaaagaataacttgatttttgtatat

SEQ ID NO: 281947 - DNA, 549 bp, Cannabis indica
attaatgacatgcatataacagtagaaagctattaatcactaaaaaaaaattaccttttcacatttgatgatgtctacttgtttggccagaatttaaaaagtttctagtttcttctaaaagaaaacaaaactaagttaacataacaataaagatttatgttatacatgaaaataataattcttgcatggagagtttttcttttaccttgtacatggtacgcattattagggaaaatgaaatgttgtaagtttctaaagaacattctacagtgataagtttcttcttctcaaagcaaatgaaaaagtttcaaagtaaatgaaaaagtcaaaaagttaataactatatatacccagagtattattattgttattattataaaattttacttttattaaatatatatatgtggaataaagttgtacacttctttcaaaaaaaaaaaaaagaaaaaaaaaaatgtacacgtaagctcgggtaaaatttcaatctaggtggctcgggctatatagctttattctaatgacaattgccaacacaagaatttcagc

SEQ ID NO: 281948 - DNA, 1030 bp, Cannabis indica
aacattcaagagtagtatgaccaatgtccttgtggtacttacagaattttttaggatccctccggtcgcgatttcccctgatggggggcggcttcttgaagaccccgttcctttcctcaatcgcatagatatggtctcgaggtacggcaagttcagtatagttgacgaagcgaggtcctcccttccttttcggcgaggactccttctttgggggtgacttagccaacttcgggcttcgctgtctgcgcgggctacgtcttctcgggcttcggcccctggaattcttccctcgcggactgcgagagcgtgaccgcggtatgggtgatcgtcgtttgtccttccccttctctaactctgctagagagttctcgattctcttgtgaggttcggccatggcgaagaactctactaaggactccggccttcgagcttgtagttccttccagaagtcggtccttggcaagatacctgtaatcaacatacaaacaagcgaagactcgggggccttctcgacctttgttacttctgcgttaaaacgcttgaaatagtcttgtaaagactcaccaggttcttgtttgatgttggccaaagtcgtatagggtggcctatacgtcattgtggcctggaaatgtgtgaggaataagtcgacgaagttttcccacgtcgatatcgatgcctcaggtaattgggtgaaccaatcatgagcattttcctcgagtgttgccgcaagaatgcggcacttcgcaagttgcggtacctggtccacttccattatagtattgaacttttctaagtaatctaacgggttagaagtacctttatatttgagggattcggataaacgaaacccttttggaagttgggcctgtcgcacctctgcagtaaaaggcgaagtgccatgcagcttgtatataggcttgcgctgctgctcgagcatcttcaaagcttgcagaagcatgctttggtcaattcctcctgtcgcaggggctggagtcgctgcgactgcggggctcgcaaccactgcggcaag

SEQ ID NO: 281949 - DNA, 526 bp, Cannabis indica
taaattctctagcttattaatttttccttacagggctatagatttggaattacactctcaattatataaaacgctctatatgttccatgatatagatacactatgagatatctatttgttattatcctaataattaatgatcctctatagatgatctacattgagcagggacaaatttaccgttacacccttcaatgtattttatccttaaaacacttagttacctataaatgatattccaatgaactaatataatcactgaaatgagtactcaacaatttatctctgttaagccaagcttgaaggaaatcatcatttgataactatatccgaatagaagctatagatttcgtatttatgatttgcgctcccactcaattaaactaccatgtccttaacctatatgtcacgagaagaactatttggtcgactttaacgaacatatttaagaacacaaataattcaactgaactataacctaaccatctcaagattaagatcacttgatctaagatcaactaggtga

SEQ ID NO: 281950 - DNA, 514 bp, Cannabis indica
ttatctaatataactagtttctgcaatgcaattttagttttttgttttgttttgttttttttttttttttaagtaaaactagtttttatattttaatttatcttttgattgttttaggttgcattggtaactggttttcctatttagttattacttttgttgttttatataactgcctctaatattttagtttttgattcggttggtttaaataagtggtttctcaattatagttttaactagctgattattgtaactggtttcagtgtatcaaattccaacgtctaacaccgatgacaactccaatttctaacaatggtgactttccagttatgaagacaacttcaacaaattttttaacaataatctgacaatgataacaacttcagcgaatattctcattttattttctactctttttgcggctaatattttattctagtggataatgactattttggataatgtactgagttgatgattaaatcttggagcttttgagaagtttttaact

SEQ ID NO: 281951 - DNA, 702 bp, Cannabis indica
ggtgagaaaaaaaaaaaagagaaaagctctaaataaggatgaaatagattctcaactaatttctttctacgtggtagaagggactagagaagaagtaataaggaaaattcctttaatacttcttattgaggatgatcctaagacttttctagaagccatgcaatctagagatagtgcattttggagagaagcagttgatgatgagatggactcaattctctccaatgacacctatgatgttgtggatcttccgcaaggatgcaaagcaattgggtgtaagtggatatttagaaagaaatatcacactgatggctctatacaaacctttaaagctaggttagtagctaaaggttttaggcaaaaggagggtattgattattttgatacttatgctcatgttgctagaacaactaccataagggtgttgtttgcattggcttcattacacaacttgtatgttcaccaaatggatgtaaaaacggcattcctaaatggtgaccttgatgaggaggtctatatggaacaacccgaggggttgtcctaccaaacaatgaacataaagtgtgtaagttgaagaaatccttatatggattaaagcaatctctgaaacaatggcatgtcaagtttgacaatgctattcatggctttaggcataacaatggagacaagtgattgtattaaaaaacttgtaaaaattatgtg

SEQ ID NO: 281952 - DNA, 554 bp, Cannabis indica
ctcaattatatagaacgctctacgtgttctacgatatagatacgctgtgagattatccatttgttataatcctaataatcaataatcctctatagatgatctacattgagtaggaacaaatttactgttatacccttcaatgtattttatctttaaaacacttagctacctataaatgatattctagtgaactaatatattcattgaaatgagtactcaaccatttatctctgttaagccaagcttgaaggaaattatcgttttacttctatgttcagatagaagctatagatttcgtatctatgattatagctcccactcaattaaactaccatagtatttacctatatgtcacgaaaagaaccatttggtcgactttaacgaacagatttaagaacacaaataatgcaactgaactagaacctaaccatctcaagattgagatcacttgatctaagatcaactaggtgatattgaattgaatagatattacggtaaatgattcaagttcaatatcggtcccttctgatgcatactccatacatccaacccaa

SEQ ID NO: 281953 - DNA, 1228 bp, Cannabis indica
  modified_base (139)..(139): a, c, t, g, unknown or other
gcttagacccattacctgagactgctcgacacgttggtggaagagatcgatgacgaaattgacctggttctcgcggtccaatatatcggcgttggcaatcgaaccaagctccgaaacgttttcgtcgtcgtctaagcanccgtacgttgatgttggattcgtgctgggatagaacctcgtcttcgtggacagtgatatgtgcatggatagagttatcggacggtgggaattcgggatcggaagcatagaggtcgaagtcgtatggggtccagtaggggaaggagtcaaggactaggctttggtcagggtggctgggatcgtcttctagttcgtgaagacgaaggtaggtgacctccgccattgatggaatctgttgagctttacgtggtttcaggttgtaagaaacttttggtttaggtttataaggagattattagattgtgaatttacaaaattgtctttttcttttttctttttttctttcttttttttttcttttctatttgtagattgggagcttagacattttgtagtggtttttgttttgcgaaattatactaatgccctaaattatagtagtatgttagtatatgtacttatttttaaaaattataacaaatgagcttaaatctatatttttttttaaagaaagagcctaaatcatgtgattatgttagtaaatgctctcatttcaaaacttgtacagaaataactctttaaaactatttattatttatattgcttttttcacataaaaaaattaatgattttttttattatttttttagaattagaagcaaattatttaaagattatggtatatctatattagttttgttaaatttttttttatttaaaagttatgtcgatttttttaatttttatgagttgttgtgggttgttggtatatatattttgttgtacagtatatttttattttgttgtatggtattattcttaaatgatatttattttttattttgatatgtataatagtggtatataattttgttagcataataaaaatatttttgttgacctcgcttttagccaacgccagtgagtcttatttagtaagcgataagtaatttatagcgatagatatatagtaaagcaatgtaaagacacaagaattttatagaggttcagccccgaacagtttggtaatagtctagtcctcgttatttgtattgactcgagaacaaggagaaaggttccttttcttata

SEQ ID NO: 281954 - DNA, 631 bp, Cannabis indica
aagatcttttagcaattaattttttaaaacttatataattgaaatatttgtagcaaagtttcttataatttaaaattattatacacataaccttaaataataaaaaatagttagaatgacctctaattagaggtaattttacactcaatcttattttcaataattttaagtgtcaaataagtgtgtcagtccaagactggttcaaattatttattttttttaaaaaaatatgaaaaactaaataaaaaaatagtttaaaatgtaataacaattataaattaaagattagttgactatttttgttcccccttgaaatcatcttcatcaatctagagattgtaaaaaaaaaaattaccaaagtagattattaattaattgagattgttgcttctttttcacaaatgagcataatagtagaaaaatagctaagaaaatcacttaaaaccaaagagaaatctaactgtagctagtggattggaaaaatgaatttgtagcagagatgtaggagattgcatcaaagtagaaaattcatataaagttagctaatagatttttttttttttttttttttgataaggaggaagataggtaagcggttgttgacaaaaaaataattagatttccttttcag

SEQ ID NO: 281955 - DNA, 571 bp, Cannabis indica
tcccaattccagtaatggcacaggctctgttgtcaccaagctttacagagcctgcccttatatcttgatagtcatgaaatttgcttctgtctgggcatacatgaaaagaacagcctgaatctagaatccattctagatcagactgacctttcgagacaacaagtaccccagcactctcataaccatcactatctgaacattcagacacaatgtctgcatttccattcttgctttggttataattcttgagaactggacagtcctttttcaggtgagttgtttgattgcagatgtaacatctccttttattctttgagtttgtctttcccttattcgattccttctttccactgttctccttcttgaaagattttcctcggaccatcaatccatctcctgagccttcatcttgaagctcagctctcttcttgatctccttagacatcagtgcattctgcacttcttccaatgttaaggaatccctgccatacatcatggtgtccacgaaatgttcatatctttctgtgggcaaagagtttaggacaatgattgcttggtcctcatcctcaat

SEQ ID NO: 281956 - DNA, 525 bp, Cannabis indica
agatggttgccaaggtgagatccttagaggaaactcaccaggcgaacttagagtccaaggccgctctagctgcggagctgaaggagctcagggacttcaaggagcaatccatcaagaaggcaaaaagagccgagctcctttctcctgtttcctgcgcccggtgtccgaagcgcttcgatgatggggtctacatggcttggtctaccaacgaccaaaatatcaagcttaccttctatcccaaacccgaggaaatgattgccaaattccgggagaagaagaagaagcttgatgccatggtagaggcacgtatcggacctcgccttcctccgcgcattgactgagctgctttatgattgacccagtataaccaagattccacccgcttcttttattattctctttttttttgtacatatttgctgctgccttggaacaatatatataggtagcagtttttattcgaaggggagacaatattttttaaggcctatccccgggccatttgtatgtatatgacctgccctt

SEQ ID NO: 281957 - DNA, 514 bp, Cannabis indica
tcaccccccctcttggaaacatatcttgggctaacatgtctcactaatcgttatccatgtcctccgagctcttacacttagttagtataatgtatattatacgcttagtgttctagcagcctacatgtctcgtcaacacctttccacacattgtgaggttgatggctcgctatgtattattgatgtcatctttatggttacgtacgcggaatggtttctcgttaatacacgaatcaatagtttgtacatccttgactcgctagagactatgcagtttgtgagttataaatatatcctattgactgcacatttaatgagttattccatttaatatcttttaatataattttcattatatttgttgattcgtattcctcaaggttgacacgtgtcatcctctgaagtaccagccaaatttcaggtataacaattaccccttaaaaggttattttcagtgaaaagtgctttttaaatgattaccaaggatatttttgtcataatccattttaaaaaa

SEQ ID NO: 281958 - DNA, 855 bp, Cannabis indica
acgacttttttggcgccctcggcaactccgacaactttttcggcaccggctactactctgatgattttttcagtgccgatagcaaactccggtgacttttttggcacgagtgagaactccgacgatcagtgtagtttcatttatattattttcttcaaaaaaaaataatataaatgaattttaatatttttatggtaattcaatctcatttatattaagtttttatttttataaatcttaaattcagattttccttttaatgttttttatatgcttttttatttatttaaaaaaattatatttttaatttgattggttaaataatgccatatttatcataactttaataatgttttttttaatattattgaaaatagccctaaataaattttgtttgtttgtttttggcaaaaatataaacataatattttataagcacattcgccactacaaatatattcctaaaaataattataccagtgatcccttctattactttatttattttttaaacaaaaataaagcaaacatatgttataagtcatttagtttgttatattttatttgaacattgtagaaaatgattcttattaaactataattttatatttcttaaaagaaaaaattgtcgtaaaaaaaaaaaaaaaagtacaaatagcttatataacatgttcagaggttagaaagaactatagcattttcatatagatgcatatagaatgtagtagtaggctaactttgaattgtactccacattagctatgagagaaaatcttttaaatattattatatatctatatgtttagaggaaattacactctatacttttttttatattgtcgtcttttattttta

SEQ ID NO: 281959 - DNA, 466 bp, Cannabis indica
tttcggagacaattgggaaggaccatacctcatcgctgagaagattggtaacacaacatatcgacttgcagaactcgatggtactgcaatccaaagagcctggaatggccaaagtttgaagttttattatcaatagtactcgcagtgtatcatatgtactcgttatatatttatacttagtcaatttatctataaatgttctatctcttgaggataatgaacccttctcatgtcctctatctcttgaggatatgtgggacactattccttagatagacggataccaaatctagaaggcatttgtgtccctttggcattggtcattgagaatctctctaaaaccttatcaatgtaagttgtttgagagagagcaagcgatctgttcttctggtttctgatgatctgaatccaagaacataaccagcttcacccaactcttcatttcgaattgagtgtcaagtcattc

SEQ ID NO: 281960 - DNA, 1045 bp, Cannabis indica
ccacgacaatcgcgcctcaaaccctgataaggggatgtgcgcctggtcgggggctcacggccagcaaggggcgctgatgcccttgcataagtacttccgcgatgtggcggacttcttcagcctctgcccaacccagattactcctaagggcattaagtatttgtttgctctcttcgtcctctacgcttcccagggatagggcgctccttcaccccacgaagtcgcttggttcttcgacctgaagtctaaccccaagcaaggcaggtcggggtatttttacttctctcagccaggcttcaagtggttgagcgggacgaaccataaggccatcagcaaaataggacattttattgatgagtacttcatggtgatggatccaaacatcacccggactcggtttcagcagattccgacatatcaccgtcctcccctcacccttactcttagggatagggctcaaaaacttgcacggttgccggcagaagacagggatatcatccagttgacctccgatgcaaatctggtgcagtacaggctttacccagaggacttttcttctaagtccgtgacggggaagaaggggaaatctgctgctgctcggcctgaacgagctcataaggagaatgagctgattcaacttaagcgagaggctaagttgaagggaggtgctcgggcaaagcagtatgctcaggagtctatgaatcctgaagatgaggctgaggctgaggctgaggctgagcaggtgactcctttgaggaggaagaagaaactcccggccacgcccaggcccgttgaacatgccattcgcataagggagcccatttcacctgttcggccatcccatccttatgctggaaaagggaaggccgttatggctgagataaagtcgatgtcaggtgatgatggacttctgactttctgggcgggcagtcactctgcgctttacttctttttcagcttcttgactttcatactttgtattttttgttgggtttttgctaaccacgctgtttttgctctgtgcagacatgtctcggcagatgat

SEQ ID NO: 281961 - DNA, 664 bp, Cannabis indica
aaatctcactataacacatgcccctagtttcgcgacgtgacaggtgcggtcacaagggaaactacattcgagagacaggtgaaaggttgtcacaaggaggtgacctttggttgtcccttcgagggtttcaaaaaatgacggctataatcattacttttattgcatttatggtgccacgtcacaaaactcttcggtttctgtgtaggcgtggccatctctggccgttggattgggcgactctaggcattccaactgccacgtgtcatgatcccaatgaatgagggatttgggtatttaaaccccctgattcgaaccaaaaatccccattttccctcattttccttcaactcccttaacttctttgttccttcactctcaaagaaaacactaagaaaaatcttcgtaaattgcccagattttcgcctttattcgtggattcttcttgattctacattgatgtcaagggcgattttttggaagcagatttatcaaagtaaaaggttagttttcaaatcttcaccatgcttcgttttctgtttgaatggggattatattttctgggtttttagtgtgcatgagggttgtttaaggatgaatgtttatagatgatatgcatgaggctatgttttttaggtaaaaacgggtaatttcatagaatatgacc

SEQ ID NO: 281962 - DNA, 507 bp, Cannabis indica
attcattccgtgggtgtaagggcccaatggagggttgaagcggggacgttacaatgactctgatttcgctcctccattatcgaaacgtgggtgagctcctccaaagaagaaatcaaaggtggctgcccatgaaaaaattcctcaagatgatgctcaaaaaaataatcaagatggagttggtcttcggtataaggtttgattttagtttctttttggtttcgcccctatttgaaatttgtttgtatttgccatttgtgtgtcttgtgtttttcgcttgtactattctaggtttttcaatttagcatttcgtttagttttgtttggttttttagggcttctatttttttagtttaatttatttgttctttttatgggtttttcattttcgtttgtttagtcttaatttctgtttcattttgttgctttttttttgttgttgtttttttttctttcctgtttttgctttttccagatattttattgtttttcattttagtttcttcattt

SEQ ID NO: 281963 - DNA, 597 bp, Cannabis indica
gtgaggctttgaacctcctttggcttggttggcgatggcatttcgaccaatgccctgatcttcgcaggattggcttctattcctcgctgattaaccatgaatcgaaggaatttcctagagctaactccaaagacacatttcagagggtttaaccgcatcttataccatcgtaatatatcaaacatggtctgtaagtgggcaatatgatccttcgcatgttgagattttacgagcatatcgtcaacatatacctccatggtttttccaatgagatctgcgaacatcatgttcactagcctttgataagtcacacctgcgtttattaaaccaaaaggcattactttgtaacactatagtccccaatcagtaatgaacgaggtatgctcctggtctggttcatacatcgggatttgattatatcccgagtatgcgtccatgaaactcaagagttcgtgacctacagtggcatcaacaagctggtcaatgctaggaagggaaagctgtctttgggacaggctttgtttagatctgtaaattcaacacatgtgcgccatgagccattaggcttaggcacgagtatggggttcgctaaccagt

SEQ ID NO: 281964 - DNA, 552 bp, Cannabis indica
ctgcgtttattaaaccaaaaggcattactttgtaacactatagtccccaatcagtaatgaacgaggtatgctcctggtctggttcatacatcgggatttgattatatcccgagtatgcgtccatgaaactcaagagttcgtgacctacagtggcatcaacaagctggtcaatgctaggaaggggaaagctgtctttgggacaggctttgtttagatctgtaaagtcaacacatgtgcgccatgagccattaggcttaggcacgagtacggggttcgctaaccagttggggtaaaatgactcccgtataaagccgcaggcaaggaggcggtcgacttcttcttttagcgcttggtacctcgcggggtccattttgcagcacttttgtcggacacctcgcacctcggggtcaatgttcaagcgatgacacatgacttgcggagatatcccgaccatatctgagtgtttccaagcaaaaacatcaagattttgctttaaaaaggtcgttaattgttctcgcagctgaaaatttaatttagaaccaatttttaaaa

SEQ ID NO: 281965 - DNA, 357 bp, Cannabis indica
atctagacacaaactactggtcttttccagcttccgttacctgaatcccgagtcaagaattaggatcactgtcacgggtctcggtctgctttttgttcaggtcccaggtcccatttctgagtttgggttcggtatcgagactggggtgcggttctaggtctcgaccctatatctgtttccatagtctggttccttatttgggtctgagttaaggttcgggttcaggtcccgagtcctagtttgggttgggatacgggtccgactcccaattcgggtctatgtctgatttaaagtccggatcctggtcccggtacagttccggatcaaggtccaatttcagttatgattttttagtcc

SEQ ID NO: 281966 - DNA, 750 bp, Cannabis indica
aaaccctgattcataactatcacacggtctatccaatttactaaagattctggctgccacataagaatgtgtggccccagaatcaaacaatactgagtaaaatgagttattaactgagagctgacctgtcaccactgaagggctggcttctgcatcagcctgcgtaatggcgaacaccctagctggagtgggtctcgccggagcccttggtgcctctgatctgagctggggacaatccctcttgtagtgtccgggcatgccacactgaaagcatccctgacctctgcactcacccagatggtgccttttacaactagggcactctgggtaggaaaaacgggtctcagcactaccctgacgaccgcctcgattctggttcccccggaacctcttgttctgccccgagccaccggatgcagtggatgttttcctcttctggtccatggccgaaccactacctcccctgctgaagcctgatgcaggaggggtaggagccccgccactcactggagtcctaactgactccgacatacatccaactgcgccctcagctcgcagtgctttttccaccatctcagcataggtggtcttgtcgtctgtagtgatcataaggtcatgcttgatcttcacattaagtccatcaagatatttttccttcttactgaaatcggttggcacaattcccgaggccaacctcgccaaccgatcaaactggagttgtgtactctgtcacactcatattctccttct

SEQ ID NO: 281967 - DNA, 514 bp, Cannabis indica
gacaaggaccgtgacctggacccagacccggacccagacctagcctcagacccaaactgagacttgaactcgggcccagacaaggtcgtgtacccagaccgaaactgagaccccgacttggacctaaatctgggacccgatccccaacacagagttggacatagatagggatccagatacgaacttggactcggactctaacccgaactcaaacccacacctagaattagacgcaaagctagacctggacccagacaaaaactcgaacccagaccaggatcagaaccaaggacttagacccagaactgaatccaaactcagatcgggattggaacttggggctcggacccaacctacaccaagacccaagatgcgaacccacacccggagcttgatctggacttagtctgaaatccagacctgaacccaaactcagaccaggactcgcacactgacccgaactgaaacccaaactcgaagttagaatcgcaaatggaactagaaccgaactagg

SEQ ID NO: 281968 - DNA, 266 bp, Cannabis indica
cctgtgtgagcctatgtgttttgtccaagccctgggtccagatctggatcccaatctcgggtctcagtctggttccatttctggtgccgggtcacgagctgggtcctaggttcaagttaaggtctgggttgggtactacgtcccggtccaagttctaatacccagggccctatcaagattatgggtctaggtcccggttattatttgggtttaggtcccggtctaggtttgggttcgtgtcctagtctcggttcgggtttaggtct

SEQ ID NO: 281969 - DNA, 678 bp, Cannabis indica
ggaaaagagttatgatggcccgagccaagctaagccagagaatgaagaagatgaacatccagcaccaacaacaacaaagaagaagactactgacagtcttcaacaaaaagaaactccaccacccatcagcattgaccatcacatcaaaattccttatcctcaaagacttcagaagaataagatagataagcagttttcaaaattccttgaaatattcaagaaactgcatatcaacatcccattcatagaggctttggaacagatgccaacttatctaaagttcatgaaagatatcctatctaagaaaagaaagttggaagaatttgagatggtggcacttactgaagagtgcagtgcggtcctgcaaaagaaactaccacccaagctaaaagatccgggtagtttcaacatcccatgctcaatagggggttctatacaaacaaaagctttatgtgatctgggagccagtatcaacttaatgcccctatcaatgttcaaaagattaaaattaggggaagccaaacccacaacagttactttacaaatggcagatcggtctttgactcatcctcggggtataattgaagatgtcttggtaaaggttggtaagttcatcttccctgctgatttcttaatacttgacatggaagaagatgagaatattcctatcatcttggg

SEQ ID NO: 281970 - DNA, 779 bp, Cannabis indica
ctactatatgttgatgatatactgatctttagcaaagaaaagtcagagattgacaagctgaaaaggaaactcagtgatgagtttgagatgaaagatctgggcaaagcaaagagaattcttgggatagacataaagagacctagacctggcatgatagtactttctcaagctgcctacctgaagaaagtattgaacaagtttggcatggacaagtgcaaacctgttgcaacaccacttgctcaacacttcaagttgtctgcatctcagtcaccaaaaacagatgcagaaagagccaagatgagcaatgttccctatgcaagttgtgttgggagtctcatgtactccatggtgtgttcaagacctgacttagctcatgccatgagtgtggtaagtaggtacatttcagacccaggccctgaacattgggaagcactgaaatggacaatgaggtacctgaagggtactctggacactggtattgtgttcagtaaggagaaccagtacaaggaagaaatcactggttttgtggactcagattttgcagcaaacctagacactagaaggagcctaacagggtttgtgttcactgctcttgggggctgcattagctggaaatctaacctacagaaagtagtagccttgtcatctacagaagctgaatacatggctgctacagaagccatcatggaggctatatggctttaaggggttgacagaggagttaggtttcaaatctgaggatatcacagtttaatgtgacaatcaaagtgctttacatc

SEQ ID NO: 281971 - DNA, 539 bp, Cannabis indica
aaaagaagtgtttaaacaactggagtcccaggctcttggttcggttcttctgggccaactggagtaagaggatctgttgtttgaacaggaggagcatcagcagcctgacgggaggttgaaacacccgcctcggttccaccataagccacttgggccgcggagtactcaaggtacatgtccttagcgtcgcccaagtagtcgaagtcggcccggggattagccttccaaaaatcaaagaagaactcgagatcggctgtctccaagtcattgaccttctccttcaacctatccacctcggtcgaaagctccccctccttggcatccttctcctccttcatttgatgaagaactgctcgcagagaagtcctctcatcttgaagactgtttacctcagcagataaaatctcgttggtctcctcaaaacggtcagcaacctcgagatccttaatcaacacggtgattttcttctcagcgacaaatagcttcttgttggcttcgcccaactctaaccgaacagctccagcttccgccctggcttc

SEQ ID NO: 281972 - DNA, 736 bp, Cannabis indica
acatttcgaaagcccgcaccaatgaaaaatgagagaaataagcgagatcaaaacaagtattgttggttccataaagatataggtcacactacaaaagagtgtcttcagtcgaatgaagagattgaaggactaatttcccgaggttacttcagacaataagaaacagaggaaatgaacataactaacccaacaaccagaatctaaaccataatgtacaaccttccctagttgaaggtgaggacattttggttatttttggagggccccatcttttgggaccaacaataacgtgcagaaaagatacataaactaagtgaagaaccaagaatcagtttttgcacctgaactactaaaatgtgcaaaaaccgaggaaccttgaatagtctttattgaggaggacacatcccatgttatgtttccccacatagaccttatggtcactacattctaactcgcgaataagaggataataatggtacttatggataacgaaagcccagtaaacattctctataaagaaatattaagaaagatgggcctaaagaatgtaagattgaagtcatgcatggtaaatctttatggattcatgggagacaaagtctcaagcttaggaactattgagcttccgctcactatgggagagtcactgctgtcagtaacctaaatgcaagagttcctcgtggtagacataccatcagtttataacatgttgatgggtatgttgggttttatgccc

SEQ ID NO: 281973 - DNA, 669 bp, Cannabis indica
aaccttaaatttgattgaaaaaaaaaaagaattcaaaccatataaagaccatttccaatgaactctaaaatgatttagcattaggccaattcggcacagctgtgctgtgagaaaaaacagttgtagctgtgctgtgagaaaaagctgctgagtgtttggtaaatataattttaaaatagctgtgagttggaaaaattgtatataagtatttggtaagctagatgattgaatagctgttaaatatacaattaccaaaataagtatgatatttgttatctaatttatttaaataaattcatacatattaatatatttataattattttttattttattacaaattacaataattttttttcttataatatttattttttaaaaatatatataataaaataattagttagacttgtactaataataataataaaaaaattacataaatattatctattacataaagatatagagaaagatatattggggagaagagaatcttaaaataaaatggtaaaaaagaaattttataattagaatgagggtaattttgtcaagtgaaatattcattaaaccaataaaatagcttccctacaagctaattccccaaagttggtattggtcaacttttgtaaaaagctgaaatttttcttaaattcttaaaaaagctag

SEQ ID NO: 281974 - DNA, 373 bp, Cannabis indica
tgattattatcagctttgttgcccgatggtggtctaatgagaactcttaaagctgataaagtttttgctttagatagagcaacatataattgtcgatgggagaaaacaggctctcgtaagaatacaccaactaaatctaacgtttgtccttgaactttgttaatagtcatagcaaaacttaatctaatgggaaactgagtgcgtttaaatgggaatatatttttttcattttccaatggagtaaaaggtattctgggtaaaaaaaattctctttccacaatgatcaccagtaactatttcagcatcaataatattagagccaaattgtcgacatattagacgtgttccattacataatgttggaaattatttt

SEQ ID NO: 281975 - DNA, 509 bp, Cannabis indica
atggcaataccctaaatatctcaaaaatgggaaaaactagggttccaaaaactccctcaactggcagaccggttcccaaccgaaagtccggttctgggtcaccaaccggtcgatcggttgctataggtcccccagaaccggaattctggttctgtgccgggaacccaaaaaattctcccctaacctcaaaatccaaccaaactctaccaaaatttccaatatgcctgtacaatgcataaacaacaattaccaaccagaatttcacagaataaaccaaagaaactcaacttgccattaaagaccaaagttaaggtttttatgctcaaattaacacaaaacctaaaccaaccaaccaaaccagctgctataacccttaatcaactcaaactaagcctagaattcgatccctaagcatctcaaaccataacatccactaatatacaaaatcacaagttcaaactaaggtaaaagcttaaaaacatgaaaccaatggtctagggttacctttg

SEQ ID NO: 281976 - DNA, 732 bp, Cannabis indica
tcagtcatatacacaagtcatatacacattatacactcaacattacaactcttcaattgactatagggaattcaaattccctctctcttttctctatagtctacatgcatatatacatttgtatatagagtatatacaacttagagtcaccatacctctctagtcagataatagtcaaataagtgaggttttaagagttataatatctatctatttatatatctacataatgctgttgttagagtatgtgacacggcgctttaacttttcaaaaaactaatttctttattttcttattaacatctaatctaatcatttagaataataaattacattagtgattaatatatacacttatttttaaatacattacgcatctaaaatttatcaatatatatgaaattacattaataataccactatcatatttatcatactaatataagtgagagtgagagaattcatgactacaagtctacaatgatacaaaaaagcaaaaaaaatgttagaactattctatgatcatgtgagattagaattattatatgaatatatttattattacaatattctatggtattgtgaggttagttatagtaactttggagttttgctagttaatttacttgaatttgttagatagtattatttctttttataaaataattttactcagtattatttttgttttataatttagaattgttctacaaaatttatagaaatttttac

SEQ ID NO: 281977 - DNA, 176 bp, Cannabis indica
ataaataatttcataattaaacataaacagctgctaatttccaaattaactaatcgggctttacaaggccgctatgcaagaattttaccatttattttttcattattttaatgccatataattctaacctaaacctagatggcttactataaatagatagtgatggcttaggaaat

SEQ ID NO: 281978 - DNA, 613 bp, Cannabis indica
gtcaatgatctcactcccacacattctctacttgcttcataaagtgcaagtatactagcatgatttaaagttgtctcattaaaaaccttgtcagaaaaattcagtgggacaaaacctgagctaaggaaaaaatagttcaatatatatttcatattcattaaaaacattgtcaggaaaatccagtgggataaaaacttgaactaagagaaaaagagtgtaacataaatatttctcccgctcatgcacatacaatgtacaattattttggtgataatatacctcataagattattgttatcaaattagcaattttttccccgaactttgacatataccaaatcatgccccctgaacttttttagccgttaaaaagtccccatgaactattgagattgttagatttaaagacttttgtctaatttcattcaattttactgtttcagtgattgtttatgtactaaaccatgctccccaaattttgatatctaccaaatcacgcccctcaaactttgatatgcactaaatcatgtcccttgaactttcatccatgttagaaattttttttactaaaattagataaagtccttaaatctaacaatcttaatagttcatg

SEQ ID NO: 281979 - DNA, 672 bp, Cannabis indica
gcatccttggaatgctgaccaccccatcaatatgcgagtagagatgcgaataagtcacgcatcctgggccaagcgatatacctccagaaacggctgggagaaactcagtgactcaaggggcatgccttctcaagcatgaccctgaagttactgagttactcccaccgttccgagaatatctatcagccaaggagtacgctcatttgaatattaacccatgtcgcaaatggctgggtgtatcacagtatctcaaggggcatataaccgcgtatatgaccattagaatactgtgacacacccaccatttggaaaatcgattaatactctcgcgactcaattcacagcatataaaatcctaaaagatctagccaataatcagaagtaaataagttttgtcaatgtgcgagtattcaaagtgttcgtccgaatacccgcgagtattcaaagcatgaaacagtgcctattcaagtatttcttatacagtatgcggttattccaatttacaggtcatttttcatgagattacccagttttttacctaaaaaacgtaacctcatacataccccttacaagcatacattcctaaaaagcctcaaaacaccaaaacccagaaaaaaagcattttctctccaaacagaaaacaaaaatacaatgaaactcgaaactaacctt

SEQ ID NO: 281980 - DNA, 586 bp, Cannabis indica
ccacccacccctcctcccgtcagtcttcctctactctccgtcgaatatgtcggaccaccaccacctcccgtcagtgtccctctcatctccgtctcatatgtcggaccaccaccacctcacatccatttccctatctctctttctctctctccgagctcggtataaatacatttatttatatacttatttatttattatatatatattattattctataaattaaatgtgttttaaaattagttgttatagtaaaaaaaaaattattttttttattttaatttaggtaaaattataaaactaatgcaggaaaaatacagatttttctgccattaaaatctgtatttttttcctcttcttttttttttttttacattcttgacggtttaaaactgtcacctataacaaggtataggagacggttttaaaaaatgccctatactaactgtcgcctatagtatagggcacggttataaaccgtcggaaaacccacattagcgacggttttgaatcgtcgtctattcttcccattttacgaaagtcgtataggcgacgattatagaagccgacggaaatactttaaacaac

SEQ ID NO: 281981 - DNA, 553 bp, Cannabis indica
cagtctgctcggaaatgttataaccttgcagtggcgaaggctaacagggaagtatcctccagccacagcacagacaagggaaaaaacatttccaagtagggaattacccacggcggggatgaagatgtggatcctcaacttcggtacccaagcagcaatgttggacctgtgaaagattagaagagatcgagattgatccagatatcccagccagaaagctaaagatcgaaaaaggtttgttgctcgaagtaaaatcaaaattgataaaatttctaatagcaaacctagatgtttttgcctggtcacaagcggatatggtcggaattgatccttctatcatttcgcacgttctgaatattgatcccaatttccgaccagttcaacaaaagtgaaggctattggacaaagagggagcactagctctaaaagaagaagtagaaaatctacgcaacaacaatttcataattgaagctttctacccagcttgggtcactaatcccgtattggtgcccaagccgaacaagaaatggcgagtgtgtattgatttcacgga

SEQ ID NO: 281982 - DNA, 483 bp, Cannabis indica
ctggtcattcgtagaccaggccatgaagacgccatcatcaaaacgcttggcgcaccggctgcaggagacaggagaaaggagctcatctctttttgccttctttaaggcttggtctttgaagtctttgagctccttcagctccacggccaggttggccctggactccaagtttgcctggtgagtttcctctaaggacctcaccttggcagccatttcatccaaggcttccctggcctcccgaagctctcgcctggccttagcagcggcttcgccctccgccctcagctcctcttggtgcctggcctccagcctatctctccgaagggcctcctcccggatcattgcctccgcttgcgcttccctccgcttggcctcttcctcactggccttggcaagggcctcccgacgctcagcatcctcctgataaagccgcctttcagtagtaaggtcctgaaggatcttcttacagctctataaacttat

SEQ ID NO: 281983 - DNA, 544 bp, Cannabis indica
gtaaaataattccaacagtatacgtggacgacatgctagtcaagtcaaaggcgtgcactagccacgcggacgacctagaagaatgcttcgaagtggtccggagatacggaatgaaactcaacccaaagaagtgcactttcgaggttaagtcagggaagtttcagggcttcacgcgatacccagtgatcgaaaaactagttctttgcctcctgatggcctcgagaaagttgagaccctacttccaagctcacccaatcaaggtattgaccaaccatccgctccggcaagtcgtacaaaagccagaagcgtccggaaggctcctcaaatgggcaatgtagttaagccaatttgacttgcactacattccatgcatttccataaaggggcaggcgctagaaaacttcatcacagagtgcaatgaagctgaagctaccgcaaacatacccacaccatcagtcccagcgtggaaggtatttgtagacggagcctccaacgagaatggatccggagcgggggtgaccatgatatccccgaacggacttcg

SEQ ID NO: 281984 - DNA, 656 bp, Cannabis indica
gctgacacgtaaggcactttgcaacatactcagcgatgtcgtttttcatgcctggccaccagaacatggctttcaggtcttgatacatctttgtcgaccctggatgaattgaataaggagtcgtgtgagactcatccatgatctctatcttgatgttctcatccatgggcacacaaactcaattcccaaatctcaacattcccgtttcatctattgagaagtcactagccttcccagccgaaaccctagctcgagtttttactaattctgaatcttgcacttgtgcttctttgattcgctccaaaagagtagattgcagggtaatattagctaattaccctacaaccaactcaatcttagctcgagtcatctcatttgctagctgctgggagatttgcttcaccgtatttaactgactctgaccctttctacttaaggcatcagcaaccacgttggccttaccagggtgataaaggatctcacaatcataatccttcaccaactctagccaacgcctctgtctcatattcaggtctttctgggtaaagaagtatttcagacttttatgatcagtgtatatctcacatttctcgccataaaggtaatgccgccaaatctttagcgcaaataccactgctgcgagttctagatcgtga

SEQ ID NO: 281985 - DNA, 550 bp, Cannabis indica
ggttcgggtccacttttgggtttggaactgggttcaggtccgagtgagggttcaggtccttgtcagggttcgagtccagggctgggtcccaaatccagacaccgactataggttttgtccaagccttgggtccagatctgaatcccaatcttgggtcctagtctggttccattttttgtgtcgtgtcacgagctgggtcctaggttgaagttcgggtctaggtcgggtactatgtccctgtcatagttctgtttcccaagtgactatcctgattttggatgcaggtccaagttattgtgtgggttttggtcccggtctaagttcaggttcgagtcctagtctcggttttgtggttagatctctgtctgggttttgatctaggttcgggtttgggtttagttccaggtcctggtcctagtcctagttcggtctagttccatttgcgattcttagttggagtttgtgtttgagttcgggtcggagttcgagtcctggtctgagtttgggttcgagttcgggttggagttcgagtcctggtatgagtttgggt

SEQ ID NO: 281986 - DNA, 673 bp, Cannabis indica
cagcgattagagcttcgtactcgacttcgtggttagatgctttgaatgcgaacttgaccgcagcgtgtaggtgttgaacaccaggcgtgatgagggcaattcctggaccagataggttatctgtagccgacccatccacatgtagtttccaggtcagtttgtcttcattgttatttggctgaggtgctggctcggggttgctttctggtatgcttttgttggaaattattttaccaggatcttagatctactcacaagtatgttgattaacaccctaaatatgaacttctaaaacgattatgaaataaacacatataaagtatgagaaaccttacattgggtgcagcggaatataatgactccttccgttcagatatctagcccttgattcctttctgtagcagagcattatcaatatctgaacctggatctctttctctccttctttagtgctgaaactccttcttgttgaatgtctttcttcacgatcttcctcactatgattgaggtatcacttgctgtgtgtgggcactactctaatcactaagtgatttcgaaatttcaaggaagaagaaagagaagaaggtggcggctaggtatagagagagagaagaaggtggcggctagtagagagagaaggctcgggtttttctctgaaggaaataagaaagtt

SEQ ID NO: 281987 - DNA, 647 bp, Cannabis indica
ctcgattccactatttcaatgatcagaagtacaaagatggagattccaagtcacaggtatagtttttcgactggtaatctctttagttttacatataatgtgttttatccctctctctcaaactgtactaacttttctttgttcttgtgcatgtacgagcatcaatctctctttcttcaagtgttcaaaccctggatcttgaagaaattactcaaccgtatagatctgggtgatgatgcaggtatatatagatctagggttctggttttcatttctgcatgtgttagttaggtagttacagaaattagttaggtgtggatttaaccaaatccattctaactaatttctgttaggaattttagaggccgaaggccaacttagggcttttacttgtaattccttttctgtcctttgtattgaagtgtattgagtctaatatcagtgtaagtggaggtttaatccaacaatttccacctaaaccttcactgagctgatattgtagtggtcgagtcaaatctgagggtcatagctctgtgatccaaaggatcacattatccttgatccaaccctattaagtttaaacaatgtttaaacttagatagggtgatcaccttagtccccatgtctgcaggattctcttctgtagg

SEQ ID NO: 281988 - DNA, 602 bp, Cannabis indica
catggttcacatgatttatttcatgattatgttaaatgtataaattctattaagtccagaacatatataaatatgcatatatttgttcatgattatagtgtcgtcagaacagtagaatataatcatgattacatgttcaaaagtttaattcccatgatttgtcgattcactggatttagaatggcatgataatctgcgataaggtatacttacaccttggataagtgttatgtcctttccagggtattagcaaagtttaccagtatcagatgtatggagtatacaatggaaatgaccgatattgatcttggataatatctttctaagtcaatatcaatggttgattttaggtctatggatcttaatcttgatatggtaaggttcaacttagttgtattatttgtgttcttcaatttgttctttaaagtccaccaattggatcttctcctgacatacagattaaggacatggaagttcaattgagtgtgagccctgataataaatatggaatctatagcttctataggtatttagaagtgaaacgatgatctccttcgagcttggctgaatagagataaatgattgagatctcatttcagtaa

SEQ ID NO: 281989 - DNA, 639 bp, Cannabis indica
ataatagaagttttaagtagacgtagttccattactttcgtgataagggaagtggattactgtaattgtagtgttattttttttattttatgttcatacattcgttggctgcttatcagacagtagcgtcaacaatatttagttatatattgacatgagaaattcttctatgattgtactagtggtttttttttttcctttaaagatgatgtaatcagatggcacaatgctctattttttgttaaatttggtacatactaaaatttttagaacactatttttaaaagggaaatttgcggcaaaagtccccaaaaaggtcacattgatgcagattagtcatcaagctccaaaaataacggcaatagtcctcaagctccaagttgttgtttgtccgttagtcctaattttaactgagccctttacttttttaatatttccacgtgtcaaaatattactggtccaaattattattttaattaataaaataaataaataatttaaaaatgattttttttcttttctttattttcttcttcatcttcttctcgctgatgacccaaaatccattatcaaaaccaaaacccttactctattttcaactcgcagatcttggccagattacaacgaaaatccccgatt

SEQ ID NO: 281990 - DNA, 193 bp, Cannabis indica
ccgaatgtccttctgttgaatctggattcttcacgatcttccacactaagattgaggtaccacttgatgtgtgtgggcactcactctatcattcaagggtttgatttgcaaaattgaagaaagaggagagaggatggcggctaggttagggagaaggcattcagtttttctctaaaggaataagatgcatcat

SEQ ID NO: 281991 - DNA, 211 bp, Cannabis indica
ttggtggtttcccacggatgtgctaacacttgctttcttttgttgtagcaggtgcctctatggatgccattttggccgaacttgccggagttcacactcctgaggctcctcctccctttacttcttccccgatggcccccctctaaagatttcttccagtgctcctccagacactattgacttagtggatgacgaggaggtgctggtggga

SEQ ID NO: 281992 - DNA, 663 bp, Cannabis indica
ctaaaattagactatgtcttatttatgaattttcactaagctagggcttaattgtgaagaaaagagatttaagggtttatttgttaattaagagactttattaagtctaattaataaataaattaaatggtacgacgacacgaaaattttgctacttgtatttgtgttttatcattttttatgttacgggtcatgttcatgtctaccatctaaaataaatttcaaaattcaacataacacgaacatgacatgatgacattaaaatcaacaatttagtttacaacccgccaacacatatgcgattttgtgggttcgacacgacatgaacttattcgagtcgtgtttgtgtctgtgtttttaatttcttcgtgtcacgtgtcgtgttcgtgtcagcaacttttagtaaatttaagtcctcagcacaacacgaacacgacacaccaacactaattgccactccaactgtaaagcatgacgagcacaagaaagttcaatcccaatccaaatggcacatgtaacattatttacaatgcatgattggctacagtatgtgctacttgattagcatccctacaaataaaattcaaaccaattacacaatcatgtgtaatattaatttattttaatatgaattaaaaaaaatatttattaatttatttttga

SEQ ID NO: 281993 - DNA, 556 bp, Cannabis indica
cccagatcaaaacccagacagagatctaaacccaaaccgagactaggactcgaacccgaacctagaccgggaccaaaacccacacaataacttggacctggatcaagaatcaggatagtgacctgggaaacagaactaggaccgggacaagtacccgaccctcccgaacttgaacctaggaccatgttcgtgacacgacaaaaaaatgaaaccagactgggacccgagattgggatccggatctggacccagggcttggacaaaacctatagtcggtgtctcgatttgggacccagccctgaactcaaaccctcacaaggacccgaaccctcactcggacctgaacccaatcccaaacccaaaagtggacccgaacccgtaccctgtgacccaaaattggaaccaaaactggaagttgcctgggaatggaactaggacttggacttggaaccataactgaaattggacctagatctagaaccgtaaccggaccaggtccgcgactccaaataagacatagaccaaaactgggagccggacccggatccgaacccaa

SEQ ID NO: 281994 - DNA, 555 bp, Cannabis indica
gccactccgacctaagaaacaaaactgtgaagaacttcacatcgccaacaccggtgtgcacattcctaggtcgagcattgggaatgtctccaatcaaccacctcttgaacgtacgaagcaatctacggtctgctggtctctccgggtctacgttctctggaagaactcgcctctttttcttttccgcagtgtagtcgttcaagtacgttggcggcttcctcttcctcacaaatggcacattttctgggggtgcaggtagaagtaggacttcgtcctgtgattgtgtatccccaatggccgtgatgattgcttccaatggagttgacggtgcctcgttatcatctgcttcccaatcttctgggaagacatcttcgttatcactcgcctgttgttcctcattttgcggtgcaggtgtgggctctccaggtgtgggcgctccttttaccatagccatcaactcgtccatcttagccagtagagtctccttcagatctttctgactctctgtgaaggaccgcctcatactgagatggctatttactaaccccgtctgtg

SEQ ID NO: 281995 - DNA, 569 bp, Cannabis indica
taggtccagcatttcgatcccagtttgggtcttggcccgagtccaggttcgtatccggatccctatcgaggtccaagtctgtgtttgggatcggttcccagatttaggtccaggtccacgtctcagttccggtctgggtacacgaccgtgtctgggcccgagttctagtctcagtttgggccgaggctaggtctgtgctcggttctaggtctgggtccgggtcttggtcacggtccttgtcttgtcctagggtcctggttcagcgattctttttcagtttctaattttgggtcccaggtcttggtctgggttcgggtttggttcttcgtctgggttatggtccaagtctgagtccaagatctagacacctactactggtttgttccaggccccgtcacccgaatccctagtcaagatctggatcactgtcacgagtctcggtctggttctggttcaggtcccaggtcccatgtttgagtttgggttcgggatcgagactgcagtgcggttctttgtcccgaccctggttttgcgtccctagtctgattctatgtttgggtttgaattca

SEQ ID NO: 281996 - DNA, 592 bp, Cannabis indica
ccaagatctgatttgttctctcagtctgaccatctgtctctggatgatatgcagtactgaacttcaatcgagttcccattgctctctgtaagctttcccaaaaagatgaagtgaaccgagcatctcgatcacaaacaatagaatacggtgccccatgtaatctcacaatctcattcacataaagttcagcaaaatggtccatggagtaagtcatgcgtactggtagaaaatgggcagattttgtatacctatcgacaactacccaaatggcgtcatgctgctttgtagtcttaggtaacccagtcacaaaatccatggaaatctcttcccacttccattcagggagcttcagtggttgtaataatcccgctggtctttgatgctctgctttaacttgttgacatgttaagcatttggccacaaattcaactacatcctttttcataccaggccaccaatacaatgcttttaggtcatggtacattttagtggtcccgggatgaactgaataaggtgtagtatgagcttctaccaatatccccttcttgagctcatcattatcgggcacataaattcgtcccttgaaccgaat

SEQ ID NO: 281997 - DNA, 567 bp, Cannabis indica
atgtgaaggcgtggaggtgcagggagatgggacttacgtatgctaggggtacgcctgagttttcatacatgaagcttcctgggtacttgtacatgctggaacagaagaatccaaggtaccattactgacttgtacttagaggatgagcggttcaagtactgttttatatcactcggtgcatgtagaaggggcttttctttttgtacgtcctgtttttgagtatcgatggcaccttcgttgaagacgaagtacggcggtataatgttagttgctgtggcatacgatgcgaacgaaccaattgttgccggttgcttatgggtatcgttgacagtgagaataacgactcctggacgttatttcttacagaagttgagggtagcaattggacgtggttgagaaccttagtgtttgtgtctagataggcatcaaagcattgatcatgctgttgaactcgtttttcccgaagcagtccactgtgcatgctatcaccacattgttatgaacgtgaacgccaaattcaagactgatgcttttcacaaccaaatatataatgttgcttacgcatgg

SEQ ID NO: 281998 - DNA, 593 bp, Cannabis indica
ccagaacccagacgaagaaccaaacccgaacccaaaattagtgctgggacacaaaattagaaactgaaccagaatcgccgaaaaggtacactagaacaagactaggactgtgaccaagacccggacaaaaacctagaacagaacacagacctagcctcagacccaaactgagactgaaactcaggcctggacacggtcgtgtacccagacctcgacctaaatttgggacacgatcccaaacacagactaggacctagatagggatccagatacgaaccttgactcggaccttgccaaaatgggatcgaaatgctggacctagatttggaccgagatcctgacccagacccaaacttgacccgcactcaggaccccaacttggacctggacccgaacctagacccagatcggggttatgacttggacacaaacccggacacagactcggacccgaactcaaacccacacctagaatcagacccaaagctagacccggacccggacccagacccaaactcaaaccagaccaggaccaggaccagaaccaaggacttacaccaaggactgaatccagactcagatcgggattggaa

SEQ ID NO: 281999 - DNA, 675 bp, Cannabis indica
agtttttgttcgggtctggatttcagtctaggtcctcaggctccgggtgtgggttcacgtcctgggtcttggtctatgttgggtccgagtcccaagttccaatccagatctgagtctggattcagttctgggtctaagtccttagttctgatcctggtctgggttcgagtttgggttcgggtctgggtctacctttgggtctgattcaaggtgtgggtttgagttcgggtccgagtctgtgtccaggtttgcatctagctctagaccccgatctgggtctacgttcaggtctaggtcaaagttggggtccctagtgcgggtccaattttgggtttgggtcaggatctcggtccagatgtaggtccaacatttccatcccggtctgggtcttggtccgagtctaggtaagtatctggatccctatctaggtgcaagtttgtgtttgggattgggtcccagatttaggtgcaggttcgggtctcaattctagtctgggtacacgatcctgtccgagcccgagttcaagtctcaatttgggtctgaggctagtctgtgtttggttctaggtcggggtccgggtcctggtcactgtcttagtctttttctagggtcctggttcgacaattcttgtttaagttctaattttggctcccaggtctaggtttgggttcgggt

SEQ ID NO: 282000 - DNA, 534 bp, Cannabis indica
gcaaaccaggatcagttcgcctggaaccatagagatatgatagggattgaccctaattttatctgccatcatttaaatgtcgatgtaaactacacagcaaagaggcagaaaaggagacccttggattctgagaggcaagaggcgctaaaacaggaagtggataagttgttagtcaatgactttatacgcgaggtgttttacccctcgtggatagctaatcatgttctcgtcctgaaacctaacgaaacttggagaacttgcattgacttttctgatctgaataaggcatgcccaaaagactgtttcccactacccaggattaaccagttggtggatgcaactactgggcacgagcttatgtcatttatggatgcatattctggatataaccagataaaaatgcatgtcccagatcaggaacatacgagcttcgtaaccaacatgggactttactgctacaaggtcatgccgtttgggctgaagaatgctggggcaacatatcaacgattggtgaacgagatgttcgcaaatcag

SEQ ID NO: 282001 - DNA, 559 bp, Cannabis indica
gggttgaattatttggaataaaagattgataaaaattggaccaaaatacacatagtggtcggccatgatgtgggcccaatactagttagatttttgctatttttctcaaccatttgtctatttttcacaaataccattttttgcaatttaaaccctataaatgcaaaaactatttatttaataattaaaataattatcaaataaaattgtcatttataatatttattaattagactcaacaaagtctcttaattaataaattaaccctaaaatcctatttcttcacaatcaagccataacatagtgaaaattcacaaactaaacatagtctaatttcagaattaaaattgattaactaaaatcaattaaatgagtcttacaagcaatttgtctcaactagtatggggaccatgggcctatataaccgagctcccaataagcagatctagaatttaccaagtaaattctctaacttattaattcctcattgaaccattatagaacttggaattgcactctcagttacacaaaacgctccatatgtttcacgatatagata

SEQ ID NO: 282002 - DNA, 585 bp, Cannabis indica
tccacagcttccgaacacaaacacagaaattaggtaattaaatataaaatagcataaaaacatatatgatatataaaatatatttctaaaatatgcattccataattattaatacataaaccttaaataattaataatacaaagtactattcataggcggtctttacaattatccccccgttaaaaggatttcgcccccgaaatctacctgaataactcaggatgctgggccctcatatcagattccaattcccaagtggcttcttccactttactgtttctccaaagtaccttgaccaatgatatggttttggttcggagaaccttttcctttttatccagaatttgcactggttgttcgtcatatgataagtcaggttgcaattccaatgcttcgtaactcagaacatgcattggatcagacacgtacttcctcagcatggaaacatgaaatacattatgcactgctgataatgctggaggtaaggctaacctataagcaacttgcccaactttttccagaatttcaaaaggtccaataaacctagggctcaatttacctttctttccaaaacgtctgactcc

SEQ ID NO: 282003 - DNA, 536 bp, Cannabis indica
gactataactgctaaaaaagcaccagactttgttataaaaaacatagtgtgtcgatatcgcttgcctcatagatagtctcagacaacgggaagcactttgactgcgaagaatttaccaacttctacaaccaacacgaagtcatcaaaagcttctccgcagtggcaaggccacaaacaaatgggcaagcagaagcaagccgtcaataaaatcctcaaggtcaccctaaagaaagatctgctggcctgcaaaaacaattgtgaggcctaccggaccaccccaagaaccacaaccggccactcgccattctcaatggcatacggttgtgaggcgatggtctcggtggaaacgttattccatcccataggaggatgacttatgatccagcaacaaacaaggctttattacaagaagcattggatcaaattgacgaactccgggatgagtctcaaatacaaatggcagcttatcataagaaggttgccaaacacttcaactcgaaggtcaaaaatagaaaattcactattggtgatctggt

SEQ ID NO: 282004 - DNA, 554 bp, Cannabis indica
cgaagaagtgcactttcggggtcaaatcgggaaagtttctgggcttcattgtcagccagcggaggatagaagcaaatccagagaaaatccaagctctcctaagcatgccttcccccaagaaacacaaagatgtgcagagcttaaccgaaaaggttgctgccctgagccgttttatctcccgatccacagacaaatgcattcccttcttcaacatcttgaagaaatgtcagaaatttgaatggtctaacgagtgcgaggaggcattcaaaaaactaaaggagcacatggtcaaacctccaatcctatcgaaacccgttctcgaagaggacttgttcctatacttggctgtctccgagaatgcagttagcgcggccttagtacgggaagaggaaaaaactcagcatcccgtgtactatgtcagcaagcgcatgataggggggaagacgcgatacccagtgattgaaaaactagttttttgcctcctaatgtgctcgagaaagttgagaccttatttttaagctcactcaatcaaagtattaaccaatcacccgctc

SEQ ID NO: 282005 - DNA, 540 bp, Cannabis indica
gggcataaaacccaacaaatgggtctaccctagtttgttgagaaggaagtataaaatgagttgggatctccactatctcatctacccaaagcaaatatcgcttgatagggtatcaagaaggatctccctaaggaaatacgggttaaacatgtcctgtctagtattaacaaaaccttccacttagggagcacaaaccaagtggaaggtagtgttaccttcatcgaaagtgctagctcctagagcccccttgttgggaagaatgttaacaaatcacttaggaagctctgtagcctccttcagcacttcttggtcttctttgaattctaccatttgacgcttgacttgggtaacaacctcctttacttcctccgccactatgttggtgatcccttctctaacctcttttgggttagtgattatcctcagaagcttggaaggtcaatggattttcgctatcgcctcattggtctgctgaactgattccagacttaggtattttttttctccagtttcatcccagtgaattggagatctacattt

SEQ ID NO: 282006 - DNA, 956 bp, Cannabis indica
aacgacattattccggagagtatgttaaacgacattatgaaattagtaactggaaatgtgattcttgggaagaataaaaacggataagaacaaaatgtaggtaggttccacctggagtccagtctgactataaactattggtcaatttaagaatagttaaagaagttgggaccagaataggggtcttcttcatcttcctaactcccaacaacaaaccccagaatgaaaggaatagccttttcaacattaaatcaatggtgcccccaacccaagataaacccatcttcaattaaccaaacatctttcaacgccaacccacgatttcacttctacaatcaccaaatcccatcaaataaaacaaccccatttccttgtttcgccataaatcgatcagaaacaccttctccgccaaccccacttccgagctcaccgcctctggttgtggtgggttcggccaatgccgatatatacgtggagatcgaccgacttcccgcggagggtgagaccatttcagcaaagacagggcagaccctcgccggaggaaagggcgctaatcaggccgcttgcggcggcaagctctcttatccgacttacttcgtgggtcaagtcggtaatgacgcccatggtaagttgattacggaggctcttggaaatggcggggtttgtcttgatcggttgagtactgtggatgcttcgccaactgggcatgctgtggtgatgctccaatcggacggtcagaattcgatcatcattgttggtggtgctaacatgagttgttggcccgagactctttctgataaggattctgagcttgttaggaatgctgggattgttttgcttcagagggagattccggattcagtcaacattcaagttgccaaggtaattgaaaggatttaaaactttcaccttttattactattattattatttgaggttccatgtgggagtaaact

SEQ ID NO: 282007 - DNA, 549 bp, Cannabis indica
tctctcaaataattctctctttttccagttaaattgtactttttggtgttgcgaaatatcagtaacaacatttggcgccgtctgtgggaattcgactgtaagattctattcacttcaaagaacatcactcaacatggctggaaatcacgctaacggagctaacaatgaatccatcaacattggaacgatgagcgtaccattgcctggaaccggagtgccacctgtagacgtcatcaacggcggggtagggaggagcaacatcagaccactcaacctatttccagaaacaactggtcctcaagtcggaggcacgtccacaccaccagcaaccatgcactttccccctgtcaccccggcggtcgtgtccgaaggagtggtccagctcacgactgatcaatacgctgcaatccaggatcagctgcgagcactacaagccgaggtggatggacagagccgagctcgacgccctcctcgggtccctgccgttcgtaacgaaaaccctcaggtaacggtttctcgacgtcaaactaaccatgcacgcagggaacg

SEQ ID NO: 282008 - DNA, 617 bp, Cannabis indica
aggctaatgtaagtatgattcatcaaatttccccatacaaaatctctaacaaaaagaacttttggacgcacgaaaagggacctgcaacgaaaactacatttagattaaacgatcatcacatatgtgtaattatagtttgaaaattattttttttttttttttgtagtgttatagtttgaaaatgttaatttcattataacaagtaaaattagattatgaatgagaataaaataaaagagaaagtatcttatagttatttaattgtcatatgactttattttcttttttttttttttgtttttttttttgtaaggaacatatgactttattttcatcatgatgaatttattgaaaaaatcttcaagagaactcaacgtgcatagagactgcatttatagtcaaagtaaaagaaatatagagcttgaattcgttgagaaatagctttcttataagaatttgagtacgtgttgttaagactattcattatcactccctttaaatttatatatatatatatatctttatatattaaaagtgcctatctaatggcatttcttggtttaacagaataatacttaaaaataaaaaataattctgttaaatttaacgattagttt

SEQ ID NO: 282009 - DNA, 569 bp, Cannabis indica
atgaaaataatgtggtgattagataagtttgtttatagaatgggtaaattaccattttagatcatgtgttttgtaaaagttataaattggaccccctgtttgttaaatgacaaaattggtcttgtatcttacaaaatgaaacaaatagaaccatgaattgattttttgtcaaaataaaacttaataatatataattcaacctgaagtattatgacaaaactgtgatttctcatttgttcgtgttatgaattgttttcaagttgtattaaaaaaattatcgaaaattgtgctcaaaatcctatttgtatcatttttgaaaatacagagtttgttttgttatttaacaaaataggaggtctaacttataatttttgtaaaacacacggtttaaaaataatatttacgctcatagaatttttattctataatttatgaaaatattcatattttaaactttatttttggttaactattcatattcttcggctttttttttttcggtcaaaaatttataaaacctaacttaatgttccattttttttttttaaaaaaaataaaggactaataat

SEQ ID NO: 282010 - DNA, 1172 bp, Cannabis indica
gggtcccctaaccgctggaaagaggccccctccggacacttgtcaaaaagaaagccccagaatgttttccttgacaagagtcgggtgcaagaatcccacagatggtgacattacgaataagtaaaagaaaagggataaaaatcgagaagacaaagtctactctaaacccttgaatgtcattacgtgagaaaaagatgggtcctcgactaaaaatacgaagaaaagaagtaactcgaacaccacgaaggaggaatataacgcgttacacaaaagctcaaaacagaaattcccagaaactcaaacatcaaacccagaaaaagcagatgaacagtaaagcatgcgatgtacacaaacagtaaactaaagtacaagatgcgaagaacttacataaagcttgagaactgggcgttgttgttgatcgacggtaaagagttgattggcagcggcgaaggaagataagtaagaaatctatggtgtttgagggtttctgttcgagggtttctttttctctctggaaaacttaagaaaatttggtgaaattctgaaagtaaccaaatgaagtgagaagggtggcttttataggccaaaacacatgtgaaacagctgtgatcagctaccaatcgaacggttgggaaggcacacgattcgaattcccaggatccaacggttggattggatcgtcatcaagacggtggaaacgcttgagtgtccgtctgacacccattaatgcgccgtatcaattaatggacaagaaacgaatcgacgcctgcaaaaagtgaatcgctgcagtaatggtgatcattaaatacgccatcacgcgcccaaagcacgtgccaggaaaccgaggagccagccggaggcacctattgttcacttcacaattaaacaaggcttgggggtaaatgttgcccctgattttgcccaatatacgtggaccaaccggacagtgacacgtggatggaaagggtttagcgtttgaattaaatagctaagtctttataaagcaaagcattattttggatatgcctcccggagaaggcatgcaaggtctcatatgctcccggagagcaagatggcatcaaagcatctccgggtggtgtcaggcttcctctgagcagtcatctcgcatttaatgccgcatgggaggaggcgtattggaactgccacacgca

SEQ ID NO: 282011 - DNA, 481 bp, Cannabis indica
cagcaatagtcttccctttcctgcacagtagagcacccgtgagcaaagcccagcaagactgtataaaacatatcaacaatatgctcatcatataatataaacaacaatgccattcaaatttgtctgtgtgacatagacctgcatgttgcactcacatgcctatttatgtctacgtggcgtagaccttcgtgttgcgctcacgcgcctaaatacaataaggccttggaacagttcatctcggttcttgttaccaagtccaacctgattatgccatgaacgcataacccttaatctcaacatatatatttatcacataattaatggtgccactgcactatttgtctatttgctatagacgtgtgtgttacgctcacacgcctatatatgtctatgtggcatagacctgcgtgttgctctcacagtaatgggccttacttggattttgcagttttctcaattttgtatttgattttctcaaaaa

SEQ ID NO: 282012 - DNA, 568 bp, Cannabis indica
aagtagtaaactcacacaggtgaggtcgaaccacagggaattggattaaatactactaaactatacctataattctatttggccaatcgaaaacaattatgatttaagagaattaaagtaattcggaaaactcaaaacacaattaaaatttaaacaaaataagaagctagggaggagaatcctgttgttgtttacccagattgttaatgcctaattgctatcctattcttgaagtgaatgacagagtataaagtaacctagctattttcagatcttctagattctaaatcacaggttatctaattaattccttaattaaactaacacaaaatcagcattaggtaataatctactcgtcacataagtcatgtaaatactctagtttcacatagaacatcgattatccaaattttagcattctcaattctcacttttcagatttcgaattgagatcataaagcatgcacaaggtgatcaatcttaaacatgaaattaagcgcaaattaagataattttacaaacaagaatgaaggaatggcaattaaacattaactaggcaaaacattaa

SEQ ID NO: 282013 - DNA, 490 bp, Cannabis indica
tcgatgtcggacaccatatcttgaaaggagtgcttcaaactgtttattgcagaagtgactcccttcatcgcttactattgctcgaggagtaccaaaccgagtaaagatgttcttttgtagaaagcggagaactgtcttaccatcattctgtggtgtagctgcagcttcaacccatttagacacatagtcgacagccaatagaatatactgattgctaaaggatgaaggaaaaggacccatgaagtctatcccccacacatcaaacaattccacttctaaaaaccctgttaaaggcatctcgtttcttctcgagatattacctgtccgttaacaacgatcacatgccttcacaaaggcagtagcatccttgaatagcgttggccaaaagaatccactttgcaacaccttagcagcagttctggtccaactgaaatgtcctccacatggtaaagcatgacaatgatttaggatagaatacatctcctcttca

SEQ ID NO: 282014 - DNA, 931 bp, Cannabis indica
aatgggggaaattttaaaagacttggtgtatggataatggtccctcggccagatggtgcgaatgttataggtacaaaatggctttttaaaaacaagtctgatgaatttgggacagtgactcgaaataaagctcggcttgtggctcaaggatatagtcaggtagaaggcatcgactttgatgaaacctttgcaccagtggcacgattagaatccatacgactgcttctcatcattgcatgctttctgaagatcaaactcttccaaatggacgtcaagagtgcttttctcaatggggtaattcaagaggaagtctatgtcaaacaaccacagggatttgaagatccacatcatccacaccatgtgtacaagctcaataaagccttatatggactgaaacaggctccacgtgcgtggtatgatagactcacctcatttctcatctctcatggcttcacccgaggtactgcagatagcactctattcattaaacatattgaaaaaggaatctttgttgcccaaatatatgttgatgacatcatttttggctcaacttgtgatagtgaagtccatacatttgtcaccttaatgactaatgagtttgaaatgagcttaataggtgaccttaatttctttctaggactccaaataaaacaactagatcatggcacattcatatcacagtccaaatatgtcaagtctatgttagataagtttggattctcacaggtcaagcatgcacatacaccaataggcaccacatccaaattgtcacgagatgagtctggtgaccctgtagaccccactctatacagaagtacgataggtggcttactgtatctcacagcgagtcgtcctgatattccttcagtgtaggtttatgtgccaggtatcaagccaatcctaaacagtcccatctctctgcagtcaaaag

SEQ ID NO: 282015 - DNA, 555 bp, Cannabis indica
gtgagtagatctaagatacctagtaaaaataattttccaacaatataattactaaaatgagtgctcaaccatttttctctattaagccaagctcgaaggaaattatcgtttcacttctatgtccaaataaaagctattaattccctatctatgattagcgctcccactcaattgaactaccatgtccttaatctatatgtcacgagaagatccattggttaactttaacaaatagattgaagaacataaataatacaattgaactagaacctaaccatctcagaattgagattatttgatctaagatcaacgaggtgatattgaattagatagatattacagtaagtttattatatcttatccaagttcaatatcggtcccttcccatgcatactccatacatccaacacaagcttacattaaccaattccctagaaaggacatagcacttatccaaggtgcaagtaaactacattgtagattatcttatcagttaaaccttgtgtgctgataaatcatatacatttaatgacacaatctcgattactttccact

SEQ ID NO: 282016 - DNA, 532 bp, Cannabis indica
cgtgggtctacgccatgtagatttaaatagatgtgtgagcgcaacacataggtctatgccacgtagacatgaatgggtatatcagtgtgatatgcaggtatgtgtcatacagacatatatgaatggcatatttgtttaaatagtatgatgagcatattatatttattatgatttatactgtcttgctgggcttggctcacgggtgctctactgtgcaggaaagggtaaggcattagctgatcagccatgagttacaagagctgggcgaagaatgtacatgttcgagccatttcagacaaagcgggttaagggtctaccagtgttgaacttttgaaattctattttgccgtttaggtcggctagaaagaaaagacttgtaaataagtttgtaaatatttttgggatcccaactgtttaaaagtttaaatgtattgcaagtcttattttcactctgtttaatataaaagtttaaattctgcgctattttgattagtaatcccgttataggggattagggtttcataatcatttt

SEQ ID NO: 282017 - DNA, 579 bp, Cannabis indica
attttgtttctgtaatgaatttaggatctcttttgatgtttttttagtttactgtccaattttcctaagacatttcttattcatgtaaattatttgaccattatggctacacatgaattagctgcgcacgtacttagagtgaatggtgagctaatttggatggaagatctttgatctctctttttaatgtactcaacgctaattgaattgtaatgtagtaatatacagtaatatttttattaattagtatttttctataataatcttttgttatttgaattttatagtaataaatataattggatggatgtaatacacggtactcataaatgacaagtattgtaatttaaatatgtaacgtcattattgaaaataagataagggaagggttttttttttttttggtaaaggaaaagggttgttgatgtaaatttttagaaaatttttttttacctaaagttgactgtagggtcgtagttagtattttatttattattattattattctttttggttaaggtagtttgcattttattgaaaacatagggggcaaaaattaactcaaataggtactagatg

SEQ ID NO: 282018 - DNA, 548 bp, Cannabis indica
ttttgatttttcagctaaggattcaagaggaatcaaagcaaggtaaccctagttcttctcccctttaagtttttgaagttttagtttagtttcactatgaatgtttaggtttagtggctgttaggttttgaaatgtttggggttcaatttctggggttaaattgagtttatctaagtccctagctactggttttgatgcttgtgaatggttttaagcaagcttgagctttgaaactcaagctttgttcattaatggcaacttgagttgtattggtttattctgtgaattactgcctggaaatcattgtgtatgcattgtataggtatactggagagtttggtaaagattgggattgaattgaatcaagggggataattttttggttcccagcagcagaaccggaattccggttctgggtggtctgtaccaaccggtcgaccggttggtgacccagaaccgggatgccggttgggaaccggtctacctgttgggggaatttccagaaccctagttttggccaattttgagatatttagggtattgccat

SEQ ID NO: 282019 - DNA, 555 bp, Cannabis indica
atgttacccgaagtgtagagatgttacatttagacagggaacatgttttctgcgggtttaactaatgaagggtattaggcgcttcggaaagaagggtaagttgagccctaggttcattggtccatttcagatacttgagaaggtcgggcaggtagcgtatcggctagccttaccaccaacattgtcggctgttcatgacatatttcatatttccatgttgaggaaatacgtgtcagacacgactcatatcttgagttatgaagcccttgaactgcaatcagacttatcctatgaagagcaacctattcagattcggaacaagactattgttctgattaagtgctctggaggaatagtaaggtggaggaagccacctgggagttggagtctgatatgaggactaagcatatccaaagctattcaagttagatttcgaggacgaaattcttttaacggggggataattgtaatgaccgccttagtaatttggattagataaggcaattagcactaatttctgtcattttataattatttgtgaatttatttaattgt

SEQ ID NO: 282020 - DNA, 631 bp, Cannabis indica
tccgggagctatctttgtacaacgggtgcggtctccggtagtgcgtattttgcctagtagcaaagtacacacgctcttgggagtccgtcagctccgtgtactgggtgtactggggagtgtacccccttttctggcgcttctcccccgtccgggtgctgcctttggaggatcttttactcctcgaaccctgggaagggcctgccaggctagcggtcggagcggagtgcgaaggagcttgtccattcatccctgaggggtttccaaaatgggatgatgctggcgccaaggcctggccctgactatatccgggggtggcagagaactgtatgccgcttatcggtggagccgcggtcggggcagtacccgagggcggtactccgggcatgtaccctgctatcccggtgggatagtatcctccataggccactatttgggcttcttcgaggttgatatatttttggactctcttctggaagtcctgaaggctagcagccccctcttgttgtagttcattccagaagggagtccctgtacggatgcctgcttggagaagcgcaagctgttgtccgtcatcaactttcttagtttttgaggcctcctctcggaacctctttatatagtttttcaaggt

SEQ ID NO: 282021 - DNA, 574 bp, Cannabis indica
tacggcttgcctcacaaaatagtctcagacaacgggaagcagtttgactgcgaagaattcaccgacttctgcaaccaacacggagtcgttaaaagcttctccgcagtggcaaggccgcaaacaaacggacaagcagaagcggtcaacaaaatcctaaaggtcaccctaaagaaaaagttgttggcctgcaaaaacaattggcccgaagaattgccaagagtgttatgggcctaccggacaaccccaagaaccacgaccggccactcaccattttctatggcgtacggctgtgaggcaatggtcccggtagaaacgttattcccatcccacaggagaacaacttacgatccaacaacaaacaaggctttattacaagaagcgttggatcaaattgaggaactccgggatgagtctcaaatacgaatggcggcttatcaaaagaaggtgactaagtactttaactctaaggttaaaagtagaaaatttactattggtgatatggtcttaagaagggtctttccagccactcaagaacccggagtgggggtacttgggccaaattgggaaggaccat

SEQ ID NO: 282022 - DNA, 934 bp, Cannabis indica
caaagcatgcaaaatttctttttcttaaaactcaagaaactaaaagaggaggttgctataaatcataccttggcttggattatacaataagctgctggaaacaaggaattgaggaagcaaatacaagaaccctagctggttctaggatggccgaaagagagaaagagagagtgagaggaaaaggagtgatcttttctagttttttttttttttctaattttgtaaaaatgagagataaaatggttttgatacattacttcagccaaaacaattaaacacatcaacaaaaattcatttaattgattcatataaagacaaaacaccaaaagggtaaaaagaccaaaatgcccttgcccacaccaaactaatttaaagagtactaagagtattttgggaaattttaaattcccgaccaatcccgacattcccaatgtctaaccataccgccccgctatactaaaatattaaattgtgattataatgagccatacaccgcgttccatgttgtcgagcaccgaaaatacaaaattatgaaattccactatatcacataaaaatgcattctgaattcatataaatcaacgtaaataattatttaaatatcaataaataattttcataattaaatcctaaatatctgctcatttctaaattaaactaagcggtctttacaacatggacattctaacttggcatttaactaataaaaatcgtccccctgggatgaaggagccttctgcagggtcccgtgtgcggcaaaacacggcatttgcagcctccatgtgcacgagttctagtgtcactcgtatctgaagcccaggcatgaccgatgtaacgcccgtacttttataaaaaatattaattttgtttacaagcgttaaacacggaaaatcataatgtcgcatttttatttaatacttgaaaatgttcacaa

SEQ ID NO: 282023 - DNA, 573 bp, Cannabis indica
cgttattttgggattcaatcgcgtttccccaccgtttgattggtaggtggtgacgcctgttcctcatgcacttttgcctataaaagccaccatctttccttcatttcggttacttcccatttcttgccaactttgctcgaatttcctagagagaaaattctcaaacccagcacgaaacctttgaacactttgcaattttcccagttctcccttgcttgctgctatcagtccttctcgtctttactcgactcacatcaggacccccagttcaacacttcattgtaagtttcttgcatcctttggtagtgacatgcttttactcgttctgtttgttcttttctgggttcgcatttgagatttctgggcatgcaagtgtttaagtccttcatgtattttgttttgcatttactgctttagttgtaggattgccattatcatgcctctgttattattgtgcattttcattgtagaagaccatacgctcttcgttcaatggttgtttagggcatagaatagggtcttttctttctgttccccttattgtgtaaaaccaccttctgcgattttactgca

SEQ ID NO: 282024 - DNA, 534 bp, Cannabis indica
ttacaacaggttcggcctgcacagcaggggcaggagctattggtatttctagagtagggactgcaggagcaccctgctgtcttaaccgccgaatctcttcatcttgttcattgattctagcttgcatttctgtaaacctattttcccattcttgggcaacttgagcagcttgtggcgggttagcatcaccccgaccacgtgccctacccctgagaccactacctcggccgcgaatattaaggggaatttgagctccctaaccacctcttgatccaaccaaattgccctggctcctggtgtttcgcctggtgtccatactaatctgaacagcctgcgtaaccaagagctagtctggtcagatcgttatcaaagaaaaacttactaatgccgcttatttggaaattaaaaacatgcgcctattctactatcaagctactaacatgctttctaacaggcttttcttaaatcatactattaaaataaactactaaagcaattaaagcttactgagccgtggaacgagctgactgctga

SEQ ID NO: 282025 - DNA, 816 bp, Cannabis indica
taaatcaaagaacatgaatagtactcctgagttgagcctaagcatatcaggatttagattcttttaatcttaagatcaactactgatattgacttggaaagatataacggtaagtttataatatcttaactaagttgcaatatcggtccagtccaatgtatactccatacattcgaaactagtatactttactaatgtcctggaaagaacataacacttactccaagtgtaagtacacatcatcgctgattatcacattagtgtaaatccaaaacactgatgaaacagggacttagtcttttgattcatatgatcacaatcacattccactgtgttgacgatactgtaattgtgaataaacatatgatctggacttaactgattttgtgtgtaaatgtaataaacatattaaaccattagcatgtaaaattcatgcaaacataaatcacttcaaatttcttatattgataactaatcagattgtaaagggttttatttagggcacaaaacccaacagatgttgcatccaagatgtggttccataagcctgcatatcctgaccaatgtttaactgattctgtaagttgtttttatttcttgtttttgctgtaccttttttaaaattttaattttattggttttaatgtatttttttttgttgtttagttgtttatatttttcggtttttatttacatatgtttgttttattgtttagcattggaatatcattttttactatcttacggaaaaaaaaaaagtatgcaaaggaaccaaaggttaagttcacaaccactgattgcttattcaacaaaatc

SEQ ID NO: 282026 - DNA, 697 bp, Cannabis indica
aattatatattcagagatactgttgtaagagtataagaaaaggaatcttcttccttgttcttaagtcaatacaaataacgaggattacgctattaccgaactgctaagggctgaacctctataaaattcttgtgtcttattattgttttattataaatctgttactacatgtcgttttatcacttataaaatagactcattgtcgttggctaaaagcgaagtcaacattttggtgctttcattgagagaaggatcagaaatcgctctttattcgacactcaaccgccaacgcgatggtgcaaactcatagaggcctgtatgacccagcaaatgcacagatgctggatccgacattataggacccaaggagttcaagggttccgcctgctgttaatcccggacaaacgggaagtgtggtgaatggtgaaacagctcctgttactggaattgcgcctggtgtgcaagagactgggaataacagtttcgcacccaaccagggcatccataatatgactgttccacctggaaccaacgcccagatgaccatcggagacccaaccgaattgcaaaatctctgtgacgcgctcggactcatgcaaagtcatagcaacacccagcatcatgatcaggatgaactccgtgctgtagtaaatctcgcgtttgacgaataaaggcgtatgttcgcttaatggagaga

SEQ ID NO: 282027 - DNA, 620 bp, Cannabis indica
accacattacaaaaaaaaaataaaacaaatacttagttaataaacttacatcatcagaaagccattatttgtctgtatttagcttcgagaaccaagccacgccacatagaccggtgaagacgtccctcggatacttgtttccgatggttcccactaaccaatttcgaaaactatgtagtagcttctcatcaacgggccgaagtgggtcaacattcacattggctgttgatggcttcatcttcttcttcatttcggtgtactcgtcaaaccaccttggccttttcttcggtctcttctccaccggtgttggaacggtctctaaaacctatacctctgaatcttgggtatctccaatggacgtgatcgacatgttctgaggtgtctggagtacatcttccacatcattaggtttgtaatcatagggaagaatgaactcatctcctggagacacggcgtctggctgtggctctggctctgcgctgggccttctctgatctcccataagagccaatagggtcttcaagtaacccattatctcattctgccctttcaaaatatcagtctggccttgcttcaaagcaagctgttccttctcaacacgctccaatcttgccaatatg

SEQ ID NO: 282028 - DNA, 462 bp, Cannabis indica
ttaaagttaatactagaatgctatgttgatgacttagtctagaaagaacttacagtttcagactaagataatatgtcacaacaagatgtccctgaggaccaatagtaagaggctaagttgtacactatgtatgaacttaaccagactcctactgttgagtgggagccatataagatgtaatcaaacaaggaacattaggagacagtcaagaaagatctctgaaagtgacctatatgttagatgatagggaagtatattagaatccttatatctacaccaactattcgagatggtggttaaactgtgggtggaggaattattctagaaggatgtaaaaacccatctataataatttaagctccattagtgaagctacataacttagtgttggaaattatttttgactccttccgttctagatatctaggccttgattcctttctatagcagagcattatcaat

SEQ ID NO: 282029 - DNA, 493 bp, Cannabis indica
ggagctcacatggtgatttttgattctgtgatttctggattgtgttgatgctttggcaatgtgtagtggggtatttagaacatgtctggaaggtttggtatgaattgggtttgatttgagcgagttatggaatttttgagtgtttcctgctcagaaccggaatttcgattcattaaccggaattctggatggtgttctaggaattcccaaaaccggaatttcagttgtagaaccggtctgccggttgggggatctttggaaaccctagtttttcccatttttatgttgtttagggtattgccatgctttttatcgataggaaacttttagtctctagtttaagtccccgggaagtgatttagcatatcacttatctagtgttgtgaattgttatggtttaggagcgtgtaaatcgctgtgtagttcgttccactcaggttgaccgcacacctgaattcgaaattgaggtaagattagtataactgtatgcata

SEQ ID NO: 282030 - DNA, 1107 bp, Cannabis indica
ctgatggccttgtgatccgtcccgctcaaccacttgaagcctggctgagagaagtaaaaataccccgacctaccttgcttgggggtagacttcaagtcgaagaaccaagcgacctcgtggggagaaggagcgccccatccctgggaagcgtaaaggacgaagagagcggaaaaatacttaatgcccttaggagtgatctgagtcgggcagaggccgaagaagtccgccacatcccggaagtacttgtgcaagcgcatcagcgccccttgctggccgtgagcccccgaccaggcgcacatccccttatcagggtttgtagcgcgattgtcgtgggcgggaatgacgcagtccagctcacccaggtatccgtccttgtcgagagtgcggaggcgtgcctccgaaatcttggacggaggacttacccatctggcgcccaaggcaccctgcctcctatgaggaaccgcctcggcaagctcctcggtgacgtaatcaacgcccgcaaccaggacgtccccgtcaacattaactggttgcccagcctcattgtactccccatagttagggggttcaatctcctcctctccctcagcagcgggagggctgcccagacgcgcctcgtccaactcctcaacctcctggacttcagcgtacccctcacggtcctcctccattgggaccaccaaatcctcgtcggcattgggcagggtggcaagccgagccacctggggagcagaagcgtcagccagacgcgtagttttcttcgtacgagccatcattctatggctgggtacggaatcaaaaggaggattagcacgaagacgaggatggacttcgtgcagaagttgaagcagttcctggtcgatttgatgctcgggcccccaagactcacctgggttcatctagaaaagacaacacgcaagatgaatgttggacggagtatcaagcgaaaaacaatcaaatatgccgaccaggagtacccaacagattaaagaacggccatgttcgaagaaaagtctaaactcaagaagtcagaaagtttttcttgagttagggcaaaaaagttcatgaagcttgaaaaagcagaatggaaaacagaagcaatgcagt

SEQ ID NO: 282031 - DNA, 819 bp, Cannabis indica
gggaggcaacaatggcaaggtttttgaatggattgaatcgagagattgctaataccgttgaactacaccattatgtggaattggaagatttggtgcacatggcaatcaaagttgaaagacaacttaagaagggtagttcgagctcaaagccaaggccaagtccacacaatccaaatacaacaccttggaggtcaaacttcccaaagaaagaggatcaacctagttcatcctctgcacccaaaccagccaccgcaactacaacccctcaaggaaaaatagcccctctttcatctcgttctagtgagataaagtgtttcaaatgtcaagggcgaggacacatagctagccaatgtccaaataagagagttatggtgatttgggaaaatggtgaagtagattctgaagatgaagaagagcttgctgatatgccaccattggaagatgcttctatagaagatgaagagtatgggccagaatacggtgacatgcttgcactagtcactagacgagcattaaactcgcaagcaaaagaagaggaagaagaggtacagcgtgagaacatttttcatactcgttgtcatgtgaaagacaaggtatgtagtgtgatcattgatgggggtagctgtactaatgttgctagttcatccatggttgagaagtttggacttccaacgcttaaacatccacgtccttacaagttgcaatggttgaatgatagtggtgaagtgagagttaccaaacaagttttggtatctttctgaattagcaaatatgaggatgaggtattgtgcgatgtggtcccaatgcaagctggacacc

SEQ ID NO: 282032 - DNA, 1077 bp, Cannabis indica
agatgcagcacatgcatgaggacaaggaaacttcatgcactggaacaagccgcaagtgcaagtatgttcctgcaagtccactacgccaccggtcagaactgttcctccagggtgaacctgcaacgtgtaaggcccgcatgagtcaacgttcaaataccgacctttttcaaaatgcaatgtcaagtcctcctccatttctggtgctaggggtttcgtccacttgtcagctttttcttttcgtgaagcaaaccacttctggactttggacctcaggaatgctacagcagcagtgatcgggaagcctcttgcatccttagttgtgttgttgaagctctcagcccagttgctcgtcattacattgtaacgtacccctggaaagtacgaccggacccatttttcaaatccaatttcctcaagatattgtgcaaccgctggattcatggcccgaatgttctcaaattctctgtgaaactctgatcttgaatacgtgtaggcacacgtgtaaatgtgattcgtgaagacgtcagtcttgaacttgtggttgacgttcataataatgtggtggtagcatgcaccgtggtgtgcatcagggaacacgatatccaaagcacgaacaatgctttgatgcctatccgaaacaaaagctaagttctcaacatcaccaatcgtttctttcaattttctcataaaataggtccaggaattgtggttttcactgtcaactatagcaaaagctatcggaaagatatgactccctgcatccaaagccactgcacacaacatttgcccaccatacctagtcttcaagaaagacccatcaacgcatacaacaggtcgacaaaacctaaacccccgaatagaaggacccagagagaagaaacaatacttgaagcgaccatcttctaccacaaaatccgtgatggtacctggattccgcaactgtagcatgtgcaagtaactaggtaatttcgagtacgaatcttcaggtgtaccccgagctaggtgtagtgccttctctctgcacctccatgccttttcataactcatttggatcccgtaatccttgtgcatactttt

SEQ ID NO: 282033 - DNA, 671 bp, Cannabis indica
tatgcaagtttgagcatagaaaccttaactttgatctctaatggcatgtgtttgattcagtgagtttttctttggtttattgcctggaatatgttgtgtataccctaattaggtactctggaaggtttggttgtgtttggtggaagattgagcaagaaatgaaaaaaatttggggtgaactggtacaaaccggctagccggttttaccagacctctaaaaccggctagccagttttggcaggatccccgaatgcttcgttttctcaattttcgtccatttaagtgtcatggttgggtgcttccctatttccagaatttgtgtaacagaacctagggttaagggttagggtttcttggaattagggttttggtcatgtaacttacccggtttcataatgtgattagggcatccatctagcacgagactttccgttcaggtcagccagcacacttgaatctggaaagaatgtaagaactgaatataatgtgtgatatcaatatctgagtgtatgtatatgttatgtgtatatgcatgcttaaattgttagtggcactaccaacacttgtacagttaaggtataaagtgcattggtatagtgaatgttaatggagagtacaatacagtgatacaaacacaggtatgggaaggtatggagtgtgtgtggtatatc

SEQ ID NO: 282034 - DNA, 737 bp, Cannabis indica
ttagagaaaatagaaataaaaattgtgaaaactgcaaaattccaagtgaggcccattcacaccatggccggccacgttgttaaagctttcctcaattcttattttcattattttaatgccaaataattactaacctaaacctagtagttgcctataaatagaaagtgatgactcacactaaaataagaagtttttcagtaattcaggaaactgcctttcagaaaattgagcaactcgctttctctctatagccgacccctctctctctcttttcctcttccaatttcgaaataccctagtgatagagtagtgcccacacacagctagtggtacatcaatcatagtctggaagatcgtgaagaatccaaattaaagagaaggacattcggactcagatcttgataataatctgcgataaaacggatacaagggttagagatctgagtggaaggagatatattattccgctgcaaccaatgtaaggtttccttaactttatatgtgttctttattgtttaagaaagttcaaatttaggatgttaaataacatacttgtgagtagatctaagatcccggcaaaataaattccatcaactggcctcagagccatggtaattaatttgcttgcaagaaatttggacttaaaacgatttgtatgtgatttggatggtttcatgttgatctatgtgttaattttcttgcaagaaatttggacttaaaacgatttgtatgtgatt

SEQ ID NO: 282035 - DNA, 783 bp, Cannabis indica
aatatgaaaaagaaaagagaggggctggttcgaatatagggtatagaatagatggctcaatttttcctgacggcaagaaatttcatcatctttttaagtgtgagccatcactatctatttataggaaaccgtctaggttaggttaggatttattaggcattaaaataatggaaaaattaagtgaaaaataccatataagtggccggccatagtaatgggccccactttggaatttttccacttttgacaaatttccctttattttctcaaaaatgccatttttccaattctaagcatttaaatgccaaaactatttatttaataaattaaaattaattatcaaataaaattgtcatttaatatatttattaactagactttataaagtctcttatttaataaataagacctagaatttcttttcttcacaattaagcccttgcttagtgaaaattcgtaaactagacatagtctaattttagaattataattgattaattaaaatcaattatctaagtcttacaagcaatatggtttcaactagtatggggaccatgggcctatacaaccgagcttccaataagcagaactagaatttaccaagtaatttccataacttattaagtccttattgcatccaccatagaacttggaattgcactctcagtcatatagaacgctctatatgttctacgatatagatacgctataaacatttaaccaccgttctaatcccaataatcaaagatcctctatagatgatttacactgagtagtaataaa

SEQ ID NO: 282036 - DNA, 313 bp, Cannabis indica
agatattttcatagataacctaactataataattttaaattcataagttggttattctatgatattatttattatttataaatcataagttagaaaaataatatttattataatattatatcattttacttaaaaaaaatttataaataatattatatatatttaaataacctagatatttttgtagaaatttgaaaaagacttaaaatgagatattttgacatataacttagaaaattatcatttatttattatttattcttaaataataattgcctaaccaaatctattttaaaattggtttatttgatta

SEQ ID NO: 282037 - DNA, 722 bp, Cannabis indica
ccggttgccacaggtcccccagaaccggaattccggttctgtgctgggaacccgaaaaattctccccttgacctcaaaatccatccaaacttcaccaaactttccagtatacctgtatagtgcatttacaacctaaaccaaccagaaaatcacagaacaaaccaataaattccaacttgccattaaagctcaaagcttgagtttcaaaactcaagcttgcttagaactaacaccaagcagcaaaaccaacagctagaaccttaaatcaatcaatattgagcataacaactaaacccaaatcatttctaaacctaacagccactaacctaaaaatcacctcttgaaactaagcaaaacttgagaaaaacataactagagaataactaaggttaccttggttaaatcctccttgattccttgctgaatctcaatgaaatggaaggaaaaatctgctccttgccctagctttgtcccagccgaaagaaggaaagagagagttcaagagaatactcaaatttccaatttttccttctttatctcttaatttctcaaatgaaaagggttttcccaattaactcttgctgaaaattaatgtgctaggtgtcactcactcatggcagccacctaatccaccattaaacaaaatgtctaaaatgcccttaacccaaaaactaaggcttttcaaaagctaggggtaaaatggtcaaaatccataaccccgc

SEQ ID NO: 282038 - DNA, 572 bp, Cannabis indica
attagatcgtgcggattggattggatcggctattttatgaacacccctaggtatggcccccataatttaactacaaaattacaaaatatcttgcttgaaacaccttattaccaacaaattgggtctcacaaggaaacgccaatcttgcttaccgagcatagaaaatttaaaatcttgtaaaatttgaaactccattcaaccatcatgcttatgaaccgccaacttaacccaactcttccacattatccctttgcccctactaaaagagaacaccactagaattgagccatcattcctttccttctatagccttacacatccctttcgaaattaagaacacactcataacacaagaaggcaatacttataccaccgtttaagcataatctccttatccacctgctgggacggacgcactagtactaatgttggggttactaataaaaatattacattttaaagaattaaatgtaattttttttagggtaaatagcggtataagtacccaatgtttgtaaaactgtaattttcttctagttttgtcagtacaaactttgttttgaatttattaa

SEQ ID NO: 282039 - DNA, 632 bp, Cannabis indica
tcggataacattgacaatgttgtggctgagggtgtcataattgaggcagttggttacttttcatatcatggtgacataattacaaatgattatgcacgggttcaaatcacacaagttattcaaggggaagctgaaatcccatatccaagaggtgcaatacgctatgtttgtgatgcatgtaacaaattggttccttggcctagggaattgattttgactgaagaggtatggaataatttacttgtatttacattaatgttaaattatatatgaattgtattacaattttacttgtaattatgtagggttctctaattaagaagcttcatagttcaaacaactcgaaggggaaagagaaatgtaaaggaaaagagaagatagtggaacatcttgattccactaaatcttatgagaaattcattgcagaggtacttgacaagactcatatttctcttcaggccatgttcttggaatatatgagagtaaaaggtaaaaatgagtttgtgagggttcctgttaacccatccttattctaccgagttcacatctacataacttccgaagatgtcatacaagtggccacccaagatgaacttacgggttcagctatgttatttggactaaggtatctc

SEQ ID NO: 282040 - DNA, 702 bp, Cannabis indica
gcaattatgttcgatttcttggccaacaagtaagcatgttgtgcccgggtggtcatctaaatttttctgatgtaccccaacaatataaggatcaagtgctcaatcgaataagagtgagtgatttttaattattaatggttgtaataattttatgtcctcatttgtaaattaatataattttaaattattttattacacagtactattttgatatcgatgggaatccccaccgagacctacttatggggactttatattcggtgatggcggagcggtatagtgagcgaaagacactcagacacaagcattttaaacaacattacaaaaaaccagaagattgggagacagttctcaaattcccccctgactacttgaataccgagacttggaaaccggtttgcgaattgttcgttagcgaggcatttttgaatcgttcaactaaaaataaatcgaatcggcaactaatgaaatatccaacaacgcaaggcacaaaatcgttggcttccatacgccacggaatggtatgtattaattctttaattgttaataatgtttttctcttataataaactaatttaattgtttatgttcgtataggggggtcctcctggagagcatgtagttgaagcatggaaggagatccatgtgaaaaagccgtctggcactttcgttaatgaattagctgcaaaagattatgtaagt

SEQ ID NO: 282041 - DNA, 536 bp, Cannabis indica
tatttttacttctctcagccaggcttcaagtggttgagcgggacggaccacaaggccatcagcaaaatagggcgttttgttgatgagtacttcatggtgaaggatccaaacatcacccggactcggtttcagcagatcccgacatatcaccgtcctcccctcacccttactcttagggatagggctcaaaaacttgcccggttgccggcggaagacagggatatcatccagttgacctccgatgaaaatctggtgcagtacgggctttacccagaggacttttcttctaagtccgtgacggggaagaaggggaaatctgctgctgcccggcctgaacgagctaataaggaggatgagctcattcaacttaagcgagaggctaagttgaagggaggtgcccgggcaaagcagtatgctcaggagtccatgaatcctgaagatgaagccgaggctgaggctgaggctgaggctgagcaggtgactcctttgaagaggaagaagaaactgtcggcaatgcccaggcccgttgaacatgc

SEQ ID NO: 282042 - DNA, 303 bp, Cannabis indica
tttgtttatgcatttaatatttcgtatagattacttgttatatagctaactttaaattttgtttgttaatggtatagatatggccaactcaggcttaggatcagatttagaccaaaaagcagagtgtcctaggccgatacctacacgaggagctactcagatgaatgaaatatctaagctgatggatcaaggaaagacagtggcactcaaggtgaatgacaaaggatagtagtgtggcaaaaactactctaagctagtattgactttaggagttagtgttggattatgttttaccaggatcta

SEQ ID NO: 282043 - DNA, 667 bp, Cannabis indica
tgtaaagaaagagtttctagggtatatttgttaattaagatactttggttggtctaattaataaatataataaatgacaatattatttaataattatttatagttattaaatagttgaaattgacatttaaatggttgaatttgaaaattggcgtttttgagaaaatgagatgcagaaatgataaaacagcaaaattgcaaaagtgaggcccaaatccactagccatggccggccacttatgtaggctttatcatttaatattttcattattttaatgccaaataattcaaacctaaccctatgtggcatgctataaatagatagtgatggcttcaggaaaaagtaacttttgcatcttattcctttcagagaaaaacctgagccatcacactaaacctagccgccactctctttccttcttcttccttgattgtttcgaatcctcttagtgatagagtagtgcccacacacagcaagtagtacctcaatcatagtgtggaagatcgtgaagaaagcaattcaacaagaaggacattcgggctcagatcttgataatactctgcgacagaaaggatacaagggttagagatctgagtggaaggagacatattattccgctgcacccaatgtaaggtttctcatactttatatgtgtttatttataat

SEQ ID NO: 282044 - DNA, 489 bp, Cannabis indica
tactactaaactatacttataattctatttggcaaatcaaatagtgtttatgtttcaaaagaatgaaagtaattcagaaaacttaaataacacaagtgaaagttgaacaagatgagataatagggaggagaatcctgttgtatgtttacctaattgttaatgcctaattgctatcattttcttgaagtgaatgacagaatagaaattaacctagctcgttttagatcttctaggttctaaatcacatgttccctaataatctacttgtcacataagtcatgtaaatactctcgtttcacatagaacatcgattatccaattttagcattctcaattctcacttttcagatttcgaattgagatcatagaacatgcacaaggtgatcaatcttacacatggaattaaacacaaataaagataatttcacaatcaagaatagaggaatggcactcatgcattaactaggcaaaaacattaaacaacattca

SEQ ID NO: 282045 - DNA, 524 bp, Cannabis indica
aagttgatttcacaaggtacctattgtgtgtgaacaaaatcagcaacacgacaccacctaaccaaacaatggtgtgcaacaatatgatgatggcatcgtatgacaacaactcagcacaggcagatttgcagcaacctggaaacaacccggcaacaactatctgcgcacacaattggatcagttcaagatgatacattttttttaggaacagggaccgtgacatcataatcaacagaaaacaacagagaaaaaactacagtagtagatgaatataaaaacaaccaaaacacaactcaataacaacacaaaaacaacatcaacaaaaatacataaaagaaatataaaaagaatgacagaatacataaaactgtcatgataaacgagttaaacattgacaaaaaaagaaaaataattacgtaaaaacaaacttaataaatgataaaaatcaaggtaataatacattggatttaactttaggcttttctcccccatcatgcactacgttctcaaaatcagaatcggat

SEQ ID NO: 282046 - DNA, 937 bp, Cannabis indica
ttgcgagttgaaatgcaaaatactcttaacaacccgaactaccagaatccgtgggatctaaacttggatcccctgtcggattggttcggtcgtttcctcgggcccacactagctccctttgccgcggagatgaccggcaagtttgcgtctcagcttactcggtgtgcacccaggcggttcgctgcttgcgcatccttgaactccatcttccaggtccaggatctcagccactccctcaccgtggtaagtatttcgtagtttacttttctcattattttttcttaaggatttttactcatacttgtatcctttcccagcttgctgctgaggccagccgcctttccaagaacttaattaatcatggcttcgtcctgtccgactttgggggcatggaggaagttaagaagatccttcaggatctgactgctgaaaggcagctttaccaagaggacgccgagcgccgggaggtccttcccaaggccagtgaggaagaggccaggtggagggaggcacaagcggaggcgatgatccgggaggaggcccttcggagggataggctggaggccaggcaccaagaggagctgagggcggagggcgaagctgctgctaaggccaggcgtgagcttcgggaggctagggaagcttaggatgaaatggctgccaaagtgaagtccttagaggaaattcaccaagaaaacctagagtccagggccaacctggccgtggagctaaaggagctcaaggacttcaaagccaagccttgaagaaagcaaagaaagatgagctcctttctcccacttcctgcagccggtgcgtcaagcgtttcgacgatggcgtctcatggcctggtctacaaatgaccagaatatcaagcttaacttctatcccaagcccgcggagatgattgcaaaattccgggagaagaagagaagcttga

SEQ ID NO: 282047 - DNA, 219 bp, Cannabis indica
aaaattaatttttatttcttttaatatgtatataatgtttttttttgaataatatgaatttattttaattaatttttgttttttaaattatttttctaaaataattattagtttgaccaatactatatttacatatggtattttattgattaactaacaccacgtcaccgcctcatacttctcctttatataaatagatagatatatagatatatgaat

SEQ ID NO: 282048 - DNA, 732 bp, Cannabis indica
cagcaaactcaaattttcatatcttgctcaaaacaaccccaaatcacatgaaaccttccagacctgctctatacctcccctagaacatttctaaggcatcaaaaccacccagattgcacataatcaaaattcaccattagagctcaagctttgagttctaaactcaaacttgagcaaacctagctaacatgcaatcaaatccatctaaacttacttaaacatgcttagaataacctctgaaaacaattagaaacattaacaacaacacagcaacagattcacaacatttccttcaaaaatcacatttttgcatagaaaaatcataactttaaataatctaacaatcaagcattacaagaagcttaattaaactctaatcaacatgcttacatttcagaaaacaacaacaagatcacagcagcaacaatattacaaattcatgcatgcattacaccaaactttcttaaaacacaagaaaacacaaagagaagttacaagtgatcaaaccttgacttggattacacaaagaggagatgaaaatcacaagatttgagcagaaacacccagccctagcagcccaagtcttggccgaaaagagagagagaatgagagtttttttggaaattttctatttttctttaacttagaatttttgaatgaaaatgaaataagagtcattacccccatatattcagccaacaaataattaaaataaacacttaatttcaatta

SEQ ID NO: 282049 - DNA, 790 bp, Cannabis indica
aggataaacactgaaagaacgtaatgtatggattacgtaaatatatatgaatagagttatgcgagcaaggcataaccaggttagactcggtaattataaccgagataaaccttactaaggccttattgtaaatagacgtgtgagcgtaacacgtaggtctatgccacatagacatatatagacgtgtgagagcaacacgtaggtctatgccacatagacatatataggcgtgtgagcgtaacacgcaggtctatagcaaatagacaaatagtgcagtggcaccattaattatgtgataaatatatatgttgagattaagggttatgcgttcaaggcataatcaggttggactcggtaacaagaaccgagatgaactgttctaaggccttattgtatttagacgtgtgagcgcaacacgtaggtctacgccacgtagacataaataggcatgtgagcgcaacatgcaggtctgtgtcacacagacaaatttgaatggcattgttgtttatattatatgatgagcatattgttgatatgttttatactgtcttgctgggcttggctcacgggtgctctactgtgcaggaaagggtaagactattgctgatcagccatgagtgcaggagctgggcgaagaatgtacatgtccgggccatatcagaccaagcgggttggggtctaccagtgttgtatttttgagactctgttttgccgcttaggccggctgaaagaaaagggacttgtaataatattttgtaaatgtttttgggatcccaacttctgtaacttt

SEQ ID NO: 282050 - DNA, 799 bp, Cannabis indica
gaaaaataggccattctgtaatccttaaatggccgcggcgactcaaaatttggccgcgaccactgggcgaatttccaaattttttttttcctatgcagtgcataaataacaggaatactaaaaattgttttactagttttctaaacaaaactagacagaatagcaaaagaaaataacactaaaacataaaagagttcgactaaatcataaagaacacttgggttgcctcccaattagcgctgcctttatcgtcgcacagctagacgttgatcgagttcttcatagtggtgccagaatcatggcggacttggcttgatcaaatttacctcccaagtagagctttaaccgctgcccattaactttgaaagtattagggccttcacctttcagttccaccgcgccataaggaaacaccttgaccacttaaatggccccgaccaccttgacttcaatttaccagtaaacaacttcagccttgaattgaaaagtagaacttgttgccaaggttgaaactccttcctgactaagtttcggtcatgccaccttttagttctttccttttaaattttagcgttctcataagcttcgttccgaaattcctccaactcatttaactgtagtaatcttttctgtccagcagcctttaaatccatgttcagagttttcattgcccaataagctttgtgttctaactccaccggtagatgacaagcctttccaaacaccaacttatatggtgacatcccgattggcattttgaacgctgttctgtaggcccacaatgcgtcatccaactttc

SEQ ID NO: 282051 - DNA, 519 bp, Cannabis indica
acagaagagagaaacaataaacttgtaaaagcaacaaatacgagtcttacctgatcgattttgtgacaggaagctccaaaatcattgtactgcaccattgttgatagtggatatcaagctaatctctgagacgagcttgacagagacgtagccctaattttggggtgaactctgaaacaaatctggtgttttctctccttatctctcatttttcattcatctaaacctaaaagctatgtgtgtgtgtgtttagatttggtttttctgggttttctgggatctagggtttggaatcgagcaagttctcagagagaacttgctctgctagggtttcgaacttgtgagtgtgtgagtgaattgtgtctgagtgtttgggattctagactcttctattgagtctttgaatcaaaggattcatacgacatcaagattggtgtcgtggggttaatacggggtcgtattggtctaagttttacttagacaaggaaaggtcaattctgaccttaagactgatattat

SEQ ID NO: 282052 - DNA, 631 bp, Cannabis indica
tttcgcaccacttctttcatgacgggattcaatcttcgctgatgctcaacagaattgctacaaccagcttctaaaagtatcttgtgcgtgcaaatcgttggactaataccccttatgtccgccatagtccacccgattgctttcttatgctttttcaacacctctagcaaggcaccttcatcttcaactaccaagtttgatgctataataactggtagcgtgtcattctcccccaaataggcatacttcagatggcttggcaagggtttcaactccaacttcggtggttcttggatggagggttttggaggcttaaaattactttccttcaactccaaagattcaaagggcttcttgaagttaggaataggttgcaatggctccacccaagcaacttggttgtcttcatcttcactcaagtcttcaagctcatcaaaagaacttataaatttctcatccttccaagcttccttgtgaaatttttcagccactatcgagtcaattacacttatgcgggagcactcttctatctcatccggaaatctatagcattgaacacattaaaggtgactttttggtcattcaccctcattgtgagctccccattttgcacatcaatcagagttctccc

SEQ ID NO: 282053 - DNA, 987 bp, Cannabis indica
aggtaaacaaaatgtttaaagacctgatcgggcgaaatatggaagtgtacggggattatatgctcatcaaatccagaaaggctgggtgacacatagacgacctgaacgaatgcttcaaagtcctcataaagtacaatatgaaactaaatcccataaagtgttcctttagagtcagctcgagaaagtttctaggcttcatcgtcaatgcccgaggaattgaagctaatccagagaagattcaagccctccaagatatgaactcgccaataaaaaccaaataagtgcgaagcttgactggttggatagccgcgttcagcagatttgtttcaaaatcaacagataactgtgtcccattcttcaacatcctgcgaggaaacaagcagttcgagtggatggaggagtgtgaaaaagctttccaagagctaaaagcagaacttgcaaaacctcccgtactctcaaaacctctggacggagaagaactgggaatatacgtagctgtcacagaacatgccgtgagtgccgtgctaatcggagaagagaacagcgtacaacatccagtctattacatcagtaaaagactcattgaggccgagggccgatacccattgatagagaaactcgcttactgccttattctaccaacaaggaagttgaggccttattttcaagctcatccttttcgggtatacactgactagccactacgccaaatactgcaaaagccagatgcttttggacggctactcaagtgggcagtagagttgagccactatgaaatcactttccaaccccgagcaattgcaaacttgaagttgatggcccatcagcaaaagttagctcgatatttcatggttctgacactggttctgtgtccctagtctggttccatgtttgggtctgagttcaggtttgggtttcggtcccgagtccacgtttgggttgggatccgggtccggctcccaattcgggtctaggtctgatttggag

SEQ ID NO: 282054 - DNA, 200 bp, Cannabis indica
agtcaagcttgcagagaaaaagtcaataaatgttatctattttattggaggcaccacctcctcgccaggaggtccttaggatcaaagaggtgcctcatacggatggaccagatctggatccaaggatcctcgatcatgccgcagcagccgaagccgcggaagacactattgagaatacctactacgacccatagataata

SEQ ID NO: 282055 - DNA, 517 bp, Cannabis indica
agtacactacacagtttgatcggttggcgaggttggcctcgggaattgtgccaaccgatttcagtaagaaggaaaaatatctggacggattaaatgtgaagatcaagcatgaccttatgatcactacagacgacaagaccacctatgctgagatggtggagaaagcactgcgagctgagggcgcagttggatgtatgtcggagtcagttaggactccagtgagtggcggggctcctacccctcctgcatcaggctttagcaggggaggtagtggttcggccatggaccagaagaggaaaacatccactgcatccggtggctcggggcagaacaagaggttccgggggaaccagagtagaggcagtcgtcagggtggtgctgagacccggttttcttacccagagtgccccagttgtaaaaggcaccatctgggtgagtgcagaggtcagggatgctttcagtgtggcatgcccggacattacaagagggattgtccccagctcagatcagaggcacc

SEQ ID NO: 282056 - DNA, 693 bp, Cannabis indica
tgatgtcgaactgactcaactccatcgcccactttaacaatctccccgatgcttctggtttcgctaaaacttgtcttaaggggaagtttgtcaaaacttcaatgctgtgagcctggaagtagggtcgcaattttcttgaggatattatcaaggcgaaagccaatttctccatttgaggataacgcgtctcggcatccagtaatcgcttactgacgtaatacaccgggtattggcgtccttggtcctcgcgtattagtactgaactaatcgcatattcggagacggccaaatagatagacaaaacttctccggacaatggcttcgataagatcggaggttgccccaaatgcgtttttaaagcttgaaaggcttgctcgcatttttcgttccaatgaaaccttttgttgcctttcaaaatctgaaaaaactccttgcacttatcagaagatctggatataaagcggtttaaagctgcgactttacctgtgaggctttgaacctcctttggcttggtcggtgatggcatctccaccaatgccctgatcttcgcaggattggcttctattcctcgctgattaaccataaaaccaaggaatttcccagagccaaccccaaagacgcatttcaacggatttagacgcatcttgttgttggaagttatattaccaggaacttagatctactcacaagtat

SEQ ID NO: 282057 - DNA, 836 bp, Cannabis indica
gaagtttggagtgatttgaataagttttggtagtgtttcggtgagtgcgaaaattgggattttcgagttttatagtttttagaaatttctaagagatcagaaatcatatttttgtcataacttttgactcgggtgtccgttttggacattctctataccatttcgaagcttgcgacgagatctacggtgtatgttttagagccaaaatataagttttattttagtgtatttataccacggagtttggtagaaaatcatagattgtcttatgtgaatattaagcagtgtttttggataaacacttattggtttaccgttgttgtgacatagggccgagatcatcggggatagttctccacttgggttggctgaaatatatgaacctggattaaaggtaagaaaattatattgtactgcatagtacgttatatgtaatacaattagtattgcaatgaattgattaatattgagatgtagttaatattgttataaaatgaaaagattgattagttgagtatcgataatgtgatgatattatgtatgtcatatatgggctcacctgtttaggtgatgcaatttttcatggcgacgtactgggcataagtacgcgtgtcagtgatatatgatgagtaccgagtgtaggtacgggctcacctgattaggtgatgcgatttttctggcaacgtattgggtgtcagtgacatatgataagtaccgggcgtaggtacgagcttgtataattagacgatgcgatatattggtgcccgattgtggcacgggctcacctgattaggtgatgcaattatatgatatattggtgccagattgtggcacgg

SEQ ID NO: 282058 - DNA, 68 bp, Cannabis indica
aggagaggaactatatgttagtcaataagggtgtgtttaaaacccttagactacaccacataagattt

SEQ ID NO: 282059 - DNA, 391 bp, Cannabis indica
ttttttgattttatttaagtcgagtctgaagtccgatcgagtccggagtctgaggccttagccggggtcagggctagagccgatgttcggggccaaggtctgggtttgagatcgaggatccgggtctggggccgtggtcgaggtccgtgtccagggtaggagataaggttcggggccagggtcggggtccaagtcaaggtctggggtccaggccaggatttggatccagggtctatgtctggggcatgatcagggttcaagtccgagtgtcaaggtccaaattggggtcaaaatccaaaaattgttaaaaaaaattttaaagtaacttttattttgttttcaaaatttttaaaacttaaaattttgattcttaaataaaattaaaaataaa

SEQ ID NO: 282060 - DNA, 601 bp, Cannabis indica
tggtacgccttcaggagatatatcttagcaagttgtacaaaaacaaggaagaattgaagaatgtagtgggaaggtatgcactgaaaaataattttgagtggatggtaagtaagtctggcactgatgtgttttacgttacttgtaaggatgaaaattgtaaatggagattaagggggaagaagaaggcactttgtgacatgtttgaggttactgtgtttcacaacgaacacacatgtaacttggattctagacattctgatcaccggcaagcagcaccgtgggtcattggtcacattattaagaacaagtacacatcagatggatctaactacgaggcaaaagacatacagagggatatgtttgatgaatatggcatcaagatgagttatgagaaagcttggcgataattaatgtgcgattttaatgcgattattaccagaatcatttttcaagatgtcatcatttcccatagttgccgttataagacaggtatttatcaaaaattaaaaaaataaagaaattgatacaagcaacaatttaaatagctttaaatttacttgttatatataattttggtgagattataatgcaattacaaaag

SEQ ID NO: 282061 - DNA, 1178 bp, Cannabis indica
tggactatggcagacataaaagggattagtccagcgatttgcacgcacaaaataatcctagaagctggctgtagtaactccattgagcatcaacgaaggttgaatcctgttatgaaggaagtagtgcgaaaagaagtgataaagtggctggattatggtattgtatacccaatttcagatagttcatgggttagtcctgttcaatgtgtgccaaagaaaggaggaatcacggtggtggctaatgcgaacaatgagttgattcctactcgaactgtgaccggttggagggtgtgtatggactatcggaagctaaacaatgctactcggaaggatcatttcccgctgccatttattgaccaaatgttggatcgtttggcgggaaaagagttttactgctttcttgacggatattcgggttacaatcagatttctatagcaccagaagatcaagagaaaaccaccttcacttgtccatatggcacctttgcctttaggaggatgccatttggcttgtgcaatgctcccgcgactttccaaaggtgtatgatggctattttctcggatatggctgagagtattttggagatattcatggatgatttctctatctacggggaatcatttgggatttgtttggagaatttggagagagtgttagcaagatgtgaagaaaccaacttggtgcttaactgggagaaatgccacttcatggttcaagagggtattgtgttgggtcacaaagtgtctagaaaggggatagaagttgacaaggcaaagctagaagtgattgagaagttaccagcccctaccacggtgaaaggcataagaagcttccttggacacgcgggtttctataggcgcttcattaaagacttttctaaggtgtccaaacccttgtgtagcttgcttgaacaaaataggccatttgagtttaccgctgaatgtaatgaagcattttcgaagttgaagacagctcttgttacggcccccgtgattgtagcacccgattggttattgccctttgaactcatgtgtgacgcaagtgattttgccattggggctgttcttggacagcggaagaataagacctttcactccatttattacgcaagcaaaactcttgttgatgcccagattaactacaccactactgaaaaagagttgctagcggtggtttt

SEQ ID NO: 282062 - DNA, 673 bp, Cannabis indica
gtcctgctgatgtagtcaagacaagaatgatgaagtcagattgaggggtcgttgtgtacaggaattcttatgattgtttggttaagactgttaaaattgaagggcttaaagcacgtttggaaaggtttctttcccacatgggctaggcttggtccttggcaatttgtcttctgggtgtcatatgagaagtttaggaaaatttctgggttttcttctttctgatgaaattaattaaaaccttttaccaattttcatgttctactctttataatagtctcttctgtcattggactgagataaaaccatataatgcaactaaactgtaattttgtaactttacacgttacacacaatgacacaactcatcatgctaaaaaacatgttttattgttttcatcttactgttttcattacaattttctattataatctcttaaaatcattgaaattaatttttttttttcataatgtattatagttataatattattttagtaaatttttaaaacattttaaacaatttacagtacaaatatttttcttaatatttttgtttaaaaatttttaatttattctcgatattgtaaattattaatttttttttaaaaaaaatttacatctatgatatttgtttgtaatcataaagaatacaataattaaaaaaaaaattaaa

SEQ ID NO: 282063 - DNA, 700 bp, Cannabis indica
attgttgtaaaagggagcatcgaactcatctgaatgatgaaattcgatacccactctctcatcatctacattagtgccaacttgctcgtccaaaccaacccccagatcagtttctgggacaaaggtcccaacaacacttctaggggttacatttcggggagtctgctccaaattcacattcttcttcaccttagtcacaaatagtggcaacaagttgtccacactcatttttgccttcatgctcaagaacactcgtagttgactatctttcactaaaacctcaggtggaaacttagtgcctttcatgtacatgtaaagaacttctaacttcaattcatacaccaaggggtccacctccaactcctcatgcaaaacttcacgcaactttttcagtgtacagtcaatgtccaatatcaatgtcttactttttgaggaatcaaatacccagttgaaaccctccaaagtccaaacgccatcatacagtacaggcacaaatacagatgaatctgtcccaaagaaaaatacaaacaaacatacagaaaaaatcagcatactatatcgcacatacatcgcacaaggtactacagaggtcgcacaacgtcgcctaatacaacaatcaatatgttgaagtatgatgtcgcacaataatcgcacagacaagggacaatatcgcataaagtcgcacaagaacacatacatg

SEQ ID NO: 282064 - DNA, 653 bp, Cannabis indica
gtgaattggaaatataaactaatttcggtaaattaaaacttttaacacaaaattatgcaattagtcacttaatcaaataaaagcaagtagtatggcaagcaatatattaagacaaataatcaaacttgtaaagtaaagagtttaaggattagaaaatgcaaactctcgatttttataaggttcggtagagctatgccacctacgtccttggtcttcaaagctatggacctagctttcagtttcaatatcgagccaagttaacgggcttgactaacccttacaaccgggaaattttcaccaaggtatttccaaacctcttacaatagtttcgcacccccgaggactattaacctatgttatcccaaaatcgacactctgacgtggcatcacaagaatggtgacacgtggcatcaacttagagcacctggtcggatcaacatgccgagcaggatgcctcgctggcatgtccataatggaatactcaacgagccgtgcagaataagcaacacttagcgaattcagccaagcacttcgtgagtcaccagctcaatcccaataactcagggatcaacttgagtggatatggcatacacacgattccactatcggtgtatacggcctcaatcccacgatcttagcattcagcaatgatc

SEQ ID NO: 282065 - DNA, 667 bp, Cannabis indica
atatcataaacttactgttgtatctctctaagtcaatatcacttagttgatcttagatcaatagatcttaatcctaagatggttaggttcgatctcaactatattatttatgttcttagagtttgtactatcccaataagcctaatggtaaataattaaggtttatatttatattatggattaatgaggtaataagtgggattatgatcctactaatttatttcaacaaaaaatttaaatttggctataagtggatatataagcgtaatttgttaattacggagatttatttgaaatacgtagatatattatgagtgatttgtgaaataaaaatattttcaggttcggcaaccctaacgacccgattggaggccaaaaatgtcacaacggttttagttaaaaatattgatagaattgttgagataagttgattttagaaataccaaagtattttgggatactcaaaattggccaaataccctagaaatagaagtttcttagtggctaagaaataataagataaatattaataataaattttttattaatattatattatattattattaatgttgaccgaggttttcggcaaccaattaagtaatatataagaagagctgtagaaagtttaatgcagaagatttttatatggttggggcattaatga

SEQ ID NO: 282066 - DNA, 788 bp, Cannabis indica
aattataattaattaaatactaaaaaaggaaagtctacctatcagtaacctgctattacaggttaaagaaaaacgtaaccatatagttacaataaaaatgtaaccattgaatagtcacccatacatatatttgttgcatattagtaagttttttttttttttaaaaaaaaatacacaatttatgataaagataatgaatttatcaaaatatggacaagaatgtgcaacgattggggatgaacatttctcccataaattgaggcccgggggacttgtccatgtgaaaatcattctctaccccgacgtggacttgtttagtattttatttaatatttttaataatatttcataatttatgtttgcatttctttagtatattaatatcatttttataatttttaaattttcttttggatagttattagtttattaaataataattaatgtgtaatatttttagatattttaattttttttataaattttagttttttattaggaaatttcccactccgtctctgctctcattaggggattttttcatcccattctcaataggaaataagcaaggatgaatattaaattttttcacgggaatggagactgaggagcatgccctgccaatttttcgcctcgtgggcattcctagtaattgtaataatttttataaacttgtaaactttagttacaaatttgtaaatcttaaaaagaaagatggtgttgttataaaattgtgagtttgtattttattttttttctttgaaaatttagacatttttttttattaa

SEQ ID NO: 282067 - DNA, 528 bp, Cannabis indica
tgccatcccccaaaaagcataaagatgtgcagagcctgactggaaaggtagctgctttaagccgcttcatctcacggtccacggacaagtgcatacccttcttcaacgtattaaagaagtgccaaaagtttgaatggtcggacgagtgcgaggaggcattcaaaaagctaaaagagcacatggccaagcctcctatcttatcaaaacccgttctcggagaagacctatttctttatttggctgtctccgaacacgcggtcagcgctgccctagtccgggaagaagagaaaactcaacatcccgtgtactatgtcagtaagcgcatgataggagccgaaacaagatacccagtcattgaaaagcttggtttttgcctcctgatggcgtcaaggaagttgaggccatacttccaagcacatccgatcaagatactgaccaatcacccgctccggcaagtcctccaaaaacctgaagcatccggaaggctcctcaagtgggcaatggagctaagtcaattcgacttgcact

SEQ ID NO: 282068 - DNA, 536 bp, Cannabis indica
tggttcttcgtctgggttctggtcctaggctgagtcccagatctagacaccgaatggtggtgtgttccaggccccgttacctgaatcctgagtcaagatctagatcactgtcacgggtctcggtctggttctggttcaggtcccaggtcccatttctgagtttgggtttaggatcgagactggggtacggttttaggtcccgaacctagttctgtgtccctagtctggttcaatgtttgggtttgagttcaggttcgggttcgggtccggagtccaggtttggtttgggatccaggtccggctccctattcgggtctaggtctgatttgtagtctgggtcctggtccggttaacgttatggatctagatccactttcagttatgattccaagtccaagtcctagttccagtcccggtcaactccagttttggttcaaattttgggtcacagagtattggttcgggtccacttttgggtttaggactcagttttggtccgagtgtgggttcgactccttgtcagggttcgggtccag

SEQ ID NO: 282069 - DNA, 556 bp, Cannabis indica
attattatagtggattttagtaattttcttaggttataatctgatttattaagattaaatggcattttatttttaataagttagaaattattcaagaaatactaaaacccttttttgcttttctcgtttccttggttcggccaaaagaaaacactaagagcaatcttgttttctttaataattcagacaaaaaataaggagttcttagcaaggatttctgttagttagtgaaagagataccacaaggtaacccctaagttctttttctttttgaattcttaacaaaagttagtttgttcatgcaatttgtgaaagttaacttctgtccaagatatggatctttaagggttgtgtgacagtcagtggtcccgtgattcgtaagggaaaagactgggtaagttgtgcaatcccacaccgcctgaggaaggtcaagtgtgatgattttgagactgtgtaggtatgggagtacacagttaaagagggcttaaatggattgattggtactacctgtatcaacaaggtgcatcttattttttggtagcccatcacgaaagaa

SEQ ID NO: 282070 - DNA, 610 bp, Cannabis indica
gaagcatgggagaggttcaaggacttagaagtgccctaatcatgggattgagaagtggctgcaagtgcacaacttttacaatgggttgatgaatgaaacccgaacactcatagatgccgctgctggtggagttttcatgaggaaaagtgctaatgaggcctttgaattacttgaagagatggccatgactaaccaacaatggtcaacagaaagaggtccatctaaaaaagttgcaggtatgtatgaagtggatgctattaccaagttgacagctcaggtagaggccctaacaaaactgataactgttcaagtaaaacaagctcaggtggtttgtgagctatgtggaggtcctcacccctatgaggaatgtccggtggatgtgaatagtttaccaatggatcaagcaaaagccattggaaactatgcccaaaataataattatgggcgcaaccagcaggcgttctaccagcagagaaatcagccccaacaaaaccaacaacagctgcaacaacaaagtcctagtggaggatccaatatccaagctgatttattgctccaattcatgatggagactagatcctctattaaaactctagaaactcagatggaa

SEQ ID NO: 282071 - DNA, 751 bp, Cannabis indica
ctttgcatatttattgttaccttttcttaacttgacaaagctcccccttaatcatatactcaataaacttggtaatactttaaagcataatatgattaatgccaaaataatcaattccaatgtttctcccccttttgatttcatcaaaaagggtggcataggaagcaaggtcaagctaaatatatttcttccccttaatcatacaagatatgacttgtatcaatgaagcacaataggcaaagagaaatttcagaatggataaaaagatgaaagttcatataggcaaaacaagtttaaacattcaatctaccaaaaaaatatgtcaaagaccttgaaagtaagagatactggtaaataatggcatagttatgatttcaaacattttctcatacctcaagatgataaaacaaatgtgttcatgcacttaaatcaattagatgacaagaattgagactttttggtaagtttttcaaaaatttaagcaaaaacaacatatgtacccaaaattagttttatgcatcctttttgaaaaattctttttccataagcttaaacatgattaatatgaagtgtacaagctggaaaaacagaaaaagcttcaaaaatgagagattttggcaagttttactcgttttggtcatagaaggtcattttaagcaacttacttaccaaaaattgattttatgcaaaatcttttttgacaactgataaatgatgaaacaaacatataacaccctaactatcttaggcg

SEQ ID NO: 282072 - DNA, 460 bp, Cannabis indica
tgaaggattataaggacgctcaggcggtcgaggcgaaccgcttgagggagaaggtagatgctttggagaatgccggcctcgagctctctttgatttttggaaggctaatccccaggtcaacttcgactacttaggcgacgccaaggaaatgtacctgaagtactgcgcggcccaagttgcctatggtgggaaagaggtggctgcttcaacttccggccaagcttctgaccaggctgctgatgcttctcctgctccagtcggctaagaagaaccaaatccagagactgggactccagccgtttgaacattgatctttttattcctcctatttatatatatatatattatatatggccgtaaggcctttaatacatcatgacccgccaaacggtcttaaaacttgtaattaattttcattttttggacaacgagctgactgggcaacttttaatcccggtac

SEQ ID NO: 282073 - DNA, 579 bp, Cannabis indica
ctctcacacgtctatatacaacaaggccttagtaaggtttacctcggttctagttaccgagcctaacctggttatgcctttctcgcataaccctactcgtatatatacataatccatacattacgttctttcggtggtttatcctggtgatatacaccaggtctaactcagttatgttttatacacataatgcttaacaaaccctcatgtattcaatatttatgacatcatataaaatcttagggtaataaccctaactcatattttcattggattaataacattaccatattttaacgctttcttactttcataatattctagggtaacaacccaagaccgcattaaaattaaactcaaggtactagtttaccgagtctaacttcattatgccttgaacgcataatccataatctcattatacatagcatttacacaatacatttcactagggtaataaccctaaactatcaatcgctcatattagggtaataaccctaatcccggttacaattactcacatatatcatattcaacataagtgtcaccgtgcatactctacgtgcaaactactgtctt

SEQ ID NO: 282074 - DNA, 434 bp, Cannabis indica
ggattcctccctatgaacggactgcacctactcaggtctttcttcggagagcccaggcctttgcctcttacgaccgggctgatcttgacgtcgggggcctggtcactacggagaactgcaggaaggcaaaactcatccttccgcaccaatccgtggaggactctaacctttcccgggttatctgtcccaacgtgagggcgccggtcgcggagaagaccttccgggacgagatcattgccaccgcagagaagaagtaccaggagtatctctaccggaaggctcaggagaaggcgtactctaaggcccaggcggcttccgggaggtcacttcgcgtggggagcccggttgagagaagaagcaggcgatcgccgggaatgttggaatatttattttaccaggatcttagatctactcacaagtatgttgtttaaaca

SEQ ID NO: 282075 - DNA, 508 bp, Cannabis indica
cccaatgtcctaaacttcttgcaaagaaacaaggtatttatttctataaacttgctgagttttagttaattattatccaattggattattgattctcgactaactttgtttatttgtttttcttcttattatagcccaagctgcttaaactcagatgctatcttagtgagttggatcgcaaagctggacaaagcgatgaagatcgtccaagataaagatgaagctcatttatttatttatttatttttgaattaattgttttagtttaaaaacagtttggatttcgaattttagtttgagatttttattccctgtttttctcataatgttgcaatacatttttttttattattaatagtattttattttcaattacaaataaattgcaatttatgagattgagcttcacttactttatcttacaccataattaccaattatattttatatgtttgtatgtgtaagtatttttattattggtacaaattctataatatttacaactctt

SEQ ID NO: 282076 - DNA, 491 bp, Cannabis indica
cagagtaccaggatccgtgggaccttaatctggaccccttatcggactggttccgtcgcttcctagggcccaccttggctccttttgccgcggagatgaccggcgagttcgcttctcagctcacccgatgcgcgcctaagcggttcgccacttgcgcttccctgaactccatcttccaggtccaggacctcagtcattctctcacggtggtaagtacttcgcaatttttgcttttccttttattgtttatattttattttttctttgagaaacttctccttcttatccttgcattatggttcagcttgctgctgaggctggccgcctctccaagaacatcataaatcatggcttcgttctgtccgactttggggacatgaacgatgtcaggaaggtccttcaggacctcacagcggagaggcagatctaccaggaggctgccgagcgccaggaggcggctgccaaggccaaggaagaggaggccaaacgga

SEQ ID NO: 282077 - DNA, 300 bp, Cannabis indica
  modified_base (5)..(5): a, c, t, g, unknown or other
aaaanaaaaaaaaaaaaaaaaatgtgcagaaaagttcttagcaaaaacaaaaatgttataattaggattatttttgtacaagctttaattaaaatagagatattaaactctttagtttatttactatatatttctcagtaatttcaaaaccattctagctgtatagaaaaatcccacttatagtttattttcctataaagatttttgaataaattgtggctaaaatacactcaatatatttttgtgaaaattacaccaaatatggaattctatacaaaagtttgataaatatggcttttt

SEQ ID NO: 282078 - DNA, 626 bp, Cannabis indica
gagaagctgtttaagaaggaatgcgacgacatcacctttatggagagtgatgcgagatgggtccatcacccgcattccgatgcactagtcataatcgccaatattggcggggataatgtccatcgcatacttgtcgacaatgggagttcagtgaatctgctgaatttccaagcattcaaacaaatggggttgcaggagaaggatctgcgacctatgacgtcgagcatctatggttttacaggcgacgtcataacaataaaaggaatgatcaaactcccaatcactttgggaactgccccagtgacagccaagtcaatggcggacttcgcagtaatcgaccagtactcagcgtataacgccgtaattggtcgaccgatcctgaaggagatgaagatcataacctcgatctatcatctgacaatgaagttccctactcccgctggagtaggttctgtgcggggagtccaagcagattcgcgggaatgctacaacacagcagttaaactcgcagagaaaaggacggtaaatgttatctaccttttggaggcaccacctcctcgccaggagatcctcagaatcgaggaggtgccgcacatagatgaaccagacttggatccaagaatcct

SEQ ID NO: 282079 - DNA, 741 bp, Cannabis indica
tactcctaaaaaaagaaatgtactgatgcaccatttctaattttttttccaagatcacgtacatagtagttgttaaagacattctataaattttcaagaaatttaaaataatttagattacagaaagcagtgttcaaataatttacaatatccactttaatgtttgttccttactattctatctcaagtataataataaaatatgtattttgtaagttatactataattaagataagatgtaaaaattaaattacataaatttttgttataattatttgtaaaataaaaattaaataaattaaaatataaataaaatggaagagctaagcacgtgcattgtgcacgtgctagatcacctagtaattataaaagcatacaaatagtgtgagatttacaaaagtttatttttataataatggaaacacgaaatagtctagataacaggcctaacattaagtatgaattgtttgtactgaggatgtcatgtcgggctttaacaagcccttccatttttattaaatggacttgctctttttgttttcatataataaaatttatttatttctttcattttttagactaatttttaaatttttgaagcataaaataataatattgttatatttataatgttctataattttattttttttaaaaaaaaaaaagtatttgtataattataaatagtcttttttcaattaaaataacacacttgaattattaattaaatttatatttat

SEQ ID NO: 282080 - DNA, 650 bp, Cannabis indica
atattataaatgacaattttatttgataattattttaattattaaatgaatagtttttggcatttatagggttgaaagggcaaaaagtggtatttgtgaaaaatagataaaatagttgagaaaaatgacaaagcccaaaccaatgtggggcccattaagtggccgaccataaggtgcttattttaccctatttttatcatttttttattcctaataagtcaaccctaaccctattgaagatagtataaaaggatagcttctcttcatccaactaatgcctctgaagctaaaaacctagctttctaaagacacttcttcctttttcttcttcctcttgaatttttgaaaatacttagcctttcttcacaaaatatgttcagccattagtaattgagtaagttcccacacacatcaagttggtcctcaatcatagtatgtaagactgtgaacaatccaaacacaaggaaggagttttgggctcagatcttggtgatactctgctacagaaatgatacaagggttagaaatctaagcggaaggagtcatttaattccgctgcacccactttaaggtttctcaaacgtttatgtgtttatttaaattgttttagaaattcatattaggatgttaaaaacatacatggtagtaaa

SEQ ID NO: 282081 - DNA, 659 bp, Cannabis indica
taaaaaatcatgtggtgctattgagcctcctttagatttcagcgtcgtgcaaattgaagtcaaatcccggtttgtcattttacaaacttgtggagaagagttatttgatttggtacgaaactgttatttttcattctgtcccttatcctattgtttagttttttgcttgtcaatttttaactggttattatttttatttattgtgtgtagcatttgaatgttgcattctattatcttaagaagagtattttatttgatgccaatgtgaataagagagtgatgaccacatgcactcatttcgaagcaacactgaagggagtttatgatgtttttattaaaagctaagcgtgatcttagtgttataaggtatgacaatatggttaccgactatattctgggccaatataacttttgtttttagccttgagttgatgtggatgatgttgtcggtccctgtcacgttactctgcaacaacattggatttttctacacttcagcattttgagaaggaaaatctttgtctacaattcaatgaagaatacaaagacaaatcaaaagaagattttaccagatcttctagcatattgtgagaaactgccctattcctggatttcttaaatttttatgatagtaggaacgatattagcttggactcagg

SEQ ID NO: 282082 - DNA, 769 bp, Cannabis indica
gatttagcttgcctacaagagacacaccaaccacaaattcgctcaacgccccgtttcacatggggccaaaagaaatgctcttgcaacatagctagagttttagcaactccaaaatgtcccatcaaccctcccccgtgggactctctaacaagcaaatctctcacagaacaattaggcacacacaatctatgttccctaaatagaaaatcctcatgcctataaaactttccttcagcagtcttttcacaaagagcataaatttccccaaaatcatggtcagcagaatacaactcttttatatgttcaaacccaagcaatttagcatcaagagtagagattagagcatacctgcgagaaagggcatcagcaaccacattctccttaccttgtttataccgaatgacataaggaaaggtctcaatgaactcaacccatcgtgcatgtctcttgttgagtttgtgttggcttttcaaatgtttcaaggattcatgatccgtgcgaatcacaaactcctttggccacaaatagtgctgccatgtttctaaggcacgcactagtgcatacaattctttgtcataagtggggtaattgagggcagccccacttagcttttcactaaagtatgcaagcggtctcccatcctgcataagaacagcgccaataccaagcccagaagcatcacattcaatttcaaaagtgttagaaaagttaggcaaagcaagtaaaggagcatgcgtaagcttgtatttcagcagctgaaatgcctcct

SEQ ID NO: 282083 - DNA, 125 bp, Cannabis indica
gggatggactagtgattttggagaagtataaaaacctatctgaactctctaagtctaccaaagagactgaatgttaaagttgcaggaaagatacttattcaatctaaggaaacttctatatattt

SEQ ID NO: 282084 - DNA, 525 bp, Cannabis indica
ttctaactctggaaatggggaaacacccaaccgaggcactgaaatggacaaaaattgagaaaacaaagtgttcgggaatcctgccaaaaccggctagccggtttttgtggcattgcaaaccggctagccggtttgcaccagtattcccaaaacacttcatcctttgctcaattttccaccaaatgttaccaaactttccagagtacctacccaatgtaatcacaacataatccaaccagtgcttcacagaaaaatacaccaaatcaatttatgccattaaagctcaaagctttaaactcaatgttcaaagttgcacaaaacttaaaccaatcatcaaaaccagcagctaggacttataatcaactcaacaagatcctaaaattcgaaccctaggcatatgaaaacctaacagcccctattactcaaaaacaccatttcaacctaacttaaaagcttgaaaataaataaccaatggtctagggcttaccttagattgatttccccccttgaatccttgctgaaaac

SEQ ID NO: 282085 - DNA, 690 bp, Cannabis indica
accccaaataacataaaaacaaggaaatccagggttcctgaaatttccccaaccggtagaccggttgcccaaccggaattccggttctgggaattttcaaaacccattcggaattccggatgcacaaccggaattccggttcctcgcaggcagaatttcaaaaattcacacaatgctcaaatctaatccaaacaacctcaaaccttccagacctgttctataggacccaaataacatttctaaagcaactacacagtccagaacacacataaaccaaaaatgccattaaagctccaagctttgagttcaaactcaaacttggttaaatacaactaacatgcatccaaatcagatcaaacctacttaaacatgcatataaaagcctctgaaaacacaagaattcgacctcaacaaacacagcaacaaaactcacaaatccactttgaaaactcaagcttttgcatagaaaaaaccataactcaagcaacctaactatcatgcattactaacagctcaaatatcctcaatttaacatgcttaaatctctgaaaacaacaataaaatcacagcagcaacaaccacttaaactatgcatgcaacctcatctttttcaacattttccataaattacaaaagggaaaggtttagaaccttaccaaagcttgatgaacactagattgaaggagaaag

SEQ ID NO: 282086 - DNA, 959 bp, Cannabis indica
gttaatatttgtttgcattttttctaaatccgaaacatgaagtgttcttgagcataattgtttgaaatacacacacagctcaatgattgtgtcccggatttcttttttcaagaacttacggatacctgccggtagtaaacgttgtaacaacacatgacaatcatgtgatttgagcccggaaatcttgcccgtatccaaatttacatttttgtctaagtttgctgcaaaaccgtccggaaatcgtacagactttatgaagtctgcaaattcaatccgttcttgaacactaagtgtgtaactagctggaggcttcttccacttcccattccggtcttcatacaaccacaactctcgtcgtatttgcaagtcttgcaaatccattctcgccttgtcggtatcctttgacttcccgtcgatacttagaagagtacctactaagctgtcacacacatttttctcaatgtgcattacatcaagattatgtcgtaaggactttgacttccagtactcaagctcaaaaaaaatactttttttagaccaattgagctcttcactagaacgcttccgtttcacacccccgaactgtttgtgttttccaggcaaagtcaatggaattcggtctaattgagataaaatatcatcccccgtcaatacaggaggtggtgctctcttctcaggcttaccattgtactttttgcttctccttctcggatcactcatttcgagaaagcgtctgtggccaacatatccaatcttactatttaggccaatggaaggagtatgttcattgcaagtgggacacgccatatacccttttgtgctccaaccagacattagagcataagcaggaaagtcatttattgtccacaacactgccgcacgcattgaaaacacagttccgttgtaggcatctcgggtttaacacccgtctcccacaactgtttcagttcatcaattaa

SEQ ID NO: 282087 - DNA, 510 bp, Cannabis indica
aagtagcagatttagcccgggagtaggtgtaagccaacttcaaaccggcctgcataaaggaaaaagtcaacatatggagctaagtatgaaaagctaaaagggaagtgtcaaaaggaaaagactaaccctggtaagctccttcaagactccacccaccaacacatccagagatgagttgtcagcaccagcccgttgctcaccgacctcaggaaccagccgattcatgtagtgagccatcacctccttacccttcttggcctcatgcaacacaggcatgggtggagttggtgcctgcacccgctcagggatcctcctgaccagttcggacccagatgttggtggcccagactccttagacttggcagatttgggagtggaaggatttgcagtagtcagctcctcaaaaagttcaataacctctccagaaggtctcttctctgaagacccctctccgcccttagacttcttcgccggaggggaggcgctagagcttccactcatcctcttcct

SEQ ID NO: 282088 - DNA, 88 bp, Cannabis indica
gagaagagtattcctaaacaccaaagacagaaagtaccaagtcgggtaaccactttaagtactaaatgaacatttgcttttaagtgaa

SEQ ID NO: 282089 - DNA, 585 bp, Cannabis indica
aatgaacaactgttattaattgaataggcccaataactaaatgggcctaaataaattctatcaagaactatgataatttattttagcaacaacaacctatatgcatctataataaaattaaacacataggctcacacaggcacactttggatgggtcctatcatgttgctaggtcatacacagataaaagaagattgtaaatttacatgttacaaattattaacttgaccaagggagccatcagatcattagatctggtgttgtcaattgaatttcgcaacaccaaattatatgatattattagtgacaagaagcaatttacgtgaaaagacaagtgcgagtattcaacctagaatagcgagtactcaactgggaatgagaaataattaaccaaaaactggaaaataataatgagacagagaattatagtggttcagtcagattgtggtctgcttagtccactgtagcaagagattcgtaggtgccatttcacggtggatcacccctttatatacaaagcaggtgtccgatcagttgtacaaggattgcattcattgttaatacgtttttacacattgaattaca

SEQ ID NO: 282090 - DNA, 520 bp, Cannabis indica
aaaaaaagactttacagtgtttatagtattaagttcatgattatattagtccaccataataattctaacattcccccacttgcacaatataatcaaccaccataacattgtctatcacacatataaggtaaccaattaagacgtacataatatcatatcgacatgatacatatatatattatgtatgaattgaccttgaagacatttatccattaacaatcaaactaaacatgcatgaggtacaacaaaattaagactatgcgcattcatctccttttatacctgtcacttcaataaacaacacatatatgcatacatatgtcaacaataactagaagtgactacaatatcattatgcatgttcaaaacacaaatcataagcattccatacaagatactagcatgtctgatacataataataaaactcccactgagctcaacaagcaaggctcctaacaatcccattcgagcaacatgctctaaaaatacacatacaggtaagcctttcgttagtgggtc

SEQ ID NO: 282091 - DNA, 903 bp, Cannabis indica
tcaagataggttaattgcataattttagtgatttgaggttctgtagtgtgcagctagtttgggtttgaattctggggttaagataggtttattttagttgattttgtgctgagatagctagttgtgctacagattactcaaacttgaagttagagagcttaagttggctctctaatggtgtttttaatttctgagctatttgatgtgttctgttgcttgaaatggatttagtatagtatatgcaggtgttttagagagtatggtagagtttgggctcgatttgagttgtgggagacatttttggggttccttgcactgaactggtcgaccggttcagggaagcctgtaacaaccggtcgaccggttggtccctaggaaccggtcttccggttgggcctttttcagaaccctagtttttctcatttttgtgttgtttggaacattaccatcctatttatcgatatagttattcctagttttgattttaggtccccaataagtgtttagtgtgtctctcattaaattttgaatattatggttagggccctgtaaagcgtcgagctgcaattccactcaagctgaccggcaaacttgagcacggaaacaaggtaagatagcataatacattgaacattataatcttgaaaaataaaattaattaatataatatgatagaattttaaaactattaaattaattgaaatcttaaattaaatataagtaaagaaaagaaaagaaaatattacttctaaagtattgaactcatgacattttaattattttaagagtgattattataaaattattataagttgaatatgttataggtttttataagtataattattgttttaaaaataaatttaattaaaatattttcttatgtaaatttgaaataaaaaa

SEQ ID NO: 282092 - DNA, 216 bp, Cannabis indica
agaagaatgcaaaatttacctgttacaaattattggtttgacctattgacaattgaaccatgggttaaaatcagatcattagatctgtcaacaagttaaccatggcaatttagatcaagcaataataggttttataaaacttgttttgataatcaaacaatataaaaacacatacacatgcaacaagttggatagttggatatttagtttatttaa

SEQ ID NO: 282093 - DNA, 544 bp, Cannabis indica
ctaaaaaacgtaacctcatacatcccccttacaagcattcattcttaaaccccctcatgcatattagaaacccagaaaacagtgtccccactcaaaccgaaaacgaaacgcagaggagattcgaaaactgacctttttgattctgatgaaattgttcccacgattcgcccttgacagcactgtagaatcgacggaaaatccacagagagaggcggaaaaagaaaaaactgggcaatttatggaagtatttttggtggtttctctgagagagaagaaacaaggaagtttaagggagttgaaggaaaatgagggaaaatggggattttcggttcgaatctggaggtttaaatacccaaatccctcattaattgggatcacgacacgtggcagttggaatacctagagtcacccaatccaacggccaaagatggccacgcctacacagaaaccgaagagttttgtgacgtggcaccataaatgcaataaaaagtaataattacagccgtcattttttcgaaaccctcgatgggacaaccaaaaggtc

SEQ ID NO: 282094 - DNA, 556 bp, Cannabis indica
cgacctgtaacgtcgagtatatatggttttaccagcgacgtcattgcactgaaagtgatgattaaactcccgattaccttgggaactgcccccgtgacagccaagtcaatggctgacttcgcggtaattgaccagtatttggcatacaatgccgctggagtaggctctgtgcgaggagtccagtcagactcgcaagaatgctacaatccagcagtcaagctcgcggagaaaaagtcaataattgctatctatttattggacgcaccacctcctcgccaggaggtccttaggatcgaagaggtgccgcacacgggtggaccagatctggatccaaggatcctcgatcatgccgcagcggcccaagccgtggaagacactattgaggtacctatagaccccatagataatagtaaagttttgaaaattggttctaaattgacttttcaacagcgagaacaactaacgacttttctcaaaaaaaatcttgatgtttttgcttggaaatatttagatatggtcgggatatctccgcaggtcatgtgtcatcgcttgaaca

SEQ ID NO: 282095 - DNA, 682 bp, Cannabis indica
gtacattaataaaatgaacagaaatcatatttataccttaatgaacgttgagattgaacgatttctccgctaaaagcggtggtcggagttaaaccaccacctttttttaaaataggttcgggtacagtgtaaatgggtgaaaaaacaaaacttttttagtgtatgggattagatattgaaaatagaaacttttaagacaaaaatgaggtgaaatggtgaagaaatgagagagatatgtgggtttttagaggtggttggcgagggttttcgtgggtttttcgtgggtttctctctgctgtaagtggctgggtaggctggagaagaagaagtgaggaagaagaagacgatgcagaggttattgaggggagaccctatgccgtcggttcctagcaaagaaccgacggcataggtgcacacgtgtcaataaagtgtgcacctatgccgtcggttctttgctaggaaccgacgacatagggtctcctagaaacccttaaaaaatcccaatttccaaccgacgggatagggtttactactatatatacctacggtttttaccaaaaaaccgcctctaaatgtcaatttcgaatttggtgggtgttctcacaccctttagcttccctttttataaaatgggttaaaaaaagggaagctaaaggcccatattgtagtagtgaaaaaaaat

SEQ ID NO: 282096 - DNA, 794 bp, Cannabis indica
tatttataggcaaaagggtaactgtacgtaaaggaaccttagacgcctcgacttcccgccttgaaagcaaatatgggaaataaaaataatcgagtgcaaccgtcacccgtggagagagaaattcggattttcaaaatattaattgtcagagcattaattagccgaaaaccgaagggacgcccagtcagcttcacatcgagtctcgagcggtcatgctcgacacgtgtcccatttcaaaggcacaaccagctcggaataagtctatacgcaacctcggaggtcccgcacagacttggggggcaaagttatcccaaaattggcactctgacgtagcatcacaagaatggtgacacgtgacatctacttagagcaccaggtcggatcaacatgccgagcaggatgccttgctggcatgtccgtgatggaatagtcaacgagctgtgcagaatgagcaacacttagcgaattcaaccaagcacttcgtgagtcaccaactcaatacctataactcagggatcaacttgtgtggatagggcatacacacgatcccactatcggtgtattcggcctcaatcccacgatccaagcactcagcaatgatcacacgatctttgtatttatgcgctttgtaacgagagaggaaactcttcttcctcaagtttcctgccctataaatagtgaggaatgttcactgggcaagggagatcgatcgaaaactgtaaaacagagatcatacgctgaaacgctataagctaaggctatctaagaattatatattcagagatattattgta

SEQ ID NO: 282097 - DNA, 345 bp, Cannabis indica
gttgaaaagtccttagctttgcccgctaagacatcttctcaaatcttaaccaattcaggatcttctaattgggccactctaattctttccaaaaaatacgaccgaagtgtcagattaaataatttctcagtcaccaactcaatgttcgccctagtcatttctgaggctaattgaggagaaatcatgatcatattaagtatctgatcagggccctttcggcttaaggcatctgccacaacatttgcctttccaggatgatacaagatttcacagtcatagtctttcaccaactccaaccaccttctttgtctaatgttcagatccttctgagtgaagaagtacttg

SEQ ID NO: 282098 - DNA, 599 bp, Cannabis indica
aacaactatacccacattccgagcgatatacttttcccaccttcaactaaattagactccctagcggccttaacagccgcttcttgaaaacagaacttggccaatcggtccggtttagtatcattctccatccccacactgtccgggatcaactatgcaagttctactaccttgccactcggataatctcttacttcatagcattcatttgctctcagccctgtggtagtggaagatttatacccacaccacctaccccgagcctaacaggctctcaattttacttactagatcacctcaggtacacctcctagtgtgatcattcctttctcatagttaaaatctttctaactagaattaatgctaataagcattaccgcacatgcatagacatacttagcaactttatatcaaaaaaaaacttatcacacttctcgaacaactttacacatatcaaataagaagacaattcaaacaattagtaaataatccactaatcaactaacaatcagcacttactaagccatgagtcgaacgagtctttgcagccaatgtacatatcaagccagtcttcaggatctttaaaccttggtcgctct

SEQ ID NO: 282099 - DNA, 628 bp, Cannabis indica
acaatcacacaaatatcgaggaaatccttgaataccctattcatcagatccatgaaagttgcaggagcattggttagtcaaaaagacataaccaaaaattcataatgtccatacctagtgcgaaaagcagtctttgggatgtcctcctctcggattctcaactgatgatagcccgatcagagataaatctttgaaaagactgtcttcccgtgaagttgatcgaaaagatcatcgatcctaggtaagggacatttattcttgattgttagcttgttcaattctcagtagtcaatgcacattcgtagagacccatctttcttcttgacaaacagtaccggagctccccagggtgacacactaggccgcgaaaaccctatgtcaagcaacccttggagttgaattttcaattttttaagttcagctggagccattctatagggggccgtagaaaccgcttctgctccgggtgccaagtcaattacaaaatcaatttcttgatgaggtggtaaactcggaagttcaacaggaaaaacatctagaaattcccgaaccaccttgatgtcttgtggccgaacagagtcaggccgtgtggtatccaataccacggccagaaaccctagacatccat

SEQ ID NO: 282100 - DNA, 453 bp, Cannabis indica
gtaatgtttctttaagtattggaatatcaatttttaatttatttttggattaacttaagaacatatttaaatcatcaacctttcttaaacactaacatattgcattcggtattcacttttaattgacaacattataaaatataatatttagatacacataataataatctcacctaataactaataatattttttctttaatttttaattgtatcactttcaaataacatagaaaaaaactagcataaaatttagtatacgtgcctcacacgtagtttttactatgttgtctcaagctggaaaagaaattttaatcacctaactgaagtcttactgtgcattaatagtgttgacttcgcttttagccaacaacaatgagtctttttgataagcgataaacgatatgtcgtaataagaatatgtagtaaagcaataataagacacagaaatttt

SEQ ID NO: 282101 - DNA, 612 bp, Cannabis indica
tgagtctggattcagttctgggtctaagtcctttgttctgatcctagtctgggttcgagttgggtccgggtccgggtctagcttttggtctaattctaggtgtgggtgtttgagttctcgttcgagtctgtgtccgggtttgtttccaggtccggacactgatctgggtctaggttcgggtccaggtccaagttcgggtcccgagtgcgggtccaagtttgggtcttggtcaggatttcggtccagatctaggtccagcattacgatcacagtctaggtcttggttcaagacaaatttcgtatccgaatacctatctaggtccaagtctgtgcttgggatcgggtctgagatttaggtccaagtccgggtatcagttccggtctaggtacgcgaccgtgtccgggcccgagttccactctaactttgggtctgaggctagatctatgtttggttctaggtctaggtccgggtcctggtcacggtcctagtcttgttctaatgtcctagttcgacaattcttgtgcagtttctaattttgggtcctaggtctaggtttgggttccggtttggttcttcgtgtgggttcgtcctagtctgagtcccagatctag

SEQ ID NO: 282102 - DNA, 694 bp, Cannabis indica
cgttgaggtgatcacgcagatcacctcgatgtacctgatagcgtcctccctgctgcgtttctacagagccggaccttgtatatctacttggtgtacgaccatgcgatgacgaagaggctgattctgcgtcgttgtctcttgatggtcgactgtgaggattgcgtcgttcagggtcttcatcagtctgcgtgccctggttaggatgcctcacggattgatctctcgatattggatggttcaggtccaaaccttcagggttggttcttcgttccctgcgtacacggttagtacgtcgtctagaatttgttacctgagggttgtccgtgcgagtagtagggacttgaggggggcgtcgggcccggttctgtccatccacttcggcctgtagtgcccgcaattggtcctgaatcgcagtatattgatcagtggtgagctggatgattccctcggatactactgccagagtgacagggggaaaatgcatggttgctggtggtgtggacgtatccccgacttgaggcgtcagttgtttctgggaacaggttgagaggtctgatgttgctcctccctactccgccattaacgacgtccacaggcggcgttccagctccggatacggtacgttcatcatcccaatgttatggacccgttgttagttcctccgtttgtttgatttccagccatgattcgctga

SEQ ID NO: 282103 - DNA, 627 bp, Cannabis indica
gtttttatttggctgaagtaaaagggttaggtggcattccttttcatttcttttcaaacttagaaaaaaattagaaatttctcaaaaagctctctctcttttcctctctcttgttcgaccctttgaagcagcaagaacttgggattttctttggtttttcaagctaattttgtgtgcaactcaagctttaggtattgttcttactcttgtcttctttgttttcttgaatttttgatgaaaaatggtgtaatgcatgcttagtttaggttgttcttgctgctggatttttgatgttgtttctgaagttaaagcatgataaattgaggttaattaagctgcttgtgatgcatgataattaggttccttaaagttatggtttttctattcaaaagcttaagttttcaaagaggaaattggaaatttggtggctgtaattgttgcatgagttagggattggtttctgcagtttttaaatgcttgaatatgagtttttaatcagggtttgatgcatgatatgttgtttagacaagttttgagttttagaactcaatcttgaacctttaatggtgaattgagtttctttggttgaagctcggttttgttgctttagaattgttccttagggtc

SEQ ID NO: 282104 - DNA, 593 bp, Cannabis indica
agacccaaactgagactggaactcggtcccgaacacggtcgtgtagccagaccggaattgagacccagacctggacctaaatctgggacctgatccctaacgcggacttggacctacataaggatcgagatacgaacctggactcgaaccaagacccagaatgggatcgaaatgctggacctagatcttgaccgagatcctgaccgagacccaaacttggacccgcactcgggaccccaacttggacctagacccctagacccagatcggggtctagacctggacacaaacccggacatagactcggacatagactcagactcgaactcaaacccacacctagaatcatacccaaagctagacctggaaccagacccaaactcgaacccagactaggatcagaacaaaggacttagaccacaaactgaatccacacacagatcgggattggaacttgggactcggacccaacctagaccaagacccaggagacgaacccacatccggtgcctaatctgcacctagacttaaatctggacccgaacccaaactcacaacaagactcgaactccgacccgaactcaaacccaaac

SEQ ID NO: 282105 - DNA, 605 bp, Cannabis indica
ttttaatgctaaataattctaacccaaccctagtggtttgctataaataggtagtgatggcttcaggaaaagatgatgaatcttaattccttcagagaaaaattgagtgccttctatcttaacctagccgccactccctctccctcttcttcacttctgaaaccaaacccttgagtgatagagtgagtgctcacacacagcaagtggtacctcaatcatagtgtgaaagattgtgaagaatctagattcaagagaaggacattcgggctctgatcttggtgatactctgcaaaagaaaggatacaagagttagagatctgagtggaaggagacataatattctgctgcaaccactgtaaggtttctcatactttatatgtgtttatttcatatcattttagaagttcatatttacgatgttaaacaacatacttgttagtagatctaagatcctggtaaaatatttccaacaattataacatttatgaaatatataattttatataaagtaaataagaaagctcaaaccatattaaatcatatagctcgactataatgtgtagagctcgaccattataaaattatataggtcaacgtgtatgagt

SEQ ID NO: 282106 - DNA, 619 bp, Cannabis indica
ctgaaaatcacccaaccggaattccggttctggaaattttcaaaatccatccggaattccggatgcacaaccgaaattccggttcctcgcaggcagaacccaaaaattcataacttcatcaaatcaaatccaattaatcccaaaccttccagtcctgctctaaataccctataacacaaatccaaagcactaaaacagcccaaaatgcacagatacaaaaagtgccatgtgagctccaagctttgagtttcaaactcaaacttgtctaaagctcacctactagcatcaaaccttgattaaaaccacataatcatgcataataacactgcggaaaacaaactctaactcatgcaataactacagccaccaatttcgaaaattctctttgaaaactaaacttttgaatagaaaaaccataactttaagcaacaccactaatcatgcattactagcagctcaattcaactcaaataatcatgcttaaacctctgaaatcaacaacaaaatcacagcaacaacaacaacctaaactaagcatgcattacaccatttttcatcaaaaattcaagaaaacaaaagtaaagaagctagacaataattacctcaactagaatcactc

SEQ ID NO: 282107 - DNA, 556 bp, Cannabis indica
caagggaaaaaacatttctaagtacggaacttcccagggctgggataaagatggactcaagctgcaatgttggacctgtggaagaactagaagagattgagatcgacccagatatttaggccagaaagcttaaaatttgaaaaggtttgttggtcgaagtaaaatcagcactgataaaatttttgagagcaaacgtggacatttttgcctggtcacatgaggatatggtcagaattgatccttctgtaatttcgcacatcctaaatattgatcgcaactatcgaccagttcaacaaaagcgaaggttgttggacaaggagcgagctctagccctgaaggaagaggtagagaagctacgaaataacaacttcataattgaatctttatacccgaattcggttgctaatcccgtactggacccaagaggtttgtgtattgatttcacagacctcaagaaggggtgccccaaagacttttttcccttccagatcatcagcttgtgacgcaacagtagggcacgaaatattgagcttcatagacgcctattcagggtaca

SEQ ID NO: 282108 - DNA, 55 bp, Cannabis indica
aaggcttcagaaaataacactttcttctgacttcttctgattcagaaaactgagc

SEQ ID NO: 282109 - DNA, 604 bp, Cannabis indica
atgatcacataaacagtaaagtatttactctcaatacttactgcaccacgagtccagcttgtctttgacgatgaatgtacatgttcggccagtctacaagaagtttaaaaaccttggcgctctaataccaaaattgtaacgccctaaataattaggcacgttactcgagttatttaggaaaccctaatcccgtaagcaggattactaatcaaaatagcgcagaatttaaacttttgtaataagaggaatggaaataaaacttgtaataatttaaactttataacatttgggatccgaaaaatatttacaaactttattacaagtctttttctttcagccggcctaagcggcaaaatagagtttcaaaatacatcgctggtagacacttaacacgcttggtttgatatggctcagacacgtacattcttcgcccagctcctaaactcatggcttatcagctaatgcctccctttcctccacagtagagcacccgtgagcagggcccagcaagacaatatataacataacaatattaacatgctcattataccatttaaacaataatgccattcatatatgtgtgtgtgtcacaggcctgcatgtt

SEQ ID NO: 282110 - DNA, 361 bp, Cannabis indica
ttatggtttaaagtatacaatttatgttaagtccagaagatatagttattcacaattacaatgatgtcaacacagtggaaggtaattgtgattatatgcttcaaaagataatgtcccatgattcatcagtgcactggatttacagtgatgtgatagtcagcgataaagcttacttacaccttggataagtgttatgttctttccagaatattgacaaagtatgctagtatcagatgtatggattatacattggattgggaccgatattgatcttggtaaagatattataatcttaccgttgtatctttctaagtcaatatcactggttgatcttagatcaaaagatcataatcctgacatg

SEQ ID NO: 282111 - DNA, 551 bp, Cannabis indica
agactataaattaccttagtaaaacctgctattgcatagaaattaataataggaggacaatcatattagaccataatcaatataaacaattgaagtcgaagccctaatttttattaactgttaatatccttattagtttaattgcttcttctttcactatttttttattttctagttttaatcttttctatctttttatttaaccaaatagaagtaaaagtttaattttaacgtacttaactacaatccctgtgggatcgacctcactcttggtgagtctattacttgtaaacgatacatgcacttgcgtgtgcaaaatatcacaacaataatcaggttggactcggtaacaagaaccgagatgaactgttctaaggccttattgtatttagacgtgtgagcgcaacacgtaggtctacgccacgtagacataaataggcatgtgagcgcaacatgcaggtctgtgtcacacaagcatatttgaatgacattgttgtttatattatatgatgagcatataattgatatgttttatactgtcttgctgggct

SEQ ID NO: 282112 - DNA, 542 bp, Cannabis indica
tctatgccgatcagaattgacgagtagggagttaagtgctgacctaatagaaatgagctttgcagattttgatatcatactgggaatggatttcctggggagctccagtattgtttgtcaagaagacagatgggtctctgagaatgtgcatcgactatcgggagtttaataagctaacagtcaagaataaatatcctttacctaggatcgatgatctttttgatcaactttaggggaagacggtcttttgaaagattgatctccgatcgggctatcatcagttgagaatccaggaggaggacattccaaagacggctttttgtactaggtatggacattatgaatttctggttatgtcgttaggactaacgaatgctcctgcggcatccatggacttatagattccatatctatgattagcgctcccactcaattgcactaccatgttcccaaaatgtacgtatcaccctaaccaaaaagtaggcttaactaacaaatcaaagtacatgtataataatcatgagatcgaacctaaccatatc

SEQ ID NO: 282113 - DNA, 613 bp, Cannabis indica
ctcgcctcacggttcctcagctttggccttgcccttgcctacacataaacataaccctgtgagtcgacagactcagtatagaaagcataatataataaacatactaaatcccgggttataatcaagcgcccatacacctgaccataaccctaactgagtcagggatgtccatgataacgtatgattaaccgcgaatctagcctatactcggtactctagtcgtaccgatgtggtagcaattaatccatactatctgatagcctagcatatatctgttggcatctcggtgcaactctatgtatacctcactgttgccctgatatgctaatctgacggctatataaaatttgcctaacatatgtctaatatattaatctgatggcaactgacatgtacgctaaacatatataagcatatgcatgacattatactaatcttacctcgattctgaatttacgtgtgtcggtcaacctgagtggaacaatctactcggcgaattacaggctcctaaatcataataatcacaacactgataagtgacacgctaaatcacttcccggggacttaaactcaaaaactagaagtttccctatcgataaataacatggcaata

SEQ ID NO: 282114 - DNA, 535 bp, Cannabis indica
attcggtatgggtcatagtggacagattcacaaaatcagctcactttctaccagtgaaagttacatattcagtggatcagtacgctgaactgtatgtaaaggagatagtttgtctccatggagcccctatatctattgtgtcagacagggatccaaagtttacatcgaagttttgggtgagtcttcagaaggctatgggtaccaagttgaagttttatacaacctttcaccctcatattgatggtcaatcagaaagaacgattcagatacttgaagacctactgcgagcctgtgttatggactttgagggttcatggagtaagtacttgcctctaattgagttctcctacaataatagctatcagagtacaatagggatggctccctatgagatgctatatggtagaaaatgtcgctcccctattcattgggacaagactggagaaaagaagtacttgggtccggaattggttcagaagaccaataaagctattgaaaagattaaggctcagatgcttgcttctcaaagcaggca

SEQ ID NO: 282115 - DNA, 819 bp, Cannabis indica
aaattctctaggatagtatatattactctattgtataggtcccggtggctgcatactcaactcaagagttgctcaatgaatcggttgattcgaaatttcaaaatggatagatgtcacaaatgatgaattgatttcttacctatattactctatttttgttaggaccgccttctataattataataattgatgaatcaaaaactttcaattggtatttttgtttatcttcgtatcttttataaatggaaatttagggaagtgctttagaaacatatgtataaaaagaacatatttcatttagtctctttatgcctactataactagttatttcggttttctactagcagctttgactataacctcagctctatttatcggtctgaacaagataggacttatttgaaattaattgaacgaacaattcataaaaaccttctgtggtagttcatttattctatagttacttaacgtgtcaattttcaatttttggtcattgagattcatgagtaataccgattaaaatttaaggatagatattacctctccttttcccctttcaaagaaattgaaatgattgaagtttttttatttggaattgtcttaggtctaattcctattactttggctggattatttgtaactgcatatttacaatacagacgtggtgatcaattggatctttgattaattaacatctctttttttgattgacctcctacttgttttaatctacaggaggtcaaattcagattgttgttcaattattttgtgttattttcgactaacaataagagaatcgaagcacgctctgtaggact

SEQ ID NO: 282116 - DNA, 497 bp, Cannabis indica
ttttaccttaacatgaaataaaaaaaaattgcagacataagaaactgtactttaaagtggtctgtccaacctgagtactttgtttctgaaacctctgcgcgtaatctgcccagaaggccattcacttagaagcgaatgtttttagcactttaaaatgttcaacccgacctgagtactttgaagtggtcatgcggacctatgtacttaaagtggtctacacgacctagtactttattggtagtatttccttaaatgttcttcattcctgtaccgtggtaccagaacgagttgcattttttcgtcatatttacctaatttgtatgctccggagtcgagaacttcgaccacttggtatggtccttcccagttaggtcctagtacacctgacgtgctgcctttggtgtttaggaatacccttctttggaccatgtctcccgcgaaaaatttccgagctttcacttgtttgttgaaataccgagctactttttgttgatgag

SEQ ID NO: 282117 - DNA, 585 bp, Cannabis indica
atctctgacatatttaattttcatattttagcatttggatgcgacattctatttgatgaggaggcgacaacacttttatccagaggtctacccaaatatatgtgtcatcatgccgtgtattttcccagtaggagttattgctcggtgggaagctgcgggtgatgaccaggcaaactatcaggatgagggcatattagatttgattcgaggggatgaaggtcaattcttggctagttggaagaataaggagagaatatatatggccctctacttcgatagagcaaagcattgggtgatgctagaggtagatctggatcattggttgttgaacatatttgactcgagcctcggatcgatttccccgaatgaattcaagagtcacctggcaatgtgggaaaaattactaccaactttgctgctgcaggctggcctattcgagactcatgacatgatccacgtgcctcgacttaccgcctcagagagcgaggtcagaaatttcacttcaaaagtcatggaccggggcgttgttcgacaaacaaagacaaggtaacttaattataattgattttttttgttatttaactt

SEQ ID NO: 282118 - DNA, 729 bp, Cannabis indica
aattttgttcttcttcttcccattttttcttgttcttcgaattttcttcttcttcttctcattttcttcttgttcttcgaattttcttcttcttcttcccattttttcttgttcttcacattttctttgggagaggaaactgtagtactttcagagttggtgcacttggttttgtttgtctccggctccttctccgaacgaggtgggtttgtacaagaaattttcttattcttttgcatgttgtttgttatttactttggataatgtattagtcacagtagcattttaagttttttcaaccaaatttaaatgtcatgtttgtttagaagtgaagtaattttgttattttaggatattgaatgtcgattttcagaaactattaatgtcgattttcttattttttgtgggttactgtatgccgtatagttgattttttctacttgcttagtttgtccgtttgaccttgcaccttatctcagtcaacattcatgcaaaaggaaaacataaattttttcctcattttggggtaatttggatagtaatgcatttgtcattcatggaaaaagagaacttaatttgtttctcagtttgggttaagttggatagtaaagtatttgtcaaaattgtgatgtggtcttcaatccgtgtatttgcattttgtattttttttttctgttccatttttggtttattgtagtagttttcatccgttttacaggccttaaatct

SEQ ID NO: 282119 - DNA, 756 bp, Cannabis indica
tatgataggtacatctcgcattcttcttgttgatagcatggtttctcccgagggtaattccgtcacaataccacatctaagtaggtcacatggcttatctatactatcaattaacctagtagctatataagaatgagtagctccagaatcaaagagaacattacaaggcaatccgtaaatagaaacctgacctgagacaacagtgttgcttgtggccgcttctcctctggtgagagcaaacactcgagcaggagcggcttggttctccttcttttgtccctttgggcaatttttcttcagatggcctggctgcccgcaattgtagcacacccctgacttcatcttacactccccaagatgttttctattgcatgtggggcaaattgggaattctacataggaccttttcaccccattgttgttattttggaccactgctttcccctttttatcacgatcattaccgtgatttccctcgtgttttctcttattctcttgatttcctccattgtttcttcgggcttcccacttagcagcattctccttctttatatcattttcgagcaactcagcttcgagagctttttctaacacctcagcataaactgtgttggtccccaccatgattttcacatctttttttatcatggggttcatccccttcaagaaccttttgacccgaagggcctcggttggtacgatctcttgtgcaaactttgccagacggtcgaattgcctagcatactccgtgacagt

SEQ ID NO: 282120 - DNA, 425 bp, Cannabis indica
tagaatgcacaggcaaggaagaaagttttcagaaaaaaaaaaaaaaactctgagccagaacaaatacatcagcctagtaacagtgaagacaagctgacttagaaattacatgtggacaggtcggctacagatcagctatccggtgcaggaatttcccttgttacacctgggggcagcacctgcatgctacaatcaagtttggatttaaagcatccaataatgaggccaaatatgaagctttgattgctggtctaaagctagcccaagagatgaaggccgaatatattgaaatctacagtgattcacagctggtggtgaaccacgtatctggagaatacgaggctcgagggaaaaaaatgatagcgtatctgagcaaaatacacaacctactcgcacagttcaaaagttatgctctcaagcaaatt

SEQ ID NO: 282121 - DNA, 621 bp, Cannabis indica
ttgcactttatgaagcaagtacatgtgtgggagtgagatcattgacataatatattcgggaaacataaggattacactcaataaagaagtatcaacacaagcatttttctatgaagataacacgaaatgcattgctcaactaaagatataatgaagaagatagagctaaatgtattttcaccaaattcttattaactcatgatcttaaggagaatgactatattgatgttcaacaaattcaatcaagtgtcaatcttgtaaacttattcacaaagtcattaccaacatcatcatttgagaaggtagctcacaagattagaattcgtcgattagaagatcttcacgaatgcctaaatgagggagagttagtttacactacactccttttcttttgaccaagtttttagcaaggtttttaatgagacagtttttatggacatccaagggagagtgttacgaaatattatttatggatgtccaaatcaccaaattaattatcaccattaatggttggttgtattttcctttattatattaatttaatttctcattctcttagtcatatatttttttttgtataaataggggttcactttattggaataaacaattaagaaattc

SEQ ID NO: 282122 - DNA, 579 bp, Cannabis indica
ctcatcgaattttgaacattatggtttagggccctgtcaagcgtcgagctgcagttccactcaggctgactggcacacctgagcacggaacgaggtaagatagcataataatgtatatatatgaatgtatgcttgttttaactatttacactactaacactaattgtttatgtgattttaagggtgttagtatagtgtaggttttaaaatagttacagtgttaccaacacgagtaccaaggggtacgtcgtgcatgtggtacaacacttagtaacttccgggggtacaataatggctctaccatcacgagtacagggttggtactttagtgcatttggtacagtggtcgtacttcccttaagaacgttcttaaccatttggtgggctcagttgttgagctcagggtggcttaagcattaagccggtctagcattgtttatatatatgttatgcctaccttactgagtttgttgactcatcagtttgctaccttgtgtaggtaaaggaaaagctaagctggaggaacagtgagatggagttaggcagtgattgtacatatcgcggcagtgcaacctggag

SEQ ID NO: 282123 - DNA, 555 bp, Cannabis indica
aactcaaaatcatcatgcatttactcatctttatttcatcaaaattcaacaatttttaaagaaacaatgaagaggagctaacctagcttgaagaatgcttagattggaagagaaattacttgaaaatcaaagcaagaacccagctccttgcacccacacactcagccgagagagagaggaaaagagagagagagttttgaattttctaacttgattttttgtaaaatgaaaaatgaagaaaaagacacctatctcatttcatttcagccaattattaataaaataaacatttaatttccatttaataaattcactaaaagacaaaacatcattggggcaaaaagaccaatttgcccctccacactaaaaccacataataatcactaaaggggtatttttgggaaattctaaattcccggccattcccgacattcccaatgtctaataacccgtcccaaactactaacatactaagttgtgatttctactgagccaaacaccgggttccaaaataccgggcaccggaatgcaaaaattatgcaaactactacatga

SEQ ID NO: 282124 - DNA, 635 bp, Cannabis indica
gtcctggtctgagtttgggttcgggtccggatttcagtctaggtctagatcaggctccgggtgtgggttcgcctccttggtcttggtctaggttcggtccaagtcccaagttccaagaccgatcggagttttgattcaattcttggtttaagtccttggttctgatccatgtctgggtttgagtttgggtctgggtccgagtctagttttgggtctgattctaggtgtgggttttagttcgggtccgagtcggtgtccatgtttgtgtccaggtctagaccccgatctgtgtctaggttctggtccagttcccagttcgggtccccagtgcgggtccaagtttgggcttgggtcaggatctcggtccagagctaggcccaggttcgtatttggatccctatctatgtccaagtgtatgtttgggatcgggtccaaaatttaggtccaggtccgggtctccgttttgttccaggccccattacccgaatcctgagtcatgatctagatcactgtcacgggtctcgatctggttctgttttaggtcccacgtcccatttctgagtttgggttcgcgatcgagacggggctacggttctaggtcccgagcctggttctgtgtccctagtctggttcca

SEQ ID NO: 282125 - DNA, 437 bp, Cannabis indica
agtcgctgcagaaccattcgaagatgttgctcatgctctgcttctgaccgagagtacacaagaatatcatcgataaatacaattacaaaattatcgaggaaatccttgaataccctattcatgagatccataaaagctgccggagcatttgttaacccaaaagacataaccaggaattcatagtgaccatacctggttcgaaaagctgtcttcgggatatcctcttctcgaattctcaattgatgatacccagacctcaagtcaattttagagaatacagtcttcccctggagttggtcaaacaaatcgtcaattctgggcagaggatatttattcttaatggttaacttattcagctcccgataatcaatacacatacgaagagttccatctttcttcttcacgaatagcacaggggctccccaaggtgacacact

SEQ ID NO: 282126 - DNA, 548 bp, Cannabis indica
caccactcacaggtaactgaccacacaggttactgctaaactctaactccgaatcctatcttctattgatgcaggtcataccaccattcatactctaactcaggaggatttgattgaacgagcgatcgctcggaggttcgaagggatggaagcaatgatccaacgtatcccaggggttccaacaccaataaagaaaagtttgcctagcagttttgctgactcaccttttgttgacgccattgcattggtcgagatgccaaagaagtttgtattcccattaatgaggatgtacgacggaacaagcgatccaaacgatcatatagctagttataaacaaaggatgttcaatgccgccatccctcacgagttgcgcgaggcatgcatgtgtaaggggtttgggtctagcttggctggcccagccctccaatggtacacaaatttacccaataattcgatttcttcttttgctcattaacagatgctttgtagacaatttgcgagcagtaagaaattggagaaaccctcagatgacctataccgcatcaaac

SEQ ID NO: 282127 - DNA, 756 bp, Cannabis indica
taccagactgtaggtcagcaatcaccgaacgtcattcccctaggagaaacggaagaggacccaacgatgaatacttcccagactactaatggtcagccgcccaatccccggttccactcgtgggcccagcggtaggccagcagaccttgtccagtaattcataaggaggagtcatacctgacggctccaactagattaatggttcctttccacctgtcaaccaagcgaatcaattgctaaggcaacaaggctcttctgtgttcgaaaggttgggagcaacccatgacttaaggaacgatctaaatagaaggaggggaacgtacgaacagaatattacgacaatcgtgcaccctggagcccgactcaaatccccgctcagaaagatgctgacgtaatccaagtcgaccagaatgccgagcaggtcagcccagccgtacaggcccaacttgacgaactgaaaaatatgtttcacggcatggctggacaacgtaataatgatcttgagttagaccgagcacgcggaactcctttctcaccagagatcaatctcctgccactaccccacaagttcaaaatgccgacgtggaagatgtatactgggagagaagatccccttttccattctcaagtactttgaaatgcaaatggatttgcaaggagtacggggggatgtatgctgagaatctttctcgccactctgtcggaagtcgctcagcaatggtatttcaagcttgctcctagaaagtttagctcatg

SEQ ID NO: 282128 - DNA, 1074 bp, Cannabis indica
gcatttagtttttgatattaagaatattaaattttaaaataaaataaataaatataatgcatttgacccctcccacgtctccatatttatgaattaacagaagtatcgtttttagaccgacaacactttggctcacaacggatcacaaacgactttttgaactagtggcactttgggctcacgacatatcacaagtggctttgataccatattagaatttgggaataagatgaataaggttccatctcaaaactaattgacaatgagaggagtagtccattcatcttatatatcacaatttatttctacacattaacaatgtacgactaactctaataaatgcaatattgttaagaaaatttctaaagtagcatcttgctcttattttttttaagctgtttgtctctaattgatagaataaactatttagtttacatcattagtttaagaatgaggttttgttctcaagtcgatctcattagggtccttctctgaagaatggttacctgttcatcttgattgcatgcacaattgattattttctcgtcgtatggcacatcgatgtcctctctctttaaaaaaaaatgaactatttagttttctcgatagaagtttaaatgagtcagcccaagtcttagttaagtgggatttttgtaatcattacaatgatttttgtcaattttaaagagaaatgctaaagggcaccagtggtgcctattaccctcttatgtgtcaatatcgctattggtctaactaagtatcgggtcccatataatttaatataatagcttttagggagtatcactagccaatcgtaacgcgacatgtcgagaaggtgctaggcaccactggtgcctaatagcaatgctcaattttaaatggtgaatcctcatgtgattattaaaattttattttcttcttaatgcatttgaaatttttcagcgcaaaaattgtaaaaaattctacactcaatatattttaaaatacaaggactatttgaatattgtaataataatatataattttttttttaaatgaattatatacaaatttttattttaaaattttatttct

SEQ ID NO: 282129 - DNA, 626 bp, Cannabis indica
ggatggccgaacaagtgaaatgggctccccttatgcgaattgcatgttcaataggcctgggcaaggcgagagtttcttcttcctcttcagtggagtcacctgctcgtcctcagcctcatcttcaggatttaaaggctcctgagcgtactgcttggccctggcacctcctttcaacttagcttcacactttagttgaatcaactgattctctggatgagctcgttcaggccggccagcaccagatttcctcttcttccatgtcacggacttaggagtaaagtcttcgggataaagcccgtacttcacaagattgtcatcggaggttaactggataatattcatgtcttcccccggaaaccgagcaagtttctgagctctatccctgagagcatgagtgaggggaggacggtaatatgtcagaatcttctaaaactgagtccaggtaatgctcggatccttcaccatgatgtactcatcaacaaaacaccctattttgctgatggccttggcatccgcaccggtcaaccacttgaagcctagctgagagaaatagaagtatcccgacctaccttgttttgggggtggacttcaaatcaaagaaccaagcaacctcgtgaggagaagga

SEQ ID NO: 282130 - DNA, 304 bp, Cannabis indica
atcaccaagatctgagtctgaatctccttctcttgaatctggattcttcacagccttacacactatgattgagtactacttgatgtgtgtgggcactcactcattcactataggctcggtttagaagagaggaagagagagagagaaggtggtttcggctagggtaggaatgaggctcaaattttatatgaaggaatgagatgcatcattttttccctaaaaccatcactacctgtttatatgaaaccacctagggttaggttagatttattggcattaaaatattagaaaaataaatggtaaa

SEQ ID NO: 282131 - DNA, 299 bp, Cannabis indica
tgagttatagggattgagctggtgactcacgaagtgcctggttgaattcgctaagtgttgctcattctgcatggctcgttgagtattccatcatgagcatgccagggaggcatcctgctcggcatgttcatccgaccaggtgctctaagttgatgccacgtgtcaccattcttgtgatgccacgtaagattgccaattttaggataacaattatatttattaattagaccaaccaaagtatcttaattaacaaatataccctagaaactctttctttacagtttcgcccttgcttagtg

SEQ ID NO: 282132 - DNA, 236 bp, Cannabis indica
ataaccctatgtggtattctataaatagaaggtaaaggcttcagtttttgtaacactttgacataattttctttcactcaaaaagccttgttcaagccgccactctctctctctctaccttctctgtttttcgaaatcctctaagtgatagcaaatatgtgttgctaaaatggaacaagggctttatgttttaagaccgagtactcaaatctcactaaatagtgaacttttcagtg

SEQ ID NO: 282133 - DNA, 547 bp, Cannabis indica
actatttgggcctcttcaaggttgatgtatttttggactcttttctggaagtcctgaaggtttgcagctccttcctgttgtagttcgttccagaatggagtccctgtacggatgcctgcctggagaagggcaagctgttgtccgtcatcaactttcttggtcttcgaggcttcctctcggaacctctttatatagtttttcaaggtctctgtaggcagctgcttgatgttagtcaaggcactgacctccaggttgacctttcttgcggcgacaaactgtctccggaagttggtctgtaacttgttccaacagcccacggatcctggttccagcttcttgaaccattcctccgcggacccgcttagagtaagcgggaagcacagacattttgcgtcattgctgactctcatgaccgtcatgacacggttaaaccgcgacaagtggtcgcttggatcggagttcccggtataagctgccatttcgggcatcttaaagttcttggggagctctgcttccaggatgtgcttagcacacggctcccggtcct

SEQ ID NO: 282134 - DNA, 583 bp, Cannabis indica
ggattcttcacagtcttacacactatgattgaggactaacttgctatgggtgggcatgcactcaatcactaaggctctaattttgatggtgaagaacactaagaattttgaaattagtaaagagaaaagaagaagaagtctcaaaacactagttgtctgacagaatgaaaactaggtttgaaagcattagcaacattagttggatagtgagacctttctttcctttttatactaattcacttaaggttaggattgaattagttagaataaaaaatggataaaataagagcaaaaataggacctagtgggcggcccctatgtgggtccatcactagttagatttttgccatttttctcaatcatttatctaattttcacaaataccacttttgcaatttcaatcctaaaaatgccaaaactatttttttaataattaaattaattatcaaataaaattttcatttatattatttattaattagactccacaaagtctcttaattaacaaataaatcctgaaattctatttcttcacaatcaagctatatcttaatgataaattcataaactagacatagtctaa

SEQ ID NO: 282135 - DNA, 681 bp, Cannabis indica
tagatctaaagaatacctttgttgattcaaagagaagaattcaaatggcggaagcgtaccttaattcatagatagtgatgatcttaatccatcttgtagagataatctttgtggtgattttgggtaatgatcttccaagaaaacaagacttaggttttctaattttctctcttgatgggggaagatgagaatagaaattggcacttgtttcttggggaccactaccaatttataacctcatagctaggttattaattttaagtatttctaatttagcccctcaataaattagaaatatcgcttagggtatctacacatttagcccatgacactttaatacccaatgacccataattactaaaatgatcactttattttgggccaaacttcaaatagcaatacactaatatacatatgagcccatattgatgattttaatccaacaatttgtagccaaactacttaaatttttggatttagcactatcaatctattaacattgtactaaattttcagggtaaaactcccaaacttcaatagtgttaaagtaaactgccacgaaatgtacacgatctatctaatattaataacttaaatattataaaaataattaaaaatattttaaattttaaaaaattagaagaaaaaaaattctatctttttctcttttgtttttctttt

SEQ ID NO: 282136 - DNA, 604 bp, Cannabis indica
acttcggatctctatccgaaactatggattttggtacatcatgaaatcttactatttctttgacgtacaaatctgcgtactgatccactgaaaaggttgtttaaactggtagaaaatgtgcagacttcgtgaatcggactaccataacccaaatagaatcaaataaacccgtggttctaggtaatccaaccacaaagtccatcgtcatatctttccatttccattcaggtaggctgcaacaaccttgccggtctctgatgttcagccttgatcttctgacaggttaagcatctcgatacgaattctaccacattcttcttcattccgctccaccagaagtaaggtttaagatcttgatacatcttgttggtgccaggatgtagggaatatggagtagtatgagcttcttcgagaatttcatttctaagttccgcattattaggaacacaaactatggttttgaataacaacatcccactgtccgacactgtaaactctctggcttgactagaaaatacctcttctcttctctgatctttactaactctggatcagtaactgagcaactttatcgttctaacagattagattgcagcgtcaagtt

SEQ ID NO: 282137 - DNA, 398 bp, Cannabis indica
tgacttgttgaacccagatctgaatgaggttagatatgaggaagaagaacaaaaggtaaatatgtaattataaaactttaaaaaagtattaaagaaaattttaaaaagtaaaaatgttaaaaattagaaaggataatataaatgttaaaaattggtcaaaatagtcattttgtgtaaaaaattcctataaaaaattatatatatatataatatataccagtttaatttagttgtataatagtaggagttggattcaattattttttttattttaatttacttatatagtacttcatagtatagtatgtatttttaatatgtattaaaggtggttttttttttttattatagtatttatttattttttttaaatttttacttattttgttataataatt

SEQ ID NO: 282138 - DNA, 361 bp, Cannabis indica
tgtgtgtgggcactactctatcactagggtatttcgaaattgaagagaagaaaagagaagaagagtggcggctatagagaaagaataggaggctcaggtttttctctgaaaggaataagatgcatgtctttatttcctaagccatcactatctatttatagtaagccacatagggttaggtttgaattatatggcattaaaataatgaaaatattaaatgataaaccctatacaagtggccggccatattagtggataatgggcctcacttttgcaatttgttgttttatcatttctacatctcattttctcaaaaaacgccaattttcaaattcaaccatttaaatgccaattctaatta

SEQ ID NO: 282139 - DNA, 654 bp, Cannabis indica
ttccgcttcaccttcaaaacgtcatagtaatcaattcccatatcagcttctctaaattctgtgatgggcagacaatcgatcgaagcaggcagtaaccttcttctattcttccttttgattcgacggtagagtaggatttcgcaattagaaaagcatgtgaaggggttgatgaattcggtgggagagagctccggcgagtggagcggttagttcacaagaagcttatatgaattattatgaatgaattttaataaaataataaataaaaatgtaagttgtgcgcgtttatttcggatatttccaaacgggtcgaaggaagacttcagtgacagctatatttccttgaggttacaaaagtccaatggcaaaattacactttattttctaaataaaacatataaaaatcagagagaagtacttgatttctttatttttatttatttttatgttttttttttaaagaattatccaatatagtgtttttttaatttttttttttaatttacagtttagatttttaaattggttgccaccgctagttgcaataggatttttatatgattttctgttacactttaccgcgctagttgcaataaggatttctaggtacaattctctaaaaaatcaaaaaaaaaaaaaaaaaacctagattgt

SEQ ID NO: 282140 - DNA, 530 bp, Cannabis indica
ataattgaaattttgtttctggaattatttttattggatagtatggaaacaattaagaaatttacttttttacagaactcaatttcgatttaatttgaattagttatgattttttgaagtttcggaaaaaatcagggtcgtgcaatagggccacgcgcgcggacgagggtgacaccctcggacagcacgcgttcagacagctgctcgaccgagggcctgtctgaatcactcccatccgcgcgcgaaaaccatgcagcacccttgctgcgccgtgtttcctcgcccaagcaaccccatacgcgcgcgcgggtagtaggctcagcatactgtccgtataactcacatttttttcgtttttcttcgattttcatgctatttcatggatttaacttccgaattttttagtagttttgtatgtagacatttactattcctatttcaattataaatatcataattaaattaattaatttttttaaaattaattcatgatattagtgtaatttgaatttgaaaatagtaaatatcta

SEQ ID NO: 282141 - DNA, 513 bp, Cannabis indica
atccttgagctggagccccatcttctcgtaagcagtcttaaacaaaatgtttgaagaagccccattatcgatcatggttatggcaaccattttgtttgctatatggacttccacgaccagcgggtcgttgtgcgaaaatcctatctggacagcatcttcgtcgttgaacgttatggttggctctcctgcgcgtggaactttgggcttcttctttccacggccaggacgacttcttcatgctcgtgccgagctgttcgggcatatctttctcgagctttgcccgtgtctccggcgatgtgcgggcctccaataatgacttgcaagtgtccatctattggcggaggcatcagatcctggttattctgaccttggttggccttgacgtacttctgtaagtgcgggttatttttcttgatcagaagttctatttcccgcttcaagttgtaacattcgttggtgtcgtggccgtagtctccatggaaccgacaaaactttgtcatgtcccttttgctg

SEQ ID NO: 282142 - DNA, 1026 bp, Cannabis indica
gaatgttacgattcggagatcgtgtttgtgtgcctttggatgatggtattaaaagggagatcatggatgagtctcatacgactccttactcagttcatccagggtcaacgaagatgtaccaagacctgaaagccatgttctggtggctaggcatgagaaatgacattgctgagtatgttgctaagtgtcttacctgtcagcaagtaaaggctgaacatcagaggcctgcagggttactgcaaccattgaacataccagagtggaaattggaagatgttgctatggacttcgtggtaggtttgcctagaacattgggacagtttgactctgtgtgggtcatagtggacaggtttacaaagtcagtgtactttttacctattcagacgtatttctccattgaccattatgctgagttatatgtcagagaaattgttcgtctttatggtgtcccaaagtccattgtttcagatagagatccgaagtttacatcgagattctgggagagtctccatcgagctatggtactcagttaaagttcaggacaacatttcagcctgagacggatgggcaatccgagaggactattcagattttagaagacatgctacgggcatgtgtgcttgactttgaaggatcatgggtaaagtacattcccctgatccagttctcttataataacagctatcaggaaacaatcgggatggctccttatgagcttttatatggaagaaaatgtagatcacctattcacttggatgaaataggtgaaagaaagtgcttgggtccccgaggctgttcagagaacgagtgaggcagttgataagattagagcgcgaatgctcgcggctcagagtagacagaaaagttatgctgatccaaagcgtcgggatattactttcaaatcggggacaaggtgtttctttgaatatcacctatgaaaggcattaaacgctttggtaagaaaggaaagcttagcccaaggttcattggaccttttgaaatccttgagaggatagggcaagtagc

SEQ ID NO: 282143 - DNA, 652 bp, Cannabis indica
gcattgttgagattatgaatggtttattgcaagttttggaaaaagcttgctggttttttttaaatctgttaactttgctaggattgctgagtcattgctgtatcaactggaacattcaagtggaaattaatcacccaagtctattttccaaatctgaaattatcaccactttaatcacttttagcttcttatttttagtttatttagtttaaaatattatttctcaagtttagagttaagattacaaatttttctcttgaattaatttgttactttattttatttttatttgaaattcttggaattgctcttagttgattttgcattatctagtaaaaagtccttgtggagacgaactttgattacttatcattgtattacttgtttgtgattgtgtatcaatataaatttttacaacaaacaactttaagcaaccaattattttagcattgcatttgcgagacaaaccttttgggtagctgggacaaggaagattggaactttaacctttttgccctgtacataatgaaataccattcagccttgagcctaaatctttaatcaaaattacattgaaaggcactcatcaatggaaactagttctagaaagaaagtgttagcagcagcaataacatttaaaattgactctcat

SEQ ID NO: 282144 - DNA, 667 bp, Cannabis indica
attaaagccatcggcagctaaatcgagacgaacatttcaaggtcactagcaaaatcaggatgtttggcatcaaagtccttccacgctgcaccatccacagggtgtcgcatcacaccctcatcttttgatttaccactgtggtgccataccatgtattttgccgtatgccttgaagtatacagtctcttcagtcgcggaattaacggaaagtaacgcatcaccttatgaggcaccttttttgctcctgaattttctgaagttatccatctactagtgccacaaactggacatgaatctttatttgcatgttcattgtaaaataaacagcaattgtgcttgcacacatgaattgactcataccccaaccctaattttttcaatcttttcttggcatcataatagtttgatggaattttattttcctttggaaaagctaattttaataacttcagtaattcatcaaatatgttgttaggaatctttcccctaactttcaaatgcaataactttgccaaaaagttaagagaagatatccaatcacaaccaggatacaactcggcctcaatctcttcaaataattcgtcgcgccattgatttgcatcaagattattgtaaagcccgcttagttaatttggaaattagcagttaatctggattatttatgaaa

SEQ ID NO: 282145 - DNA, 167 bp, Cannabis indica
attcttgggagaccattcttggcaactggccaagccttgatcgatgttcagaagggtgaattaaagctgagagtccaaggagaagaagtggtctttaatgtgctaaaggctatgacgtacccaaaggcaagtgataactgtttcttcattgacttgattgatgaaat

SEQ ID NO: 282146 - DNA, 610 bp, Cannabis indica
gttattatgttatgaagattattcagagtttcatgacggttgttaatcctgcaagttttttgaaaaatcatgtaaacatgaataactactcttctctatttagtttgtattttaattatatatacttttaatatgttgattaatgttttttgatcttttattttacagttcaagttagacgctccctatagtaacgaggagatcaatgccgtacgggatgagttggccgaatttgtgaagccattgattatagattaagtacttaaggttactacacttttgatataatacatgagtaacaagttttatgattattgttatcttttgcatatattattagtttatatttagtttacgatatacatggaatttaagttttagaatcgattttattaacaattttggtattgtgtgattagttaatagaatcgattactaatttaatataagttttcgaaatgttaatttaattttttttttttttgtattatgtatttactatattatatagagttattctaaaatttgataatgcaggtggggaaaattgcacgaaaaatttacaattttcccttacttatatttgtgcttcattttataagtgatgcaa

SEQ ID NO: 282147 - DNA, 139 bp, Cannabis indica
atttagggtgttaatcaacgtacttgtgagtagatctaagatcctggtaaaataatttccaacatatatgcccctaagaagctaacataaaaagacaagtgatcccttcttagggatccccccagaaaaacactataaa

SEQ ID NO: 282148 - DNA, 769 bp, Cannabis indica
tccaaaaatatatatatatatatatacgtaagttcgaaatagtttacgactgatcctaatttcaggtggagtgattgccctacttagtctacatgagttttgcctatagttcgaataataaataaccttcgtgactctaaccacccatgaatcaaaagcggaatacaatcttacaacttgcttagcgacaagaacctgattaaagagagataaatctaagaatatactactatcaaacttgtgccaacacaatttctctcaagtacaataatgaagctttttcttagacgaagtaccatttcactaaaatcgcacataatctatgaatctcttaaattaaggaaacatgaagttttaaaggattcatagaataagtgtgaatagactagataacagatttaataacgacttccattctacttgacaagaaggatcgatacttccaatcagaaaatttattccttatcctatgataaagttatttgttcatgtatgcacgtaagagcgaatttatgtttttttgaaaattagtttgaatttgatttggattaagacatttttgaatgggaaaggacattaaaatagtatatgcataattttctatatgaaaaaagtaaatagtaattatagtagggaaatttgattttctatgcttagaaaatcaaaaaatttgatttttaaaccaaaaatttaaaacctaaaaaactaatcctttttttacaaacccaaaataatacccccctcacatattctctctctctgcatcatc

SEQ ID NO: 282149 - DNA, 698 bp, Cannabis indica
aaaagaaaaaaaagaaattatatctatatatattataattagctataaataattgtcatggtgaaattgaaaattttcttttctttgtgcagagaatcaagtgaaaaaggctatggaatgaagaaattttgatttgggcaaaagcactaagtttggggtgtcaggttgctgttcagttgctatagcaacagcttagcaagaagtgttttggtattaggctgatcaaatgaactggggtttgaaaaaaataaagtgaatggtctgtcagaaaaaaaacatgtgattgtcatgttgttcatgattcaatcattggataggtctattattgttcagacaaattatttgaggttgtactttatgttgaattgagtgagcccaagtaatttttggagatacaaagaccccacttcacattatttaaatcagttttgggccaaattctttggtcaactgggccccagctagtttgaccagcccaattctttggtcagcccaccctcaaccctaccacattcaacatcatcttcttcatttctcttgaacagccgaaccagccaagaaccagccgaagcttccttcacccaacccgcaccatcactgcccgagcctagcctccagtcactcgacccagccgagccacttccaagttcgaaacttcgaactgcaccacgacctcaccatcacatcgcaccatcagc

SEQ ID NO: 282150 - DNA, 592 bp, Cannabis indica
taaatattggggtccacaataaaattaattcacaaataataataaaataatagaaattagtgctaattgccctcactaatccaaattactagagcggtcattacagttcctctgaggcggaggaagaggaggaggttgaacccccaaactacgggggatacaacgagggtggggagccagtcgatcctgacggagacgtcctcgttaacggcgtggactacgtcagtgaggagcttactgctgcgattcctcacagaaggaaaggtgccttcagcgctaggtgggtgagtcctccgtccagggttaccgaggcgcgcctgcagactctcgaccaaggtggctacctggggtgaattggactgctacattctctcccacaataatcgtgccacaaacactgacaaggggatgtgctcttggtcgggcgtgttgggttttatgcccaaaattaaactctttacaatctgattagttatcaataaaagaaatttgaagtgattgatgtttgcatgaattttacatgctaatggtttaaatatgtttattacacacaaaatcagttaaatccagatcatatgtttattcacaatta

SEQ ID NO: 282151 - DNA, 635 bp, Cannabis indica
agaaaattgccaaacacctggtactagtagtagtcgtccaggcgaaaccagtcatgctagaggaactactgacagtacaggtcctaataatggtagagagaccaatgatattagtggtcctactgatgctcgaggtaccaatgtgactggatggagcgatccattttcttcttcgacaagttacggtaaattcaaggagaaaatgtatacaagagaagacatcgaggatcatagtcattatatatctacgggtggcacaccaggcggggagttacatgtgggaaagttttttagagacaaagagcatttaaagatggttgttggcctgtatgcaatgaagaaagggtttgactactacgttaggaagtccggtactgatatttggtacgtcacatgtaggatacagattgtgggtggagattaagagcgaagaagaacgtactttctaacatgtttgaggtgagtacatttcataatgtacatacatgttcccttgatcttcgaggaaaagataaccgtcaagcatcacctgtaatagttgcccatctaattaaggataagttcgcaactgacggctcggatcacttggcctctgatataagaaaaagtatgcacaaggattacgggatccaaat

SEQ ID NO: 282152 - DNA, 446 bp, Cannabis indica
acttcatatagaagccgtgcagcttcatttggtgtgacgcacctgagtaatggcattgagaatcctcttctgtacatgatgatcgtctacgagcttcattttctgagcttcctttcgattatttgggagttccccagagttgagataggctgctattggcgtcatccagttcggagatgtgtcgatcattttgatttcttccgtgccggtgatgctaggctcttcaagaaattggatcgggaccaggttcgccttgtcacttatattgctgctcgccaaacgggctagcgcatcggctgttgtattttcctctcttggaatctgcttgaggctatagcttttgaattgtgcgagcagatcatgtattttgctcagatatgctatcattttttctccccgagcctcgtattcgccagatacatgatttaccactagctgtgagtcac

SEQ ID NO: 282153 - DNA, 609 bp, Cannabis indica
gacttaatacgaagctacttcaaccaaaacactcaagggatgggtactgatgccaacaatcaacagatacctcaaacctatcctcgggaggtccctaccccaaggaaccagagggagagggtggtctatggacctgaagagcacccaaggaaccaagaaaggactaggagtcacccctccaacagggttccccgcaataataatcgaccaccctcggctgatgagcaagtcctacccggtcatcatatgggacgcgatgactcccacaatgtccgtctaaggcggagtggtggaggaaactctagaaacaataatggtgatcgtggcagaaatagtggaaggacgccccagcgtagggagtggcaaccccgcgatcaacgtggccaaccacgagatggcaatgatcgcccaagaaatagtaggtccagagggagaagagaagaccctgaggtcaacagtgactaccatccaaactaccctgacggtcatggtgatgatgaagctgaaagtcgggctaacaaccaaccaaatcatgagctggggggttatcaagccagagggccgtattgttgggttttgtgccctaaattaaactcatttcaatataat

SEQ ID NO: 282154 - DNA, 559 bp, Cannabis indica
tgttgccgcctacgcccttgcggtgcatcaggtggtggctgcccataggggtgtggctctttcagcctgttgacaaaggcgatgtccatcttacgaagtggcaacaccgtgttgtcaaactctaactggggaacttcatatgccccgcagagttctgtgataacccctgccaaaccgaaaccacctcccgtggctccttgcacgatttggtcaatgctctgccgtatgacttgtccaatgttaatgttgtaccctttcattatggcgtacacatatttaaggcgatccatttggacatcggaaaaatgcttgttgggcactaaccgagcactcacaaagtacagccatgtttttgccaccgggttaatctcacaccggtacagaatattgggcgacccctcggtaccatcattgtcatggaacctcaacccaggaaatcccactgtctccgcgacatccaccatatcaaattgctcttcctcctcaataattcggaggcgttgttcctccctagtgtaatctgggacagagaacatcacattgaatgcgtcagcagtgg

SEQ ID NO: 282155 - DNA, 261 bp, Cannabis indica
aattatatattcagagatattattgtaagagctataagaaaaggaaaattcttccttgttcttaagtcaatacaactaacgaagattaggctattaccgaactgctcggggctgaacctctataaaatttctgtatcttattattgctttattatatatatatttattatgacatatcgtttatcgcttatcagaaagactcattgtcgttggctaaaagcgaagtcaacaaggatgttaataaaacatacttgttagtaa

SEQ ID NO: 282156 - DNA, 625 bp, Cannabis indica
aattacaaagctgaccaaaatatatttacagccattatccctaaaatcgtgggatctgattacatatcacaaaatataagtgcggtgtatgattttgaaaatcatatagttgtgattttcccgtttttactgggtcaaaaatatcgtgtattaaacacgtgtttaattgttgaatctggagatgtctagacagaaacttgattgtagtgatccaatagcgagctgggaccattcttctttctgagatcaaaaagatatgtcttacgttgatcgcaggtatatagaaatcttctgacttgccagggttatgaaccttgctcctgttagttggacgaagctataggaagtcttctcatagcgagaaggtcatctcgcatacttgttcttcgagtcgatccgacttttacacttagttttcttattgcaagctaaggtatgggtcacttttctctggtgcctcactattcaactttagcgacatgtagtttctcgttaatacactaagtgccagtttgtacattgattcctcgcctaagaccttatagtcggcgagttacaaatatactatgatacttacgtaattaatgaattattccataaaaagatattgcaccaattcacattc

SEQ ID NO: 282157 - DNA, 792 bp, Cannabis indica
ttatcgcatacataaactagggtgttttaggatttcatccttgttagtattaacccttattttttgttgtagctgcagttgaagtccgctcctactcttaaccgcaagctaaagcctgggacaacagcaacttcccctatcgcttctcagaagaggaaaagcgatgtggtggttactcctgtcgcagattcttccaagaggcctgctaagggaattcaagagaaagggaaaaaagtcgtgatcgacccagcggttcgagctcgccatgtgttgtaccttcaggagagatttctcagcgatgagttccagtcgaagattgacaagactcctactaaggagctgctgcctcgctccgcggagttagctacgcagtttatggccatgttctcgaaggcttttgctgctgggtccaaggaggttgaactcgcgaagaaacatattgcttagcttcaagaatacattaagaagctaaagcaagatgcgtcttctaaagacaaagagctcgaggaactccgtaaggccaaggagcaagtcgagcttgaggccaaggcgaagatcgaagagatgtcttgcaacttggaaatcgagaaggagaatggaaaaaagcaatatgaccaggcggtctcggactacatctacaccactctctccaagattccagacttcgacttttcaatcattggagcagaagccgctgaaatggccgaggcttttcgtgcgatgtcgcacacgccaactcaaggttgtggggggaatcttctcgaggaggctgaggtcgcggaggtggaggaa

SEQ ID NO: 282158 - DNA, 632 bp, Cannabis indica
ttggatagtttggaaaattctaagcaatttatttttttacagaactcgatttcgatttaatttgaattagttatgaatttttgaaaatcgggaaaaatcgaggtggtgatctcccaccccacgcgcgcggaagggctgctggcagcctcccagcgccgaggaaactcggcagatcaccctgtatacgcgcgcggatggtatgcaacgcataccatccgtacagtgtgctatttttcttcgttttcttcgatttttcatgctatttcatggaattgacttccgattttttgtatagttttgtattttgatttttgtttttcaattttcaaatctaattatcagaaataaattaattttattttaaaattaattttagatattagtgtaatttgaatttgaaaataggataaaatcaagtattgcttacctcttttcttatttcttttaaattttgattattttatcttattttgaataaaaggtcagattttttttgttaaaaatatttttttttggtaaattgaccttatttagaataagattactataatcatggtattttaaaaggggaaataagattatttttgttaactttttaaattttgttattttacctaaattagattgtaaaa

SEQ ID NO: 282159 - DNA, 595 bp, Cannabis indica
cccaaccacgtaaaaatccttctctcactttcttacagctcaatagtataatcatattttattagttgccgaaaacctcggtcaacattttggtgctttcattgagagctgaagaaagctgctacaaaacaagcatttgacttcacaaatatggtggagacaagaagtactcgtcagcctcgccctctggaagacgctcaagacccaaacgaggaagatgtagcctcaagagcagcagaggagtccgaggaagaagaaatagtccccgatgatgactacgagggaaacctcgacgagtatgcctatgacgaaggtagttactcagaactggtgcttcttagacaaaaagctatcgatcacgaagccgagatcgaagctcagaaagcgcaaaaccagaaaatgcaggaagtgatgctggccatgcaaaaagccatggaagcagctggcattcacgtgcaccccaaggcaatgaccgctggactcaacaaggagccagcgacatcttcgcctaattcccagcagcagaaatctagggagcctagccctataagatatcctgctgaggggaatcaaacaaaaaaccctacttctaccc

SEQ ID NO: 282160 - DNA, 617 bp, Cannabis indica
ggagtactggcacattacctcatttcatcacccttcgttgttaagcaaactttatagcaaaaagagagagttttcaggcttcaaagttgctgaggagctttcagacgatttcaggcttgcttgaacccgaacacttgaatctttgagtaagtttctgatcccctttatgtttttcctttgcatgcttgtgctttgaatgtaactttgctgtagaaagaacatcgtaggaaaccctagggtttgaaacttctgctactcttcttttccatgtccttgcgttagctttcagccgtaaggcttattttagaacagcattgtgtctatttttcattctgctttcttcaagcttcatgaactttttgccctaactcaagaaaaacttttcgacttcttgagcttagacttttctttgaacatgatcgttcttttgatctgttgggtactcctggtcgatttgaagttggcttatacctactctcgggctaaatctgctacttccaagagtacggctctgtccgacaccttgagggcggaggcagacttggccaagaaggaagctgaggaggccaaggcggagactgcagctgttcgccttgagttgggtgaggccaacaaga

SEQ ID NO: 282161 - DNA, 628 bp, Cannabis indica
tgttcaggtcggccagcacacttaaatttggaaagaaggtaagaactatgtataatatgtaatatgaatatctgagtgtacatatatgttaagtgtatatgcatgcttatgtgttagttgcactaccaacacttgtacagttgtggtacagagtgcattggtatagtgaatattatttaagagtactttacagtgataccggcacaagtacgagaaagtacagggtgtctgtggtatatcactcagtggtactaagggttcgaaacaaaccctaccaacactcgtacaacaaggtacgtagcgtatgtggtatagtggttgtaccctagtatggaacgttcttactcatctgttaatccttgtaaataggtgtatgtgcgcctagatacaagtcggtatatatggtatgttatatgctcttcttactgagtctgtcgactcatagttctgcttccatgtgtaggtaaaggaaagacgaaagctgagcaggagtgagcctgagctaggatgagattgtacatgtcgtggcaacgtgacctgaagtgttcggtctcgggacaactggggatatattttgtagtcgctgtgcgacctggatattgtattttggcatattttgtataaaagt

SEQ ID NO: 282162 - DNA, 719 bp, Cannabis indica
attagtatttttaatttttttttaagaaaaaaaaaataaatcacttaaaccaatcttggactagcacacttatttggcacttaaagtattgataataagattgagtgtagaattacatttaattagaggttattcttactatttttttattaattaaggttatgggtgtaatatttttaaattataagaggttttattataaatattttaataatttaaatccaaaaattaatttttaaaagattcttatttagtaacaaattgtaaaaaattaattaataattattagtaatttaattttaaatataattaattttaattaagattttataaggaaataaattttcaggttactatcaggttacaagttatttatttatttatttattttaatttctaaattaatcacaaccatccaatagtgatctaatgactaaaaataaatgtaaccatgatggttacatatttgatgtaaccattgaaacctcttcctatatatattatgtatgttatataaaatatgttatatcagttaacagtaagcgaacaaaccctcgttccttccccttcgacaaaacattctccccctatatctattttctatgattttcaacccaatacttagcgatctaagctccggtagtagcagaatagcgaattctcagagcggtgaagcttaatgtaaggtttaatttcgttttaagtttaataacaattag

SEQ ID NO: 282163 - DNA, 581 bp, Cannabis indica
aaataatactggagctccccagggtgacacactgggtcgggtaaaccctaagtcaagcaatccctgaagttgaatttttaattctttaagttctgctggagccattctgtaaggagccttggaaatcggttccgctcccggtgccaagtcaattatgaaatcaatttcccgctgaggtggtaaacccggaagttcttcaggaaaacatctagaaattcccgaaccaccttgatgtcttctggccgaacagtatctggccgaatggtatcaactaccacggccagaaaccctagacatccatcacacaacaattctttagctgataaggccgaaatcaccgggacccgagatccctgaaccgaaccaacaaaaacaaacggttcttcgccttcaggttggaagattaccatcttcctcttacagtcaatactggctgaatatttggataagaaatccattcccagtatgatatcaaaatccactaaattcaactctatcaaatcagcgctcaactctctatcttctactctgattggcatagacctaatccaccttttggagataactaactctccgccagg

SEQ ID NO: 282164 - DNA, 506 bp, Cannabis indica
tgacttttttaccagaggtgaaaaacacatcaatggtatctttgcctagtacctttgatttgacctcattgtccattttgatctcatggttaccctttgactcttcaaaggtcttgaacaatgatttgtcatatgtgacatgaatggtggcacatgtgttaactcaaacttataggtctccttgttttgatgattaacaaatatttgattattatttgttactaatgatttgttgattttgtagcaaaattaaaagagaaaataaatctttcatgataaattggtatttttaccaaacttttgaaagcaacccaaaatggattcaacaagcttatcaagagcaaaaatattcttcaagggatcaacaactcaagaccctattcaaaagaggtcttcaaaagcccaaagtcaaaagtcaacccgaaagtcaaagtcaaagtcaaaagtcaactctcgggaaaagtcaacatgggatcaaaaacatgcaaatcaagctaggaggctca

SEQ ID NO: 282165 - DNA, 683 bp, Cannabis indica
tcaaattcttccttgaacattagagttagtcgttcaatctcttcctttgcacgcgtttacgaatcctctgtttctgctgcatagaaagtgaagttataagttagtgaactcagagatccaaacctagccatctcataaatgtgctgttgttcttgtgccgggggttgaaatgtaggtggagatttgtcttcgcggatttgctccatcgcttcatgagaagagtattaggtattcttctcatgtttaatcttttcattgtagcccataaatgtctacaagggtacccctgactttcatatagcatgcagctacagtgtagtgctcgttggccttcacagtaatgaactcggtattggacttccggatgctgaaactttccaatggtgtatatctgccactctccttcttgctcctgacttatgacaaaataattattctctaaatcaagctgctcagcaaccttgtggtacatagttcttgtgtagaattcagcacattggttgtagtacgtggtcaagcatgtaggattaggtgggtgaggtcgagtgcatctgcttttgaagtcatttgcagtctcgttgtgtctgagctttgagactgtcatatctatggttgttacaaattcacgcaagcaataattcttctctaaaaaattttttagggctgagttgatcgattcgcaa

SEQ ID NO: 282166 - DNA, 635 bp, Cannabis indica
taccaaaacaagcacccacacttatcctattttttctttttcatataccccaaagaagatagtaagagattgcaatttttttctatgtgcctacccaattgttcacaattgattctcaagaaaaaaattatcccatttacttttcttttttttttcttctttctttttttttttcaatagaggcacaacacataacaactatttttttttcaatctcttactgcaaaaattattcccccacttacaacaatttatcccccccccaaacttgcttaaaagcttatggcataataaggtatgttgagggtgaaagtagttaaagataacgaattcagcttagttaagtggtgaaaatttttagaataggctaaggctcaactttgggtatactaggataaaacgttttaggtaggcttgaaaggctcaatcgatccaaagaaaacttgcctaaatcattttccaaacaaaaatcgtcaaggatttcgcttcaagagagtatgtcaaacaaattctattccatgtcaagtcaatcattccacaatccaaatagaacacaagtgatatgcgtcaaaaacaaatgttttacatctacatgaacaaccttctaatacacatccaatttaattcaaacagtt

SEQ ID NO: 282167 - DNA, 565 bp, Cannabis indica
taaataatcaaatagggttagaaatacggtaattaaagaaatctagaacgctaattttttttggatttaatgagatttattttattttaattttattatatataaataaaaagtgactcatgaatttttcgtaaactattttatttttaatataaataaaaagtcacccataaatttttcataaaccaaaaattctattatataaacacactttatataaaatagatattacatatggaggggtgggccctttttaagtagacttggcctcatcgtcattaacctcggcagtgtaagtagaggaaacgccacctcgttactgtgagtagacttggaagctcgatacagcctcggtcctattaatcttgagcgcccaacatcagttatgctttattatatgtgccatgcccctttacttatccactcctttgatccatgaaattgaaatcttaattgatgtacataaaaatatatacttttttccatgtttcaattaaataaacgatcaattaatttagtgtaatttgcggcaaaacccccttaactatcaatttacttacaaaaa

SEQ ID NO: 282168 - DNA, 641 bp, Cannabis indica
cacttacaaaaaacatccaagcgcgagccacttggttcagttcacatcgataaagcatttggggctcttcatccacctcatgcaatctcaaccccggaaaaccaactgtttccgccaagtccacagggtcaaacttttctttcataaattgtctatatgtttcctccataagaatttcttcctctcttggcatgccaaacatttgatggatggtgttaatgtttactcgcacggttgttttgcgtacccgtaccctttcattttgtgcctcaggccaattggctaaaaattcaagagccagagtctgattgattctttctgaaattttcactaactgcgcccagtggcgattctgaatctgttgcctcatggtctcgaataatggattattcgggatgggattgtcatcatattcaataccacgatccataatgaaggctctcttttgcagttcaaagtatctttcttgcgctttcaaactcacaaatctatctttttcataattggcctttgacgccggtgttggcggtttcgatgatgacgcacccgattgccccgttctactacgcttggaacccattacacacttcaaaattaccacacaaaaattttgggaaaaattcggcagcacttccccttaa

SEQ ID NO: 282169 - DNA, 994 bp, Cannabis indica
cctagttcggttctagttccatttgcaattctaagtttgagtttggttttgagttcgggtcagagttcgagtcctggtctgaattttttgttcgggtcttgatttatgtctaggtccaaatcaggctccaggtgtaggttcgcgtcttgggtcttggtataggttgggtccgagtcccaagttccaatcccaatctaagtctggattcagttctgggtctatgtccttggttctgatcctggtcttggttcgagtttgggtccgggtctgggtctagctttgggtcttattctaggtgtgggtttgagttcgggtccgagtctatgtccgggtttgtgtctaggttttaaccccgatctgggtctaggttcgggtcaaggtccaagttcgggtcccgagtacgggtccaggttcggatcccgagtccaggttggtttgggatccaggtctggctcccaatttgggtctaggtctgatttggagtcttggacctggtctggttacggttctgaatctgggtccaatttcaattatgattccaagtcctagtcctagttccagtctcggtcaactttcagtttggttccaattttgggtcacagggtacgggttggggtccactttgggtttgggacaggattcagttccgggtgttggtttgggtgcttgtgagggttcgggtccaaggctgggtcccaaatcctgacaccgactacgggttttgtccaagccctgggtcacgatctggatcccaatctagggtcacatttttgttccatttctggtgccgggtcacgagttgggtcctatgttcaagttcacgtcgtgttcgggtattaggtcccggtcctagttttgtttcccgagtccctatcctgattctcggtcaaggtcctgattattgtgtgagtttgggtcccgctttagcttcgggttcgagtcctagtctcggtttgggttcaggtctctgtctaggttttgatctgggtccggg

SEQ ID NO: 282170 - DNA, 679 bp, Cannabis indica
tcccaagtagatatctgaacacccatttcatggctaaccagtgaacttttcctggattagccatgtatttgctaagtacactcatagcataacctaggtcaggtcttgtgcttaccattaagtacattacagaccctacagcattagagtagggtacatccttcatagattcaatttccttttctgtcttagggcattgttccttagaaagtgtgtactgactagtaataggttgcttaacaaccttagcatccctcatagaaaacttatctatgatcttctcaatgtagtcttcctgtctaagtattagttttccttcatccctgtctcttagaatagaaattccaaggatcttggtagaatttccaaggtccttcatttcaaattctgtcttgagcagatccttaaccatttcaaccttagccctttcttgacttataataagcatgtcatctacataaagcaataagtagatgacatcttttatagagtctcccttgtagtatagacaagtgtcatgatagcttctgttaaatccatgctttatcataaaagcatcaaactttctgttccattgtctgggagcttgtttgagtccatacaaggacttaaccaacttgcagaccatattttcctttcccttaatctcaaaacccttaggctgttccatatagatctc

SEQ ID NO: 282171 - DNA, 529 bp, Cannabis indica
aaaacaagaaacctgttctggaagatttgaatggcattacagatgaaacggttgccttgttaacgagaaactatgcaaaattcttgaaaaagaactacagaaaaaattcaccagctgacaaagaaaatcttctcaagagaaacaaaggtgtaaacttcaaaccaggacaagcctctactgatcaaaagggtcgaggaattaagtgcagagaatgtgatggatatggtcacattcaggctgagtgcgccaacacactaaaaaagaaaaaggcccttgcagcaacctggagtgatagtgatgaggaaaagaactccacagccagtgaaggatcatatgaggataagcagatggcccaaagctgtaatccagttgagtctgaagatgatgcagtctccaccttatcagaagctgatagcacaggtcgacaaaatgcttatgaagaaatgtttgcacaatgggactacatgactaaatagatccttgctctaaagaactcactagagcaagtggagactgaaaaggaaagtta

SEQ ID NO: 282172 - DNA, 723 bp, Cannabis indica
tgctattccgatcggatagtatcgcccataagccactctttgggcctcttctaagttgatgtacttttggactcttttctagaaatcttgaaggttggaggctccttcttgctgtaactcgttccagaatggagtccctgtacggatccctgcttgaagaactgcaagttgttgtccgtcatcaactttcttagtctttgaggcttcttccttaaacctctttatgaaatttttcaatgtctccgtgggcagctgcttgatgttagttggggcgctgacctccagattaacctttctcgcggcgacaaactgcctccgaaaactaacttgtagcttgttccagcagtccactgatcttggttccagcttcttgaaccattcctccgcggacccgcttaatgttagcgggaagcataaacatttggcgtcattactgactctcatgaccgtcattactcggttgaaccgagacaggtgatcgctagggtccgaattctcggtataagctgccatctcaggcatcttgaaatttttggggagctccgcctccaggatgtgcttggcacatggctcccgatcttcacagtcagagtcggagtcatcgcctttttgtctccgggagacccgagcaatgtctttacatagtatggcaagctcagccatgattccttcgttcagcgttcccgtggagaccgttggtgcatgtttcttctggtctaggtg

SEQ ID NO: 282173 - DNA, 892 bp, Cannabis indica
tccacatattgtcgagggtgcgggcgaaccaaaattggttgttgctgttgttgctgactctgagcactgaaaaagcctccatacataggctgttgtggagatcctcccatttgaccatacacaggttgttgctgcaacaatgacccaaattgaccgtacacagggtatggttgttgggatgagcctccaatattaccaaccataggttgtgtctgagatcctccagcggcttccgaaaaaaatataggaggagactgtgagggaagcccgaacatgtaatgcaactgaggcgattgtgaagagccagcagacatgttgggagaatgttgttgttgttgttgaaaaaactggggctgctgaggcgatcgtggttgttgttgttgttgttgttgttgttgttgtggcattgacgttggagggggggctgaactggacgcgctaccttgcggttgtgatggtaaaaatttttgtaaaaaattattaaaccgcgggtcatgcagagacgcgtcactggaggtgccagactgatcaatcttatcacgcatttttaacataaactcggcgaagactcccatatcttccggagtaatggatgaagtcggtacttgtgattgagctcgactttgagtactagaacttgatgtcgagctgcctttcaatttataacccaatcctcttagatagtccgaccggctcccaagaactttattcatagctttcaattgcttgtatttgctagcagacccatcgctggaatcatcttctgtatccgtcatgctagcaacctcttcaagcattttctcctgatcaaataaaatattagaaatacaataacaacaacatgcattagttgtaagaaaattattaaaaaacatattgaaacttacatgta

SEQ ID NO: 282174 - DNA, 727 bp, Cannabis indica
aaaaaagttcatgaagcttggaataagcaaaatggaaaacagacgcaatgcagttcaaaaataagccctacggctgaaagctaacataaggacatggaaaagaagagtcgcagaagtttcaaaccctagggtttcctaagcgttctttctacaacatagttacattcaaagcgtaaacatgcaaaggaaagcataaagggaatcagaaacttactcaaagattcgaatgtccgggttcaagcaagccagcaatcgtctgtaggcacttcggcaactctgaagccagaaaattctctcttttcgctctgaagtttacttaacaacgaagggtgataaaatgagtaatgtgccagtactccgagtatttataggcaaaagggtaactgtacataaaggaaccttagacgcctcggcttcccgcctcaaaagcgaatatgggaaatcaaaagtaatcgagtgcaaccgtcagccgtggagagagaaatttggattttcaaaatattaattgtcagagcattaattagccgaaaaccgaagggacgcccagtcagcttcacatcgagtctcgaacggtcatgctcgacacgtgtccccatccaaaggcagagccagctcggaataagtctacacgcaacctcggaggtcccgtacagacttgggggcaaatgttatcccaaatttggcactctgacgtggcatcacgagaatggtgacacgtggactctac

SEQ ID NO: 282175 - DNA, 1106 bp, Cannabis indica
gtcaaggagtatcgccatagcttcttcttctcctccgagttccgagctgtggagcacccggagcttctcacgaagtgggtcaggattcctccatacgagcggaccgcgcctactcagatctttcttcgtcgggctcaggtctttgcgacttatgaccgggcagatctcgacgtcgggggcttggtcacgacggagaactgccggaaggccaagctgatcctgccacaccagtcagtggaggactctaacctttctaaggttatttgtccgaatgtgagggttcctgccgcggagaagaccttccgggatgagcttattgccaccgcggagaagaagtaccaggagtatctctaccggaggcccaggagaaggcttataccaaggcccaggcggcttccgggaggccccttcgcgtggggagcccggtcgagaggagaagccaaacgattgccgggaagtcccttcgcattgggagcccggttgagaggagggctcccaggccaaagcctccggttcaagtgccgaatacaggggctcctgatgccagtacttccggctccggtaagtctcctttagcagttcattacgttccttctgttagcgagtatgccagccttaggcctgtagggttcgatgaacgtctccttaggtttaggctgccctcgacccggtggggagatcatgccaaggattattatttttccaacttaggagatttcctaggtcggtcccggatgggttctggacctccggagcccattcccttggacccttcggcctatctttcttttagctggttccggccctcggacagctacctcggggatgatggagccagcattaaaattcagaactttgctacggctgaattagagagtcagggtaggactagcttgattgcttttttgagtgtttactactttcacagatattctaacacttgactcttttcttttgttgtagcagctaattccatgtatgccattctggccgcccttgccggagctcacacttttgacgctccccttcctttaacttcttcccaagtggccactccctcgaaagcttcttccagtgcccctccagacactattgacttagtggat

SEQ ID NO: 282176 - DNA, 611 bp, Cannabis indica
ttacgctaaatgcctataccaaaaaaaatgacgctcacccataaataactacaaaatgaaacaaaattgtggacagctaacaaatggcatcaatttttttttttattctatactttaataaaaattattaaaattttatatttttatttatttcaaaatttatatattacatcatacatttattttttaaaaataaatcaccaaaattttattttttaaattttaatatattttattcaaataataaataatattatttctcaaaaaaataataataaataatattttataaatttaaaacataaataataaattttaaaaaaattaaaataaagcaaatgtttacaacatttgatgttacctatttttagttaaattatccaaatatttttaaaaaatttctattttaaagctttaaaatattattgtaaatgaggcaaaatcaaataaacgacagatttgaattaattaaaaaaaaaaacaaataacgacaataatcatacaatactttctgaatcttacttttgaaaccgaaactgagtttgttaaccaaacttttctaacatcataaaccatataccaattacactttatcaaaaaaaataaaataa

SEQ ID NO: 282177 - DNA, 477 bp, Cannabis indica
gtccttcccaatttggcccaagtacccccactccgggttcctgggtggctgggaagactcttcttaggaccatatccccaatagcaaattttctgtttttaaccttagagttaaaatacttggtcaccttcttctgataagctgccatccgtatttgagactcatcccggagttcttcgacttgatccaaagcctcttgaagcaaagcttgattcgtggctggatcgtaagtcgtcctcctgtgggatgggaataacgtttctaccgggaccatcgcttcacaaccgtacgccattgaaaaaggcgagtgaccggtcgtggttctgggggtcgtccggtaggcccataacacccttggcaactcttcaggccagttgtttttgcaggccagcagctttttcttcaaggtgacctttaggattttattgactgcttccgcctgaccgtttgtttgaggtctggccaccgcggagaagc

SEQ ID NO: 282178 - DNA, 592 bp, Cannabis indica
tcactggcttgagctcaaactgcggtgcttgtatttcaggcctcacaatgcctggattgagctcattaaacatggggctgcatactctcgtatagcccttgctcgatcatctgccaatatgatgggattaacaatttgttgagcaatcccatcatcatcaagattctcagccatgatgtctcgacctttagccttttgaacccttcttcttcttcgaaatgtgcgttcaatctcggggtcaataggagcaagttcaaagtcctcttgttggttcatacactatagatacctgagatttcaaagaacaaaccagcaagattaaaagcacaaaaattattagaatgtcaattagttgataaaacaaaatttagaacttaaagtccccggcaacggcgccaaaaacttgttgtgaaaatttatattgatttataattgcgcaagtgtacacaatcacaaacaagtaatacaatgataagtaatcaaagttcgtctccacagggactttttactaaataatgcaaaatcaactaaaggcaattccaagaatttcaaataaaaataaaacaaagtaacaaattaattcaagagaaaa

SEQ ID NO: 282179 - DNA, 532 bp, Cannabis indica
aagaaattatggctaaacttcctagattcaataatcgttttgctctgtaatccttctgtttattttggtctgttaagtgttaaattggactaccaaagtgtacataaatatttttttttcctcttttttctttttcttttttcttttttctttctttcctttttagtttttttttaaaactacttcttctttcttgccgagaaaaccaaacccccaccaccactacaaaaaattactacttttagtgacaatttttaatcacaacataaattttttgtgactaaatgtgacttttagtcacaataaaaaattatttgtgactaaagcatattatttagacacaagttgttactaattagttttagtcacagcaagtattgtgactaaaaacacatttagtcacaaaattgtaatttttgtgactaatacatatagtcacagaccttttagtcacaagaataataatttataatcagtcacaatttttttacttttagtcacaaatttaattacgactaaaagtaaaaaaatt

SEQ ID NO: 282180 - DNA, 531 bp, Cannabis indica
atacggcgttccaaacgagcccttcaagtgtcgaaacatgaaattaaagaaaataagcataattctattctaaaaagtgacactgaagaagaaaattaactctaaaaataacataaataataggctaaaaatatcttaacaaatttccccaaactaaatctttactcgccctcgagtaagactaacaactaaaaacaacacaacctaaatgaaacaagtcaatcaaccgaaacatgagaaattttcaagtaagataaataacatggttctgaacaaaaatttcacttataataatctagaatttcagttcaatcacacccttgattcacctcattcttttattcagttcatgaaatcataattagcacttaactaatagttgaaacaatttatccatgtcaattacaaccatcaatccactatcccaaaaatattccatatgcttgctatatttactattatccactaatataaatcaatgcacaaccaagaatcaaaaggtctttctatgcttgtaatgttaggcttagg

SEQ ID NO: 282181 - DNA, 915 bp, Cannabis indica
tatgtgaaatatgttatttttgtaatttttgttcggcaacaacggaaaatgcgatagatgactagattgatcacatgggtaagtttagaaccttatttcataaggggaaatattttagtgaaaataaattatcaggattgagcggggttgtaaattttgaccattttacccctagctttagataaaccttaatattgggttaaatggcattttactcttttggttaaggggtgagtgaggtgactgcccaagtaattgacacctagcacattattttttcagcaaagagttaattggggaaaaccattttcatttgagaaaattaaaagaaaaagaagaaaattagaattggagttatctcttgaactctctctctttccttctttcggctgggacaaagctagggcaaggagcagatttttccttccatttctttgagatttagcaagaattcaaggggcaattaaccaaggtaatcttagctactctctagttatgtttttctcaagttttgcttagtttcaataggtgatttctaggtttagtggctgttaggttttgaaatgattagggttcgaattttatagtttatttgatttaaattaagttcctagcagctggttttgatgcttggtgttagttctaagcaagcttgagttttgaaactcaagctttgagctttaatggcaacttgaattataatggtttgttctgtgaaatactggctggaaattgttgtttatgccctaattaggtactctggaaggtttcattgcatttggtggaggattgagcattgaatgaaaggttttgggaaaccttgtgcaaaccggctagccggtttgcagggccacaaaaaccggctagccggttttggcagggttccccgagcctttcattttctcaatttttgcc

SEQ ID NO: 282182 - DNA, 573 bp, Cannabis indica
taagataattgatgtgttcatcctagaggctgctcatttgactactactacccctgaccagagactcattgtcaattccttatgttcatggatgcaagggcccaaggtctgcagccactgcattccaagtatcacatccaaacctgaaataggaagcatatacaaatctaccataaaatgatgaccctgtaaaattaattccacttctttgcaaatttttgaacatagcagagaatggccattgcccatatataccttgaaccttttagtttcttcccacggtaattacaactgagccgcaagtgtttattgaataaaatttttcttgctgcccgtgtcaatcaagacttccaatgattctgcaccatgtttagcaaaaatacaaaaaattcgaggattagaggaatttgacaaagcattcaggctaacctcatcaagtggattgtcatctaattcatttgattccccaccattcgaaaatattaatccctcctcttcttcctccatgccacataaaaccataacttaatttttgcatttatggccaaagctatatttctcatcacaagtaaa

SEQ ID NO: 282183 - DNA, 179 bp, Cannabis indica
atagcttttatcttgacatagacgtgaaatgatgatttctttcaagcttggcttaatagagataaaaggaaaagctcttatttcagtgattatattagtttactgaaatattatttataggaagctaagtatactcggtgtaaatcatctatagaggatctttgattattaagattaga

SEQ ID NO: 282184 - DNA, 472 bp, Cannabis indica
catagtgtgtcgatatggcttgtataatatcccgaaaattttattgatatttatttggccatattttattaaatatgtagttatgtggatattagagtaagattataatcttacttaagctaattacgagttaattagtggaatttgagtaaataaataaataaagcgtaatttattaattacgaaaattgtattgaaatatgtgggtatcgtagataccataattcaaataaaatattttatcgggcccggaaatttagcattatggtcagaaatgtcacgatattaatggaagaattattttgagggtattccggactaggttagaatttttagaatgtcggtttaatggattagtaaaattgccaaaattcccctacgttttttttaagaatttaagtttctttggagggtaaattagtcattttattaaatgggaattttgacttttaattttatggcctgattgtat

SEQ ID NO: 282185 - DNA, 567 bp, Cannabis indica
attttgacatataattaagataattattgttcgtttattattttattcttaaaataataattgccgaactatatctattttaaaattggtttattttgttattttatttttattaaattataagattagaaagtgatattgaaaatatctatttggttatttttaaatcatttatcttattagatatttaatttaatttgataaaaatcatttaaataaacctagatattttaaaattagtttcattttttgaactttaaattttgaaaagatatgtaaagttgtttttaacaacccttaattttcaaaataattggttagataaaagataataatttaattatattaaaatcttatttcagatttgttacatgaacattgtttgttatatttatattgttttttcagaactttttttaacaaacctattatttatttgatctaaattactatgattaacttgttgatagatccaatgatctcattttaatcatagtccaattgttaatatgtcctataaataatttgtaacaggtaaattttgtacttctttcatctgtgtaaacc

SEQ ID NO: 282186 - DNA, 511 bp, Cannabis indica
tacagaaatacatatatatacacatatatacactaataaacacatttacacatacacatacacatatacataaacttttcaaaaaaaaattaaaattaaaaaattaaaaaataccttccacaaataacaggaggtggggcttcgggtggtgtgcggtggaggctactggcggccggtggtggtgcccgacggacggtggtgagtggctgccggcggtggggaatttttttccaaaaaaaaaaaacaaatttttgagagaaatgagtgggattttgagtgagattgatagagattagtgagattgagtgagaatgagtgagattgaaagagagggatgaaggagggattttttgagagaaaaaaaaataaaaaaaaaaaaccagaaatggggtctgctcgtcgaaggggatatatgaacacttttaccggcgcattgaattgcgccggtaaaagtggtcatataaccctaaaaccaaacgcaccgtttcgcttaccacttttaccggcgcat

SEQ ID NO: 282187 - DNA, 437 bp, Cannabis indica
aggtcaaaaagcagtatttttgtaaaattccctaaactaatgggacaccaacttaaacgaactactaatcacattaaattcctatagagaccaactcaggtggtctccatatttttgggcttcctgttgttacttgggcctttattataggcccactctttttttttgggtaagttgaaaaatactacttttattaatcaattaatcaaatttacttctaattttatatttaattaaaacatacctctttttatatgttttgtacctaaaatactctaacataagagagtcacatggagagtatcttgaagtaataggggcaaaatttgtacaatgtttaaaaaaagagataaaaattatagattttaaaaaaaaaatgataaaaataaaaaaaaacaatataaaaaaggtatagagtgtaatttcctccttttttt

SEQ ID NO: 282188 - DNA, 569 bp, Cannabis indica
ttctaggtctgcgtacgggtcctggtcacagtcctagtcttggtctagggtcctcgttcggcgattgttgttcaggttctaattttgggtcccagtggttcgggttttgttcttcgtctggcttctggtccaagtctgagtcgaagatctagacaccgactactggtctgttctaggccctgttacccgaagcccgagtcaagaactggtctgcaattggttcaggtcctaggtcccatttttaagtttgggttctggatcgagactggagtgaggttctaggtcccgacccttgttctgggtccctagtctggttccatgtttgggtctgagttccggttcgggtttgggttccaagtcccagttttggttgggatccgggtccggctccgaattcgggtccaggtcttatttggagtccgggtcctggtccggctacggttctggatctaggtccaatttcagttacgactccaaatccaagtcctagttctagtgccggtcaacttcgtgttttggttccaattttggttcacagggtaagggttcgggtccacttttgggtttgg

SEQ ID NO: 282189 - DNA, 558 bp, Cannabis indica
tgtacatttatatatctctggtaactcatgactataattatgtaaattcaatcttttaatcaccttcctaaagttcctagtcatgcatcatcaacatagattttactcactactcacctcattctcttggttcatactggcaaaacatttatgcaacaaagaccactgaagcttttaaatctactcttctgaaagcatcatatgttctctacctcactttctttatcctgactgatgttccatgtcttgctttagaactgaatgccacaattgtaaggtggagctgttgagattcataacatattaatccatgttgtacaaatcacaccaaataattgctgtaaaactaaactcttttaggcctacttcaatcttcagctaaaatatatatataagaggactgcaataataacatcctatcataatttctttcttcaacttctatttttgaaaataaatactgaaatatttttttaaaatttttttatacagtaatatttgtcataattacgacatcgttctacttataaatttttgaaaaattctaaatagtttaca

SEQ ID NO: 282190 - DNA, 1080 bp, Cannabis indica
tcattccatgttactgctcgtagtgatttcttcacttcttacactactggtgattttggcactgtcagaatgggaaacaatggtgcatcaaagattgtgggtattggagatatttgcttggaaaccagtgttggtagcaaattgattctcaaagatgttaggcatgttccagacattcgccttaacttgatatctactggaagacttgatgatgaggggttcataaactggtttggtgaaagtaaatggaagctcaccaatggttctcttgtagtggcgagaggaaagaaagtgaatactctctatgtcatggaagctaagctacacaaaggagagattaatgcagttcaaaaagatgcaaacattgatctttggcaccagaggctcggtcatatcagcgagaaaggacttcaaactcttgctagaaagcaattcttaccgaatttgcaaggtacgcctcttaaaacttgtgatcattgcttagctggaaaaacacatagagtttcttttcatacacgtccaccatctagaagatctaatgttattgatctgattcacactgatgtctgtactatgcaaactagaactcttggaggtgcactttattttgttacttttattgatgaccattctagaaaagtttgggtttttgctttgaaatctaaagaccaggtgctcgatgctttcaaagaacttcatgccaagattgaaagagaaactggaagaaagttgaagtgtgttcgagcagataatggtggtgagtacaggggtccatttgaatactattgtagactccatggaatcaagcttgagaagtcagttccaaaaactcctcaacataatggtgtggcagaaagaatgaacagaacaattgaagaaaggattaggtgtatgctttcccatgccaagctacctaagtccttttggggggaggctatgagaactgcagttgatttgattaacctttctccttcagttctctgaacggtgatgtgcctgagagagtatggagagggaaagatgtctcatatggtcatttgagagtctttgggtgcagagcatttgttcatattcctaaag

SEQ ID NO: 282191 - DNA, 547 bp, Cannabis indica
aaaataatttccaacaggtatggcttaggtgcctcttttttatcttctggactatcatcttgtggtttggatggcactgattttggttttgggatgataggtgggtcgtagtgtttcccacttctcaaggtcactgcactggcattctccttaggatttttctcaggttgggatggtagttgattaaacaattgagattgcattcgattacaagattctgagagttgacccacttgattctctaaactttttaacgctgcttgagtttcttgtttgaattgttgagaatcagccaacatggcattaataagatcttcagtggtaggcttgggaggtgctggattctgtctggcagatgtccactgttgataattaaaagcagcttttgtaggttgttggacattttgttgattgccatagcgaaaatttggatgatcacgccatccctcattatatgtgttcgaatatggattatattgctgccttggttgacctgggaaacctccaatagcattaacatcttttgttggcccttcatagagagtag

SEQ ID NO: 282192 - DNA, 927 bp, Cannabis indica
aaacccccttaaaccgagccttgttcttcattgttcgtctctgaagaacacgaagaacaccaacaaaatacccaaaaaatcccaagcagaaattaaataaaacacaacaataaaagtgcagaaaagaaaaggaagaaataacatcgagttttatagaggttccccaaaatcgtgttgggtacgtcctcttcgagctcgtctcgttcactatggatcttcaatgatcagatgattacaaaaggtgggattccaaaacacacaggtattgtttggtaatctgaatatgtttacagtattttcttcctctctattctctttgtttctctcgaattttgtactaactgttgtgtatttcttctttattgcatggacaatcttcctgagatcttggatatccgaaccacaccttgggttccaaagcttactccattgtaagcctccttcaaaaaactcccccaaaaaacagtttgtttcttctctgtgaaaaggatctgattttgttgtatattgttatgcctctgattttctgtttctgtttctgtagtactgctctgagtttttgtttctctgcctgttacttaattgttgttcatgctggtttttatatatgttgtattatagcacaaagagaggagagttagttacaaagtattaatcaactttgtaactaacttaactgcttttgtctaggttaatagaggccaaaggccacctagggattattttactgccttgtaaatctctgtgtaataatctggtttttacagtgtacaggtaatatgtggtttaattcaacaggcgcagacatactaaattaattgatttttttttactgttgaaatatttctaagcatattagaatgactatttgaatgtaaaataaaaattgaagaaatatgcatattttatcacttgctaaataaaatt

SEQ ID NO: 282193 - DNA, 599 bp, Cannabis indica
tccggttgccgttttctcagttgttcgacatgaccataaaacttcaggaagttcttccggccaatttcctttggcatattcgagtcttttctttagtgaatccttcaaggtcatgttaactgcttcactttgattattcgcttgaggatgtgccactgcggagaaacttttgatgataccatggttcgcacaaaaatcagtgaaggattggctgtcaaactgcttgccattatccgaaactattttgtactgcaatccgaactggcagattatgttcttcacaataaattcctgaactttctttgatgtaatagttgagagtggttcagcttccgtccacttagttaagtaatcaaccgctaccacgacatactgcactcctcctttgcctttgggtaattgtccaatcaggtcaattctccaaatggcaaagggccacagactttgcatctgagttaactcgttgggcggagcttgaggtatctttgagaatctctggcatttgtcacatttcttaacataggcctttgaatcttcaatcattgttggccagaaataaccttgccttagaattttcttatcagctagccatactctct

SEQ ID NO: 282194 - DNA, 815 bp, Cannabis indica
gtggaaattaatcacccaagtctattttccaaatctgaaattaccaccattttaatcacttttagtttcttatttttagtttatttagtttaaaaaattagttctcaagtttagaatcaaggctataaatttttctcgtgaattaatgtgtgactttattttatttttatttgaaattcttggaattacttttagttgatttaacattatttagtaaaaagtccctgtggagacgaactttgattacttatcattgtattacttgtttgtgattgtgtacacttgcgcaattataaagcaatataattttcacaacaagtttttggcgccgttgccggggactttaagttctaaattttgttttatcaactaattgacattctaagaatttttgtgcttttaatcttgctggtttgtctttgaaatctcaggtatctatagtgtatgaaccaacaagaggactttgaacttgctcctattgatcccgagattgaacgcacattccgaagaagaagaagggttcaaaaggctaagggccgagacatcatggctgagaattttgatgatgatggggttgctccacaaattgttaatcccatcatattggcagatgatcgagcaagggctataagggagtatgcagcccccatgtttaatgagctcaatccaggcattgtgaggcctgaaatacaagcaccgcagtttgagctcaagcctctagggtttctctctagggtttctctctagggattctcatgtgacacgtgtccggagggggcctctttccagcggttaggggacccccactccctttt

SEQ ID NO: 282195 - DNA, 596 bp, Cannabis indica
tatcagagcagatctttctcaatctgagatcgagatcttggtgtgtagtgtgtttcttgagtttgttctgttctcttggttaatatttttttttgttccttctgttctggcaaactaacaatcctcaagtgatttcttgaggtattaccctggtgtttttcgtgtctgctgtgttttactgcaggaaaataaagatggagatgtttcgtgaaggaggttccacctctcgaccacccatgcctgaaggagctaactaccaatactggaaaaccaaaatgagggcattcttgaaggctgtggatgaaagagtgtggatggctgtctctgaaggatggtcccctccctcggttactgatgaagagggagataaacttaagaaaaccagtgagtggactgttgatgaaatggaaaaagcaaacttcaactcaaaggcgctccatgctctctttaatgcagtctcaaccaatcagctgaaggttatctcaaactgtgaaattgccaaggaggcttgggaaaagttaaggataaagaatgaaggaacagaagctgtcaagaaagctagattgagagtgttggatattattttaccaggatct

SEQ ID NO: 282196 - DNA, 660 bp, Cannabis indica
cctcctcatccactaagtcaatggtgtttggaggggcactggaagaagccttcccgggggtgaccatctgggaagaagtaggaggaagggaaacatcaggactgtgggctccagcaagggtggccaagatcgcctccatggggtcagctgctgcaacaagaagaaaagagtcaagtgttagaatgtttgtgaaagcagcgaacacttaaaaagcaatcaagctagtcctaccctgactctctaattcggccctagcaaagtcctgaatcttaacactggctgcatcatccccgagatagctgtccgagggacggaaccagctggaagacaggtaggctgagggatccaagggaacaggcaccggaggtccagaacccatccgggaccagcctaaataatcacctaagttggagaagtaatactcctttgcatgatccccccaccgagtagagggcatcctaaacctaaggagacgttcatcgaaccctatcggcctaaggctagcatattcacgaacaggagggacgtaatgtatcgttagaggggacttaccagaaccagaagtgctggcatcgggagcccccgtgttcggcacctggacagtaggccttggtctgggggccctcctttcaaccgggctcccaatacgaaggggcctcc

SEQ ID NO: 282197 - DNA, 502 bp, Cannabis indica
gcttttcgtgccatgtcgcctactcagacccaaggtggtggagggaaccttcctgatgaggtcgagggtgcggatgctgaagaagtcgagaacgaggtcatcagcaaagtcgcggatgagactgctcctgttgctccagatgtctaattttcctctatgttatgctttttaattttacttctctctttttctttatatgcggtacaggggtactcgcgcttttgtacttagacaaatttccttttattttggacaaatttatatcctcgcggggataattatcctttaacattttcgcagtacacgggtactcgcgttctatatatatattcgcgactttaattacagcttggtgtaataagtagaaatatttacaagtctgataaaattttgaaaatttagatgaatcaatttcatttatataatcaatagtacattcgggcatatatacccccctatacttaggatttttcatgaaaaatatctaagtataagtacaaga

SEQ ID NO: 282198 - DNA, 537 bp, Cannabis indica
aaaataagccttacggctgaaagttaacacaaggacatagaaaagaagagtcgcagaagtttcaaatcctagggtttcctacagtgttctttctacaaccaagttacattcaaagcataagcatgcaaaggaaaaacataaaggaatcagaaacttactcaaagattcaagtgtccgggttcaagcaagccaaaaatcgtctgtaaactcttctgcaactttgaagccaaaaagctctctctttttgctctgaagtttgcttaacaacaaagggtgatgaaatgaggtaatgtgccagtactccaagtatttataggcaaaagggtaactgtacgtaaaggaaccttagacgcctcgacttcccgccttgaaagcgaatgtgggaaatcaaaacaatcgagtgcaaccgtcagccgaaaaccggagggacgcccagtcagcttcacatcgaatctcgaacggtcatgcttaacacgtgtcccctttcaaaggcagagccagctcggaataagtctacacgcaacctcggaggtcccg

SEQ ID NO: 282199 - DNA, 569 bp, Cannabis indica
aagcgctagcgtcttccggagtttctggatcagcccatcgagcaaacacttcttgcgggaacactgggaagtcaactatcggccttggcgccattcgctttagagattttgctaatgcagtgtcacgcgcctgaacatagcgaaagtaggtaagttgcttctcctcaaggtgtgctaggcgatccatgatttgttcgtgctgagtgcgaggaagattggcggaagtcgtctgactgctagatggctggtgacgtttgggaggagcagtcgagggtgtgcaatgagtggcaacacgctgaatcgagaccaaatcaatgctgatccgctctcttagaagttcttcatcgtccccaatagcggcattacccgctaggcaaatctgagtgatgagagctgggaaaaataacttgccgccttttttctgaaaacacttccaaatttcctcataaatgatcttgcccacatttattttcttgcctgccaggatgcaatacaataaacagaggcgtgtttggctcactgtggtgtcatgtgttgtgggcatcaaagagcacttaataaaagcaagc

SEQ ID NO: 282200 - DNA, 921 bp, Cannabis indica
ctcagtgtaattgaatagaagtacaatttattattaaaagagaatatatattgtttaaaaaaattagataataagaaaatgtaagatcggttgccaattttaaataatttttatacccttgcttctagatgaaggtataccagccattggataccaaaaatgtgcattcttcatcaatctaatggttaaaaagctattgaagttttacatgcctcaagtgttaaatgaggttttacataattggcctttaattaaaattgaataattgaatatatataatattaatatattagaaaaagatttgcattttaattaattataattttgttattttaaaagttagtgtaattttttttttctttttggttaagaaatttaaattttatgttaggcatatttatattaatatataatttttttaaatttagtgtgataatgtatttataattaaaaaagtaatatattaaataataatatgtgagatcataataattatagcatttttgaagagtgctataccattggagtgtttttagaagtaagagtgtcaaaaatgatgtggaagagagataaaataaaatattatatttttagatgatgtggatatttttagcatccttaaaggatgctaccattggagatgctcttacatgctattacacaatgctcataacactctttttaaaaaaaaaaaaattatatatattttgaagggctccaaaatcaaatttgtcttaggcccataaattttcaggatcggccctgctgatattaggggtgttcacaaagtatccgatccaatccaatccgcacgatccaatccaatccaatccgcaaaatgcggatatccgcacttgtgcggattggattggattgaaaaatccaaaatccgcacttgtgcagattggatgttgtttgacc

SEQ ID NO: 282201 - DNA, 768 bp, Cannabis indica
ttggattttttctggattggcttcaattcctcgagcattgacgatgaagcctagaaactttcccgagctgactccaaaggagcattttaagggatttagtttcatgttgtatttcctgaggactttgaaacattcatccaggtcgtctatgtgccccccaacctttctggatttgacgagcatatcatccacgtacacttccatatttctgccgatctgatctttaaacatcttgttgaccaatctttggtatgtagctccggcgtttttaagaccaaacggcatgactttgtagcagtagagacccatatctgtccggaaacttgtatgttcttggtctggtggatgcattttgatttgattgtagcccgaataagcatccatgaagcttaatatttcgttttagactgttgcatcgacgagctgatcgattcttagaagtgggaaacagtctttatggcatgctttgttgaggtctgtgaagtcaatacaaactcgccatttcttatttggcttaggcacgagtacggggttcgcgacccaagccgggtaaaaggcttcaatgatgaagttgttgttgcgcagcttttcaacttcatctttcaaggctactgctcgttctttatccaacaatctttgtttttgctgaactgggcggatgttaggatcgatattcaggacgtgcgaaataatagaaggatcgattccgaccatatccgcatgtgaccaggcaaaaacatccagatttgctctcaagaattttatcaa

SEQ ID NO: 282202 - DNA, 524 bp, Cannabis indica
aatattaccgctattctatcccatatagtctgaatgagtgtagcctcaacgtcctcccactcaaaattgttcatataatagtattgcgaacaagaaactttatgtaattgttaaacttgttgccatagtcatctacaggggcccaaatcgccatatgaaatctaaatttcaatttttgacctggtggcagcttggccagttcttgttcaatattttatcccttgtactttcccctaactctctttttctgaccgccacttgaacctgcatcagccattctacaaatacaagctacgaataattaattaatcatactattgacgaaagaggcatgtatttcattaaatcaatagtggcgtctatattacaatacttgaaagtctacaagtcatcataatcatcatcatcatcattaacatctacattattttcattatcactatcattagtgtcttcatcatcactataaacaatgaagccatctaaatcttcacggttagtctgctcatgacgacccatgtttg

SEQ ID NO: 282203 - DNA, 488 bp, Cannabis indica
gtcaaaacataaaagttttagatctctttctcttttttatctttccaacgcatcttgaatcagctcatttggagtttgtatgagaaagttatgcccattttactaaaagagatcgaagcagaaaattccatctcgccgcggcgagatttccatggccgcggctagaaagtctgggcagaaacgtggttttttgatgcacttttggccgcggcgagaccacttttggccgcggcgagcgtccgtacggtcaggggtatttttgtccgacgaaccctaaaaattagatataaatagaaaactgcgattggaagtcaagggaagcgatttggaaccctaaaacacagcagaaagcggcaggaagagcagagtgattcaaagtgaagatccagaattcatccaccaacagtttctttctctattcctctttaatttatttatgttgaatattgttataggaatggttatggatttatttctgaactaaattt

SEQ ID NO: 282204 - DNA, 560 bp, Cannabis indica
tattgtaaaggtatgggctttttcggtcgatttagctcaagagggtggggggacttcgactttctcgaagcagacaacttacgatccagcaacaaacaaagctttattacaggaagcattggatcaagttgaggagctccaggattagtctcaaatacgaatggcagcttatcaaaagaaggtcactaagtactttaactctaaagttaaaagtagaaaatttaatattggtgatatggtcctaagaagagtcttcccaggaactcaagaacccggagtgggggtacttgggccaaattgggaagggccatatgaaattgaggacgagatcggctccagaacctataagctaaaaagattggacggatttattgtgccaagggcttggaacgccgatcatctccggaagtattaccaatagtccaaaaatgtaaacttaggttttgttaaaagaattcgtaccgtaaaatgtatgcaacctctaagtttcaaataaagctgagtgccttaaaaataaagttttcatgccacttagggggtactaatgttggaaatatttt

SEQ ID NO: 282205 - DNA, 465 bp, Cannabis indica
ggaagggctgctgattcttggtgttttcagcaaagaaacctcgggagattcaagttaaggtaagccctagtgaaacccttctgtagtttttaagtttttgcttagtttgaacttgtgaaattgtaatatgggggctgttagggtttgatgcttgcatagttcgaattctagggtttgtatggattgattttagtacatagcagctggttttaaggtttattgttggttttatgcaactttgagctttgatttcaaagctttgagctttaatggcaacttgagttttattggtttgttctgtgaaatactggctgaaatatattgtttgtgccctaattaggtactctggaaggtttcattgcatttggtggagaattgagcaacaaatgaaagacttttggaaccttggtgcaaaccgactagccggtttgcagtgccacaaaaaccggctaggcggttttggca

SEQ ID NO: 282206 - DNA, 934 bp, Cannabis indica
tcaacggcctccacctcagcatcgcccccgggagtattcgtccatggcataattgtacttggctatctgaagctcctgcctcgcctcatctccgggaaccggagtcagcacaatgttaggaggcactgtaaactcctcctaagttggagaaataatactcctttgcgtgatcccccccaccgggttgagggcatcctaaaccttaggagacgttcatcgaaccctacaggcctaaggctagcatattcgctaacaggagggacataatgtattgctaaaggggacttaccggacccgaaagtgctggcgtcaggagcccttgtattcggcacctggacggtaggccttgcctgggagccctcttctcaaccaagctcccaatgcgaagggatctcccggcagctgtttggcttctcctctcgaccgggctcccaacgcgaaggggcctcccggaagccgcctgggccttagtataagccttctcctgggccttccgatagagataatcctggtacttcttctccgcggtggcaatgatctcatcccagaaggtcttctccgctgccagaaccctcacgttcgggcagaagaccttggaaaggttagagtcctccaccgactggtgtgccaggattagcttggcctttcggcaattctccgtcgtgaccaatcccccaacgttgagatctgccctatcataagtcgcgaaggtcttggcccgctgaagaaagatctgagtaggcgcggttcgctcgtacggagggatcctaacccactccgtaagaagctccgggtgctccacagctcggaacccggaggagaagaaaaaccgatggcggtactccttgacgtgtttttgctggttataagggaccgcgccctcattcgaagggtgggcccagaagccgtaaaaaccatccttaagtttgtcccc

SEQ ID NO: 282207 - DNA, 573 bp, Cannabis indica
tgttccttagatagacggataccaaatcgagaaagaatctgtgcccctttggaattggtcattgagaatctctccaaaaccttatcaatgtaagttgtttgagagagagcaagggatctgttcttccggtttctaatgatctgaataccaagaacataagcagcttcacccaaatctttcatttcgaattgagtgtcaagccattccttgatgtcagtcattttcttgatattgttaccaataatcaaaatgtcatcaacataaaggaccaggaatactaccacttgattatccttgagttggtaaacacaaggttcatcttcattttggtgaaagtcgtaggtcttgattatttcatcaaaccttttattccaagagcgagaagcttgcttaagtccataaatggacctattgaagtttgcaaactttcttttcctgccctggaagaacatagccttctggttgctccatatagatggtttcttcaagaattccgttaaggaaagctgtcttgacatccatttgccaaatttcataatcgaaagcggcagctatggagagaagaattcggat

SEQ ID NO: 282208 - DNA, 543 bp, Cannabis indica
aagtggtgttgtatttcatttttcaaaatcaaagttagaaaagaaaaacaaaaaatttcaaaaacactctctcttttcctctctctttttcggctcttggtgcagcaaggaatcttggattttccttgtgatttcaatctccctttgtgttcaattcaagctaggttagctcctcttcctttcttctttaaaaattgttgaattttgatgaatatagtgtaatgcatgcatgatttttggttgttgttgctgctgtattttgtggatattttcagaggtttaaagcttgtttatttgagttaatttgagctgttgtgaagcatgataattaggttgagcaaagctaaggtttttctatgcaaaaattatggttttcaaagagaaatagtttaattctgttgctgtgatgttgttgaagtttgtagttgttttcagagggttaattatgcatgtttaagtaggtttggactggtttgattgcatgttatttaggtttgctcaagtttgagtttggaactcaaagcttgagctttaatggtgatt

SEQ ID NO: 282209 - DNA, 499 bp, Cannabis indica
tgctaaggaaattgctattgaaatgaatatcgatccagtatttcctcaaaggcgcacaattcgaaaaaaaagacaatttgatgaaaatttaaatattccatctgttgagttatctggagaggaatcttttagaattaattattttctttaccttgttgatcaagccattgtttctcttactaagagatttgaacaatatcaagactatgaaaatatttttggtttcttacaagttacaatcattagacaatgcaaatttaatgtcttgttgttgtcattttgaaaatgcattgaaacataatgaacaatctcatattgatgggaatgaattatgtgttgaattgaagcaattaaggcaaatattgcctagagagaaaatgagagctatcgacatattaaagtttttgaaagacgtagattatttttctaatacaattattgcatatagaattttgttgactattcctgtgacagttgcttctgcagaaagaagtttttc

SEQ ID NO: 282210 - DNA, 632 bp, Cannabis indica
gaattccggttctgagaaatttcagaaccccatccggaattccggatgcacaaccggaattccggttcctcgcaggcagaacttcaaaaattcatacaatgctcaaatcaactccaaaccaaaccaaaacttccagacctgttctatacatcccctagaacatttctaaagcatcaaatccacccagaatgcacataatcaaaaatcaccattaaagcttcaagctttgagttctaaactcaaacttgattaaacctagatatcatgcatccaaactagctcaaatctacttaatcaagcataaaataacctctgaaaacaacaacaatcatctacagcaagcaattaacagattgaacacatttctttgaaaatcatagcttttgaacaaaatttcacaaacttgaaccaagtaactagcatgcatgaaacctacttaattccattcaattcaagcatagaaaaacacagaaaacaacctaaaactacagcagcaacaacatcaaaattggacatgcaaccattttcatttttttcttgaaaactaagaaaactaaagagcaagtttcaaggcttaccaagagcttagaatcacccaaaaacagcttgaaaatcaaaggaaatccagccct

SEQ ID NO: 282211 - DNA, 598 bp, Cannabis indica
gtgccacagtcttgcttctcaagactttctctcttctatcgagtatctgcacttgttgttcctcgtatgacaagtctggctgaagttccaatgcttcataactcagaacgtgggacgagtctgagacatacttccgaagcattgaaacatgaaacacattatgcacagctgccagcgctgggggcatagcctacctgtacactacttgccctatcctctcaacgatttcaaaaggtccaatgaacctcgggcaaagttttcctttcctcccgaagcattttatgcctttcatcggagatattcggagaaataccaggcccccgacctgaaaatcaatatctcgacgctttggatcagcataactcttctgcctattctgagacgcgagcattcgtgctctaatcttgtcaactgcctcacttgttttttgaacattttcgggacccaagaactttctttcacccacttcatctcagtgaatgggcgatctacattttcttccatataaaagttcataaggagccatcccgattctttcctgatagctggtattataagagaactcgatcaggggaaggtactttacccatgatccctc

SEQ ID NO: 282212 - DNA, 648 bp, Cannabis indica
attggattgcaatgcccctcccggttttgcaaacttttgtcagaggaaaagaattaagaatgaagcttctaacaatgctgcttcttcaagtacaattgatagtcatactcttcaatgttcaaattgtaatgagaagggacatcaggaagaacgatgtcccagacttctaaacaattcgaacgaaggtaatgcttttgtctttgaatcatgtgttttagagaatgacaaatccttctggattgttgattctggatctactaaccatgtttgttcttcattgcagctgcttgaaacttgggattatcttaacccagaggagttaaagctcaaagttggaaatggcgagttagtatcggtccaagccaaaggaagagcccgcctcaagtttcagaagaaatttttagttttagacaatgttttgtttattcctaattttagtagaaacttgattagtgtttcatatttacagacacaattttataaattgaatttttcgagttctgtttgcacaatttctcgtaatggatttcaattatgtgttgctcacatggaacaagggctttatgttttaagatcgaatatacaaatcgcacttaacaatgaactttttaatattgctaaacctagaaaccttaaaagaaaagagat

SEQ ID NO: 282213 - DNA, 706 bp, Cannabis indica
ggtctgggatcaagtctcgagtttgggttcggttcaagttcgagtcgcaatcctagtctgggttcgggacagggtctaggtataggtttgggtctgggtccgagcccgagtttcggggctgggttctggtctagtttcaggtcccggtctaggtctaggtcttggccacgaccccagtcctattagggtcttgtcttaggtctgggtctgggtctgggtccaggtcctagtccagcttcggatccttctctgagtcaaggtcctaatccagcttcgggtccttctctgagtcctagatctagacaccgactatgggtcttgtccaagccccaatttccagatcccgaggcaagatctggatcccaatcacgggtcccaatctggtttcggttcattttccaggtcccggtctaggtctcggtccagttccgggactaagacttgggtgcagttccgggtctcaatcccaattctgggtccctagtcttcttccatgttcgggtctgagttcaagtctgggttcttgtctcgagtcctagttcaggtttttattcaattttgggacccaatccgtggtgggtctgtgtctgagtccgggtactagtccggttacaattttgggtctgggtccagttcctggtccttgtcctggtcctactcctgagtcccgatccgcttctggtttcgattctagtttcaagtcaca

SEQ ID NO: 282214 - DNA, 669 bp, Cannabis indica
caatcaggatattattggccctctatttttaaagatgctcatgctttcgttcaacaatgtgatcgctgccagcgagtgggaaatatctccgctaggaatgagatgcctcttaattgtattttggaggtggaattgtttgatgtgtggggtattgactttatggggcctttcccacaatcctttgggaatctctacattctagtggcggtggattacgtatcaaagtgggtagaggcaattgctagtccgaagaatgatgctcgagtggtcatgaaattccttcataaacatgtcttcacaaggtttgggacccctagagctttgataagtgatgagggaacacactttgtgaacaaagtgttggctgcactcttggcaaaatatagtgtaaaacacaaaattgccactgcctatcacccacaaactaatgggcaagctgaagtatctaatcgggaaatcaaaggcatattggagaaggtggtaaatcccaacagaaaagattggtcccaacgcctagatgatgcactttgggcgtaccggacagcatacaaaacacctttgggcatgtccccatatcgattggtgtatgggaaggcgtgtcatcttccggtagagcttgaacacaaagctttttgggcactaaaaaatctcaatatggatatttcagca

SEQ ID NO: 282215 - DNA, 514 bp, Cannabis indica
ttttctttattccaccttgttaaggacatttcataattctgcaaggatccaatcaattcatcaagatccaattcctccacatttctcatttcttcaatggagattactttagacataaatctcctaggtagaactccaagaacttgacgaaccaactttgcatttgaataagtctttcccaaagcataagactcatttgatatgtcacacaatttggcgtggaactcaggcaccgtttcttcttcctccattgataaatcttcaaatgcttttgccaaagcacgaagacgagatttctttacagcatccattccttcatttttaattcgtagtttttcccaagcctctttggccatctcacagtttgcaatgaccttcaattgatttgtggacactgcattgaatagagcatgcatggccttcgaattaaaattggccctctccatctcatctggagtccacaagctcataaatttggtttggtgacaccattatccatcaccgttgggcatgt

SEQ ID NO: 282216 - DNA, 470 bp, Cannabis indica
aagtctaagtccccggaaagtgatttagtgagtcactcatcagtgttgcacttaatgtgattagggcatccatctagcgcgagcatttccgttcaggtcggccaacacacttgaattcggaaaacaggtaagaactgtatatagcgtgttaaatgagatatatgcatgatgtatgtatgattgtgtatgttttgggtgatatcatagcggcacaacaattgtgtcggttcggcagtacaagcatcgtactggttaagagtgatatttaccccagagagtattaattggcgctatcatagcggcacaacaattgtgtcggttcggcagtacaggcacagtactggttaagagtgatattatggccaattgtactcttgggtgctattgatgctatcatggcggcacgaacatagtgccggtcccgcagtgcgatcatagtgctggtagtgggtgatagtcatggtcaatag

SEQ ID NO: 282217 - DNA, 513 bp, Cannabis indica
tgagataccacacacaatcaaagtgcatgaaatctatatatcatgtgtggaattgaataatagtggtcgcgtacctgtagtacggacacacttataatcaagataaaagtatacttgattatttaatagaatgtgaattgtacaaacttattgtaacgccctaaataattaggcacgctacccaaaatacttatgaaaccctaatcccctaaattggattactaatcaaaatagcgcagaatttaaacttttatattaaacagaaagaaaataaacttgtaatatatttaaaacttttaaaatagttgggatcccaaaaatatttacaaccgctattacaagtcatttatttctagccgacctaaacggcaaaatagaattcaaaagttcatcactgatagacccttaacccgcttggtctgatatggcttgaacatgtacattcttcatcttgctcctcaaactcatggttgatcagccactgacttaccctttcctgcacagtagagcacc

SEQ ID NO: 282218 - DNA, 615 bp, Cannabis indica
gctcgagagtgaacttgggagaaaaccatgtctatcatcagcaaacagaaggtgagacaagggctgagcacccctgcagatctgaattccagaaaaatgagcattagtttcttgcaatcgaatagcagcagaaagaccctcagcaattaaaaggaaaagatagggagataaaggatccccttgtcgaataccacgtgtagaatggaaagtgtcagtgagagaaccatttatggataaccaaaactggaccgtggaaagacaacgcattataagagaggaaaacgaaggaggaaaaccaacatgagcaagcaatcgatttaaaaaagaccatttaactctgtcgaaagccttttccatatcaagcttaatagcagcccaaccaaccttccccgatcttctagaattgatggcatgaataatctcattcgcaagaagaatgttatcagtgatttggcgcccttgaagaaaagcactttgattgatactgataatggaatgaagcacaagtattaaccgattggcaataactttggataggcatttgtagaaagtattggaaagactaatcggtcaaaaatctcgaacattcttaggatttttctttttagggatgag

SEQ ID NO: 282219 - DNA, 584 bp, Cannabis indica
tttttgtaatttttttttccttttttgtatatttttgttttttttttcctatttttttaatgtacgttgtgttttatcctttttttttttaatgattgtcacctcatgttttttttgtaaagaggttgctctaaaatgatgaaagcagagagggaataatgcaggccttgttaggctaaaattagtctaagtttcgggtcatattttcggttagttttcactctttgtttctagttttagggctattttacgcttgattcttttgtttcaggtcctcgggtgtttaaagaaagtatgtacaagaattgaggacaagtggtgaaggaattgagaagaaaaaccaagaaaatgtgtgctgcctaatcccgtcgcgacgggaaatgtcccagtcgcgacggggattggcagaaagaatctcgagaaaaaaaatgtttaaccccgtcgcgacgggggcattgccagtcgcgacggggaccccagtgacgggatttttgggcagtttcgtaatttcacgaattttaagatgagacttggtttaaatagagagagctcatgaaaattagggttcattcagatttggagcc

SEQ ID NO: 282220 - DNA, 586 bp, Cannabis indica
aaggcgtacttaagttttttagcacggctgccgctagggttagaaatttggatgatagcacacaacttacagcccttcaggcggggatctctactgatccattaaccgcaggggcgagttgtgggatgacttacaaggacgttcggtgagaagcatcactgagttcaacgaaagggctcaggtgtctgttcggaaggaagaagcccgaaaggaaatgaacttcttgaaaacaagctcgagaagcaaacccatcaatgtttcaagaggtattgctcccatgagaattgataactcaggggcttctggtccaaagagaaaggacggaattaaggaaccgtcgaagaatagaaagaaacaaaagaagcatgacaaatacgtgccagtgtatactatttatatcgagcttaatgaaactcgggataatatttacctcgcacatgagcagaaggtagcctttagcgaactcgagcctatgaggaattcgatgagcaaaagagatcctaacaaatattgtaaattccataaggatattcggcatacgaccgacgaatgtcactaattgaaagacgagatagaaagtctcatc

SEQ ID NO: 282221 - DNA, 521 bp, Cannabis indica
atggagtctataacttctataagaatttagaagtgaaacgatgatatccatcgagcttggctaaacagagataaaattgcaaaatggtaaaattgcaaagtgaggccgattatccgtatcatggccggccactatgcaagtattttaccatttatattttcattattttaatgccatataattctaacttaaacctagatggcttactataaatagatagtgatggcctaggaaagaagatatgcatcttattcctttcagagaaaaacgtgagcctcctattcttcctctatagccgccaccctcttcttctcttttcttctcttcaatttcgaaataccttagtgatagagtactgcccacatacatcaagtggtatctcaatcatagtgtcgaagattatgaagaatccaaccaacaagagggagaatcagcatcaagaagtagtgaaagagatccaggttcagatcttggtgatgctctgctacggaaaggaatcaagggctagagatctgaacgta

SEQ ID NO: 282222 - DNA, 226 bp, Cannabis indica
cagggtgatagagaatctcacaatcataatctttcactaactccaaccaacgtctctgtctcatattccaactctaggtcataaggcgggtatcgctgttcataatcctttaactgacaggaggcataagcgataacccgatcggcttgcatcaatacacaccccaaaccctgtctggatacatcgcaataaaccacgaacttctctttgtcagaaggcaaagcta

SEQ ID NO: 282223 - DNA, 650 bp, Cannabis indica
ctctgatgtaagttactacggtaacaaatacacttttcgatcaataaatgaataaagatagtatttcaaaattcaattgagttgaaattatcagcatgtttataatttaccattacaatgcatacaaaaggtttggccaaacccaaaacaccgaacaaataagcaatatatttgtaaaagacaagtaacaaagagtcatacgtctgctcgatcacttagggggcacctatacttgtataaagaatttggtaaaataaaataatcacgattacacgacaattataaatagagaatgaaattcattaaggataacaaaagcacgtaatactggaattaaaagctgcccggtcagcctattgtccgaaaaatgaagaataattccatgtttaaagaccgcttggccggtcatgatgtcttagaaaaggccttgagggcaaataagatatatcaaataaaaagataaaaaagagaagtgtttaagcaactggagtcccaggttcttggttcgcttcttctgggccaaccagagcagggggatctgttgtttgaacaggaggcgcatcagcggcctgaccggaggttgaagcagtcgcctcagttttgccataagccacttgggatgcacaaaactcaaggtacatgtccttagc

SEQ ID NO: 282224 - DNA, 538 bp, Cannabis indica
gccccagacttgtgtcttctgcaacaaatgatcttcggcacgaggaaacgcatcaaggctctttatagcttgtttgagacccattttccccttcaataacataaaaaaattgtcacttcgaatatgatagcaaaacaaaccccaaattagggtttttaaggtatcccaaaaacgaaaaccctgaaaaagtataaattttcacaatcagcaatctagaaggactcatattctgatataattcaacatgtttacagaattccgatcaaacccggaaagggaaggatcacgttttactgtaaaattgtaagattacgcagcagtcttaaccaaaatcacgtcaccaaaatttaagtttcagaaatttcagcttgatgtgttgagaagaattttaattgaaaaacgaaaatgaagataaaaaaaaaaaaaaaaaatatccgaggagaaattaataatattatcatcaataaaaacaaataaaaagaaatactgacgaacaggaggaagaagaggtaccaaaagagaaagagaatctgaatga

SEQ ID NO: 282225 - DNA, 636 bp, Cannabis indica
tttgggcacttggcgaggattcctctggttcctttccaagtccagcagtgatggctttaggatgcacgtggattcctgctgcctccattgctttttgcatggccagcaccacctcttgcatcttttggttttgctcttgttgggctgcgatttcaacttcgtcatcgacagccttttgccttaagagcaccaattttgagtagctgccttcgtcgtaggcgtactcatcgaggtttccctcgtagtcgtcatcagggattccttcttcttcctcggaacccacggttgctcttgaggccacgtcctcctcatttggatcttgagcatcttgaagagggcgaggttgacgtgtgcttcgagtctccaccattgttgtgttgttgtaatgcagtgcgtgtttacagacgctttcttcagctctcaatgaaagcaccaaaatattgaccgaggttttcggtaaccaataaaataataataatttagagagctgtaagaaattaagagggagattttttacgtggttggggcgttaatgagccttagtccacgagtctgtgtatttatgatagtatttaatacagagaatattcttggtgagtttttactcttctagttcttatgatacccagaattctc

SEQ ID NO: 282226 - DNA, 797 bp, Cannabis indica
atatatatatatattttcttttctagttacacacgcacaacaacaacaacaacaacaacaacaacaacaacaataacaacaacaacaacaacaacaataataataataataataataacaatataattgtatcacacttaatataccaaataccaatatatgtatataaactggatattacaaatctcactactagaaaattgggttttagtgacacacattgcgtaactctaaaagtctatagtgacacttcaacgcgcgtcactaatgaggctgactggaaaagcagtttttagtgacgcgccaaacgtgtcactgaatgcttttgccctcagtgtctgcgcgtcactataggggtacagtgtcatgttttgtcagactagaaaagcaacagccacttacatggagtgtcactatatcctattttttttttattaatatttttagagatatagtgacacaccaaaaatgccactacattatatatttttttaaaaaaaatataataattatttattttaattcaaatttgatatattataaataataatttatattaattatatacaaatacaattaaatataacaataataattttaattaactaaatgtaaaattatataaattagactattataataattcacgttaacacaactaataaatattacatattagttcattataccaataaatccataactataaaattatataatctattggtctattaaaagaaaaaacaactaaataaccgataacatatcacttgcccattagtctattaaaacaaaaa

SEQ ID NO: 282227 - DNA, 456 bp, Cannabis indica
tattcaatgcccctacttcggtgtgttcttcttgcagaagcaaatgaaatcatcagagaaattcatgaaggcttttgtggggatcatgccggctggcaaagtctgtctaaaaagatcattagacaaggatattactggccaacgatcaataaggacacacacgagtttgtcaaaaaaaagtgatacgtgttagaggttttcacatgtacctcgcgtaccgccaacagaacttagaatgatgacctcgcgctacccatttgctatatgggggattgacctaattggggcattacgcactaggtaaggaggagctaagtatgcagtagtagcagtcgacttcttcactaaatggacagaggccgagcccctcatctccataacctacaaaaaagtccttgactttgttgtcaagaaattatcagtaggtttggaattcccatgaagatagtatccaga

SEQ ID NO: 282228 - DNA, 518 bp, Cannabis indica
aaatttaataatttaatattttaaaataatatatatagttaaatttgtttagaacccatcaatgggtaatacccattaaaaatgtatatatatcatattaatatatataatgatatatacatgatattttgaatttatatataacatgtttatatatataagagatatataatatatatagcatgtatatatgagtaatatatattatatatatgtagagcatatcatataatatatattagtgagattaaatatgtagaaataaggaacacttcttaatgggtattactcatgaatggttaataaacaaatttaactataaatattaattttaaaaatatcaaaccatcaaaattttgatctaataatgaatgatgaaatcacaaatttgaatttctatgcttaatttaactacttaattaaaaaaaaatatcaaaaaatatctctttttacactatatcaaaaatatgttcatacaaaaatattttttacaaactcaactttttcttttcttattt

SEQ ID NO: 282229 - DNA, 252 bp, Cannabis indica
gagtcaacaatgagaggtctcagatatgctttacaatgcattagacaagacacttgttgttgagtgggagtttagattaatccaagaaaggaacattggaagacaatcaaatgaatcttaagatcaagaagagaaactatatgatagtcgataagggtggtatttaatactcttagactacaccaaatcaggtttctaacttgccttagtgctagaaagtctgctgatgagtggagtagtgattttggagaa

SEQ ID NO: 282230 - DNA, 511 bp, Cannabis indica
aagccgaattactcgatgtaattccggtagatgtattgtctcatccaaccatagatcgagaaacaatcatggagatcgatgacgttcaggagattacctggatgactcctatcctcacataccttgacaaggggctcctacctgatgataaaatagaagcaaggaaattgcgacaacgagcagcccgttatgtgatatatgaccagagtttgtatcgccgaagttttagtcaaccacttctcagatgtatcggtggagaaggttgcggttacatactgcgtgaagtgcatgagggaatttgtggaaatcatactggaggtaattcccttgccttaaaaattatgcgacaaggatattactggccaacattgcgacaagatgccctcgcatttgcaaaaaagtgtgatagatgccagcgaatagccttcattggaatagcgagagcttgaagttttattatcagtaatattcgcgttattcgattatgttaattcgagtacttatacttaga

SEQ ID NO: 282231 - DNA, 565 bp, Cannabis indica
tagttgaaacactataaaaggaacatgatactctcatctcatcctaatgtcaacttgactattcaaccaagctagatgagagagttccttccttagtgatttcaacctcctttattgttcttcactattcaaaccttgagtgaatgagtgctatgttcacacatagcaagtcaagtactcaatcatagtgagtaagacggtggtaaccaaacccgaaggagagaaagagatcatagttcagaacttgataatgctttgctacagaaaggaatcaagggctagagatcttgaacggtaaggagtcattatattccgctgcaatcaatgtaaggttttcttaacccttatgtgtttatttcatttattttagggaattcatatttcggatgttaattcaacatacttgttagtaaatctagatcctggtaaaatattcctaacaattggccttagagccatggtaatgatttactttcataaaatatagatttaaaacaatgaatatgtttgtgtgttgatttggatgtgttcatgttggcttatgtgttaattgatgattgaatgt

SEQ ID NO: 282232 - DNA, 610 bp, Cannabis indica
tagtgtgagggaaaacctgatggtaccatggtatgctgactatgtcaatttcttggctgcaaaaataacccctcctgagctttcgcgtcaacaattgaagaagttcttttctgaggtgaaacattattattgggaagagccaatcctctacaagcactgcgccgatcagataattagaagatgtgtgcctgaagaggagatgtattctatcctaaatcattgccatgctttaccatgtggaggacatttcagtggaaccagaactgctgctaaggtgttgcaaagtggattcttttggccaacgctattcaaggatgctactacctttgttaaggcatgtgatcgttgtcaacggacaggtaatatctcaagaagaaacgagatgcctttaacagggatcttagaagtggaattgtttgatgtgtgggggatagacttcatgggcccttttccttcatcttttagcaatcaatacattctattggctgtcgactatgtgtctaaatgggttgaagctgcagctacaccacagaatgatggtaagacagttctccgcttcctacaaaagaacatctttactcggtttggtactcctcgagcaatagtaagc

SEQ ID NO: 282233 - DNA, 523 bp, Cannabis indica
ctgggttgctggttattatcatcagttcgtggaagggttttctaagatctcagcacccttaactgaacttacgaagaagaatcagcggtttgtgtggtcagataaatgcgaagctagttttcaggagctgaaacagaggttgattacagctccagtgctagctttgccttcagacaaagagaaatttgtagtttattgcgatgcatccagacagggtctggggtgtgtactgatgcaagccgatcgggtgatcgcttatgcctcccgtcagttaaaggattatgaacagcgatacccgactcatgacctagagttggccgcggtggtttttgcattgaagatctggcggcattacctttacggagaaaggtgtgaaatctataccgatcataaaagtctcaaatatttctttactcagaaagatttgaatatgagacagagacgttggttcgagttagtgaaagattatgactgtgagattctctatcaccccaggaaggccaatgtgttggaaattatttta

SEQ ID NO: 282234 - DNA, 501 bp, Cannabis indica
aaattgcacccttgaatatttttgtcgttaaaattctctcaaacttttgaatattttggtggtgttgaatataggattttgtttaattagttttattccatggctaacgaaatgctaatgtggttaatctcattagcaccacatatattaggggtggcaaaacggatttcgacacggcacaccaacacgaacacgacacgaattttacaggttagggttgaaaaaattagacgtgggtcgaaaacgggtcaacacgatttgacacgaaataaaaacgggtcaaacacgacacgatccgcttaacacgaatgtgacacgtttaacacgatttttttaaatataataaagggtacataccattttggaccctctgttttacaaaagttaccaattggaccctgtgttttgttaaatgataaaatggaccctgtattttctaaaatagtacaaataggaccctgaattaattttttgtcaaaataaagtttaattataatccga

SEQ ID NO: 282235 - DNA, 624 bp, Cannabis indica
taggttgggtccgagtcccaagttccactcccgatctcagtctggattcagttctgggtctaagtccttggttctgatcttggtgtgggttcgagtttgggtccgggtccgggtcttgctttgggtccgattctaggtgtgggtgtttgagttggggtccgattctacgtgtgggtgtttgagttggggtccgattctaggtgtgggtgtttgagttggttctgatcttcgtgtgggttcgggtttgtgtccaggtctggaccctgatctgggtctaggttcgggttcaggtccaagttcgtgtcccgaatgcgagtccaagtttgggtatgggtcaggatctcagtccagatctaggtccagcattttgatcccagtctgggtcttggtctgagtccagcttcgtattcgaatccctatcttggtccaagtctatgtttgggatcgagtcccagagttaggtccaggtccgcgtctcatttccggtctgggtacacgactgtgttcaggcccgagttcaagtctgagtttgggtctgaggctaggtctgtgttcgattctaggtccaggtcggggtcctggtcaaagtcctagtcttgttctagggtcctggttcggcgattc

SEQ ID NO: 282236 - DNA, 929 bp, Cannabis indica
ctggcgggtgtggtgtcaccttattttttggagaaaatttatttcttaaattattatttatttaattaattaaaacagttttcttttttaaataaaaacatgtttgattaattagtaaacatgggtgaggactcacacaccggaccaccacacacacgcgcacgccgccgccgtccgaccgtgccgagcgggcgggtgtggtgtcaccttattttttggagaaaatttatttcttaaattattatttatttaattaattaaaacagttttcttttttaaataaaaacgtgtttgattaattagtaaacagagatgcttcctgatttatagcatcttcctgattttttgcatcgtttacacgatcccatgttccaacgttcccatccagtaacgtatttcttcccgttactactatcagcgcattgcctatataatgcgactgaacagtgggagaaaaacacaacttttcattctgaaaaattatacgatatatacacactactatattacatatttatattttcgcttcgagcagtagtcggttttgggtgtttaatttcgacggttctctatcgtgcaatagagttccgatacagtgtgttcgactgggctgttttatcctggggacgacgaggctgatagtctgcttgcacaaatctgggcagtgccgcaaacgtcttaaagagagcgacctagtccgcgactcaacccagattctatttcggtaacttcgttccttttattttctgcagcaactagtttctaacaattataagatgtttagtttctgccatgactgccgatgagaattttggtgttattgatataaacaaaccttttcgttttgagggaaaccattttaaaagatggaaacagaaaatgttattttcctcactacgaaaaaatgttgcttatgttctgacgactga

SEQ ID NO: 282237 - DNA, 811 bp, Cannabis indica
tcattttatcacacaatgcagagatacaaaccaacttcagtatcgaaataatgtcataatggtttcactccatcaaactagtccacaaaccaatagccaatatgcttgcatgcttacctctctccactaatgttgacaacattcttttcggaatcaaaaggactttttaaggttagaatttatggcttagatatttggaaaataaaagacaattttggctaaagatatcataagcacaaaagaacccacaagcttctcataattttaaaatttcccgaagtgttcccacaactaaccatgattgagatttttctacttttttttcaatcactagacatcactgaaattttcttttatttctgattttttttcattcttttttttttcaagtgatgccgagttacaattctttcttttttttcacatgtttctcaatcacgcaagatttttttttctttcttcaatacttccacacactatatatttcactcccccaaacttattgtaaggcttatgataccattcaaaatgtaatgaggacaaaaacaacagtgtggatacatcttttagttcaatgggtgaagaaacgaaacaggtttaggctcaaaagggttcacaaaggatattcattttatggtaggcttgaaaggctcaaactatccaaacaaactgcctaaatcatgttcctattaaatgttgtcaaggatttcgcctcaaaagaataagacatgcaagttctaagctattcaatcaatcttaccacaaaccacagtaaaacaattataacatatttcacagatcgtcaaattgc

SEQ ID NO: 282238 - DNA, 558 bp, Cannabis indica
acagatgacaagaccacctatgctgagatggtggagaaggcactgcgagctgagggagcagttgaatgtatgtcggagtcagttaggactccagtgagtggcggggctcctacccctcctccatcaggcttcaacattggaggtagtacttcggccatggaccagagaggaaagcatccacagcatccggtggctcagggcagaacaagaggttccgggggaaccagagtagaggcagtcgtcagggtggtgcggagatctggttttcttatccagagtgccccagttgcaaaacgcaccatctgggtgagtgcagaggtcagggatgctttcagtgtggcatgctcggacattataagagggattgtccccagctgagaacagaggcaccaagggctccgacgagacccactccagctagggtgttctccgttacgcaggctgatgcagaagccagcccttcagttgtaacaggtcagctcttagttaacaactcttattacccagttttgtttgattctggggctacacattcttatgtggcagccaaaatcttta

SEQ ID NO: 282239 - DNA, 593 bp, Cannabis indica
aactacccggatctttaagcttgggcggtagtttcttttgcaaaatggcgctacactcctcagttaatgccactgtttcatagtcctccaattttctcttcttagacaatatctccttcatgaacttcacataacggggcatttgttccaaggcttcggcaaaaggaatgttgatgtgtaatcttttgaagacctctagaaattttgtgaactgcttgtctagattggtctttcggagtctttgaggatagggtattttcacatgatgatcaatattgattggtggagactgttgtggtggtgctggactatcagtaatcttcttatctgatgatgcttgagttggtgctgtttgatctttaatctcttcatccactggttgtatcatctcaggcccatcatatttctttccactccttaaggaaattgctttacattgttctcttccttttgcatcattagtgctaggcgaatttccttgagcttgtttttccacttgagtagccaattgttccatttgagtttctagagttttaatagaggctctagtttccatcatgaattggagcaataaatcagcttggatagtggag

SEQ ID NO: 282240 - DNA, 676 bp, Cannabis indica
gctataacatcttcaaacaacgctcctaactcaataaaatagttccacctgaaaaaaacatcaaaaaacagcataaaactttaattagaaaactattcaaactgaagagaatcaaccaaccaccaagactaagcaactagatctccctataaaatactagaactagccaaagggattaccctttggctagtaacaactaaattatagcattctacttcataaccttcataggatctctattccttacttttacccttttaaaatcaaacataaataaaaatttccttttaatacccattattctttaaatattcaaaatattatatactaattatttcattttatctcttaaaaatattacttatttatagactaaaacatgttaaaatccttattaagtcaaattatttattattttatttacagcgtaaaacatagtatctataatctttattcaacctaaattaaatcaaaattgtattaatatccttaaaacttaaaattgcacttttcacattcaaaaagtaccattttcctattaccacttcatcatacatttaattaataatattaaattaatattaattaatccaattcggtattatcatgacataatgcttccttatttattatttaaatagataacctcctaattattataccattcaaattatta

SEQ ID NO: 282241 - DNA, 808 bp, Cannabis indica
ttccagatccgtatctcaatctcgggtcccaatcttgttctatttttggtgccgagtcacgagctggatccaatgttcaagttcaggttttggttgggtactaggtccgggtcctagttctgtttccatggtccttatcctgattctggtccaggtctcggttattgtctgggttttggtcctggtctaggtttgggttcgggttcaagtcctaatctcggttcgggttttggtttaggtcctggtcctagtcctagtttggttctagttccattttcgattctgagttcgagtttgggtttgagtttaggtcgaagttcgagtcctggtctgagtttgggttcgggtccggatttcggtctaggtccagatcaggctctgggtgtgggtttgcgtcctgggtcttggtctatattggctccgagtcccaagttccaatcctgatctgagtctggattcagttttggttctaagtccttggttctgatcctgttcttgtttcgagtttcggtccgggtccggctctagctttaggtctgattctaggtgtgggtttgagttttggtcccgagttcgagtccaattttggattcagtttcatgttcagttttggtccttgtttgtgtctatgtttctgtcctaattttggttcggggtaggttttggggccgggtctgggtccaacgtcgaattcccaggtgaaggtcaggtcctcgttgacgttcgggttcgagtctcgaatttttattttgtttaggttctcgggcctaggtctgtggtctaggtcccctatctaagtccggttcct

SEQ ID NO: 282242 - DNA, 291 bp, Cannabis indica
ctcttgaaggaatttcacagcacccttggctctcaaagctttttcaaccatttcagcatatgtggttgcttcattagtagtgatcaccaaatcatgcctaatcttcacattcaaaccggccaaatacatctctttcttgctaaagtcagttggcacgatacccacgacgagcttggccagacggtcaaactttgtagtatactcagtaaccgacatcctctcggtttgcatcaactcagtgaactctttccgcttagcactgcggacggcttcattataatatttggagtt

SEQ ID NO: 282243 - DNA, 662 bp, Cannabis indica
tgattcgaaagaggaagaaaaagaataaagaaaggtgttttctttttctaggtttttctacaactctctctctttctctaatatctatcaaaattattaatattactaaaataaatcccccatattcagcatataaccccacaaaagacaaatgaaaagggagagggtttttcaacaaaagacccttttgcccctaaataaataaattatttaaaactttccaagggcaatttagtcacttactaatccccgaaaattctaacacctctaacctctaactatgataccccgataatattctaaacatattaacgcgactctctaaaggcccaacgtcgctgtccacagctttcgaacacaatcacagaaattgagtaatttacataaaatagcataataacatatatgatattaaatatattttttttttgatgaaataagaaagttttattgctctataccaaactttacattacagctcatgccatattttcaacactgattacaacaacttataacactttaatcatcatgtacaattaaattctagtatcaatctatatcttccttctttgctttcttaggcggccaagcttgaattctcagcttgctggtttgcttagcttgctgaagtgttctgctcgtgagaccccctttgctga

SEQ ID NO: 282244 - DNA, 606 bp, Cannabis indica
ccggcgccctcacattggggcagatgacccgtgagaggttggagtcatccacggattggtgagaaaggataagtttggccttcctacaattctccgtggtgactaggcccccgacatcaagatcggcgtggtcgtaggaggcaaaggcttgggcccttcgaaggaaagcctgagtgggaagcgtccgctggtaaggtgggatccgcacccactccgtgagaagctccgggtggtccacggccctgaacccggacgagaagaaaaagcggtggcggtactccttaacgtgagtctgcctattatacggaaccaccccctcgttagcagggtggatccggaacccataaaaaccatccttaagtttgtcccctttcttggggacggatacaagttcataaaaatataaaatttccgccgggctgggagacccccagccgcgggcggtgtaaaaaataaataagcctgagagcaggcggtaagcttgaggaataagttggtatggcgcaaggccgacaaatacaagaaaattaacaaagtaatcttggagcgggagcatggcaccggccatcaaatgggtctgactccaagccccgaagccgtcatagt

SEQ ID NO: 282245 - DNA, 599 bp, Cannabis indica
actttaaaagtaggaatcaagaaattactgttcaaaataatctgaacactaaactgtaattcaagaataagtgtgccaacatagataacatcaactccaacataagtgtcactttaagctttgactccctctcacttatttgcttgagatcccttagcctctgattgtggttgcttcttttcatattttctttatcctttgctgggcttgagttgagaaacatagtgtgaagatgtatgaaaagctcgatgaatgatgtaagagtcaggaagagaaatattatgatctttcaacttgtactgaactttaatgattttaaaatgaaaattctcactcctttgatttatcatactgaatggttgtcattgcattcataagatgtccaactgcagcgatttcactagtgtgaaatagtttttctttgctttgaaatattcattagcatttgtggtgtttggcaaaccaccaaaagatgttcaggaatcaaacgtttcatagcaatgagactaagatgatttgaatttttccattgtgcatgaagaattttttgggcaacaattctgatattagaataagatcagcagatttttcttctcgaa

SEQ ID NO: 282246 - DNA, 622 bp, Cannabis indica
gttatagacgattcttacaagatatttctgagagtaagcattgttttttgtaaatggtggtctggtctgaacccacattttttttatctgtaaacccaacgtttttattcaacaccactgttgcttcattgatcttaaacctttgtctccacaggaatggacgtagattttgagagcatgttcaaaggtcctccccaagccgacaagagaaagttagctgaccaacttaactccctttttttatatcttaagtgctttgtacttttgcattcgaacttaatatatttatttttgcttgtgttttctttcacaatgtaaacaattatattttgatcaaatgcagagtactcttggtctttccattgctcgtaattttcctatttaagtagttagtaatctactatgtgcgcgggcagtttattatctaccaggcttttgatttacgagaagttatcaattctaccttgcaataacagttataacctgtcttaagcaaacttgaatactcttttaatgatcttatcactttgtacatttttgattgcttacatgaatagttatattatatatccatacactaggtttaagtacttttgtcaagacaccttgatgtctcatttaa

SEQ ID NO: 282247 - DNA, 483 bp, Cannabis indica
gccacataagaatgtgtagcccgaaaatcaaacagcacggagtaatacgagttattaatagaaagctgacctgtgacaactgaagggctggcatctgcatcagcctgagtgatggcgaacaccctagctggagtgggtatcgccggagccctcggtgcctctgagcggagctggggacaatccctcttgaagtgtccgggcatgccacagtgaaagcatccctgacctttgcattcaccccgatggtgccttttgcagctggggcactcaggataggagaaccgggtctctgcaccactaggacgactacctctactctggttcccccagaacctcttgttctgacttgagccaccgaatgcagtggatgctctcctcttctggtccatggccgaaccactactccccctgctaaagcctgatgcaggaggggtaggagccccgccactcaacggagtactagctgactccgacatacaccca

SEQ ID NO: 282248 - DNA, 648 bp, Cannabis indica
ataaaaataaatacttaattaaatacactaggtttcgtcgtcctccttaataataagggaacttagaaagccataagaaaattaactatgaaagcggtaaactaacactgagcgctctgagcattttctctagatttttctgtctgaaactctataactgaattctaaaatcctaagtttctatttatagaagggtaaaaggactaatgtgcaattaaacttattacaaattccaaatgggtaaaaatataattaaaataacttaattcggagtgccacgtgtcactgtcggattggatgcatgtggacacgtggcgagaagagagaatgccacgtggaaagtggctgaagagaatcggaccagaggagaaccactcgcgcgcctgggaagtggcgcgcacgcacgaccaaggagaagccgtgcgcgtcacgcgcgcgtgggagcagaggggctgctggtgctggcggtggcagctgcgggcgaatgggaggaggccacgtggctgccttgtctgctgggagagagggatttgggccgattgggccttgtttcttggactgttttggctcttcaaaaatgccatttttcattgctttggatcacattttttactatttttctttttcttttcctttcttttcacaaat

SEQ ID NO: 282249 - DNA, 734 bp, Cannabis indica
ataaggacatttactaacacagtcttatgatttagggccatttactatatttttttgaaaagaggacataaactaacatactcctatgatttggggtcatttactataatttccctaattaaaactcatattgatagggaaacttacaaaaatactggattttgacttactctttacaaaaatactgccacacggcaaaaataacttttatactgccttgagacttttttttttcttttatactgtaaacatcaaaaataaaaaatgaggtcttcttttttcacacccgcagacaaaactactacaacaacaccagaacaggcagaaaacaaccattaaattcgtttagatgaagcaaaaacattaaaaccattaatattggggttgtcatggttttttaatgttgtttttgggttgttccactattgttttgtatgtttaacaaatattggttttaaattacacaagttaaactaattactgaatatttatttgaggtaaccagaatgaaataatcatggacagtaatagtcttaccttctattaaagttgtgaaatctagaagaccaaaaaaaaaaagaaattgaagctggatgggaaaagaaacaacataataaaatgcagcaaatgtagggagctggggtacaacaaaagaacatacaagagaagacacaaaaaatgaaaagaaaacagaacaactaaaaaaacaacagtagaacaacagaggaaaaact

SEQ ID NO: 282250 - DNA, 546 bp, Cannabis indica
tattcctcgttgaatgttaatatttttccgacttgcactaaattcagcatgaagcttatgaattcgtgagacaacaactgtaggtgaaaattgctcccggccataaacaatctgtgtacgctcactccaaacataccaagcggcaactaaaaataattcaaattcaccctgagacaacacttcagacaccaaaagaatagtttgttggaaggaagtttccaaagaaaaatattttaggaaactaaaattaagtagcttccaaacctttctaaaaccccggcaccaaaagacagcatgcccattagactcattgctaaagccacaaataagacaattggagtgaggaaggatagatcgtttttggagcccttttgaagtcgaaagtatctcatgaaaacctctccaattacaatttaatactttatttggtaaatggagcttccaaatttttttctaccagatttgaaaattcatccttagaaggagaagtagcaacaaatttaactgagaagccacataatatccacttttaacagaataagaacc

SEQ ID NO: 282251 - DNA, 748 bp, Cannabis indica
aagaagcggtgacggtactccttgacgtgcttttgctggttgaaggggaccgggccctcattcaaagggtgggcccagaagccataaaagtcgtccttaagtttgtcccccttcttggggacagaaacgagttcataaaaatataatatttctgctggactgggagagccccagccccgggcagcgtaaaaaataaataagcctgaaagtaggcagtaagcttgtggaataagttggtatggcgcaaggccgacaaatacaaggaaattaatgaaataatcctgaaggggaagcatagccccggtcatcaaatgtgtctggctccaagctccgaagcctccgtaattgtgattgggcgtctccgcgtcgcggggcggccggtggtacgtcccggaagtagcaggcttgatgccggccaccaccacaatatgctccaactgatgagggcaagttaaagtggagtgaagctcggccgcttcccaccccgtggcacgaggcttatacccctcctgggcgacggctaccatcatcatctcttctagggtggccaggtgctttcctttcttggaagatttggaaccagaagtagacattttggttctgaaaaagatttaaaattccagtagtcaggccccataacaaaccctaaatcaaaaaagggaatgggggtcccctaaccgctggaaagaggccccctccagacggttgtcaacaagaaagcctcaaaaggttttctggcaaaagtcgg

SEQ ID NO: 282252 - DNA, 652 bp, Cannabis indica
cgaagctggttgctaaaaaaatagtagaacaacttgaaaacaacagaaaaaaactagattcagaaatcgacaacaacaacgcgaagctaataacagacaaacatcacccagaagtagaaaaaagtcaagcatacaaggacaaggaaactctgaagaatttcctcagctactacgcacaaccaaagcggaggaaaacacccactggaggaagaagtatagccaatattacttcaatcaatgtttatgaacccatggtatgtataaaaattgtataattgtaaacatctatttttaaaacaaaatgagataggtgtccgttagatgagccttttggtgccacgtaggaggatgatcttacacgtgtacaagatgatagtcaacattcatttagattctttatatacataatatatattatcaaggaccacctagaagtaaagtagtctctatctttattgcatttttgacacgtgtaaccaattaggacgttccatcaatattttatacaacatgacaaactctccagtgatattggctataaccagaagttactactctagaatggtagtattctgatcgggtgtacttaaattcccaatcctaaaaaaaataaaagaaaacactactaaaaaaatactacaataacacaaaa

SEQ ID NO: 282253 - DNA, 538 bp, Cannabis indica
ctcaaataatgtttacaatatttcgttttagtaattatgatattatttgagatactatttagtttcattgtagaaacttttcaagagtgttttataaaataagattgttgaatataatacagtaacttttaaatattaaataaaaaaaataaaatactagttaatttattttagttgaaaatttgatatttaaattaaaaaagttacttttcaggtcattatgcaaacaatgaaaaaaaataggggtaagttgaaaaatgcctcttttattcattcaattaatcaaatttacctctaatttttatgttttatttgtaaacatacctctttttatatgttattgtacccaaaatacccttacataagagaatcacatggagagttatcttgaagtgataggggcaaaattggtacaatatttaaaaaaaaaaaggtaaaaaatgatagattttaaaaaagaaggtgaaaataaaagaggacaatataaaaagagtatagagtgtaatttcctcaaaaaaatatatgcttctcatatatt

SEQ ID NO: 282254 - DNA, 765 bp, Cannabis indica
gactattttgtaggctacactattggttcgaggggttctagattctattgtccttctcacaccaccagagtgatataatcagatagagttgtctattttgaagatgaatttggttcaagtcaagggtcaagagaaattgtgttcagggaagaatgtatttatgtccctgtacctgttgcttccgcttccgctcctactattgatcctgtgattgaacaaattctaacagaagcccatcaagatgaaaatcctgatattgagggaggtgaagttgtgttgagaagatcagagagagctcacaaacctgctattcatgatgactaccttgtctatttgcaataacatgattatgatgtgagagacgcttctgaaccagttacttatcaagaagccatgaggagtcctcaatctaagttatggttgaatgcaatgacagatgagtcaagttccatgtcgcgaaacaaagtatggaatttagttgtcctaccgaaaggttgcagacccattgggtgcaaatgggtttacaagatcaaatatgattcaagtgggcagccagtaaagtataaggctagacttgttgctaaaggatatagccagagagaaggtattgatttcaaagaaacattctcacctgtctctaccaaagattctttgcgaatcatcatggctatggttgctcattttgatttggaacttgaacaaatggatgtaaaaactgcctttctaaatggagatttgtatgaagatatctacatgactcaacct

SEQ ID NO: 282255 - DNA, 736 bp, Cannabis indica
ttttttaattagatagagaaattaagtataaaaactcaaaattttctaattttacccatttatgggtaatacccattaagagtgcacccatatatatatatatatattttaaacttttaataaattttttgagtaattacaaataaatacttaagttttatttttattaataataatacttaagttaaatttttagaacttctgtagataactagccgttaaatgtcaagttattatctacatgtcattttttattggtatatttaaactattttttaaaaagtaaaagtataagtgttagaaatactgtaaatctgtatatagccctaattaattcaagagaatcaaacaataagattaaggaatagcggaagcgtaccggagtccatagaatcgacctttaaatgatctttattggtatgatcttccaatttgcatcaaaacctttctctgtaaactttttctcttggtgatggggatacaagagtgaaaagatacgatgcaaatggggaccattacccgttatattaccaacagacaaacctgttggtaatatttattgactatttctatttggcccctcatcaatatagaaattgtctaattggtatccacatattaaaatcatgacaatcatgcccttaagtcataaactttattccaaaatagaccacataaatttgacttatttatttgatgacccaacacacattttatatatacaattgtgacccca

SEQ ID NO: 282256 - DNA, 547 bp, Cannabis indica
tgttgatttaattaagaagttaattagagaacataagatttagaacctaaaagatctgaaaagagttaggttaaattcataatctgtcattcacattaagataaggatagcaattaggtattaacattggtaacttatcaacaggattcacctccctaatctctcatcttgattaatcgtcgtatattctttttaattttctgagttattttctttaaattgcaaaaattattgttttaccaaatagaatcataagtatagtttagtagtacttaatccaattccctgtggttcgacctcacttgcgtgagatactacttgattgcgtatacttgcgtagtaatcataaaatttgtaacataaggctgtgaggaatccagtttcaagagaaggagattcagactcagatctttgtgatactctgctacagaaaggatacaagggttagagatctgagtggaaggagacattatattcccctgcaactactgtaaggtttcttatactttatatgtgtttatcttataccgttttagaagttcatatt

SEQ ID NO: 282257 - DNA, 697 bp, Cannabis indica
aatataaacatgagttagaaaaaattatgaaaataaaattaaaataaatattgaaattaatataaaataatgtgaaaaaaattttaaaaaaacattaagagtaatttttaaaaattatttaagtttatatatatattttttttaataatgaggtatatttataattttatgagttacaaatataactctcctattaaaatataaaataattagaattaatattttattattatttattaaactaattgaaaatattgttaaaaaaaaatacttgtagaaatcaaaattatatttattgaataataattaatatgtaatattttaatttttatgttgtaataattttgtatattaaaatttttattgtaaattttatttttctattaggggtattctccgcccgtcctctcctccattaggggattcttcacccatgctcgatagggaattaatggggatggctattaaaatttttaacggggatggggacgggaagtacgtccctgccaattctccactccgtgtgcatccttattttactggcgtataaaataaaatagtcatgcgtgcaatacactgtttgaacataatttttggagtgttaaacttttccgaatttcttaaaattttacagtttgcaggatgtcttaaataattataatttaaatgactatgaaaaaaaaattaataaaaaatt

SEQ ID NO: 282258 - DNA, 744 bp, Cannabis indica
ctaggcaaaatacgcactaccggagaccgcatcttttgtacaaagacagctcccggagggatccaagcataagatgcgagtaccacaacggcattggtcatagcatcaatgaatgcaagaatctcaaggatgagattgaaaacctgatccgatcgggccacctctatgagtgggtcaagaataggctgcctcacctcaatccgggccaggcgacaggggttgtgccccagggaacaccaaggggtgaagcaggagtattggcttcagctgctcctgcgggcgatgcccagcacatccccggtctgccgcccacacccaacgggagggtagccatgatctccggagatccccatattggaggaactacccgcaaggagctaaagcgatacgcgggggccgtgaagcacaatgaagtttgggaggttactcaactcccagctcagaggccccggctgatggaccaacccatcacgttcacggaagaagatgccaagacggtgcgcttccctcatcatgactcgttggtcatagagacccccatcgctaataaagtggtggccagagtcttgattgacaacggaagttccgtgaacctactcttcaaggaggctttcactacaatactattccagaaaagataaagccatgaaagaatttcttatatcaacagtgagaggtcttagatatgcttttgtatgccttagaccagacacctgctgttgagtgggagtaatgagtaggtat

SEQ ID NO: 282259 - DNA, 537 bp, Cannabis indica
catctacatatagaagtagatatatttattaatattagtttccttgtagtacaaacagtggtcatagtagcttctagaaaatcccagttttagcataaacccatcaaaccttttgttccattgtctaggtgactgtttcaacccatatagtgatttaactagcttgcagacatagttttccttccctttttcagtataacctttaggttgcctcatatagatctcctcctcaagttcaccatgtagaaaagcagtagtaacatccatttggtctatttccaggttgtattgagttgctagacttagcattatccttatagtcttgtattttgcaactggtgcaaatacttcattaaaatctatgccttctttctgtgtaaatcccttggccactaacctggccttatatcttataggttcatccttagttctgccttccttctccttaaatagccacttacaatcaacaatgctcttatctttaggtttaggcaccacaatccaggttttatttttcttaagagattccatctcttc

SEQ ID NO: 282260 - DNA, 327 bp, Cannabis indica
tacccactcatcctcctcgccaacaatattaattgtggcatcgtagatcttcttccacgttttttagttgtaatatggagagcaaagtgtgtacacgctcacattctgactaactgctgcaacatatacacggggacaagagattttgagcgtttggaaaagtccgcaagtgcatgttctctccactaagttcacatcaccacctctctcaccttgaggactcgtaccaacgttaaacaattgggcaccattacgaaggacactcctgaacataccatctttgtgttcatcctttaaatcattttcaaaagtagtagccaaaggagt

SEQ ID NO: 282261 - DNA, 616 bp, Cannabis indica
agcttcagggtccgatacacaaccttaaataaggcatgctgacgtcctccttcggtagagaaatttatccatcaatacataacgatgacgcctgatactgaattcttttggacagtcccccttccgggggcaactcaccttttggtatgtattctatgagtcgggaccatccaggttgggttctgccccaaccgtggctatggcctcttttatttgatgcttggctctgccaagcgttccacgggtactaccccagtccttcaatttcactgtccgaagctaacttagccaggcagtccgcgtgaacgttcttttcccgggggattctttctactttatagtccgtgaactcgtggagaagttcccggactatcgttacatatgcggccattctttcgccgcgcgtttgatactctcctgatatttggttcacgaccagttgggagtcgctgtagacctctactcttttggcccccacagcctttgctaatctcagccctgctatcagggcttcatactcggcttcattgcttgaagctgaaaagtcaaaccgaagggctgcttggggtcgaagtccgctcaaggatatcattgcaacccctgctccggatccatt

SEQ ID NO: 282262 - DNA, 655 bp, Cannabis indica
taagtccccacgtcatcacccatgtcctcaatgtcaacccggacatgccaccggtccagcagaagcgacgtcccctcgactcagtaaaggccgaagccttagagaaagaggtggacaaactactaacgagtggcatgattcgagatgtctactacccggaatggctagccaatccggtcctggtgccgaagcctaacgggacctggcgggtttgtatagacttcactgatctaaacaaagcttgcccaaaggattgtttccctttgcccaggatcgaccagatggtggacgccacctccggattcaaactactgtccttcatggacgcgtacgccggttacaaccaaattaaaatgcacgtagcggatcaagagtgcactagcttcaggaccgataagggggtatactgctacctagtcatgcctttcggactgaaaaatgctggcgcaacttatcaaagaatggtgaaccggatgttcaagggcctcctggggcgaaatatggaggtatacgtggacgacatgctagtcaagtcaaaagcatgcactagccacgcggacgacttagaagaatgctttgaagtggtccggagatacggaatgaaactcaacccgaagaagtgcactttcggggttaagtcagggaagtttctggg

SEQ ID NO: 282263 - DNA, 288 bp, Cannabis indica
tgcctcacaaaaattcaacatgagtctcgcatgcacgatgttttttgtgtgtgaaagatcactgggggtacaacacgtcttcaaccctccttcccgaaatggaaagagtgctcgaagtctgtttcactcctaatgactgttttcaccctttgatctctctcaaggaaagtcattgtttgaatttttagccaacttctagccttccctcgtagaagctgaagtctacctcacaaaaattcaacattactcttgcatgcacaatgtttttcgtgcgttgaaagatcactg

SEQ ID NO: 282264 - DNA, 683 bp, Cannabis indica
tatggtatttgtgaaataatagataaatagttaagaaaaatggcaaaaatataactagtgttgggcccacatcatggccgaccactataccatatttttgctattattttatcattttttattccatataattcaatcctaaccctaagtgaattagtataaaaagaaaaaatagtctcataatccaactaatgactctaaacctagtttacatcttgtcaaacaactagagagtttgagacttctttttcttctttcttcttcttcaattttgaatcctatagagttcttcacataaaaaaagtcttagtgattgagtgcatgcccgcccatagcaagttattcctcaatcatagtgtgtaagactgtaaagaatccaaacaattgaaggagtgtcaggcttagatcttgattatactctgcggcagaaaggaataagggttagagatctgagcggaaagagtcatttagtttcactgcaatcaatgtaaagtttatcatactttatatatgtttaagttttatcgttttagaaatttatatttaagatgttaaaaatatacttattagtaaatttagatcttgataaaatataatccaacaaataactcatatgtttttttaccgacaataactatatcttttagaaaactgaagaaaggaggcaagtcatgtgatgaaac

SEQ ID NO: 282265 - DNA, 504 bp, Cannabis indica
catcgacggtcagaatagcaatcgattcgcattctacagatccaacggttggggcaagcgttcatcaaggcggtagaaaacgtttgagtactcgactgacacccatttaatgcgccgtatcattaaatggataggaaacgaatcgttgtctgcaaaaagcaaataactgcagtaatgatggtcataaatatatccccacacgcctaggacacgtgccaggaagttaataagggaaccagaagcatctaagcaagccttgtttactttttaccaaacaagacttggggggcaaatgttgcccctgattttgtccaaaatacgtgtaccaactggactgtgacacgtggattgaagaagcaggactttgagataaatcaactaagtctccttaatcaagaggatcgacatttaacatgcctcccggagaaggcatgaaagttccatatactcccggagagcaaaactacaatgaggcatctcaaggaggtatcaaatcctatttga

SEQ ID NO: 282266 - DNA, 508 bp, Cannabis indica
gctactaaattgttatagttttgactttattttatgaagagattattatttatttataaattattaattgatgaaatttatttttaaatattataatattaatttaatgtgtaattactaactatcatgccaaacatgatattaggaatttacatgtaattaccacttgacatccaaacacacattgtattttaaaatacaatgtaattactatacaatgtaattactaccctagtaattacacaattgtttccaaacagacccttagttttcttttttaataataatggttacaaacacagaattttttggtttatgagaaattattgagagattttttttaacacctttaaaatatttcaaatctattctatatggctgtaacagaattcttggtttaacttgttaaatatatttaacattttcttttcttttaataaaaaaataaacggaaggttaacgtgaaacttcaagggctcgtttgaaacgccgtattaggtcgtattgt

SEQ ID NO: 282267 - DNA, 617 bp, Cannabis indica
gaccatcacctcttgcatttttctatttttctctttttgggctgcgatctcggcttcatgatcagcagccttttgcctcaagaccagtaactctgtatagctaccttttttgtaagtgtcatactcatcaaagttctcttcgtactcttcgtcattggcctcatctcgctcctcagaacccacattcactcttaaggctacttcttcgtcctctaggttttgagcatcctgaggaggacgaggctgacgtgtattgttgcgagtttccaccattgttgatctaacatttctgattattgtctatttaaagacactttcttaagctctcaatgaaagcaccaaaatgttgaccgaggttttcggcaaccaatcaaataatataatgagaagagctgtagaaaatttaatgcaggagatttttacgtggttggggtattaatgagccttagtccacgagtctttgttatttatgagagtgtttattacaaagaatgttcttggtggatctctctactcttttctctctacgattccttaattaaaatcgatcaaccccttttcagtctgtttgtggagtatttatagtgttttcctgggggatccctaagaagggatca

SEQ ID NO: 282268 - DNA, 904 bp, Cannabis indica
aagcaggtactggcattcatggcccaaagctgtaatacagttgagtctgaagatgatgcagtctccacctcatcagaagctgatagcacaggtcgacaaaatgcttatgaagaaatgtttgcacaatgggagtacatgactaaacagatccgtgctctaaagaactcactagagcaagtggagactgaaaaaggaaagttagaagacactgtcaaaaacctcaacagacttcttgatgaaaaggagaatgagatctataaactcacagctgatctaattcgaaccaagcaagctttacaattcattcccccaggcactgcagctatcaatcaaaccctacagcttcagaagccctatggtgatcgaacttccttaggatataagatgctgtataaacaagggaatgatctgtctgttgagcattctctgccctctaatgtcgattcaacaaagaaggaagatgagttacctgacacctcaaccaccattaacgaatctgactcatctgagaagagacaggttccaactggacccattaaactcaagtttgaaggaaggaggactgatgcagaaaatctactacagaatgacaatttcattcctacatgtcatttctgtaataggagaggccacattcgtcccaagtgttacaaattgcagaactacttgaaagccatgatcaatcgtccaaatagtttccctcaaccaaataagtcacatggacgaaacctcgtcgagaatggaaaataaagtccaaaccaaatcctgatgttggtttggttgcaaagctatccctgtctgcctttgttgaagggcagtggtacttcgacagtggatgttctcgtcacatgactggaaataagaaattgctagttactacaaagatgaaaaagggggatctgtc

SEQ ID NO: 282269 - DNA, 599 bp, Cannabis indica
aaattcaccattaaagctcaagctttgagttctaaactcaagcttgagcaaatcccacaaacatgcatccaaacctagttaattctacccaaataagcttggaatagcttctgaaatcaaacaaaaacctcaacaataacccagcaacagattacacaatattttcctccaaaaactacatttttgcatagaaactcaaactttaaacaatctatccaacatgctttcaacatagcttaattaacatcaaataaacatgcttgaacctcagaaaataacaaccaaacacagcaacaagaacagccacaaaagcatgcatttcatcaattttcataaaaatctcaagaaaactaattagaaaaagcaagacaagaattaccttgattagagacacactaacaagctgaaatttacttgaaattgaagaggaaaaatcaccctagaagctgcctcaaatggccgaaaagagagagagagagttgagagagttttctttgaaattttctcttaattttgactaagtgatgaaattttgagaaaagagaatataaagcatttaccatattttatttcagccatgtaataataaaataaacatt

SEQ ID NO: 282270 - DNA, 916 bp, Cannabis indica
caaacaagcctcatttatttcccaacaaacaatgcttggggggtaaatatttcccttcattttgcccaaaatacgtgggcctggataaggacgacacgtggaacttagaggaccagcttttaaagaaatcatctaagtcttagacaacagaggagcgcctctggcaaggtgcctcctggaggaggcatgggaaggactttcacgctcccagaggccaaggacatattataaggcagttccgagaggtactggactctattgaacaatcacctcgcatttaatgccgcatgggggaagacgtattgaaactaccataaacgatatgacagatggcgtaacccccctttctcagatattatgctatgattaataaggctagtgacggctactttatgagaaatcacatcaatccagaagggataaaagattatatccacctaacccctaagatacctacggtataggtcatgtatttcatattttgtatctgctgggaatatgtgtccatatgaagctgcacaagtgattcattcctagggatcaccctagaacaacactataaataccccacaaacacactaagaaaggggtcgaggattctggattcagaggaatcaaagagagaaaataggagaaaaattcaccaagaacattctctgtaataaatactctcattaataacaaagactcgcggactaaggctcattaatgccccaaccacgtaaaaacctaatgcattaaacttcctacagcttttcctacatattatttaatcggttgccgaaaacctcggtcaacaataggaaaccacttagggttagggtaaaattaaataacaataaaataatgaaaaaataaactgacaaattgcttcccaagtggctgaccatggataatgggccccactttgcaattt

SEQ ID NO: 282271 - DNA, 770 bp, Cannabis indica
ggattagcagcctttttcttattagccgttttaatagctttaagaggcttcttgctattcttctaattcttcttgttgctagatttcgaagcaaagacaatgtttgtttcagccttggccgtaccattagcagtacaagaactaggagctttagttcctcctttctatggtcctccaatcaaattttcaaatctatgaaggttgttgattaactcgtagaagtcaaaatccaacttgttcatgacataatttgatgtaaagggcagaaaaactggagtcaaactattcaagatcaaactcacttgagttgtccgatctataatagctccatgattctcagcctcttggaagtaactagtcatttggagcaggtgatcacgcacgttctgatgaggtttcatccgtgcattgataaaattcttggtcacctcaaaacgagcttgaattgacgccatcccaaacagttcagtcaactggttcatgatatctacagccgtgagagtattgggaaaccttatttttaaggtgtcgaccatgctagacaacataaagtatcgagctttgtgttagcattctgccaacgctcaaacttttccttgactgccttggtcgcattctcacctggctgctcaagagcctcttcagtcaacacaaacaaggaattttcacaaatgagagcaatattaatattctctctccatttgacaaagttagctccaaagagcttgttgtcagtcaatagtgagaccatggggttgttcatagtcata

SEQ ID NO: 282272 - DNA, 514 bp, Cannabis indica
cccaaacttaattgaaacttggctcttgacaagtgagcaattaagttaggatatatgtggaaatgcaaattaggattggcgttagatgtatgattgggttgcacaacaagaataggctaaacggctcaaacttgggtgactagggaaaaattgattttatagggaaggttagaaaggctcaaacgtccaaagatggcctaaatcatttctaagttataaagctcgctaggatttcgcctcaaggattacactagctaattctagatgcttaaactctctcaaagtgttagctattctaaaaactcaaggtatggtgggataacacaagcacacaattgttgaaagcattcctcataggctagcatttagacaaaaataacacttaaaattagcattttcaacacacaaaccaaggcactccacaaatggaggaaaatggatatgtttcatcatcgagcgctaccctaaaccaaagctgaaaatacaagcaatatgtttctcatttgcaagctaa

SEQ ID NO: 282273 - DNA, 489 bp, Cannabis indica
ttgatcgaataaaggatgctagaatgatgtccattttagatgagccggctactctattcaatgaatgatatctttgactctcgcctaccagtacactgtataagtttgttggaaaccttagaaattatttaaggtgtgatagtttttgtattttcacatgtctttgttacttggtaaatgtatgataatttctgaatgtgtatgaatttatattgaatcatgttattttctatttgttgtagtttcaatttcaaatcttcattcttggtctaacttaacttgttgttttaatgggacaaatctcaaaggattgtcatccattagacaaacataatagttttagatctcgacagataaatatttgtgaatgtaacatctagttgtacatccaaagatgacaacttggactagtgtttaaaatatgaaacaatgaagaaatttataaaataagaataacttgactctcgcctactaggacatcgttggatt

SEQ ID NO: 282274 - DNA, 610 bp, Cannabis indica
ataatttataattagtcacaatttttcacttttaatcacaaattttgttgtaactaaaaataagattttttatagtatttatactaataatgtatatataaatatatttatataaaatactatatatacaagctatagataggtagataattagatccaaatgtaatattcctagaattatgggaaaagctttgtttttttttttttgtttagtccttaattttttgctttacaccgaatgtctctttgtttaacatcataacaaaagtaagcacgctttgtctaataattccatttgtttccccataaaacacaatataagatctcatcaataatattaatatatatatatatacatatatatatttatattatatatatgacccacatcatcaacactatgatctcaacatcacatgtgtactctctatactttttttttctaattaattaacaaaactttgtaaaaagaaatttgacttagcctagcttggtggtatccctatattactataatggcatgtttactaataagtaatgggaatcagtagtaaggtaatcattttcttacatttgtttacttgcattattaaaattaagaaaggaagaa

SEQ ID NO: 282275 - DNA, 622 bp, Cannabis indica
tcttctagtgagtttattaattgaaaattaagtgtttattttaattatttgttggctgaatatatggggggtaatgactcttattttcatttcattcaaaaattctaagttaaagaaaaatagaaaattttcaaaaagctctcattctctctctcttttcggccaagacttgggctgctagggctgggtgttttgctcaattcttgtgattttcatctcctctttgtgtaatccaagtcaaggtttgatcacttgtaacttctctttgtgttttcttgagttttaagaaagtttggtgtaatgcatgcatgaatttttaatattgttgctgctgtgatcttgttgttgttttctgagatgtaagcatgttgattagagtttaattaagcttcttgtaatgcttgattgttaggttatttaaagttatgatttttctatgcaaaaatatggttttcaaagagaaatgtcttgaatctgttgctgtgatgttgttgaggtttgttattgttttcagaggctattctaagcatgtttaagtaagtttagattgatttgattgcatgttagctaggtttgctcaagtttgagtttagaactcaaagcttgagctttaatggtgatt

SEQ ID NO: 282276 - DNA, 859 bp, Cannabis indica
cttagcttacaattaagataacaatctctatttaacaccagaaactaacctaaacaattcccaaatcaaacagccaccaatttccccaaattcacaccaaaacctaacttaaactacaacaaacttcaagtaagagatagagaaaaggattaccttgaacaaagcttcaattactactagaatcccttgattcaacacaaattctcaacccccagctgctgcccaagagaatcgaaagagagagagagaaaaaaaaaagctattttccttctttttccttcaaacttaagcaacctctcttctttcttcttttctttcttcttttttttttttattaattgcttagtaataatccattcccagccaagacttaaccattaaagtcaaaagaaaagtcttactaaaagaccttcttgcccccctcactaaaaaaagaattaaaacatcacaagggtaaaatagtcatttactaaaccccgaaaataccaacaccgctaaagcttaacaatgataccccgaaaaatattctaaaccatataatacaattctctaaaggcccaacgtcgctttccacagcttccgaacacaatcacagaaattgagaaattacataaatagcataataaatatatatgaactcaaataaattcccataatcgtattattattaataataataaaatctcatacataaaccctaattatttaataattcaaagtattaatcatatgcggtctttacacatgtccacgcgcgcatgatgggtgtttgggcgtgaaaactctgcgcaggggaaggttgcatgatttctgcgcgcgcgcgaggtgcagcgacaccaccccgatatttttgaaactt

SEQ ID NO: 282277 - DNA, 668 bp, Cannabis indica
actagaaacaaagagtgaaaactaaccgaaaatatgacccgaaacttagactaattttagcctaacaaattcccccaaactagatccttactcgccctcgagtaaagctaaaactcaaactgaaattaaacaatgtaatagataactaaaccttccaatgattgaactaccactaccacctgcacaacttcaagcaaatcaaaaaccagaatttcaactcaataactctaagaattaacttggatgcacagttcagaagtaagcaattcatatagacacaaaacacctcttttgacacccatatcacaaccattctacactctccgacattccgctaacccatgttcaataagcttgaacgacatacctttctccactaatgttgacaattcttgctcggaatcaaaaggtctttttcggttataatagcatggcttaggtaaaacgggtagatgagaagtcatttaggctacattataccataagcacaattataccaaacaagcacccacacttatccattctttcatcccaaagaaactagtaagagattacacttttcttttttttctttcctatgtgcccacctcattgttcacatttgattctcaagaagaaattatcacatttattttttttcttttgttttcttttcttctttctttttt

SEQ ID NO: 282278 - DNA, 462 bp, Cannabis indica
aactaaactccaaaacttgattccaagtaaccatcatgcatacactaactctaaattacttaaaatagcaagattaaactttagaaaacaacaacaaatcacagcagcaagaacttcaaattattaggcatgcatttcatcaaattttcataaaattcaagaaaacacaaagggaaagttctaagagatcaaaccttgattagattacacacaaagaggatgaaaatcacaagattgagcaggaaaaatcccagccctagcagcccaagctttggccgaaaagagagagagagcttgagtgtgtgaattttgaacttttctttctaattttgactaagtgtggaaatgagaaaaataaaagaataaagccacttaaaccattttatttcagccactaaatataataaaataaccatttaaaattcaaataatcaattcacataagacaaaacactaatgggg

SEQ ID NO: 282279 - DNA, 771 bp, Cannabis indica
actatccaaaacactgcctaaatgatgttcctattgaatgctgtcaaggattttgccttgagaggataaggcatgcaagttctaagctatccaatcaatcttaccacaaaccatagtaaaaccattataacatattttgcagatatcaaattgcatccatacacaggtttcacaagcatccaaactaatgcaaagagtgaacagaattaagcagacaattttgcaatatcaggacactttacaatcaacaacaacatacaactatctttagcttattgcccattcctaataaaaaactaaaacagaaaattaaagcagaaaaattaaaaatttaagtccctccctccaaactaaaattcacattgtccccaatgtgctattaaaactaaagggaaagagacttacctgagaaccccatcagattagatcaagtccaccccttgcatccaaaagatccctcgtaccgaatgaagaaaattgacctccaatattgttaattttagagttttgcacaagagtaagttcacctttagaactaccactcatcaatcatttccaacgatgccttatcgttcgaagttgctctttaggctttgctctctttttatcagctttaataaaagaacccttcaccatctcaatcttgcaacaggtaggaatgtcggttggggcaaaaacattaaaattgacctctttaatcatattaggccataatcaatagacacaattgaaattgaagccctaactttaatcattgttaatttctctttt

SEQ ID NO: 282280 - DNA, 686 bp, Cannabis indica
tgcatttaggcttcacttttgccagcgcattattgcgccgatgttaaaaggtttaccggcgcaatactgaatatgcgccggtaaaagttaccaaatgaagcgccaacaggcgcgagaagttcgccgcctttcatttcatttattgtggtgcttgtttacttttaccggcgcataattgcgccggtaaaagtctcaaaaaaagagagggaaacttctcgcgtggatttccttggtaggtgggaatacttttaccggcgcaccattgcgccggtaaaagtgttaaaggaaacgtgtggattttgatgtgataagtgagaatacttttagcggcgcaattgtgcgccggtaaaagtatttattgcgccggtaaaagtatttacttaaacgctcgtttttggctacttaggtcagattttaaaaacacttttaccggcgcaattggatgcgccggtaaaagtatatatatgaatcaggagcacgaagcccccttcttctcccccatttttcatttttttgcccaggttttcagagaaaacctctcagcccccctctctcaatctctctttgattctctctcattctctatcaatctctctcaatttctaaccccctctctcaatccctctcaatccctctctttttctcttcaaaaaaccaccaccaccacctctaacaccaccaccacc

SEQ ID NO: 282281 - DNA, 919 bp, Cannabis indica
tctcggctggtgtggattgctagggctgggagttcttcttgatttttcaagcattattcatccaatctaagtgttgttcaagtgcttggtaagatccttgtagcttctcttttagttttcttggtttttaagaaagttgagtgttgcatgcttgagagtttgtggctgtggttattgtttgtgattgcttttgatttctgaagtttaattatgatttaaaatgttgattcaagcaagattgtgttggtgattagttggttttatcaaaatatggaattcttactcaaaactatagttttcaaagaaaaatgatgaaatctgttgctgcacttgttgttgatgcttgctgtagttttcagaggttattatatgcttatttaggaagatttgaactggtttgaatgcatgttattgatgtttaaccaagtttgagttttgaactcaaagcttggagctttaatggtgatttttgattctgtgttttctgggctgtgttattgctttagagatgttctttggggtatttagaacaggtctggaaggtttggtttaaattgggtttgatttgaaggagttatgaatttttgtttgaatcctgcgaggaaccggaattccgtatgtgcaaccggaattccggatgaggttcaggaattcccaaaactagaattccggtagtagaaccggtctaccggttggaggattttcaggaaccctaatttttctcgtttttatgttatttggggtattgccatgctttttatcgatagggaaacttttagtttctagtttaagtccccgggaagtgatttagcgtatcacttaatagtgttgtgattgttatggtttaggagcttgtaaaccgtcgtgcagttcgttcaactcaggttgaccagcacacctgaattcagaattgaggtaa

SEQ ID NO: 282282 - DNA, 531 bp, Cannabis indica
cttttcctgccctggaagaacatagccttcgggttgctccatatagatggtctctccaagaattccgttaaggaaggctgtcttgacatccattttccaaatttcataatcgaaagcagctgctatggagagaataatttcgatggatttgatcatggcgaccggactaaaagtttcctcatagtccacaccttctctttgggtgtaacccttggcgaccagtgtagctttaaaagttttgacttcgcctccagcgcctcttttcttcttctagacctacttacatcaaattggacgatagtcatcgggtgcatctacatattcccatactttgttctttttcatggaatctatttctgaatccatgccggttgaccattgtttctgtttgggacttgccattgcctgtttataggttaatgggtcgtcatcaataccgtcaccaatgaacatattgatttcaccatccaagccataacaagattgtttagtagaaaccctcgccactacaacgaggagcggtgaccttct

SEQ ID NO: 282283 - DNA, 501 bp, Cannabis indica
gctgggaaatgacagcaagtataatgaatgttactggttttgtagattcagattatgcaggaaacttagatactaggaggtctctatcaggctttgtcttcactgtgtttcggggctgtgttagttggaaagcaaacctacaaaaggttgttgctttgtcctccactgaagccgagtatatggctgctacagaggctgtgaaagaagctatttggttgaagggtttgacatctgaactgggaattaattctgacaatttattcattcattgtgacaaccaaagtgctattcacctcatgaagaatcccatgtaccatgaaaggtcaaaacacattgacatcaaactacacttcattagagacattattgccagcaaattggtcaaagtaaagaagataaatacacatgaaaatcctgctgatatgttcaccaaagctgtcactagtgagaaattcaggctatgcctgaagttgctgaacattggagattgttgatccttca

SEQ ID NO: 282284 - DNA, 743 bp, Cannabis indica
acgactcatgatctctgaaacaatctaaatagaaggaaaggagtagaaaattagcttggcacgccgatcatgcggcccagaactcgtgctcaaattcttgctcagaaagatcctgacgtgactcagatcgaccaaaatgctgaacaggttagtctagctgtgcaggcacaactagacgaactaaagaatatgttccaaggcatggccggacagagaaacaatgatctcgagttggaccgagcacgtggaacccctttctctcccaaaatcaatctcctgacgttaccccacaattttaaaatgccaacttggaagatgtacactggaagagaagatcctctttcccacctcaagtatttcgagatgcaaatggatctgcagggggtacgaggtggtgtatgttgtagaatttttcctgctaccctctcggaagccgcccaacaacggtatttcaagctggcccctcgaaagttcaactcatggaaagttttctcttcggaattccatgcacaattctcctcctctcgccaacttccgttgcatttagaagacctagtcgaagtcaagcaaagaccaggcgagcctctccgagcatacatcagtagattcatgacggaagcaaccaaggtctcacgggtaactgaagatggaaagttatccgcaatattgggggtcattgaagtcctcggtgaactttggaaggacataaggaagaattgtccggtagactcaatgagttattt

SEQ ID NO: 282285 - DNA, 296 bp, Cannabis indica
ttttgaagtttcgaaaaatattagagtcgtgcaactacacacgcgcgcgcgcacgaggcttgtccctcggacagcacgcgcgcagacaaggattttgtctgaaatcctgggctccgcgcgcggacaggctgcttgcagcctcctgcgccggcaatcctcgcccatgcagcacctgatgcgcacgcgcacagtatgcttggcatactgtccgtacagctcgcagtatttatacatttactattcctaattcaattctaattatcataattaaatttattaatatttttaaaatttaa

SEQ ID NO: 282286 - DNA, 622 bp, Cannabis indica
accggaattccggttctgagaattcctggaccctcatccggaattccggttgcacaaccggaattccggttcctcgcagaaaaatttcaaaaattcataactcgatcaattccaacccaaatcacacaagatcttccagacctgttctatatgacccaaataaccattcaaaggcaacaagactacccagaactcacagattcacaaaacaccattagagaccaagctttgagttccaaaactcaaacttggttagaatcaactaacatgcaatcaaactagattaaacctacataatcatgcataactaagcctctgaaaatgaaaacaacccactacagcaagtaattacagattcaacatatatcttcaaaattcatattctagagctaaaacttcaaagcttgaatccaaacaaccaacatgcattcactacctttaaactacttaaaaataacaagatttaacctatgaaaacaacaacaattaacagcagcaacatcatccaaaatcatcatgtttcattaaaatttcaagaaaacaaaggagaaaaaactagagagacataccacaacaagagattactagaaattaggtttaagctagcttgaaaatcaaaaat

SEQ ID NO: 282287 - DNA, 875 bp, Cannabis indica
aaggtatcacctatgaaggggattatgcatttcggaaaacggggaaagttaagcccaagatttataggtccttttgagatactggacagagttggtcaagtagcttaccgtttggccctaccgccaacattagcagaaacacataatgttttccacatatccatgttacggaagtatgtacctgatccgacacatgtgcttaaatacgagaacttaaacttgcagcaggacatgagttatatggcacgccctgtgcgcgtgatagaaaaaggaacaaaagtcttacgaaataagactatacccttagtcaaaatcttgtggagtgatagttctgataaagaagcgacatgggagttggaggaggacatgcagaataagtaccccgagttattctcaagtaagtaaatttcgaggacgaaattctttaaaagagggtagattgtaataaccaaaatattaagttattattttctattacgttagtctagatgactcgatgtggaaatagtggttaaataaaatatgttattaactcattaaaaaaaatagtattctttaaaatttgtaagaataattatgtcatttttctaatttagacttatctaattgattatgggcttaaagatttagtccatgtttggacttataaagctaggatgtgatatattattattgttactattattattataaagttactagaattgtttatgatgtaccattcttgatataataaatatgtaatagtaataatatctatagaatttatatgagagataagtcttattttaaattaggatagtaataataggtggcaaggctttgagttagtcttggtcattatgagagacatgtatatagttttagttgagaga

SEQ ID NO: 282288 - DNA, 719 bp, Cannabis indica
agaccattcttccttatgtctttacaaatctcaccaaggaattcaatggcccccactatcgcggacaactttccatcttcagttacccatgaaaccttagttgcctccgtcatgaatctgctgatgtaggctcagagaggctcgcctggtcttttcttaacttcgaccaggtctcctaggtgcaacggaagttggtgagaggaggagaattgggcatggaactccgaggagaaagctttccatgagttgaactttccaggtgcgagcttgaagtagcattgttgggcggcttccgagagggtggcaggaaaaattttgcaacatacgtctcctcgtattccctgcagatccatttgcatctcgaaatacttgaggtaggaaagaagatcttcttttccaatgtacatcttctaagttggcattttcaacttgtggggcaacaccaggagattgatctcgggggagaaaggggttccacgtgctcattccaactcgagatcattgtttccctgtccggccatgccttggaacatactctttagttcgtccagctaacctattcggcacttttgccgatctgagtcacgtcaatatctttctgagcgggaatttgagcacgggttccgggctgcacgtttggcgtgtcaagctggtcatctactcttctcctcctatttagattgtttctgagatcatgagtcgtccccaacctatcgaat

SEQ ID NO: 282289 - DNA, 698 bp, Cannabis indica
aataagtaatttaaaaattaaaaaaattattaagacatacctcaagtctatcccagagtgcgttgatgtcagctctactgacatcttcccatttgaatttattaatggggatagacatccgagtcatccatttggccatattgttgaatttttttccgtttttgcctacgggggtgccagtctctgcgtgcacctcaatcggtaacttggcagattgtgttttggagagctcctcctcaacattcttgcccttgtatttacctctgacccctttctttttcgaactgctgccacctggtgtagacatactacatatacaacacatattgtttatttaaaataaactaacatattgcaaacatattaaagaagaagggttgtaatttttattttatttaaaacactatttcaattacaattcatcatcctcatcatcagttacatatacagcattatcatcactgtcactctctaattctaaggagttgtcttcttcggtatttagaccctcgttgtcatcatcgacaatgaaatcatctaattgttgaggctgtgaattcacacgatggatgtttgcaacttcagttgggtccacatcatggcgaacatagtcaacatcatccaactgtggaagttgaacaacgaactcggtttcagctgaattgttttcctgtacaaagggtgtctccccatcagtg

SEQ ID NO: 282290 - DNA, 560 bp, Cannabis indica
cggggcctggaacagaccagtagtcggtgtctagatcttggactcagactaggaccagaacccagaacccagacaaagaaccaaaaccgaacccagatctagacctgggacccaaaactagaacctgaacaagaatcgtcgaaccaggatcctagaacaagactaggaccgtgaccaggaccaggacccagacatagaaccgaacacagacctagcgtcagacccaaactgagactagaactcgggccaagacacggacgtgtacacagaccggaactaagaccccgacctagacctaaatcttggacccgatcccaacagacttggacctagatagggatccagatacgaacctgcactcggacaaagaccaagactagaatcgaaatgctagcccagatctggactaagatcctgacccacacccaaacttggacccacactcttgacccaaacttggacccacactcttgacccaaacttggacccacactcttgacccaaacttggacctggacccaaacctagacccagatcggggtccagaactggacacaaac

SEQ ID NO: 282291 - DNA, 892 bp, Cannabis indica
ctgtctcgaatctcgatgccccctgggttcagcgagctcctgcaccattttctcgatgtctacggaagacatcagacctaattctatacctacgacaggtgcaatctcctcttctgagatcgaagtcgggataaagctatcctccctctggtcctcgtcaccgtcaaatgcatcgcctcccgagccaagcagctgactatccgacaggtcgctcatctgaaagatagaagatcttttcagcgtggtgaatgtgtgaaaaacaaaataagtgatctcacccgcatataaactataaaattgcattaagagaatggtccgcatcctcgcgaatactgaccaccccatcagtatgcgagcagagcgaatactaaatatgcgaatagaaaaacgtcccaaaaatggttaggagtgtcctggtaacctcagcgacatgcgtctttcggcatgaccctgaggtgacgaggagacacccaccatttcaaggagtccaactaaagtcgcaacctgcgaataagtcacgcatcttgagctaagcgatatacctctagaaacggctgggagaaactcagtgactcaaggggcatgcgttctcaagcatgaccctgaagttactgaggtactcccaccgtttcgaggatatctaccagccaaagagtacgcttattagaacattaacacatgtcgcaaatggctgggtgtatctcagtatctcaaggaacatataaccgcatatatgaccattagaatactgtgatacatccaccatttgaaagactcagtcaatgttctcacaaccaaattcacagaatacaaaatcctaaagatctaggcgacaatcagaagtgattaagtctcacaaaatgcgagtattcgaagtgtcgtccgaataccc

SEQ ID NO: 282292 - DNA, 567 bp, Cannabis indica
aactctccgccaggtaatagggttccaaaccctgattcataactatcatgcggtctatccaatttactaaagcttctggctgccacataagaatgtgtggccccaaaatcaaacaacacggagtaaaaagagttattaactgagagctgacttgtcaccactgaagggctgacttctgcatcagcctgagtaatggcaaacaccctagctggagtgggtctcaccggagcctttgctggttctgatctaagctggtggcaatcccttttgtagtgtccgggcatgccacactgaaagcacccctgccctctacactcacccagatggtgccttttacaactggggcactctgggtaggaatatcgggtctcagcactaccctgacaaccgcctcgactctggttcccccggaacctcttgttctatcccgagccaccggttgtagtggacgctttcctcttctgatccatggccgaaccactacctcccctgctaaagcctgatacaggaggggtaggagccccgccactcactggagtcctaactgactctgtcatacacccaact

SEQ ID NO: 282293 - DNA, 799 bp, Cannabis indica
aaggaagttgaggccttatttcaaagctcatcctgtttgggtatataccgaccagtcactacgacaaatactataaaagccagatgcttctgaacggttactcaagtgggcggtagagttgggtcagtacgaaatcaccttccaaccccgaacagcaatcaaaggccaagccttggccgactttgtggtagaatgcacaagtaaaaaagaaagcataccagaaagtaaccccgagccagcacctcagccaagtaacaatgaagacaaaccgacttggaaactacatgtggatgggtcggctatagatcaactatctggcacagggattgccctcatcacgcctgggggcaacacctgcacgctgcagtcaagtttggattcaaggcatctaacgacaaagccgagtacgaagctctaatcgctggactaaaactagcccgggagatgaaggccgaacacattgaaatctgcagtgattcacagttggtggtaaatcatgtatccggagaatacgaggctcggggagaaaagatgatagcatatctgagcaaaatacacgacctgctcgcacaattcaaaagctacggtctcagacaaattccaagagaagaaaatacaactgtagatgcgttagctcgattggcaagcaacaatgtaagtgacaaggcaaacttggtccctatgtagttccttgaagagcctagcatcactggcacggaagaaatcaaaatgattgacacatccccaaactggatgacgccaatagcagcctacctcaactctggggaactcccagata

SEQ ID NO: 282294 - DNA, 633 bp, Cannabis indica
aatcccttcagatctgatgatgaagatgacactgaactcccttcagttagaactcagcaactccaggctcagatcattccgccattgatgaccatcttcaagctatacatctgacctgtagacacaacaacaagaagcaagatacgacactatctccacgaacaactgaattaacaaactatacgatttaatggatgaacattttactaactgaaaccgactatttatatatccacaaaatagtccacctggcactaactaacacttaacagaaactgacttaacagaacgctagtgcagatataacagactaaaaacaccagacacgactagacattgaacagaacaaaactgtcacaaaataatgacactaacattctcccccttgacaggttatgttcaatgactaacaaaaaaaactaaagaccacaaaagaaatagcaattccagaattaatgatccaaatataaatgtctttaggaatataaacagagctaccataaaacaaaacgaattacaaatatctcccccttcattgaatatgagctgttggatcctgttctgtgccagactccccctgggaaggtggcccagtcgacaccaaaggtgttgcagagattactggaggcgagt

SEQ ID NO: 282295 - DNA, 810 bp, Cannabis indica
tttaattttaaataaataatttcaaaaaataattatttaaataaataaaaaacaattattttcaaaaatttaaaaaaaaattcgaaatttttaaaaaaatatttaaaattaaacctacaattttgaaaaattaggtttcaaccaacctaaatatcatttcaaaatttgctaactacttttaaaattaatgttattttataaataaaaattaaataaaaaattaaaaaagataaatgaatatctttttcagattttaaatgtaatttaaataaataaaataacaaaatttaaaagttagcaaaatatcttacatctatttaaaattacatgtgttgaccgaggttttcggcaactaataaaatattataaagttagagagctgtaagaaaattagagaaggatttttacgtggttggggcgttaatgagccttagtccacgagtctttgttatttatggatgtatttaatacagagaatgtatttggtgagtgtttcactcttataaatacagagaatgttcttggtgagtatttactctacttgctcttatgcagcccaagattctcgatcccatttaatgagctttgagggggtatttatagtgtttttggtggggtgatccccagaattatccttacaagtgtatctgtaagtatccataaagttgggcattcccaatgaatataccatgggtaatgcatggtcaaatccctaggtgctgtagggcttttatgtggaatgtccttattgtcttttgactgatgtgactcttcacagtgtagccgtcgctagacttaaatgatcattac

SEQ ID NO: 282296 - DNA, 611 bp, Cannabis indica
ttgcctgtaggggggaaagagtaagggggtgagctaaaagcccagtaaggaaatgcttaacatacaatagcattcaatacactaaacatatcttaaaattcacaataatacgattctttataatattaacgtatccagtcttaacaatattatataccttagctcataattgtaacttaaataactccagatatggaaagctatatcatataccatatatttgtactaaacgaaaccattacatatatgtagggatcacaaccctgacatcatactcatagcacaatcatagcaataacatataataattatttcaatcatatcatgtctttaccataatgtggcgtatcatagccactccatacacaacctgggcttaactggccctacaataacctgggcacatttagccctaccattgctatggaataaggtatctctatattcaacagcattgtcgctgtatcataccttaccataataatgtcatacacaaatcggacaaatgtagggtagggtatctctacattcaacggccttatcccgtatcataccccaccataataatttcatacacgactcagaaaaatgcagggtagggtatctctaca

SEQ ID NO: 282297 - DNA, 517 bp, Cannabis indica
agcggaataatatgtctcatttcactcatatctctaacccttgtatccttcctgttgcagagtattatcaagatctgagcccgaatgtctttctttgttgaatctgaattcttcacagtcttcctcactatgattgaggtactacttgctgtgtgtgggcactactctatcacttagaggtttcgaaacagagatagagagagagagagagagagagtggcggcttaggaaaatttctgtgaaaggaaaagaatgcaattgtgttgtgtgtgtttcctgaagcctttaccttctatttatagaataccacacagggttagggttgaattacttggcattaaaaaattgaaaaaattaaatgataaaagcaatgatgtggccggccatggcaatatggaaataggcctcacatttgcaactttcctattttatcatttctgtttcccattttctcaaaaactgccaattttcacattcaaccatataaatgtcaactctaactatttaataacaataa

SEQ ID NO: 282298 - DNA, 499 bp, Cannabis indica
tcaacactaggaacacaaactcgagctttgtataataacattctactgttcgagactgaaagcctctaggccgaccagccgctacttcgtctcgaaccttaactagctcaggatcttctagttgtgcctttctgattcttttcaacagatcagattggagtgttaaattatgtaatttcccgaccacgaactcaatccctgcattaaccatttctgagtctagttgagcggctatcataactgtagtacaaacttgcccgggaccttttctgcttaaagcatcggccacaacattggctttcccggggtgatacaaagtttcacaatcgtagtccttaactaactccaaccaccttctctgcctcatattcaaatctttctgggtgaaaaagtatttaagacttttatgatcagtataaatttcacacttttcaccataaagataatgtcgccatatctttaaagcaaaaaccacagcagcgagctctaaatcatgagt

SEQ ID NO: 282299 - DNA, 541 bp, Cannabis indica
tcatttttgttttgttttgttttcataatctatattattgttgtgtaacaaaattagtccttgatgaagaaaccactttttggtgaagaaaccggtttcttgatgaaaaaactactttcttggtgatttttctagtgattttgctggcgacaatgccaattctgacgacttattttacaccggcaataactccggcgatttttccgacaccgacaactactccggcgacttttctggcaccgacatcaaactccaaaatagtcgtcggaattggcattgtcacaagtaaaattaccgaaaaaataccaaaaaaccagttttttggtgatttttccaacgacaatgctaattctaacgactttttcggcgccagcagcaactccgacgagtttttcggcaccagcgactccgacgactttttcggtgtcggcagtaaactctggtgacttttctggcacgagtgacaactccagtgatcactatagttttatttgttttatttttttaaaaaaataaatatgaagggaattttaatattctt

SEQ ID NO: 282300 - DNA, 395 bp, Cannabis indica
taaaatcaagtaatcaccaatcctaacatgcttgaatcaacattttgaattataaataaacctctgaaatcaacatcaaaacacagaagcaagaacaactcaaacaagcatgcaaacattatcttttcatcaaaaattcaagaaactaaaagaagagaagctagacaaggattacctctactagaatcattctaaacttgagaaaaaaaaaactttaattttgtaaagaatcacagccctagcagccccccaagcgtggccgaaaagagagagagagaaagagcttgaaattctaatttttctaactttttaactttgaatgaaaaatgagagaacatgcaacattaaaccttttgtttcagccaaaaataaatcaattaacatttaaatttcca

SEQ ID NO: 282301 - DNA, 656 bp, Cannabis indica
cctcatgcattaaggccctataaatagtgatttagcttcactgtaaaagggatcaaaagaattgcttcagaaagagatctaagagaattactcagagatttcattgtaagagctttgagagagaaaaaaactttgttctttgttctcgagttaatacaatctaaggggagtaggctattatcataccaacggggctgaacctctttaaaatctggtgttctttattacttattcatttttgctctattttaattatatttcttaatcgcttaataattaactcattgtcgtagactaaaagcgaggtcaatattttggtgctttcattgagagcaaaaacccaattttgttctttgtcttatgtcttaataggcatacagaatggtgttgcaaactcgcagaggcctggtcgatcaaagtgacccaatggtgacagatcctaacgtacaaacacctgggaatacgagaggaccaccagggacaaatcccgaacaggccaatacactgccacctactgtgggtcatggtgtgacttctgttgggaatattttaccgtatctagatttactaacaagtatgttgaattaacatcctaaatatgaattctctaaaataatgaaattaaacacataagggtttaaaaaaaccttacattg

SEQ ID NO: 282302 - DNA, 664 bp, Cannabis indica
acggccccagctcgcgaatcaggcgaggatgaagaagaggcggaagggagtgggacggacttggtcaatgacactcaactgaacgaacccttcgtgtgtgaagatctgatttcgagggtcaccaaatcagatttcactacctttacgaggttaaatctgctgcgacttgcatttcagcgacctaaaccgacccagagggcgcatctcccttttaccaaccctgcaattattccaatagaggatgtggtagtctcaatacccattctccgatgtggggtatcggtccccttccatcctttcatcgcaaccattcttaggcggtacgatgtatcgccatttcaacttactccaaacagttatcgcactgccctagccttctatgcgatgtatatggagtacgttcatagggctccctcagtagaagagttcagctatttctacgacataaaaagtgtaggtcttcataacggagtggttctatgtctttaaagtccctgggattagaactgactttaatcgcagacctagtatgtcgcgtgtttcttaacttaggcattttctgatttattttgagattttatgctagctcgcttttccttgttctcgcagatagaccagctcgaccggcacttgacgcgactcgcagagagacagctgaaatcct

SEQ ID NO: 282303 - DNA, 598 bp, Cannabis indica
cgtgtagcagtcccaacacgcttcctcccatgcgacatttaatgcgacttgattgctcaggagaaacctgacacctcgcggagatgccttagcgctattcgagtcttcgggagcatacgaggttccatgtgccttctccggggactacgtcccgaacattaccttatggcataaacacttagcaaatattgtgaattgcttgatccacgtgtccttatctagttggtccacgtatattgggcaaaatcaggggcaacatttaccccccaagccttgtttatttgaaaaatgaaacaaagcttgctcaagtgcctccggttgactcctcggtttcctggcacgagctttgagcacgtgagggtgtatttaatgatggcttttaatgcagcgattcaatttttgcaggggtcgattcgtttcgcgcccaattattgatacgacgcattaatggtgtcagacggatactcaagcgtttccaccgcctttattgtaaatcgatctggtccgttgatctttgagcatttgaatcgtgcgcttccctcaccgttcgattggtaggtgatgacgcctgttcctcatgcattttttgcctataaaa

SEQ ID NO: 282304 - DNA, 676 bp, Cannabis indica
caggaaggagctgcaaaccttcaggatttccaaaagagagtccaaaaatacgtcaatcttgaagaggcccaaatagtggcctatggaggatattatcccaccgggatagcagggtatatgccaggagcccagccatcgggtactgtcgtgaccgcagctccaccaatgagcgacatacaattctctgctactcccggatacagtcagggtcaggccttggccctcgcatcgtcccatttcgggaatccctctggtatgaatggacaaaccccctcacactccgctccaactgccagcctggcaggtccttctcagggctcgaggagtaaaatatcctccaaaggcagcacccggacggaggaaaagctacaaaaaagggggtacactccccaatacacccagtacacggagttgacagattcccaagagcgtgtgtacttttctactaggcaaaatacacactatcggagaccacctcccttgtacaaggatagttcccggaggggccccaacaagagatgcgagtatcacaacgacattgggcacatcaccaatgaatgcaagaatctcaaagatgagattgagaacttaatccgattgggacacctctacgagtggatcaagaatcggctgcctcctctcaacccaggacaggcgactggagctttgccacagg

SEQ ID NO: 282305 - DNA, 571 bp, Cannabis indica
gaccgggaacccctaatggggcaagaggagcggaaaatgccctaatataaaaataaagtttatattaaaaactaaaagaaaaaaaattaaatattacacattatttattatttaacatatttaatattattatctaaaactctaacaaattagaaaaattgtgctaatatactaaaaaataaaatataaactataaaatattattaaaaagataaataaaatataagatggtaccgtcagagcaaggagtgtcatccccgtcctattttatattcggagacaaaaaataatctccattcccgcctcataagtaaggatgtaaaatggggcgggtcgggcccgacccactaccgacctaccgcggcccgactcattaagtttttgagttggggcagatcaaacttaactccgttattcgggtcgggtttgcccagcccaaatcttttcccttgtttaaactaacatttttaaaaaaatatatacattacattataattgtactaaaacttgtttaacactaaaagtagccctagtgacgtaaatataaatgtttgactacgtggcaagaatg

SEQ ID NO: 282306 - DNA, 706 bp, Cannabis indica
gatgcatgggaaagattcaaggagttgttgaggaagtgcccccaccatggtattcctcattgtattcaacttgagacattttacaatggtctcaatgcgacctctaggatggtgttggacgcttcagctaatggagccattctttccaagtctaacaatgaagcttttgagattttggaaaggatagctagcaacaactatcaatggtcaactaatagagctcctacaagccgaaaagtagcgggtgttcttgaagtagatgctttgaccgctctaaccgctcaaatggcctcaatgaccaacattttgaagaatatgaatatgggaggaagtgtacaaccagccgctgccattcaaagggcagaaatctcttgtgtgtattgtggtgatgggcatacttttgaaaattgcccttcaaatccagcttcggtttgctatgtgggtaatcaaaacttcaaccgcaacaacaatccatactcaaactcctacaatccggcatggaagcatcatccaaacttttcatggggaggtcaaggggcaagttcaagtggagcacaacaagcacaaggaaagcaatcatttccaccgggtttttctcaacaaccacaccaacctcaaggctctcaaactagttctttggagagcttaatgagagattatatggccaagaatgacgctgtaattcaaagccaggcagcatctcttc

SEQ ID NO: 282307 - DNA, 594 bp, Cannabis indica
ttttagatgtttttcccgaagaacttccagggttaccacctcagcgggagattgacttcgtaatagatttggcaccaggggtggaaccggtttccaaggctccatatagaatggctccagctgaacttaaggaattaaagattcagcttcaggggttgctggacatcgggtttattcggcctagtgtgtcaccctggggagccccggttttattcgtcaagaagaaagatggaactatgaggatgtgtatcgattacagagaattgaacaagctaacactgaagaataaatatgaggatgtgtatcgattacagagaattgaacaagctaacactgaagaataaatatccattacctaggatcgatgatctgttcgatcaacttcaggggaagacggtcttttccaagattgatcttcgctcgggtttccgtacattctgaagacggctttccgtactaggtatggacattatgaatttctggttatgtcgtttggactaaccaatgctcctgcagcatttatggatttgatgaatagagtattcaaggatttccacgatatctatgtgattgtgtttatcgacgacatcctcg

SEQ ID NO: 282308 - DNA, 511 bp, Cannabis indica
attcgggtctaggtctgatttggagtccgggtcctggtcttgttacggttctggatacaggtccaatttcagttatgattcaaggtccaagtcctagttccagtacctgtaaacttccggtttttgttccaattttgggtcacagcatatgggttcgggtcgacttttgtgtttgggactgggttcaggtccgagtgtgggttcgggtccttgtcagggttcgcgtccagggctgggtcccaaatccagacaccgacaacgggttttgtcgaagccctgggtctagatctggatccctatcacgggtcccaatctggttccatttctgaagtcagataacgagctgtgtcctaggttgaagttcgggtctggttcgggtactaggtctcggtcctagttctgtttcctaggtccctatcctgattcttggtccaggtcttggttattgtgtgggttttggtcccggtctaggttcttgtttgggtcctagtctcggttcgggtttaggtct

SEQ ID NO: 282309 - DNA, 37 bp, Cannabis indica
gacagtgcaccgtggcactaaactgtgatttttggac

SEQ ID NO: 282310 - DNA, 618 bp, Cannabis indica
aaggcaaagactttaaaagattacgacaatatgttatagtggatccaaacaaagattgcatgaccacattactttggagagcttgaacaaccacaagtgaatcggtttccaaaataacatgttcccatcctttcgtttttatccaactcaaagcttctttgacaccaaaagcctccactaaactgggttgaacacaacccggtttgtgcaaacaaaaagcttcaatgaaatggccattagcatcacgggcgagaccccctaagccgaaagaattagatgcagaaaatagagcaccatcaatgtttaccttcaaaaaaccagctgcaggtggcgtccaattgttgctgagattgctggtgtcgttgatgacagcaggaagtggagagaacctgtttgcagcagctgatttccattggttcaacacggttcttgctgagttgatcacttccacggctgtagtaacatttttattccaaagcaactcattccttgctttccaaacagcccaagacaccataagagcctcttccaacaccacggtttgaccattattcaaaattttctccacccaggtcccaaaatctgatgccacaaaagcaccagtaggcacacaagaca

SEQ ID NO: 282311 - DNA, 676 bp, Cannabis indica
atccagggtcaacaaagatgtattaagacctgaaagccatgttctagtggccaggcatgaagagtgaccttgttgagtatgttgttaaatgtcttatttgttagcaagtaaaggctgagtatcaggggcctgcagagttattgtagccattgaatataccagagtggaaatgggaagatattgctatggactttgtggtaggtttgcctagaaccacaggacaatttgactctgtgtgggtcatagtggacaggtttataaagtcagcgcacttcctacctgttcggacgaattttctccattaaccagtatgctgagttatatgtcagagaaattgttcgtcttcatggtgtcccaaagtaaattatttcagacagagattcgaagtttacatcaagattctgggagagtctacagcaagctatgggtactcagttaaagtttagcacgacatttcatcctcagacagatgggcaatccgagaggatgatccaaattttagacgacgtgctatgggcatgtgtgcttgactttgagggatcatgggtaaagtaccttcccctgatcgagttttcttataataacaactatcaggcaacaatcgggatggctccttatgaacttttatatggaagaaaatgtagatcacccatacactgggatgaagtgggtgaaa

SEQ ID NO: 282312 - DNA, 548 bp, Cannabis indica
ctttatgccaaattcaagaaatgtgaattctggttatctcaggtgtcctttctagggcatattgttagcaaggatgggatcaaggtggatccaggaaagatagaatccgtcagggattggccgagaccgaaaacagtgacagaagtcagaagcttcttgggtctagccggttattatcgtcggtttgtagaagggttttctaaaatctcaacacccttaaccgagctcaccaaaaagaatcagcggtttatatggtcagacaaatgtgaggctagctttcaggagctgaaacagaggttgattacagctccagtgctagctttgccttctgacaaagaaaagtttgtggtttattgtgatgcatccagacagggtctgggatgcgtactgatgcaagccgatcgggttatcgcttatgcctcccgtcagttaaaagattatgaacagcgatatccgactcatgatctagaattcgcagcagtggtgtttgctttgaaaatttggcggcattacctttatggagaaaaatgtgaaatttatactgacca

SEQ ID NO: 282313 - DNA, 822 bp, Cannabis indica
gtttgggttcgggatcgagactggggtgcgattctaggtcccaaccctagttctatgtccctagtctggttccatgtttgggtctgagttcaagttcgggtttgggtcccgagttcatgtttgggttgggatccaggtccggctcccaattcgggtataggtcagatttggagtccgggtcctaatccggttacagttctggatctaggtcaaatttcagttatgattcaaagtccaagtcctagttccagtcccggtcaactttcgatttaggttctaattttgggtcacaaggtacgggttcgggtcaggatttcagtgaaggtccagatcaggctccgagtgtgggttcgcgttatgggcttggtctaggttgggtccgagtcccaagttccactcctgatctgagtctggattcagttctgggtctaagtccttggttctgatccttgtctgggttcgagtttgtgtccaggtccgggtctagctttgtgtctgattctaggtgtgttttgagctcggctccgagtctgtgtccgggtttgtgtccaggtttggaccccgatctgagtctaggttcggttccaagtccaagttttggtcccgagtgcgggtccaagttttagtctgggtcaggatctcggtcttgatctaggtccagcatttcgatcccattctgtgtcttggtctgagtccagcttcgtatccggatcccgatctatgtcctagtctttgtttgggatcaggtcccagatttaggtccaggtctgggtcacaattccggtgtgggtacacgaccgtgtccgggcccgagttctagtc

SEQ ID NO: 282314 - DNA, 732 bp, Cannabis indica
gttcaggtttgggtccagaccctggctttgtgtccctagtctggttccatgtttgggtctgagttcaggttcaggtttgggtcccgagtccaggttgtggttgggatctggctccggctcccaattcgggtataggtctgatttggagtccgagtcctagtccggttacagttcttgatccaggtccaattttagttatgattccaagtcaaagtcctagttccagtcttggtcaactttggttttggttccaattttagatcacaaggtatgggtttgggtccaattttgggtttgggactgagttcaggtccgagtgtgggtttttgtcctcgtcagggttctggtccaaggcttggtcccaaatccaaacaccgactacgggtttgtccaagccctgggtccagatctggatcccaatctctcgtcccagtctggttccatttttagtgccggctcacgagctgggtcctatgttcaagtttgggtttgggtcgggtactcggtctcggtcctagttctatttcccaggtccctatcctaattctaggtctaggtcccggttattgtgtgggtttcaatcccggtctaggttaagtttcgagtcttagtctcagttaaggcataggtctctttctgggtttttatttgggttctggtttgggtttaggtcctagttcgcagtccttgtccaagtcttagttcggttctagttccatttgcgattctgag

SEQ ID NO: 282315 - DNA, 594 bp, Cannabis indica
gttgaatctaaactgctgactattactcatgtgtctacaggtgctcaactagctgatttgttcactaaggctctggatgctcacacctttgcccatcttcgcaactccattggagtgtgcactatctgatcctatgaaagttgcatcttacaagaggcaactgcctttggctgtggtaagttagtcaattttatatgtacaaggagttcatatatagtttggatcattgttgtatgtgattagggatgaatcctcagttaccccagttgaaaaagctacctttcatggatgcaatgggaagagctatccttgtacctttgagtgtctagaaaagtttgctcctttttgagtcactctcagagaaaaatccaaaggatgacggctacatctccctgaaagagtgaaagctttaactggttggcaaaacccagagagtgttgatttatcagaaaaagggaaatctttccatatttgactaaaaaaaaaaaaaaataaaaaaaacagacaaggggggaagtcaattatcctcttcaattcatattttttttagatgagtgaagtgccttgattcatctcttggtgcttcacatgagg

SEQ ID NO: 282316 - DNA, 552 bp, Cannabis indica
gtgctaatgcacagggcccacaaattaaaaaggcttaatatgactttttagaatttttttaaaaaagcttacaaaaatattgaaatttgagttaatttttataaaaatactgtcacatggaaagttttcaaaaatattgtgtttttataaaacactagtaaaacacaaagcaaaacaactcaaaataacagtaaaacaactaaaaacaccagtaaaaacttaacacattatactgcactatgaaatttataaaaaaatacagtaaaaaagtaaaaaaataccgattgacagtatttttgtaaaaaaatagtaaaaattaatataccatgtaaattttcttctttttttaaccccaatcttccactaatgtattatgccaaataaaaaaaaaaggtttttaccttaatttctttttctataatatttgtatattagcttgaagttttattagaaataacaataattttaataaaattgtttaagttttttggttgcttaattatgtaaaatatattttcataataatatttaaaaattatatttttttttatt

SEQ ID NO: 282317 - DNA, 735 bp, Cannabis indica
accgggatagcagggtatatgctcggagccccaccgtcgggtactgtcctgactgcggctccaccaatgagcggcatacaattactctgccactcccggatacagtcaggaccaggccttggcgcccgcatcgtcccattttggaaatccctcggggatgaatggacaagctccctcgcactctgctccaaccgccagcctggcaggtccttcccagggctcgaggagtaaacgatcctgcaaaggtagcacgcggacggaggagaaacgccaaaagagggggtacactccatagtacacccagtatacgaagttgacggactcccaagagcgtgtgtactttgctactaggaaaaatacgcactaccggaggccgcctcccctgtacaaggatagctcccggagggaccccaacaaatgatgcgagtaccacaacgacattgggcacagcaccaatgaatgcaaaaatctcaaggatgagattgaaaacctaatccgattggggcacctctatgagtggatcaagaattgggtgcctcaccttaatccgggtcaggcgacaggggttttgtcgcagggagcaccagggggtgcagcaggagtattggctccagttgctcctaccggagatgcccagcatatccccaatctgccaccccgacccaacgggagagtgtccataatctcaggaggaccccatattggaggaaccacccgcaaagaattgaagcggta

SEQ ID NO: 282318 - DNA, 693 bp, Cannabis indica
aagtttgacaatgctattctttcaaatggctttaggcataacaatggagacaagtgtttgtattcaaaaacttgtaaaaattatgtgataattgtttgcttatatgtggatgacatgttaatccttagtgataacatgaaaggaatagaagaaactaagaggtttctttcttcaacctttaaaatgaaagaccttggagaagtggatactattttgggtatcaaagttacaaggcatagtgggggttttgctttagggcaagcacactatattgagaaagtgttgaataagtttagccatctaaaggctaaagaggccaacacaccattcgatcatagtaaaccactagttaaaaatagtggtagagcagtggctcagttggagtatgcaagtgttatagggagctttatgtacgctgcccaatgtacaaggcccgatatatcatttgcggtgagtaaacttagtaggtttactagtaatccaagtgtggatcattggaaggcaatagggagagttttgggttatctaaagaaaaccaaaaacctatgccttcactactccaaatttccttcaattttagaaggatatactgatgcaagttggatagccaaccttggggataatttgtccacaactggttgggtatttaccctaggtggaggggcggtttcttgggggtccaagaaacaaact

SEQ ID NO: 282319 - DNA, 685 bp, Cannabis indica
aaccggtcgaccggttctgtgctggggacacaaaaatcatcccccttgattcaattcaatcccaaacttcaccaaactttccagtatacctgtacaatgtattcacaacattttccaaccaacaattcccagaaaaaaccactaaatcaaattatgccattaaagacctaaacttgagtttcaaaactcaagtttgcttaattcccataccatagctcaaaattgatatccagggcttaaaatcaactcaaaataaacttagaattcaactcctaagcaaacctaaacctaacagccattacttcacaagttcatgacctcaaactcaagaaaaagcttaaaaacataaactaatggtttaaagtttacctcaacttcaagaatgatcaaatccttagcttcaattcagcagaactccaagatttgagggtgattccctctgatttgtttcagccgaaagagagaaagagaggaagagagcttctatttgattttccttaattttctttctttttcttgatttttctttttctttaaatggaaaaagggtttaattaactaattcatgctgagtattcacttgctaggtgtcattcacctagggcagccacctatctcttaatcaaataaaatgactaaaatgccctttaacttaaaactagggtatttccaaaactaggggtaa

SEQ ID NO: 282320 - DNA, 593 bp, Cannabis indica
ggcttccacctcgacatacccccgggagtattcatccatggcatagttatgcttggctatccggagctcttgcctcgcctcatccccaggaaccggagtcagcacgatgttgggaggagcaggatgctcttccatgggagaaaccccaccatcaagaccatgggccggagtgtcagctctccgaggccgttgggctcttcctgggcaatcattttgcccttgcgcttgcgaatcagagcaatttcttgctcttcttcaccttcttcagcttccttaggaagagcccggagcccccctgcaccttctgcaacttcctcggaaaaaccccattataacaccctaactatcttaggcgtattacgtgatttttaaacatactgtgcagctcgttgctaatcaacgaggtttatggaaaaacgtgattaattaaaattttgcttcttaattaaacttataaaccatattacaaaagtctcgggatcccgatttataaaatcatttacaaaagtttaactgtataactgttacatcaaaataaaagtcgtctaacgaccagttacaaaaaaactcagccttgctgtcccgaggatcgt

SEQ ID NO: 282321 - DNA, 676 bp, Cannabis indica
tcaagttgtggcacgggctcacctgattaggtggcgcaatgatattatatatgatattgcattatgacacaggcttgcctgattaggcaatgcaaatatatgagcatatctatatctatacatatgactgattatattacctactattgaatgttatagtttaatcattttgtgataatgaaacgtataattagctatttaatgtatccttctttattacttttcttgctgagtctatgtgactcacgggtgctttgtggtgcaggtaagggcaaggcaaaattagaacaaccatgagatggcggtcttctccagcaatgtacatattgaccccaccagcctgcgtgttgagttgccaggaattgttttagactggttgtgtctgttgtattttgaattgtgttttaaattattgttgtatatcgtcttttggataaatcttttataacacgaatccccggaactcctttttactgccgttataatgtccgtttttagtgttttattttagtcaagttttgattatcctcacagtttttaataattaattaatatattagtattaaactagttttataaaatcacacacgtggcgttcctatagattagggcgttacaacttggtatcagaacagccatggtttaaaggtcctgaagactggtcgaatatgtacat

SEQ ID NO: 282322 - DNA, 571 bp, Cannabis indica
ctgatgtgccaactcttggtttcgcaggctgttcagactagatggacgccaggcggaataccaagagccagggaaattcagtagggtcaaatcagggtcagggagctcagtttcccccgcatgctaggggccgtggtagaggttccaggggcagggcccgtggtcggggtgacgataacccgccacaggctgcccaggctgcccaagccgatcaggaagcccggaattgggagactaggtttgctgaaatacaagccagaatagaggagcaagatcttgagattcagacattgaggcagcagggggctcctacagtgcctgtgccagaagctcctgtggcacccgcccctgctgctcaggccgagatagtggtaacggtaaacagaatggaacccttgtatgaaaggttccggaagcaaacacctccggttttttctgggacgcccggatgtcatgaaagccgaacagtggctaacagtgatcatcaagatactgaactttatgggtgtcaccggaaatgacagagtggtgtgtgccaccttccagttccaagaagacgctctagtctggt

SEQ ID NO: 282323 - DNA, 404 bp, Cannabis indica
gaggttattttgtatctttgattcacatgtaatatttatttgagtgtaatggtagtattgctcattgctatcttttatgttcatttttatttactttttattaaatgatatataggtttagttatgctctctctatgtatctaaaagttaataaaagtaatattaatgttcatttccttcaagataaatactaaaaattaatgtccaaagcaacccaacccaaaaaggtcaatactagcccatgaagcccatcatcaattttatctcttccaaagcatgtgatgcaatgatgataagtctaggtcatcatcaaccctatttccctcttccacactcaaccttcatccaaagagtagaagacaaaaaagaaatgataacaaaataatattaattttatttttgat

SEQ ID NO: 282324 - DNA, 598 bp, Cannabis indica
atcgtcgaaaacggagtcacgaaactacctcactctctctcactctccggcagccgcgagtgggcttcgtcccagcaggttgtcttcaacctccagcaacctccatggctgaaaaaatgggttttgtgcgacccggttcagacccgagcgggtcgggacgaaattccggccaaaaaagtgacgaaacggacgggaaaaagagggattttgattggtttacaatttctaatagatctatggtattaatttcatgcaacaacacataaacttaggtagatctaaattaaaactaatccaaaaactaaagaagcaaagtaacccgaaaatttgatccaattcggaaattaaacttttagaaacattttaaatcaatgattgatgagatatgcacaattaatttcagattataatcaatagaattgaaaaacacaaaattaatttcataaagaaaatatataaaccctaaaagtttatcttaaaattctcctaaatcactcaataattttatgcaaataatatatcaaaaaaagagaatttaatgaggaataaaacccctaaacttttaagattgaaaaacaaaaaattcaacataaaataa

SEQ ID NO: 282325 - DNA, 753 bp, Cannabis indica
cacatgcactgtcgtactttttatgggtcattttgagcagcctcaagtagggctgagcataaaatataaaaaaattgaataaaaatcgttcaaaccgacctgccgaacactattgaaatcgtaaccggcgaacggaaaactgaaaaaaactgttaacagttaaaaccgtcattcaacagtcaatttttttataataaattggtcgaaaaaactaaaaactggtcgttatacatatatattaatttattaattttttgctttaagtattgtagttaataatattatatataataataagggatattagcggctaaattacctaaactttacggtttgtaacagttaaccacaaaaactgaaattttgggagcaaaactacctaaactctggttccgttttgctctgtacacctccattaaaaaatcacaataaagtaccacggtggactatccacgtggcaaatttttagtggtccacataatattagttttaaaaaataattataaatatttaaaaaaaattaaaaattcgattttttttttttttttatttttttcttcttcttcttcttctttcttctttcctcttctttttctacagaaccctcccaggccaggccctctttctctctggtctcaccaccaaagccaaagcaccaggccagaggcaatctctttctctgtactgatcttctcctttttttttcttcttcttcttcttcttcttcttctttttcttcttctctctctctct

SEQ ID NO: 282326 - DNA, 655 bp, Cannabis indica
ttgttctcgcagatagaccagctcgacctgcacttgacgcaactcgcagagaaacagctgaaattctcgggagccttccggtacaagatcgcgactggcgattactgtgtacgactgccaagctgcgagaacaccagctgattccagagaacgcaagtcttcaaagagagccagtatacaaggaaccatccgagagacaacaagagcggatagacaaacgcctctccaagcaaacttctcgaccagtctcaggtaacatatcttatgtttataaactagtgccttgaaatttattcatacttatccttatttatcctcgcagagatgacttttttgaagtccgcgcccgtccttaaaatcaagccaaagagtggaacagcgacgacatcgcccgttattgcccagaagaggaagagcgatgttgtaactactcttgccgcagattcttccaagaagctggctaagaccacgcaggacaaggggaagaaagtcatgatcgagccaactatccgagcccgcgttttctggctatgcaggagaagttcgtgggtgaggaggttcatatccaaggcggagaagagtcctctgaggagcttgttccgcgttctgtggagttggcttcgcagtcgatgactctgttcatgaaagctgttgc

SEQ ID NO: 282327 - DNA, 607 bp, Cannabis indica
gaatgggagcgtatcttgattggttctgttcctattttcttgcccactaccgtctcagtgatggttacctctgcggaggaaactgaggcaacaccaacttctcaacctcggagaggtaggaaggcgacaaaagggaggaaggggacaaacacttcaccttcacccaaccgccaaggtcaacagggggtacctgctgagatcaatgaacgccctttatcagatgaagggtgtaggacgcctttctccttccaaaagaaggctagaagcgatagtgtaagggttcccaaagcaagccctaacgcattccgaagagaacatggtgactggatgtttctccagggctacccaccaacaagggtcacctcaactgctaagcttacctcctacacgggccctgtaactcgatcgagagctcgtgccatgcaggaatcagtgaatccctcttttcaaaaagttcaggaagaagagtgtacatctgaacactctttagaagacactccccttattgaacacagtgagggggtgtctgctgatctcattactcagttcgaagcactaacccttggcaattgataaaaatatgccagtgttagtaactgggacaatc

SEQ ID NO: 282328 - DNA, 455 bp, Cannabis indica
aatgtaaggtttcctaaactctatatgtgtttatttcattgttttagaattcatattaggatgtcaatgaaacatacttgttagtaaatctagatcctggtaaaatatatccaacagtcaactgcctcactcattctctgaacaccctcaggacccaagaactttctttaacctacttcatcccaatgaataggtgatctacgttttcttccatataaaagctcataaggggccatcccgattgttgcctgatgttgttattataagagaactcgatcaagggaaggtactttacccatgatccttcaaagtcaagcacacatgcccctagcatgtcttctaaaatttgaatagtcctctcggatttcccatccgtctaaggatgaaatgctgtgcagaactttaactgagtaccatagctcgatggaactctcctagaatctcgatgtaaactt

SEQ ID NO: 282329 - DNA, 578 bp, Cannabis indica
tcacaacactaataagtgatacgctaaatcacttcccggggacttaaactagaaactaaaagtttccctatcgataaaaagcatggcaataccccaaataacataaaaacgagaaaatctagggtttctgaaaatcactcgaccggcagaccggttgcccaactggaattctggttctgggaatttcagaaccccatccggaattccggatgcacaaccggaattccggttcctcgcagacaaaactcaaaaattcataacttcatcaattcgaacccaaagcatatcaaaccttccagaccagttctaaatacccctaagaacaaatccaaagcattaaaaccgagcttcaaccacataaactcaattcaccattggaggttcaagattgagttcaaaaactcaaaacttgactaatcctccaaacagccactaaatcatgcataactcaacatatttcaacatcatttaacaccagaaaacactactcaaccatagcagcaaccacagcaacgaaaatcaagaatttgctttgaaaaccatagcttttgtactaaaaattcacaaacttaaacaag

SEQ ID NO: 282330 - DNA, 659 bp, Cannabis indica
gtggcatcgacaagctggtcaatgctaggaagaggaaagctgtctttgggacaggctttgtttagatctgtaaagtcaacgcatgtgcgccatgagccattaggctttggcacgagtactgggttagctaaccagttggggtaaaatgactcccgtataaagccgcaggcaaggaggcggtcaacttcttctttcagcgcttggtacctcgcggggtccattttgcggcgcttttgtcggacacctcgcacttcggggtcaatgttcaagcgatgacacatgacctgtggagatatcccgaccatatctgaatgtttccaggcaaaaatatcaagattttgttttagaaaggtcgttaattgttctcgcaactgtatatttaatctagaaccaatttttaaaaccttgttattatctataggatctataggtacctcgattgtgtcttccgcggcttgggctgcggcggtgtgatcgaggattcttggatccaagtctggtttgtccatgtgcggtacctcctcgatcctgaggatctcctggcgaggtggtggtgcatccaaaaggtggataacatttaccgtccttttttctgcgagtttgacagctgcattataacattctcgagagtcggattggactccccgcaccgaacctac

SEQ ID NO: 282331 - DNA, 697 bp, Cannabis indica
gtttcttgaggagtgttaattataacattctattacaactttttagtaaacctccacacccaaaattagatatcgaaatattttttcaatttttttcatagtactattctttataattacagtatcatcctttaaaatttttgaaaaattcttaatagtttaccatatcaaaaacagaatttctgatatttcaatttattatgcatgtttaaaaaatttcaaaagtatatttagcacggtaaataattcgaaattttttaaaaaattacaaggatgatgttgtaagcatcacaaacacctccacacaaaaaaattgaaaaaaaaaaatatttcgatatgtattttcaaatacagaagttgactaaaaaattataataaaaagttgacattagtactcctctaatttttttataattaatttttattttattttgtgttagagagagagagctttttgaagttggactttagaacctccattaaaaaaaaaaaaaaaaaaaaaaaagtagccttagacccacgtgctctggaggaatcttagtacgagtaggtccagcaatttggattagtttacttattaatataatatggagtactaacaagaataatcgtttccttaattaatttggtttaacttcaaattcaatgttagtttattagagagaaacaagaaactttcggctcaaatttccttatt

SEQ ID NO: 282332 - DNA, 800 bp, Cannabis indica
acaaaaccaaaactcaataaaaaccttaatcaaatttctgataatcgactccaattctcacaatcgaacacaccctactttcccccagatcaaactagcttaaccatctctaaaacaccctgaatttcactccgaaagacaccccgaatcagatcggacttgaggagaaaaacccaaaatttccccttactgtgaaaaacggtcggccgtttttctgggtgccagaaaaacggcctacctttttttcctggcagccatgaaattttctggtttttcaccccaaaaaccaatcaaacctccaccaaacctgctcaaaccttccaaaacagtataatatagtaaacatgacataacccaacaaccaattcattgcaatatatcaatttgctcaaaatcacacttcaaagtgaagaaaactcaactttggtttcaacaaaccaaaaccaattcaagcagccatggagaccacttaaaaccattcccaacatgctcaaaaacctaccctaaacacaccccaaacctagtttaagtcctacagcaacaaagaagtaaaaccctacttcaaaactaactcaaaactaggattttcaatccaaaaattgttgagaacttaccttgattgcttctaggttggacttaggttctacaagctgcttcaattcaagtgaaatggtgaactttcaatcctcttgctggctggtcttggttcacacgaaggggagaagaagaagaaacttagtttcttgccttggaagctattccctttaaataaggtttcatgcatttcatttcatttcatt

SEQ ID NO: 282333 - DNA, 703 bp, Cannabis indica
agatttgagagaaaaatattctaatatctaatatttttccttttttttttttgctcttaacaattttagcttttgacaaatccatagtcattttcttctcgggcactatagggcctagaaacaccatctcttttcagcagggctggactttgtgagttttcctcttagtttctcattagatgacactccaacatacttatactattgcccataatataagtcgtaattggattgtagtatcctttgcttacgttgtgccttgaattcctttatgttgcatgagtgtattttctaatcccaacacttatcaaaaacttgtatagtccttgacatgccatgacattcttcaatatatgttactttggtcctaattgtgtctcacttttctcctgtctctaagtgaggctttcctaacattttctcattgagctatactccacaccattgttgttgtatcagtgagtatttggaatctagggatgtcacccttgaatgctaattcctcctctttctcaagttttgaatttgcgatctactctctatagttgtttgttgtacacccgccacaaagctgcatccacaatctcttagttgtgtagttgtgatcaattccgagtagtcaccctcttagttgtctctcattcatgttgtacccaaattgttagccgtgcctggactttttttgtctttctcctttgaaaat

SEQ ID NO: 282334 - DNA, 542 bp, Cannabis indica
agtattttcttaaatgttcctcattccaataccgtggtactagaacaagttgcattttttcgtcatacttacctaatttgtatgctccggattcgagaactttgatcacttgatatggtccttcccaattaggtccaagtacacctgccgtacttttttagtgtctaggaatacccttctcaggaccatatctcccacgaagaatttctgagccttcacttgtttgttgaaatatcgagctacttttgttgatgggccatcaacttcaagtttgcagtggctcgtctctcttcaatttcatcaagtgattctgctaggagtatgtgattggtatcttgattgtacatcaatcttctgtgggaaggtggctcgagttctacgggcagcaaagcttcatatccgtacgccatagcaaatggtgtctatccggttgtcgttttctcagttgtccgatatgaccatataacttcaggaacctcttctagccaatttcctttggcatcttcgagttttttctttagtgtatcattcaaggtcttgtt

SEQ ID NO: 282335 - DNA, 898 bp, Cannabis indica
cgtagatttggaccgagatcctgacccagacccaaacttgacacgcactcaggaccccaacttggacatggacccgaacctagacgaagatcgaggttcaaacctggacacagactcggactcggacccgaactcaaactcacacctagaatcagacccaaagctagacccggacccaaactcaaacccagacaaggatcagaaccaaggacttacaccctgaactaaatcctgactcagatcgggattggaatttaggactcggacccaacctagaccaagacccaggatgcgaacccacacccggagctgatctggacctagactgaaatctggacccgaacccaaactcagaccaggactcgaactccgacccgaactcaaaccctaactcgaactcagaatggcaaatggaactagaaccgaactaggactaggaccaggaccaggacctaaacccaaacccgaacccaggtcaaaacccagacagagacctaaacccgaccgagactaggactcaaacccgaaccgagaccgggaccctaacccacacaataaccgggacttggacccagaatcatgatagggaactgggaaacagaactaggaccgggaccaagtaccggacccagacccgaacttgaacctcggacccagctagtgacccggcaccagaattggtaccagactgtgacccgagattgggatccagatctggacccagggcttggacaaaactcgtagtcggtggacccgaaccctgacaaggaaccaaacccacactcggacctgaaccgagtcccaaacccaaaagtggacccaaacctgtaccgtgtgaccaaaaattggaactaaaaccggtagttgactgggactggaactaggactttgatttgga

SEQ ID NO: 282336 - DNA, 945 bp, Cannabis indica
ggcaagattcacaaactggtaattcaccccatgtgacatttttcaatagaccacctttggttaatttgtaaagtctatcatagcctatatgacctagttgtaaatgtcatagatatgttttatcattattatcaatctccttccttttatggtttctaggtttagcgatattaaaaagttcgttattaagcgcaactggtatattcggtcttaaaacataaagtccttgttccatgtgagcaacacataattgaatgccatgacaagaaataatggaaatagaactcaaaaaattcaactgataaaattgtgtttgtaaacatgaaacactaatcaagtttctactaaaatttagaataaacaaaacattgtctaaaagcaaaaatttattctaaaacttgaggcgagcttttcccctggcttggaccgagcttcaactcccctggatttaagtaatcccaagtttcaagcagctgcaatgaagaacaaacatggtttgtagatctagaatcaacaatccaaattgatttgtcattttctaaaacacatgattcaaaaactaaagtgttaccttcgttccaatggtttacaagtctggaacatcttgatttcaaatgtcccttctctctacagtgagaacatagaagagtatgtctgctctgttgttctttaattgtttcaatttctggttccatttcgattctagctctcaaaattgaactcaaagaagcaacattatcggaggtgtcatcctcaatatcttcaggtttccttttacctttatctgtaatattggagagagccctccttgcaagcagcaaagtccgttcataggcacgcagtttagcgtcttgcttgcctatgtcgaatgagttaaagttgatcatgtatgatacaacgaatctattatactcaggtggaaggctgttgagagtgaattgaacc

SEQ ID NO: 282337 - DNA, 432 bp, Cannabis indica
gttgttcttgctgctgtgatttatggtgatttacagagatttaatcttgttgttttaagtagattagagttagtgtaatgcatgataatttctttgatttcaagattgaaagtttttagctcaaagttgagttttcaaaagtgaaattgtgagttttgttgctgtgtttgttgaggtcgatttcttgtgttttcagaagcttttatatgcatgtttaagtaggtttgatctgatttggatgcatgttagttggatttaaccaagtttgagttttggaactcaaagcttgggctttaatggcatttttgatttatgggtgttctgggctgtgtagttgctttagaaatgttatttgggtcatttagaacaggtatggatgttttggcattgtttggattggatttgagctttgtgtgaatttttgaaaaattc

SEQ ID NO: 282338 - DNA, 597 bp, Cannabis indica
cataattaatttatagtactctaaacggggcattacagaaatctacatcgatcaacccgaagggttcgtgatccctggccaggaacataaggtttgcaagttggataaatctctgtacggtctaaagcaagcacctaaacagtggcatgaaaaaatcgacactttagtcatttcaaatggctttaaagtgaacgaaagtgacaagtgcatctattacaaatctgaaaatgacatatgcacaatcatatgtctatatgttgatgacttgctaatttttggctctaactttcatgctgttaacactgtaaaatcaatattgtgttccaactttgatatgaaagacctcggagaagcgagtgtaatccttggaataaagattactaggtctgataagggaatttctctagatcaatctcactaccactacaacattcaacagtaatagcggcagacacctccgccgctattagagtcatttctggacgctaaagggcaatagcggcggacctcggccgctattggtccgccgctattgcttggccgctattagtagtattagcggccaaaaatggggtccgccgctaatactattaatag

SEQ ID NO: 282339 - DNA, 529 bp, Cannabis indica
cgttaatggcgtttttcatttaagggctcgatttttatttatgttacgtaaggataataatatttatagtatatatgcgccttgtgaagtatggagtgatttggatatattttggtagtgtttcggtgagtgcgaaaattgagattttagattttcgagtttcatagtttttagaaattcctaggatatcagaaatcgtatttttgtcataacttttgactcgggtgtctgttttggacgttctatataccgtttcgaatcttgcaacgagttctacaatatgatttatgttttagagccaaaatataagtttaattttagtgtatttataccgtgggatttggtagaaaaccctagattgtcttatgtgaatattaagtagtgttttgggataaacagttcttggtttaccgttgttgtgacatagggccgagattatcgaggatatttctccacttgggttggccaaaatgtatgaacctggattaaaggtaagaaaagtatattgtactgcatagtacgttgtatg

SEQ ID NO: 282340 - DNA, 542 bp, Cannabis indica
tgagtggaagtgcagctcgacgtttaacagggccctaaaccattatgttcaaaaaccgatgagagactcgctaaaacacttatcggggatttaaaatacaaactaagcttaaccctatcgataaaaaggatgccaatactctaaattacttaaaaacgggaaaaactagggctcgggaaaaagccccaaccggcaggccggttcccaaccggaagtccggttcctgggaccaaccggtcgaccggttgcaacagggccccaggaaccggaattccggttctgagctgggaacccaaaaattcttccccttaattcaaaacaatcccaaatcttttcaaaacttccagaatacctgtatacattattttaaaccaatcccaagcagcaaaacacaacaattcacacaaattctcaaatcaccattagagctccaacttgagctctcaaactaaatttccatcccaacttcaaaataactaactaactcagccctaaacactcaaagcaatcaatacctaactccagaaaagagaacaaaccaa

SEQ ID NO: 282341 - DNA, 534 bp, Cannabis indica
ttttattattaataattactttttcttctgttgttttttttattttttgcaggagccttacgtagttgatcttgatgattagaaagtacattgttctttttagtatatgagtgaggacatggatgagaacaaattgtagtgtttagtacttatggttgctagttattatatttgagtttatggttggtagttattattgatgtattaaatattgttagtaacaaaagtacaatctcaagctttcctctattatgcataattgaatcactcatttattcattataacaaaaatgcaattattcattgaaaaccttagtttccaaccttatctattattaaagtaaaattgaaaaaaaaatattaccatcacacccttataattctcttcattaaaaataaattgacttacataattattataatattgattttaaaacataatcaaacaacataatagttctcccattacccatgactcaaaacaagacaaaaccaaagaaaaaagaaatcccttttaataaggcatgtcatatt

SEQ ID NO: 282342 - DNA, 685 bp, Cannabis indica
attcttataaaagtaggttaaagaaagcataccttataccaaaaattatgtacttgtcttccgataaagtcacttccgataaaatcctaacaaccaagtttaagagaaattaaaatcaaatattatcctaattttactgaaatttcggcagcataacgactataattgaacgtttccgaaaaattcaaacctattaataacaacaaaacacaattcaaaacaatatgaaataatcacaacaacatttagcaatataaaaatttaccacccattcgactgcagtacatgtattcacagaacctacttcactaaggatgaatattgaagatattcaaactcatctaacatgcatattatttcacccatcgatccggcgcattacaatatattacagaacctacttcactacggatgaatatttaagatattcaaactctactaagcattcataattaatttataataaaatttagtgagtgtatacctcgagctaactagaaaccgatcaataccaaataagtcagatccttgcaaattgacctcacaacctacaacataaagaaatactacaaaattacaaatttttttatttagctacttactagttatataatttatgagtatttagttactaactagttaatttattactaactagttagtaataaaaatacatgaatagaat

SEQ ID NO: 282343 - DNA, 726 bp, Cannabis indica
ggtaaatattgtagtagtttttacctcattcagttgcagatttttcgtcaactctgaaatttagatgttagtcactatttcgtgtaatccaacaaaagattttggagaagattcatatctcaagcagtttgctattgcgtttttaatttctgtttcgttactctccgcccttaaaatagagtaagtatgataatcattataaatatagtatacaaaaatttaattttttgtaaaatgtgtagctataatagtatgtgtatttaattttatgagtattaccattctttcagtaatgcctcgcagagttgaggattgattttgtaggcctcagagtgtaccgagtccaccccaagcgaataaatcttaaccccagcttcaagagtgcaacttgcctgtaaaaataaaatgtataccattacatgcgcacacataagagtatcagattttcacagccaactgatttcaagacattatttttttaaaaaaaaattattgtggccctcctaatatatttgagtctggcgtacgtatgaacaaacttaatgagccaaattttaagggtttaacatgactagaaccttataaaacaaaattgtctttcaaaaactatgaaattggaacagtggggcaaatcttcccacaaattttgtattccctgcttgtcttattaccctgccttcgtgttattgaacaaataagaatctgtatgatcatcacaaaaaacac

SEQ ID NO: 282344 - DNA, 532 bp, Cannabis indica
atagtagcagggaggaataacttccccttcccccggtgtgcacaatcagcaatctcttgggcaaggacagcccctacgtcaacatcccaacccattctaaggcaatagagcatccaggcgcggtctctgctgacggtcgaatcatgtgaggtggggcagagggcagtttgcacgaatgtataccaacatttcaactcgtgctccaagtcagtgcgccgaaatcgaagatttccataattatcgaaaccccattcggaccctggcttggcgagcaccggcatcatgtcacccacagtctcgtcgctcacttgccctttttgcgcggagtattggcactcgacagagtttaacccaaacaggttgttgattgctgcagctgaaaatgagactgggacttcacgcaccaccactacagtgggccattcttgggataagaagttggcgtaaaattccttgacaacttccatgaccgccggctctctttgctggacaaaaagtccccaatctcgcttatgaaccgttgcactgaccc

SEQ ID NO: 282345 - DNA, 860 bp, Cannabis indica
tagggttttcaaatcctgttacattttttgtggttcccggatgcaatgaataaggtgtggtatgagcttcatctagtatctctttcttaagctcatcaacattaggaacacaaacacgagctttgtataacaacattccattgattgagactgaaaagtctttaggccgaccagctattacttcatctcgaacattaactagctcaggatcttctagttgtgcctttatgattctctccaacagatcagattagagtgtcaaattatgcaatttcccaaccacaaactcaatccctgcactaaccatttcagaagctagttgaggggctatcataaccgtggtacaaacctacccgggaccttttctgcttaaagcatcagccacaacattagctttcccgggatgatacaaaatttcacagtcgtaatccttaaccaactcaaaccaccttctctgcctcatattcaaatccttctgggtgaaaaagtatttgagactcttatgatctgtataaatctcacacttttcaccgtaaagataatgtcgccatatctttaaagcaaaaaccacagcagcgagctctaaatcatgagttggataacgctgctcataatctttcagttgacgagaggcataggctatgactctgtcagcttgcatcagaacacatcccagaccctgtctggatgcatcacaataaaccacaaatttctcttgatctgatggcaaagctaacaccggagctgttatcaaacgttgcttcaactcctgaaagcttgtttcacacttatctgaccacacaaatctctgatttttcttggtcaattcggttaggggcatagaaagtttagaaaatcct

SEQ ID NO: 282346 - DNA, 1129 bp, Cannabis indica
cttgtaaatccatttgcatctcgaaatacttgagatgggagagaggatcttctctcccaatgtacatcttccacgttggcatcttgaacttgtgaggtagtggcaggaggttgatttctggtgagaagggagttccgcgtgcacggtctaactcaagatcgttgttacgttgtccggccatgccgtgaaaacatattcttcagttcgtcaagctgggcctgtacggctgggctgacttgattggcattctggtcgggttgggccacgtcagcgtctttctgagcggggatttgagtatgggctccggactgcatgttcgttgtagtattctgctcgtctgttccccttcttctgtttaggtcgtcccttaggtcatgggttgttcccaacctatcgaacatagaagaacctagctgccttagcgattggttcgcttggttggcaggtggaatgggtccattattttgcgtggatctgtcgagcatgactcctcttgatgaattcccggacaaggtctgtccacctacctcttggcccacgagtggagctcgtgaccggggattggacggctgaccgttggttgtctaggaagcattcaccgtcgggtcatcctcagtttctccatggggaataacgctcggcgcctgctggcctacagtctgataggctcttcgtatcagcacagtggcttgccaactacgatcttcgatttctgcatggtgatcccttaatgcctccatctctttgtccctccatttggcgaacatacacctctgttcgtcaaacgcgaggtttctgtggcacgtaattcttcctgatcgtgatgcagggtattgttgtgaccctgcatgagtccaagcgcagcgcagaggttttgcaattcggttgcatcttcgatggtcgtctgggcgttgatgcttggtgggacagtcaagttaggaatgtcctggctgtgtgcggaaccgttgtttccggtctcttgcacaccaggcacagcttgagtaataggagttgtcccatcattcaccacgcttcccgtccgtccaggattgacagcgggtggaatcctcgaactccctaggtcctgcaacgtcggatccaacgtctatgagtttgctgggtcggacag

SEQ ID NO: 282347 - DNA, 593 bp, Cannabis indica
aaaaatacaatgaaaagaagtaactcaaacacaaaagaaaaggaggaatctaacgcgttgcacagaaactcaaaatagaaattcccagaaattcaacattcaacctagaaaaatcaggtgaacagtaaagcatgctatgtaaacaacagataaactagagtacaagatgcgaagaacttacataaggcttgggaactgggtgttggtgttgatcgctggtaaaaagacgattggcaacgacgaaggaaaatgagtaagaaatctatggtgtttgagggtttcttttctctctgaaaaacttgagaaaatttggtgaaatgctgaaagtaaccaaatgaagtgagaaggttggcttttataggccaaagcatatgtggaacagctgtgatcagctaccatcgaacggatgggaaagcaatcgattcgcattctatagatccaacagttggattgaatcgtcatcaaggcggtagaaaagcttgagtgcccgtatgacacccattaatgcgacgtatcaataaatggacaagaaacgaatcgacgcctgcgaaagtgaataactgcagtaatgatggtcattaaatacaccatca

SEQ ID NO: 282348 - DNA, 506 bp, Cannabis indica
cacaagccataggtttagataaactcaaacctataatcactacaagaaaagggcttttgccggcgcatttcgtgacatgcgccggcaaaagttgtcgacacaaacaaatgtatggactcccaattttattttgggtttacttttgccaacgcatatttgcgccggtaaaacatatctataccggcgatgtcaagttaaatgcgccggaatgcaccggtaaagcatatctataccggcgatgtcaagttaaatgcgccggtaaaacgtgaaaatattaggcgagaaatttccgcctttgatttcatttttggggcgcatttatactttttaccggcgcatatgtgcgccggcaaaagtaaccaaaaatattggagggaaaattcccgcgtgggttttatgtggtaggtgggaccacttttgccggcacaattatgcgccggcaaaagtgttaagtgaaacgctcattttgccttaggttagaattaatttttttaaatacttttacc

SEQ ID NO: 282349 - DNA, 551 bp, Cannabis indica
tggtatttttaaaatcaaattatcccaataatccaatcaatatgtctaaataaaactgttgtgacatttttggcctccaatcgggtctccagggtcgccaaacttgaaaatatttttattccacatatagctcatattacattcacacatgctatataaatctctgtaattaaaaaattacgattatttactcacttatagaaaaatttaaattttatgctaaaataaattagtaggatcataatcccacttattacctgattaactcataataaacatgtaaatcctaattagttaccattagacttatcgggatattacaaccatcccctccttatagaaatttcctcctcgaaatttatttaaataattcgggatattaccccatatttatgattctaactctcaaattgttgtttctaccttgctatatatatatatatatatttacagcaatttcttaactagtggaactgtcccattttatagtacctcctctttctagtcctaaacatggacaagatatttttcccatataataaatttgtctg

SEQ ID NO: 282350 - DNA, 589 bp, Cannabis indica
taggttgttaatccaacatacttgttagtgaatctagatcctggtaaaataatttccaacaattagtagtatgttcttaaatgttccccattccaataccatggtactagaacgagttgcattttttcatcatacttacctaatttgtatgctctgaattcaagaacttcgaccacttgatatggtccttcccaattaggtccaagtacacctaccgtactgtctttggtgtttaggaatacccttctcaggaccatatctcccacgaagaatttccgagcgttcacttgtttattgaaatatcgagctactttttgttgatgggccatcaacttcaggtttgcagtggctcgtcttccttcgatttcatcgagtgattcggctaggagtacgtgattggtatcttggttgtacatcaatcttctgtgggatggtggcttgagttctacaggcagcatagcttcatattcgaatgccatagcgaatggtgtctgtccggttgtcgttttctcagttgtccgatatgaccatagagcttcaggaagctcttctggccaatttcctttagcatcttcaagttttttcttca

SEQ ID NO: 282351 - DNA, 1045 bp, Cannabis indica
aggaaaattataatttaaagattgagttattttatataggtgccgtttggtaacacttttgttttttaattttttaatcacaaaatgaaagtaaaatttttgtttttaaaaaatttgtttttgaaaaacaaaaatgcgttctgtaaccacttttgtttttcaattttaaaaacagaaaacaaaagtgtgttctataaagtttatttttatttttattttttgattttatttaagtcgggtctaggtccggggtcggattcgggttcaagtcaaaagtcgggtttagcgccagggccgtagggaggggatttgggtccgggtctggtcctaatctaaaagattgattaagaaaaaaactgtttaaaaaaatattgaaagtgatttcttttttagtttttaaaattttgatttctaattataaaattgaaaagtaaaaacagttttatagaacatgtttttgaaaaatattttcacttttctacttttaaaaacagaaaactgattaaaaataaagtgttaccaaacgccaccatagcttatctattaacagtactcttagttaaatatagctacaactattattcatgagttaaaactattttatatatttttttgatgtcatatgcttttatcttttctttaaaaaaattaatattttagttgattattattgttattttcataatattaaattaataaaaaagtttaaaaaaataatatttttattggaatttttttattttactactttaataatttttttttttgtgaattttttactaaaaatctatatagaaatcttcataacaactaacagactaacttaaatcacaataaaaattcacataacaacacacataaaaactactaaaaaaacttaaactgcaaatttaaaaaaaaaaattaaaaaatagtacatgaaataatttctctaatatttaaataatgtaaagaaaagtaatagagaatctcatatatagagtaacataaatgacgtggttaaataaaaaaacaataaatagatggaaaaataaaaaaaaaaaat

SEQ ID NO: 282352 - DNA, 669 bp, Cannabis indica
ttttgccagtacatttttgtgctggcaaaagttggtattgcactggtaaaatagaatttacttgtgatgtgttggcaaaaggaggttggcaaatcaatgttggtattagaacttttgccagcataaaatgaaaagcgctggcaaaaatgatttttcctagtgcgtaaatacgctggtaaaagttagattttagccactgcaaatgtacgctggtaaaactttgactactttgccaacgcagtttgcgaaatgcgctgggaaaagttacttttgccagcgcggtagcgaattgtgctggtaaaagagacatttcttgtagtgaataccattttagaccctgtatttaacaaaagttactaattggaccatctattttgttaaaggacaaaatggaccctgtattttctaaaatggtacagataggaccctgagcttaatttttgacaacttttttttaatataacaaacttaaaaatacgaacagatacaaaaaatataaacaattttgtcataacacttttagatcggattattattaaatttattttgacaaaaaaatcagttcagggtcctatgtttaccattttagaaaatgcaaggtctattttgtcatttaacaaaaacagagggtccaaacggtaacttttgctaaaacacagagtccaaaat

SEQ ID NO: 282353 - DNA, 689 bp, Cannabis indica
atcacaatcaccagcatgtctgcatctgtgtacccatcaagcataggttcaccactaccaaagcataagcacaacctggaagtacctcgtagatatctcaatatccatttcactgcttcccaatgatccttaccaggattagagaggaatcggctaacaactccaactgcatgagcaatatctggcctcgtacaaaccatagcatacatcaaactgccaactgcagatgagtaaggtattgaagccatttcttgtttatccttctcacttgtaggacattgtttggagcttagcttgaaatggcctgcaagtggagaactaactgctttagctttgctcatgttaaatctttcaagaactttttcaacataagcttcttgagataaccaaagtttcccattcttcctgtcacgagaaatcctcattccaagtatctgtttcgccgatcctaagtctttcatagcaaaagacttgctcaactcttcctttagcttctcaatctttctgacatcatggccaacaatcaacatatcatcaacatacagcaggagaataatgaaatcatcattagaaaacttctttgtaaacacacaatgatcagaagtagttctggtatatccatggctcgacatgaaggaatcaaacttcttgtaccactgtctaggtgcctgtttgagtccatataagct

SEQ ID NO: 282354 - DNA, 523 bp, Cannabis indica
tataaataatttcataaataaacataaacaactgctgatttccaaattaactaagcgggctttacaaaaaggttctccgaatcaaagaagattcaagttaaggtattgattcctagctttcctatgttgattttagtaagtataggttaggttttacatgtgaatttaggttctaggttgctgtgtgatttgaaatggtataatttggtattctgaaaatgggttgaggttgtttaagcttatttgaattgaaattattggttgatttgaggtttgagcaaagttagagtttaagaactcaaacctagctctctaatggtgatttgagaatttgtgtggattgttgtgatttgctgcttgggattggtttagaataatgtgtacaggtattctggaagttattacagagttttgggattgaattgtgaagtgggggtcggttttgaggttcccagctatgaaccggtcgaccggttctgggaagcctctagcaaccggtcgaccggttggtacccaggaactg

SEQ ID NO: 282355 - DNA, 608 bp, Cannabis indica
tcaccctggtaaagccaacgtggttgctgatgccttgagcagaaatggtcaaagtcagataaacactgtgaaacaaatctctcagcagctagcaaatgagatgaccaaagctaagattgagttagttgtggggcagttggctaatgttaccctataatctactcttttagagcgaatcaaagaaatacaaatgcaagatctagagttggtaaaaacccgagatagggtttcgacagggaaggctagtgatttttcagtggatgtaacaagaatgttacgattcggagatcgtgtttgtgtgcctttggatgatggtattaaaagggagatcatggatgagtctcatacgactccttactcagttcatccagggtcaacgaagatgtaccaagacctgaaagccatgttctggtggctaggcatgagaaatgacattgctgagtatgttgctaagtgtcttacctgtcagcaagtaaaggctgaacatcagaggcctgcagggttactgcaaccattgaacataccagagtggaaattggaagatgttgctatggacttcgtggtaggtttgcctagaacattgggacagtttgactctgtgtgggtca

SEQ ID NO: 282356 - DNA, 734 bp, Cannabis indica
  modified_base (671)..(671): a, c, t, g, unknown or other
accaactaactaactaacataaccgaaagttagttaagttagttggtttaaggagttggataataagttggtttagaggatcaatttccacaaatttccaccttgattctctaaagcaacctaccagaatcttttcactgaagtcttgatgatgtgatatctcgaaatgttcagcaagaaccaatgttcagcaaactgagacaatgcatcagtttactgaatgtgagaacctttgttcccatgtcagcagggttgtcacttgtgtgcaccttttccaattccagaaccctgtcctcaatcttctctcgaatccaatacaatctaatgtcaatgtgcttgcttttctcatggtatacaggattcttgcacaagtgaatagatgacagactatccgaatagactgtccctttgtctttgagcagtagcagctcttgcagtattccttgtaaccatatagcttccttgaatgcttcagtggtggccatgaattctgattcagtagttgacagtgccaccactggttgttgttgtgatttccaacatatgcagcttttgttaaccatgaatacataggcagtggtgctccttctattgtccctatttgatgcataatcagcatcaacatagccttctaacctcacatcagatgtgtctttctgatgatcaaaccntacttgattgccctttcaagtatctaatcagccactttacagcattccaatgctctaacccag

SEQ ID NO: 282357 - DNA, 572 bp, Cannabis indica
gagagtccatgaaatggatgttgcacgtggccattaacggtgcacaagcgagatctaatgaggtctcaagtgaactctagcaaagatgtgtgtgttatcaccgatttgtattaaaggaatagtggttcaatgctacggcaaccaaaatttcaacaaactttgtggtaactacactaaggtaaaattcaagtcgaaaaacattttactttatgcatctaagcaagatctctataaaagtgtttgatttattcaatcaaagtgggggatatatgtaatatttgattgattaaataatgttacaatggtgtgtcacaaattttaatctagtgggggaatgttatattatttgatataatataatatagattaaaatatttaaatgtgagaaattatatattaataggagattaatatatattatgtgttggaggttatattatatcatatatagtataataatacacataaaattgtaacatatgatgagttacaaatctaaaaatagattgtaacttaaggatcacaattgataaatatgtaattatgtgagttgttacatattggagttatgg

SEQ ID NO: 282358 - DNA, 655 bp, Cannabis indica
tctcgattcccacagacggcgctaaatgttgtcgagtgaatttcacaacaccagattatatgatattattagtaacaagaagaaatttacgtgaagaacaagtgcgagtattcaacctagaatggcgagtactcaaactgggaatgagaaatgattaacaaaaagctgaaaataacaaagagacaaagaattatagtggttcagtcagatcacggtctgcttagtccactgtagcaagagtttcgtaggtgccatttcacggtggatcactcctttatatacaaagcaggtgtccgattagttacacaaggatagcattcattgccaatccgtttttacacattgaattacaataattaactaaacaacattaacattaataaatgaactgcagttactaagttcatcaacgtatgcgtcttccaaatctgcgagttgactgttcatattctgatgataaactcgcgggtttatcatcatgtttaggatgcctgcgtccttagataatcgccttttccgaacgttgcatgatgggctgataggacccaaacatgcaagtctatattggcttatcaaggccgcagggttctcaggacaaactcgcattcacagagagttggtctcctggtttatacacggacacggggaggatact

SEQ ID NO: 282359 - DNA, 944 bp, Cannabis indica
actcctgccaagatctggaagaaacttgaagagcagtttcaacaaaaatccctaactaacaagatctacctaaaagaaaggatctttgggtttaagatgagtcacactaaaaccctagatcagaatcttgatgagtttctcagaatgcacattgaattggcaaattcaggagagaatgaagctctaagtgatgaaaatcaggcaataatcattttgaattcattgcctgattcatacagagaggtaaagacagcaatcaagtatggaaggacttcaatcacacttgatgaagtcatctcagccctaaaatctaaagacttagagatgaagagtgaaaaatccaattctggacatggtgaaatgaacctaagtagaggaaggccatctcacaagaaatcctaccagaacaggggtagaagtaatagtgcacatcatcatagaaactcaaacaaaggaaagagtagatcaccatcaagagattctggtgattctacaggttgtttctattgtggaaagactggacactacaagaaagactgctacttctacaataataaatacaagaacaagaaaggtggaaggtttccagaaagatcagatcaaaacagacagcaaaatgacaagcaacaagaagcaaactactcagatggctatgatagtggtgaagtctatgttgcatctacatctttcaaagatgactggattttggattctgggtgtacttttcacatgacaaactctagggaaatcctaactgattacagaaattctaatggtggcaaagtaattctgggaaataacaacacatgcaatatagaaggttcaggtaatgtaaatttcaaaatgtttgatgggattgtcagaaccctaactggtgtaaggtatgtccctaatcttgctagaaatttaatttctataagtgttctagatgacatgggtattgt

SEQ ID NO: 282360 - DNA, 514 bp, Cannabis indica
aacatgccttggctcggcactcaccaggatgatgcttcttgcatttagaacattctggatatgatcggaatgaggacccgcgaccctgacggccacctctgtttccccgaaactttctatttccccctgaagctccggaagcctcagccttccgtttgtgctcagggttgctactgtcggtccccttactgacattaccaccagcaggagggtttgatgccatggaggcatcctttgcagcctgctccttcattacttgctgctcggcctcctcagcaattgatgacattaccaccatcagaaatcttacattgggtgcagcggaatatatgtctcctcccactcagatctctaacccttgattcctttctgtcgcagagtataatcaagatctgagcctgatagtccttctttgttgtttctgaattctacatagccttcctcactatgattgaggacttatagatttcgaaacagtgaaggaatagagagagagagggtggcggctcagaga

SEQ ID NO: 282361 - DNA, 507 bp, Cannabis indica
gaccaggaactaaacccaaacccgaacccagataaaaacccagacagtgacgtaaacctgaaccgacactaggactcgaacccgaacctagaccaggaccaaaacccacacaataaccgggacctgcacccagaatcaggatatggacctgggaaacaaaactatgaccaggacctagtacccgacccagactcgaacttgaacctatgacccagctcgtgcccggcaccagaaatggaacaagactgcgacctgagattgggattcggatctggacccagggcttggacaaacccgtagtcggtgtttggatttgggacccagccctggacccgaaaccttacaaggacccgaacccacacccggacctgaaccaagtcccaaacaaaaaagtggacccgaacctgtaccatggaacccaaaatttgaaccaaaatgagtagttgatcgagactggaactaggacttggacttggaataataactgaaatttgacctagatccaga

SEQ ID NO: 282362 - DNA, 680 bp, Cannabis indica
taatcacaattaactaccataagaattcactacaacttattatcgacaacctatcgacatatagtcgacaaattgtcgacataatcacaattaactaccataagaattcactacaacttattatcgacaacctatcgacatacagtcgacaaactgtcgacataatcacaattaactaccataagaattcactacaacttattatcgacaacctatcgacatacagtcgacaaactgtcgacataatcacgattaactaccataagaattcactacaacttattatcgacaacctatcgacatacagtcgacaaattgtcgacattgcatgtcaaaactacataacaacaaacaaggtgaaaccatcgactaaatgtcaacatgatatcgacaacctgtcgacaataatgttcaaacacacaaacagaacaacacatatatcgatatcctatcgacatttcatcgataaccctgtaaaaacacacaaacaccattgaaacatatccaacatatacaacatgcaataattgacatccagattcgcatatacaatctaaaacaatgttatctgaagaacatacacaaattcgcatccaaaatctatgaaatttctaaattttaaaaagaaaaaaacttaccgttggattggattggattagtggttcgtggtcgtggtcgtg

SEQ ID NO: 282363 - DNA, 993 bp, Cannabis indica
tgttgtcttataattttctttactattaacaaagtgttgctaataatgttttttctagtagtctatcttttccttttttgttgataatttaatgttttagattgcaatagaaggatttctcggcagatcatccatttttatattattttcgttcaaatacccttagctacaaaattatgatgaaattttgatcaaatgaattaataatttagaactgatataatcgtaccgtgctccctcacatttcacttttatattttcaagtaaaaaaattgaatttgtttctcaaatttgatcttactcccatctcatttgctataatcaacatctcatcttgatttatgtcaatagcaaaatggaaaatgagtgtgtcgagggacggacacactaaaaaaaaaaatacattaaaaaaattaaatatttttctttttatttgataattatagcacaaaaaaatttaaaaaaatcccacaaaaataaataaattaaataaagtagacctaaaatttttttaataataattaagccccacataataaaaattctgggtccgtcactaagtgtgtcaacatttattggattgggttattgatgtgggaaatgaattgatcatttgttataatctccaatgcatcctacttaaagatcacatttctataaatatttggtctgaattactaaagtgcttgacaacttattcagaacctgtaaagtttaattatgttagtacatgaacgcccaatgtacaattgatatagtcgcaggcgttccattttacaaatgatcccaagttgtaattctaatactttatatgcgagtaacactagagaacctgtaactttagtaaacggttaatatgcgactcccaaagtcgcatgcgttctttactataagaacggtcgaaactaatctttactcaccttaattaatggcgcgtttggaaagccacctgggaattggaattggatgtaattggaagtaattacacagttt

SEQ ID NO: 282364 - DNA, 508 bp, Cannabis indica
gtcaatcaaacccagaacctacttccctacggatgaatatctaagatattcaaactccactaacataatatatgactatatgatatattaatcaaagttaatgaaataccttagtccaaataacatagctgaacccgtaagttcatcttgggtggccacttgtatgacatcttcggaagttatgtagatgtgaactcggtagaataaggatgggttaacaggaaccctcacaaactcatttttaccttttactctcatatattccaagaacatggcctgaagagaaatatgagtcttgtcaagtacctctgcaatgaatttctcataagatttagtggaatcaagatgttccactatcttctcttggagggaaagaatgatggagggaaatatttttcaagattgcatagagttttaactatgtcatcatgcaatgaattcaatttcttcatttctaattctttcccacacaattgattaaagaatatgcaaacctttgtcaaagttt

SEQ ID NO: 282365 - DNA, 1279 bp, Cannabis indica
tggtaaaataatttccaaaagttgaaccctgaaccttgtggcctgaactgatgttgatattgagactgctggcccaattggggtgtgaaaccataggatgaagactgagactggtttatcctaggctgtccatgaaaaggagtagactctacatagctccctatgggtcctccgttagatgcttgaaatctttgttgtcgttgtgggaaatctttcttcttatgaccttgttgaccataactgaaacacctgtatggtccactatgagtctttccaaatgaaccactactagtgctacccccactaaattgttgtccttgggaccactgtccttgattcttcttggtcatctttcggtcatttcctcttcctctgcttgtgttcttcttctcattcccttctacatgagcctcagttcgcaaggctgctgtcacacactcagtcaggttgttaaaggtcaaaggggctattggaccacgtatcgcaggcctcaaacgacgcatgaactgttcaatcaccaagggttgatcaacaacaccaggatatgcataagaggatagctctacaaacttcatgtaaaattcattcacagtcatatccccttgtcttagaccatcaaatactccaataagagcctcctgtgagatggactaaaatattgttccctgaaaacttcctcaaattctcgccaagtcatcccatcagtttccattgtcctggacaaggtctcccaccaatctgctgcaccaccctctaacttggacacagcaaaagtaacttgatattcctcaggtgttcctattgtgttgaaatttttctttatctgcctcaaccacctttcagctaccatgggatcttgtccaccctcaaactcaggcacttggatccgatgaaagatctgaaaatgatgactctgtcgagcggcaggatccatttgttgagcgggaactgctcttaaggcttcgagaagggcgttcataggaaattcagcttgtggaggttggacattagcttgaggggcgtcttctccaaccgttctccttgtcttccttccttttggaggcattttcttaggtctgagaaccaaaagctaatcagttagcgaggattggatgctaataatataaatatgtcttatacatataaataccaagatacttattactattattatttaaaataaatctaaactatttggtgacacactccgaggtaattaaacccggtgctctgataccatttttctgtcacgacccgagccctaggccgtggcagatat

SEQ ID NO: 282366 - DNA, 551 bp, Cannabis indica
tcacatcactctctcatcttgtcaacatccaagtcaaattcacttataaacaacaaaacttcaagttatttttcaccaccttacactactattaaaatcccttgatctttctttttattatttatgttatcccttaattaaaaccatcattatacatatccttcatcatatcagcattaccatcaccatcatttttacattcaagttttagtgctcaactagatcttattggaagctaaggtatatcattttataattttgggtttctaaattcaaatttaaggtttcatatatatatatatatatatatatgtatatatatactcctataatgtgttctaattaataagtatgaaatttaggttttccataatacaattatttctcaagggtcactttcattgcaatcaaggctaggactccacattcgaggtaaggaaattaagtagaaaacataagttttctgtatgtaataacattcataggaagagtgggaatagtaaaagagaagttaactaaggtcttctgcctgactctttattgtttgttat

SEQ ID NO: 282367 - DNA, 862 bp, Cannabis indica
gtagctagggtttgcctcatttcctctcaattccagcaagtttcagcaagattttggagtgcttaagctctaggtaagcttttgactttgtcttcttgagtttcttgaattgtaagttaatgaagttttgcatgctttgaggtttttcttgctgtggttgctgtagttgattgttgttgtgttcagaggtttaattatggtttattatgttgatttatgcttgaattagaggctgttatgttgtttgagcaagctttggagttttgaactcaagcttggctcattaatggcaagttttgattctgtgtttgggtgaatgttttattgccttgaaaatgttctgtagggtgtatagaacaggtctggaaagtttgaattggtttggggttgatttggtcgagctatgaaatttttagtcattcctgcactgaactggaatttcggttcagagaggtctgtaggaaccggaattccggtttgcttctaggaatttttcccagaattggaatttcggtggaggaactggtctagccggttattatcgtcggtttgtataagggttttctaaaatctcaacacccttgactgagctcaccaaaaagaatcagcgttttgtatggtcagacaaatgtgaggctagttttcaggagctgaaacagaggttaattacaactccagtgctagctttgccttctgacaaagaaaagtttgtagtttattgtgatgcatccatgcagggtttgggatgcgtgttgatgcaagccgatcggattatcgcttatgcctctcgtcagttaaaagattatgagcagcgatatccgactcatgacctagaattggccgcagtagtgtttgctttaaa

SEQ ID NO: 282368 - DNA, 777 bp, Cannabis indica
cgggtgttcgttttagacgttttacataccgtttcgaagcttgcaatgagctctacaatatgatgtatgttttagagctagaatataagttttattttagtgtatttataccgcggggtttggtagaaaaccctagattgtcttatatgaatattaagcagtgttttggggtaagctcttattggtttaccattgttgtgacataggacagagatcatcggggatagttatccacttaggttggccgaaatgtatgaacctagattaaaggtaagaaaagtatattgtactacatagtacgttgtatgtaatataattagtattgttatgaattgattaatattgagatatagttaatattgttatataatgaaaatactgattggttgaatattgaaaatgtgatgttattatgcatgtgatatatgggctcacatttatgtcttttctttggatctctttcaaatttacccgaatgaaattgttatcgaggctatggtacttgacaaaatgaaggaaaccactctctctacgatccaaaaacgaagttctcaatgtcagaggagccaaaatggtggtggccatagccataactttgaagctcagtagagtctaaagcttgtttactaataagccataccttacatttatttacttactttattaaaattaaaagaaaaaaaaacttagatgaaataagaaatgaaaaaaaaaaaaatactttctctattaatttttgaaagaatgtgataatgatttttattattttttattttt

SEQ ID NO: 282369 - DNA, 574 bp, Cannabis indica
aaatccattgtttcgaatagggatccaaaatttacaataaagttttgggtaagtcttcagagagctattggtaaaaagttgaagttcagtacaactttccatcctcagactgatggatagtccgagaagacaatacagatactagaagatttattgcgagcctgtgtcatggactttgaggattcatagagtaaataattgcctatgatagaattctcctacaacaacagccaatagagtacaatagggatgtctccctatgagatgttgtatggtagaaaatgtcattacccaattcattcagacgagaccagagaaaggaaatatctggggggtgtgttaatctagaggaccaatgaggctatagacaagatcaaggctcaaatgctttcttcgcaatgcagacaaaaaagttattctgatcctaagcacagaaacattgagtttcaggtgggagaacatgttttcctaagagtctcaccaatgaagggtgtaaagcactttgggaaaagggaaaagttaagccctaggttcataggccattcgagatactcgagaaggtcgggcaggtagc

SEQ ID NO: 282370 - DNA, 517 bp, Cannabis indica
ttattttatgtaggttaacaagttagctaataaatttagaaaaagggttgtgtactttatgaaaagttatgcattatttttggtgataccactgcaactggttccagtgctcatccttcaactcttgataatgatgatgatgatgctatgtcaaagagtccatctatcaggaatcaagaaagtagttttgatgaggatggtagcaaaagaagaggtaaatcaacttccactacgagttctcgatcggcaaaaaaagcaaagttttcactcgcattggcagaaacattgacagtgtataatgaaaccgcaaagcgaaagatggaaatgtatgagaattcaatgacatcgacaaaacatcacttattggatgagtgtattgaagctctcaatcaaattgatggaatcagtggagaagtatatgcaaaggctattgagaagtttgagagcgaagtgtctagagcattgtttctaaagatgccagtaaatagaagaattgattggttgaactatttgaagt

SEQ ID NO: 282371 - DNA, 524 bp, Cannabis indica
ggctttatatagccaacttacaagacaagtaaaaaagaaaactaaaagaaagacaactttccaaataaaacaaagacaaaataaaggaaacaaaattaaaaaaggaaagctgccaattgccttggaaaacctggtaagctcaacttgggtctaaattgagtccactttgatgagaaacacaaattttttctctccttcagtgttgactgcggtctcctcttgttttaaaattaggttgactaagttgttgagttcttctttgaatttcttggcttgcgcccttgtcaccaggcgaactggaactttacttgtatctttagccttagtgttctcatcattccttccctcttgaaaaggatttgtcctcaaatcttcacttgcatcaaaagggctcaaatcagaaacattaaaagtagcactaacattatattactccaggtaaatcgagtcggtaggcattgtcattgatcctttcaagtcacttgaaacggacctatctcctcgaggtagcaatttggaatgtc

SEQ ID NO: 282372 - DNA, 518 bp, Cannabis indica
cataaaacccaacaaaaaattactaatttaatgtgatgtaggatcatggtaggtaattatagaagaaaaatttaataattcatgcttaaaattgtttatagtcttttagtatgctacattaaaatgcattggaatttaatactctaaaattaattaaatctcaaaataccctcctcatacattctttctttctctcggtcctctctccatctcactaactctcaccaaacccaactgacacccacgaccacagaaccagaccaaacctgacccagaccaaacccacgaccaccgcaccatctccggtgaaacccacttcgaagacgaaacgtaggacaaaattgaggaggatatcgcgaaaccacaaagagaaaacgtgaaacccaaagccccaaaatctatgagctcaactaccctaaaaccctcaaaatccctacccattgttggagttctcaactcgcttgttttctgcatttttttctggttttagacgatatcgcgaaacatcgctaaatgtc

SEQ ID NO: 282373 - DNA, 757 bp, Cannabis indica
tgatcttgtcttctattttccaatcattaagataagatcttagggcctcaagtagtgctggagcatcgtgaggacacggaacatacttaaaacttaatatctgactgtgtaagttccacgaatcatcaataaaatgagctgttacagccatatatcccctcttttgatgatttgcagtccacatgtcactggttatggctattctgctcctacttttttccaaattttgcctgcacttttgtttctcagttttatacattttcataatgtctgacctaattgtattccttgacaccatttgaaacatgggacataaagtgcttgaatactctataaacccgctatgctcaaccatagacaaggatattcgtgcttaacgatcatttgagtcaatttgatccttgctaaatcaggatcaaaattaaaagaaactgaagggcttgtagttacactaggattagcggcaagttgggcctttcttactggacacgtttttacgtgagaatttaaatgcctagtcccactagaactttctcccaccagcttacgctcgcaataatttttccatcaattttttgtcgtgtgaaatgatcccatgcacgagaagttctttttctctgattctgagtttcatctactgtattactaacagattgtacttcatttgtagttgatttcacaaaatcaacatcatcctcaaaattagaatcgatttgaccagacattctattttaacctacattaacaccatattctc

SEQ ID NO: 282374 - DNA, 644 bp, Cannabis indica
aagaggaagctgaggaggccagggcggagactggagttgttcgtcatgagtttggtgaggccaacaagaagctgtttgctaccgagaagaagatctccgtgctaacaaaggacctcgaggctgctgatcgctttgaggaaaccatcgagaccttatccgctgaagttgaccatcttaaggatgagaggagttctctgcggcaagttcttcttcggctaaaggacgataaggatgcctaggtgaccgaggcggaccgtttgaaggagaaggtcaatgctttggagactgtcggcctcgagctcttctataatttttggaaggctaatccccaggccaacttcaactacttgggcgacgctaaggacatgtaccttgagtactgcgctgcccaagttgcctatggtgggaaagaggtggctgcttgaacttccggccaagcttctgaccaggctgttgatgcctctcctgctcgaacaacagatcctcctactctagttggctcagaagaaccgaaccaagagcctgggactccaactgtttgaacactctttttatctcctgtttatatatatattatatatggcctcaaggcctttaagacatcatgaccgaccaagcagtctttaaacttggaattatttttc

SEQ ID NO: 282375 - DNA, 617 bp, Cannabis indica
ttgagtagattaactagtttgatgcatgttagttgccttgattcaagcttagaatttttatactcaaaactatggtttttaaagagaaattgtgagttttgttgctgtgtttgttggggtcgaattcctgtgttttcagaggtttttttatgcatgtttaagtaggtttgaactgatttagatgcatgctagttagatttaaccaagtttgagttttgaactcaaagcttcgagctttaatggtaatttttgatcctgtgatttctgggtggttttgttgctttagaaatgttctatgggatgtttagaacaggtctggaaggtttggtttgatttggttttgatttgagggagttatgattttttgagtggttcttgcgaggaaccggaattccggatgtgcaaccggaattacggatggggttctgaaattcctagaaccggaattccggttgggcaaccggtctgccggttgggtgattttcaggaacccttgattttctcttttttatgttatttggggtattgccatgctttttatcgatagggaaacttttagttcctagtttaagtcctcgggaagtgatttagcgtatcacttatagtgttgtgattgt

SEQ ID NO: 282376 - DNA, 722 bp, Cannabis indica
aaaaagacaaggataaattagaactttgtgatgtatcttctatatatattttataatttgagtggaagtataaaatggaatagaataaaaagagataattttcattccattgtcttatttgattacatattaaagtattgaaatgtcattccaataaaatgacctttctaatgttttggtaaattaattatttcattttgaaatgaaaataaattctattccaagacattatgaaaaaaaactaataatttttatattaaatttttttcatacattttaagttttattctattttatttttacttttatttctattctcattactctttttatgttttcattcccacactttattttacgttttcctatttctttatggattgtatttatgatggcagttatctcttttttttttttttcttatactttttttattattatttttctagaatttagtacgtccttaaagataaaaactttgtgtacaagtagtacaaagtaacatatatcttttttattttgtctcttattgtaataatcaaaataggatatagctaagatagcttagattctaaaataaaacaaattaaataaataggatagtaacaagagtctgacccatatgagaaacaaaacattcatggtttgatgtggggatgagttggtgaagcactatatcttcacataatccaaaactgcatacgtatgggcttacaacacaa

SEQ ID NO: 282377 - DNA, 508 bp, Cannabis indica
agaggcggctagaaaggacaaagagcttgaagaccttcgcaagtctaaggagcaggttgagctcgaggccaagaactctcaggtgaagatcgaggagatggctcgcgacttagaggtcgagaaggagaatgggaagaaacagtatgatcaggcagtgtctgattatatttacaccactctttccaaaatcccagactttgacttctctatcctcggagcggaagccgctgagatggccgaggcttttcgcgctatgtcgcccactcaaactcaaggtggtggagggaatcttcctaaggaggccgaggttgcggatgccgaggaagtcgagaccgaggccgctagcaaagtcgcggatgaacctgctcctgctgctcccgatgcttgacttttatgcttaaactatttttcttgaatttgctagtttagtttttatgcggtacaggggtactcgcactctgtacttagacatatttgcattttactttggacaaatttatatcctcgc

SEQ ID NO: 282378 - DNA, 711 bp, Cannabis indica
aatggacaagtagaagtccgtcaataaaaccctaaaggatactatcaagaaaaagttagatgctgccaaaggcagatgggttgacgaattacctcatgtactctgggtccacagaactatcgagaagacagccattggacacactcctttctcgctagcatttggatcggaagcaatgttgcctgttgaagtgagcatatcgactcacaaaagagagttatataatcaagaagaaaacaaagaacttttaaaattgtccttggatctacttgaggaaaaacgagctgagtcgcaaatcaccaactccgcataccaacactgagtcacgagatacttcaacaaaaagtcaagaaaagactattcaatgttggagaattggtgttaagacgagtctttgcaaatacgagagatgcatcagcaggagtgttcaacccgaactgggagggtccgtatgtcatcgaagcagtagttggagttggagtctataaattggcttgacttgagggctctctaataaagaactactggaacgcagaacatttgtgaccctactattaataaataaatgatgtaactcgtagatgtaaacttaaaacttcagttatgaataaagagaatcatttatattaagtaattacaaagcttcattctttaaaagttacttaaggggcatttatgtatgattaactgaaattcatctggaaatacatt

SEQ ID NO: 282379 - DNA, 630 bp, Cannabis indica
gtgtggtgcggacggtttgagcggttgatgaacaccctaaaagtactatcatcgttaaatttatatacaagtattcaagtgctatttatgaaacactaaggtatcgtttggttagaatgaatgaaaacatataaatatgaataagaataagaataggaatcgaatcgaatttaaaacgcagaaaaagttgatgaaaaaattatcaagtttttttaatctttcattgaaatggtttttctttctatttcaaaatggaatagtcatttcatcaaaataatgaaaaagtcagtctattataataaaatttcaatactttaaaatacaatcaaacaaaaaaaaatataataaacgttatttcttttccattccattaattttttcttgctaattgtaacgtccccgcttcaagcctccattgggcccttacacccacggaatgaatggctcttatacacgagtacgtcactctggctgcttcatggactgatgactgaccctacagaccaacacgagtgtttccagcgtgctttgtcctcactcgcacgcttcctaggaaaacttcccaggaggtcacccatccttgaaattgctccaggccaagcacgcttaactgtggagttctttcgagat

SEQ ID NO: 282380 - DNA, 558 bp, Cannabis indica
gtacttctggccgtatcgggttcgggcccgaaatgcaaattggattgaattaattggcattatatttgatattatgaaatctaaaattatttgggaattaattgagtgtgaaatggcaattttgcccttgaaaatgtgtatgtatgattaattggccctaagggcattttggtcatttgaccccttattattgtatttggaaaatgggattttattaagaaaatcaaagtaattttctggttatttccttctctcacctgaaccctctccctctctcaaaccctctcaatttttgagacttgaatttggtgtgttctagcttggattaagagtgttgattgggaagaattgtgttgaagattgggattaagcttgtgcaaggaattaaggtagcttcttgctgatttatttgaaattaaatgctgaaattcttagggtaaaaagcatgttctttgagttttgaatgttcttgttgcatgatgagtgaattgatgttaatcttgtggaaattgagcttctatttgttatatgctttgttgttgagcttgggcagagatt

SEQ ID NO: 282381 - DNA, 547 bp, Cannabis indica
atatgtatttataatatgtactacaattaagatgtaaaatttatattatataaatttttattaaaattatttataaaataaaaattaagcaaataaaagtataaatgaaatagaacaggaaaaactatacacgtgcaatgcacgtggtatacacacctagtatagaaaaaaagtatgagacggtgatattagtgacggactcagaatttttattttgtgggaacttatttattattaaaaaatatttatacctatattataattactcttactagatttatttaattttatggggatttttctattattttggtctataattattaaattaaaaaattacattttatttttttgttagtggaagctatagcccccacattgatagtagtgggtccatcacgggtgacatgacattgtaaaatttctctaaaactatttttcttttctctccttaattctcaatttttaatattttatttgagcataaatctataaattcagcaaaccctagatgcttctgggtggaatcgagagagagagagagaga

SEQ ID NO: 282382 - DNA, 446 bp, Cannabis indica
taaccctgatttaattgaagacagaggtgattcaagtgacgttttctttttaaatgagtgtgattgtagaatatttaatatcagttcaaatattagtagaatttgttttattattattttattatatataaataatattttattattttattaaataaaaattaaaagttacccataaatttctcaaaaactaagaatttcagttatataggcacactttatatagaatagatatatacatatatatatataaatatattagataaatattacgtgccaagtcacattacaacacacacgcataaattaagaattttgttatataaccacattttatatagaatagatatatatatatgtatatattttaatttaggaaaaaaacaggaatattctaaaaagggaaaaatattacaacaatactgtgggccggcccaatgaacatt

SEQ ID NO: 282383 - DNA, 562 bp, Cannabis indica
aaatatctcaaaattgggaaaaactagggttccgaaaattcccccaaccggcaaaccggttcccaaccggaagtccggttctgggtcaccaaccggtcgaccggttgccacaggtcccccagaaccggaattccggttctgtgctgggaacccgaaaaattctccccttgacctcaaaatccatccaaacttcaccaaactttccagtatacctgtatagtgcatttacaacctaaaccaaccagaaaatcacaaaacaaaccaataaattccaacttgccattaaagctcaaagcttgagtttcaaaactcaagcttgcttagaactaacaccaagcaacaaaaccaacagctagaaccttaaatcaatcaatattgagcataacaactgaacccaaatcatttctaaacctaacagccactaacctaaaaatcacctcttgaaactaagcaaaacttgagaaaaaacataactagagaataactaaggttaccttggttaattcctccttgatttcttgctaaatctcaatgaaatggaaggaaaaatctgctccttgcc

SEQ ID NO: 282384 - DNA, 491 bp, Cannabis indica
ttaaattcatcactgcaaaactctaagccattgtcagttcttagggttttaaccctttgattagttaaattttccattagggttttccattgtatgaatttagataaagcctcatttttatgtttaagtaaaaatacccaaacttttctagaatggtcatcaacaatagacataaaatacacatttccaccatgtgttggagttttctctggtccccaaagatcagagtgaacatactccaatatgtgcttagttttgtgaataccagttttaaactttaacctatgatgtttacctaggacacaggattcacagaaatccactttacttactctgtccttacccagtagcctttgatcactcatgatctgtaggcctttctcactgatatgccccagccttctgtgccatagaacagcctttaggtcttctggattgctagtgactgcattgttgcagtgagtcactggttctccatctaagtagtatag

SEQ ID NO: 282385 - DNA, 678 bp, Cannabis indica
gcattttatccttaaaacacttagccacctataaatgatatttcagtgaactaaacataatcactgaaatgagtactcaaccatttatctctgtttagccaagctcgaaggaaatcatcatttcacttctatgtcctgatagaagctatagattccatatctatgtttagcgctcccactcaattgcactaccatgttcccaaaatgtacgtatcaccctgaccaaaaagtaggcttaactaacaaatcaaagaacatgtataatactcttgagatcgaacctaaccatgtcaggattaagatcatttgatctaggatcaactaggtgatattgaattgaatagatattacggtaagtttaacatatctgattcaaagttcaatatcggtcccttccgatgcatactccatgcatccaacccaagctttactttaaccaatgccctggaaaggacatagcacttatccaaggtgcaagtaaactatgttgtagattatcatatcagttaaaccctgtgtactgataaatctaggaatatatatttaatcacataatcttgattactttccactgtgctgacgacacaataaacaagaataataaatgtgataaggatttggatgaatttataaaatacaaaataaaaataaaaataaaaatagataaacaaatatgaa

SEQ ID NO: 282386 - DNA, 523 bp, Cannabis indica
ttacacataggacaagcttctagggaatatgtttggtggtaagttgaaccttagtagccaagcaaccagataaagcacgccacatgagttggtgcactttgggagggacatgaagcttccatgcaattttccatatcttaatctcagactcactagtgttagtgatctctgaatggtgcagcaaccgatatgcctccctcacagtatagaatccataaagatccttatgccaataccaagtatccataggagtatcctgatcaatattagttcgaatgatgatctctttatctcggtcattgaatatatctgactcccaaaagaagttagacataacatatttgattataattgaatccatgaagtagttctatataggtacctataaatgataaacatatttaaaaaatatgtaatttagagagatctctataagtatgtcaatatgagagtaaattatcatatattgaaatttttatcgacaatagatattcaatgtttgcatatgcaataaactaacatg

SEQ ID NO: 282387 - DNA, 686 bp, Cannabis indica
ttcgggtccttgtcagggttcgggcccagtactgggtcctaaatccagacaccgactacgggttttgtccaagccgtgggtccagatccggatcccaaactcgggtcccagtctggttccatttctggtgccgggtcacgagctgggtcctaggttaaagttcaggtctgggtcgagtactaggtcccggtcctaggggtgttcgcggttcgggtggtgcggtttttaaccattttttcaaaccaagccgcacatgcggtttttccaattttccaaaccgcacccgcaccgcgatactaaaaaaccgcaaaaactgcaccgcaaaaaatgatgcggtgcggtgcggtgcggtttcttgcggtttgaactatcacaatttttttttttgaaatcatcataaaataattaaactatcattaatataattattccaaaacacttaagaaaatacaacaaacttgagactaataaaagttataacaacaacaataagtcaataatctttttaaagtttcaacaacacacctaaatcaaaataacaaacttgaaactaattaaattccaacaacaatataaatgtacaactaacatactttcagcaatagattaaaaataaaacaaacacaaagttccaactccaaatttcaatacacatgtatgggcttgggtttgttgctaagaagaga

SEQ ID NO: 282388 - DNA, 729 bp, Cannabis indica
atcacctagtatatatatatgtatccattatatatattatactcatcaaaattattattattcacttaataattattcacttataaaaatgtgtacacatgcatgcagggcattatgttccgcagttggcaaagatgatcgtcgattacaataaagcacactctaactccatcattaatcttaaaggcttcatcgtaagtgtctttttctttttctttcacttttcaattatttctatttttgaaaaggcttttcaatattaatttctacaaatcatcactacacaacctaattaatagattataacacttttaatcgggtgctttttagtaataaattttattaatgctactaaaagtaaaaattttgtattatagtatataaatggtatatattggaaaattttaaaattaaccatcatttttgtattcattggtagaaacgtttctgttttcagtatataaacaaattataattttttttttttttaatattttaatgtacatgattacaatataatattacacattctacttttactatgtcaaaattatagcccaaaattatcaactgcgtgcatataaaaaaaaggatgaatattattttagacgttctcttttgttaaatgataaaatagatatatcttatattttttaaaatggtaaaaataggactttaagctcaatttttaacaattttatttttaaatataactaactttaagataat

SEQ ID NO: 282389 - DNA, 145 bp, Cannabis indica
gataaaataatcaaatttttaaaaaaataagaaaagaagtaagcaaaaatagatttttacctattttgccagcagccagccgcgcgcacaagtgtgtgtcaccacccccaattttttcaaatcttcaaataattataactaattc

SEQ ID NO: 282390 - DNA, 343 bp, Cannabis indica
aatgataaaacagcaaaattacaaaagtgaggctcaaatccactaagccatggccggccacctttgtaggttttatcacttgatattttcattatttgaatgccaaataattcaaacctaaccctatggcatgctataaatagatagtgatggcttcagaaaaaatagactttcatgtcttgattccttcagagaaaaacctgagcctcctctctatacctagccgccaccttcctctcctttttcttccttgaatatttcgaacctcttagtgatagagtagtgcccgcacacagcaagtagtacctcaatcatagtgagaaagatcgtgaagaaagacatt

SEQ ID NO: 282391 - DNA, 656 bp, Cannabis indica
  modified_base (625)..(625): a, c, t, g, unknown or other
tggtatgtataaagagacaaggattttcagatcttaatataaagagattaaatcataaataaaacaattcattgaagaaaaagtttagtagtaattcatttgtatcattctcagagaacattttcatttcagtccccaagataaaaatatttacataggtgttggcatctttgccatacaaaattgtaacaattaatcatttttgttagcagttagcatcaatctatactcatcatcagacatttaagctagaaacaagattgataaaagcatcttcagtgcagggaattgttagagctcccattggatgatcaaatccgaattcttcttcagcttgacatagcaagtcttggaatgaagaattgttcaagtaagacacagggattataaatcttgtcattttgctcttcccaacataaactgccaaatacccttttggaacatcttttgcactagaaaaaggcctctgaattagttgcttggcatgaactacaccgggaaaacgaaaacccatgattgctgaagtttctaaaggtagaagaaggaacaaaatgtaaagctaagagtagttgaaagttgtgaggagttgagatgttgaagaacccaatcttaagagtatatatanaatcaaatgtgctgtgtggaaatgaatggtg

SEQ ID NO: 282392 - DNA, 794 bp, Cannabis indica
ccttgagcaaacttaaatatacttttaaggatttatcaatttgtgtatttttaattttgctcgtatgaatagttatattatctatctattttctaggtttaagaacttttatcaaggcgtcaagatgcctcgtttagtactttcctagcttgcgagaaccgttagtattcagttttatacgcgagttataactttttattttcctctcccgttagataggttataaatcaaaaattatagttgtttgatcccttctttgtcaaaaaggtttgatcaaggtgttataacgatttgacccctttctcgtcaaaaaggtttcgtcagggagttataacggttcgactccactttcgtcaaagaggtttagttgagaacctttgaatttaaaaaacaaaattgaaatggcaggtttgcattatataatgtatttccagatgaattccggttagtcatacataaataccccttaagtaatttaaagaattaaactttgtaattacttaatataaatgattctctttattcataattgaagtttaaagtttacctcaataatgcgagttacatcatttatttattgatagtagggtcgcaaatgttccacattctagttgttctttattagcgagctattaaatcgaggcaatttatagactttgtctccaactactacttcaatgacatatggaccctcccagttcgggttgaacactcttaccgatgcatctctcgtatttgtaatgactcatcttaacaccaagtctctaacattgaatagtcttttcttgactctt

SEQ ID NO: 282393 - DNA, 166 bp, Cannabis indica
aaaatcggaagttaaatccatgaaatagcatgaaaaatcgaagaaaaacgaaaaaaaatgcgagctgtacggacggtatgctgtgcatactcgtccgcgcgcgcaggggactgcatgggcgtgggatgccggcgcaggaggctgcatgcagcctgttccgcgcgcg

SEQ ID NO: 282394 - DNA, 544 bp, Cannabis indica
cagctaagtcttcttgaaagcaaaggatatcgcgaacatgcctcccgggagaaggcatgtaagcctcatgtgctcccgggagagcaagatggccacaaagcacctccaggtggtgtcagattccatctgaacagtcatctcgcatttaatgccgcatgggaggaagcgtattggaactgccacacgcaataaagtctgacgacacaacccccaatttgtacctactaggctatgatcaataaagtctagtgacggctactctgtgaggaatcacatcagtcaaaagggattaaggactaccttcataaaatccctacaacacctagggattagacgatgcattacccatgatatattcattgggaatgcataactttactgatagttacagaaaggcatgtaccttaattctagggatcaccccacaaaaacactataaataccccccaaagctcattaaagaggggccgagaattctggatttttaagagctagaagagtaaaaactacaccaagaacattctctgtattaaatactatcata

SEQ ID NO: 282395 - DNA, 1113 bp, Cannabis indica
ttagtaagctctcgttgatcatgatctatatgccaactcttggttacgcaggctgttcagactagatggacgccaagcgaaataccaggagtcagggcaattcggttgggtcaaatgaaggtcagggagctcagtttcccccaaatgctcgggaccgaggtagaggtcccaggtgcagggctcgtggccggggtgatgttaacccgccacaggctgcccaagctgcccaagctactcaggaagcccagaattgggaaaataagtttgcagaaatgcaagccagaattgaggagcaagatagtgaaatccagcgattgagacaccagggtgctcctgcagtgcctgttccagaaattccagtggcacatgcccctattgtccaggccaaaccagtgatagcggtgaatcaaatggaacctctgcatgaaaggttctgcaagcaggcacctccggtttttctgggaggaccggatgttatgaaagccaagcagtggcctattgtgattaccaagatattgaatttcatgggcatcaccgggaatgatagagtggtctgtgccacttttcaatttcaagaagacgcattagtatggtgggacatggtgtccatgatacacgatgtcacaacgatgacctgggaaaagtttcaggaacttttcaatgccaaatattacaatgaggccgtcagaattgccaagaggaaagagttcacccacctgacccagaaagaaaatatgagcgttattgagtacacaacgcagtttgatcagttggcgaggttggccttgggaattatgccaatcgattttagtaaaaaggaaaagtatttgaatggattgaatgtgaagattaaacatgacttgatgattacaaccgacgacaaaaccacctatgctgaatggtggaaaaagcactgcgagttgagggcgcatttgggtgtatgactgagtcagctaggacaccagtggttggcggagctcctacccctcctgcatcgggctttagtaggggaggtagtggttcggccatggatcaaaagaggaaggcaaccactgcaaccggtggctcaggtcagaaaaagaggttctgggggaaccagagtcgaggcaatcg

SEQ ID NO: 282396 - DNA, 612 bp, Cannabis indica
ttaaaatactcaccctacatgtctcaaaaattgtgaaatttatgaggatgaagccaagaatgttgtgcatcaattttctattagacacgttgcgagataaagtaattttgatgcactaacaataattttaatcgatatagtgaaaatcacacatttctgatagtggtacccctttgtgaaatgtggcccggaccaatcgtagaatattttttgccactagtcacaacgaatttgtactactaagacatgaatatgaagattggttttgggttaaaatttgttgaaatggccccttaattgaaaaattaaaaatattcttcttttcaaggtatattttaacaagttttttccatcctcttacactcattagtgttctactaaaatctcaccttacacatctcgaaaaatcgtgaaacttttcaaggacgaaacaaagactgttgtgcatcatttttctattggacacgttaagatataaactagttttcatgcactaacaatcattttaatcgaaaaaagtaaaaaatctaacattttttatagtggtacccctttgtgaaatgtggccaggccccatctcgaaatatattttctccactagtcacaatgaat

SEQ ID NO: 282397 - DNA, 648 bp, Cannabis indica
ttagtcatttggttttgaggttaggtggctggttattttggtgacacctagcatgtttatttcagctaagaattaaccttattactcatttatctcatttttgtaaaaaaagaaagaaaaaccaaaaattcaagagaactctctctttctctcttttctctttcggctggggcaaaaccagggggaagggctgttgattcttggtgttttcagcaaagaaagcttgggagattcaaattaaggtaagccctaatgaaacccttcttagttttcaagttttaaagttaggttgaattggtgatattgtaaattaggggctgttaaggtttgaagtgcctagggttcgaattctagggttggtttgagttgattgaagtccctagcaactgattttattgcttgatgttggttttaagcaagcttgagttttgaaactcaagctttgagctttaatggcaagttgagtattgttggtttgttctgcgaattactgcttggattctattgtttatgcattgtataggtgtactggagagtttggtaaggtttgggatgaaattgagttaaggggatggatttttgggttcccagcacagaaccggaattccggttctgggggaccagtaccaaccggtcgaccggatggtg

SEQ ID NO: 282398 - DNA, 654 bp, Cannabis indica
cttacgaattttctaacattaatgaaataataatattatttaataccacttatacaattaatcaaatctaataaatatattataaaaaccctaatggattttcatatcgggctttaattaaacgattatctacttataaaaatatcataatattttattttcatagttaatacaactttaactttctttagaaaattggtacaactactctaagcaataatctctactcgctaacaacacaaataaatgagattattatcctcccactattaatatcccaagaaaaattaaatactattttaatttggatattacattctaccctccttaaaagaaatttcgtcctcgaaatttaacttaccaacactcagggtattgtgtcttctacctaccacattacctcctcttctaccacatgaacccaatagtcatgtatgtaatgtttgtcttatcggtaaaatgatatcacatttaatacactcctttatttaaaaattattattctactatactttacttaataacaaaacatgctcctacaattgcatgctcgtaatgttataaaagttttccttctcttatgaacatccttacatgccattaagagtaaaactatttattctcatctgaacatccttacacgtcacttgagaa

SEQ ID NO: 282399 - DNA, 760 bp, Cannabis indica
attcttcctgggctaactctagggtttctgattctgcttcttcacccttgcaactctttcttgacaagcaatccagctgtgttactaccattaggaattggagtaaatctcaacaccctatcaaactccaaatctctcagacacaagctgctctcgataacctcctgaatgcttcccaccaaactcccaactctctctcccacattgcctccctccaatctagattggatggcctcctcctcaagaacgaaatctactggaagcagcgttcaagagttgattggctacgagctggagacaaaaacacaaaatttttccaccaccgtgcctccaatcgaaaaaagaacaatttcattcgcctcattacccttcctgatggatccacatctcatgatcacgccactataacttcccaatttcttaactttttcaattccctcttcacctctcaaggtgtttgtgaagttgctatcaatactcttctccaagggatccccaataggctatccactcatcaagctgattatctagccgagccttacacagaaatggaagttaaaaatgcgttatttagcctctctgtggacaaagctccagggcccgatggactcaactcgcttttctacaagcgcaactggtccactctaggcaccgaattcactaaggctatgcttcacatcctaaatcatcaaggggatatctcttccatcaatcaaactatcattgtcctcatccctaaaaagaaaaaccctaagaatgt

SEQ ID NO: 282400 - DNA, 704 bp, Cannabis indica
attaacaaaacacaaacacaaactatgaaaaaaaacaagctagaattattaaattggcctaaaaatgcaaagttgatataatggtgctaatgagtattgttgtaaattgataatgtcaactaggaatttaaaatgtcataatcctttttccaaagtgtttatggtttgattctctaattaattaacatattcctatgcccaattaattttaagaataccaatttaagcacaattccttcaagtcatacaaggtaaataacacattcctatgctatttacaaatcacacttttccaagttgatattcatgcatcattcaagcaattccactaaccctattttttccaaaatcaagattagctactacttactaatggtgatcaagcaaaagtaagcaattgcacaataaacactcttgaatgaacaaaaccaattcactaaacatagcaataaaatatcaaatcacaatttaagtcaacaaaataattctagcaaaataaaaattaactcataatagattgtgcaaaaattacaaaatttaaaagaaaagaaagatagaaataaaaacccatttagagcttgtcacaagactctaagtttcttctccaaattgctcttcttcttcctcttgatttttgccaatctcaaaattaaaaatgctaaattaaaaccctaaataaaactctctctctctcttttcttttt

SEQ ID NO: 282401 - DNA, 534 bp, Cannabis indica
ctatggctcgcactaaaaaaaagagtcaggttggctcttctgacaatccatatggcggaggtcatcactaaacggagggtatctgacgatcttgagactggttcggacaatggagccatggaggagatagtcagagagtttaagaagtgggtggaagaggaggctaagaataccctccacaaagctgccaaagagaaagaaccagccgagggttcccaaccagccactctcaaaatcagagagtttgccccgagagtgattaaggaggttcgcacttctcgatgcaaaaccaagcagaccccctttgtggccccctctagcagtcttagcgagacccaattcaaatatgtggaggagatgactgtgaatggcaaggattaccagttaatactgttggaaatattttaccaggatctagatttactaccatgtatgttgtttaatatcctaatatgaattctctaaaacaatgaaataaacacatataaagtttaggaaaccttacattgactgcagaggaatataatgactcct

SEQ ID NO: 282402 - DNA, 786 bp, Cannabis indica
attggggtccacaattaaataaattcataaataataataaaataataaaaatttgcgctaattatctttactaatccaaattactaaatcggtcattacatgaccactactgaaccacaacttaatcctatatatttttataaaatggtatacaatataaatatattcagattaaaatttggatcacaatagttagctagagaggctaagaaaggaagttttaacatatttgaccaaaatcaatctcaaagtgtcatcatgtgtttattttgtaaaacaaagaacctaaaattaacatttaacaaaataaagatgatcaccgataacttttataaaataaaactctaaaactatatttattttattacaaaaccgcgcaaagcgcggttatgtttactagtacttatataatcctcttgttaaactagatgatgtggtagcctaactatttagaattccaatttttctattttttgagtttttataattttgtttatttgtaaaagaagaaattgttagataatagtcctcttcgagacaggacaaatctccgaaatacactcttcgagtcagtgccaaactcccaattgaactaaagttctatttactcaattcatatctcataatagctacacaattacatatttatagtgattcacactctgtagaaattactactaagcccctacactattttatagtgtaacacgttcccacccttcaaaatcaccttgtcctcaagatggtagaaataaaaaaatacaactaaaaacaagtacaaatata

SEQ ID NO: 282403 - DNA, 475 bp, Cannabis indica
gctccccgagtactgcgtcataataggtaagtctcgggagtactgtgtaggatcgacaacaggctcatcaggctgatcttcagtgggcgctggttcagttgccgctatttcaaccatttgctcctaaaataaataaataaattaaatggttaattttaatacaaaataaattgaaataaataaataaaaaggaattaaaatgtaaacttacgtaagcttgttaagcgtactcgttgcaccaattattgcctttatggtgaaacttttgaaaagtttcgaccgcagttggcagttttcctgtgtcggggttagcctatttttaagaaaaaaaatattattattgttattttactacagaaaattaaatcaatgataatgtaatatataagcttatcccctcgacaacatgtgaaacaataggctttgagccccagcctccttaaagtttcatcttaccccgactttctttattttt

SEQ ID NO: 282404 - DNA, 705 bp, Cannabis indica
gaagaagacggtggtggtggtgctggtttggggttggggggcaggtggcttctggcagtgagaagaagaagaagaagacgaagaagaaaagaaagaaaataaaaaaaaaaagtaaaaaaacaatttttaaataatttatttatttattaaaattaaaacaataatttggaccaataatatgtcgacacgtggcatttttaaaaaaataaacgtctcagttaaaattaggactaacggacaaataaaaagtgtgaccttgaggactattgccactatttttggagcttggggactaatttgcatcaacgtgaactttttgaggacttttgccgcaaatttccctaaaaattaaaaagtataatttgagatatatagactaaaatcatccaaataaacaaataaattagttacacatagaattataaatgatactttttttagagtgtgtttgaagcttatgtgaaatttttttgatctcttcactactattttttatctctatttttttgtataaatatatatgtatatagaaaatttatattaaaaaaatgaaaaatatacgtacatatattttattgttgttaattaaattcaaaatagtatagtaatagagaaaatttagaaattagatttttattatgaatttttatttatttaaaataattaagtttaataaaaaaaaattagaaaaaatgagagatatac

SEQ ID NO: 282405 - DNA, 503 bp, Cannabis indica
tatggagtatgcatcggaaggcacgatattaaactttagatttctagtatatattaaacttaccgtaatatctattcaatttaatatcaccttgttgatcctagatcaaatgatcctaattctgatatggttaggttcgatctcaagagtattatacatgttcttgatttgttagtcaaacctactttttggtcagggtgatacatacattttgggaacatggtagtgcaattgagtgggagcgctaaacataaatatggaatatgttatcccaaatttggcactctgacgtggcatcacgagaatggtgacacgtggactctacctggagcatctgttcggatcaatatgccgagcaggatgcctcgctggcatatccagaatggaatattcaacgggcaatgcagaatgaggaacacttagcgaatttagcttaatgcatcatgagtcaccagctcaatccctataactcaccgatcaacttacgttggatgtggcataca

SEQ ID NO: 282406 - DNA, 745 bp, Cannabis indica
atcgaaccctacttcgaaatcgcagtgtgtctctctcctcacacatccatgatttatccataacaaaaatcctatccaaaaaaattctgtatttagtaactaattatatctagttactaattacacaatgtaactaactaagtctctcacacaatttattcatattaatctaaaaattactcaaattttcgttttacattagttcatgttattaggttgtttagttgattataatgttggtaaaattaaaaagttttcataaatgtgaatattattattttttatgtgacctaacttcttattactatgttataattaactatattatgaatggttttagtaagatttatcctaattctaccgaaatttcggcagcataacggctgtaattggacgttcccaaaaattttacaagtgcctaaaataacaaacaaaacagataaacaatacaaaattaatccacccatccgaccgcagtacatgtattcgcagaacctacttcactacggatgaatatttaagatattcaaactcaactaacatgcattgataattaattatatattaagaaaaagttagtaaaagtatatacctataattgcaagcccaaatacgctacacacaaaattatgccgaacccctataatataaagaaatacaacgaaattacaaaattaattatttcataacttataactagttataaaaaattgtaacaagttacttagttactaaattatacata

SEQ ID NO: 282407 - DNA, 661 bp, Cannabis indica
ttgaccgggactggaactaggacttggacttggaatcataactgaaattggacatagatcaagaaccgtaaccggaccaccacccgaactccaaaccttgactcgggacccgaacttgaacctgaactcagacccaaacatggaaccagactagggacacagaaccagggtcggaacctagaaccgcaccccaatctcgatcccgaacccaaactaagaaatggaacctgaaccagaaccagaccgagactcgtgacagtgatccagatttgactcgggtttcaggtaacggggcctggaacagaccagtagtcggtgtctagttctgggactcagactaggaccagaacccaggcgaagaaccaaacccgaacccagtcctagacctgggacccaaaattagaacctgaacaagaatcgccgaaccaggacaatagaacaagactaggaccgtgaccagggcccagacccagacctagaaccgaacagagacctagcctcaaaccaaaactgagactggaactcgagcccagacacggtcgtgtacccagactggaactgagacacggaccttgacctaaatctagaacccgatcccgaacacagacttggacctagatagggatcaagatacgaacctggactctgaccaagaccgaga

SEQ ID NO: 282408 - DNA, 684 bp, Cannabis indica
tatatatatatgatccttttttatgcatatttctcttttggacctgccctttgggtcaggatatttctttttgactttgtttttactttgggcctgttttacatctgtccatgcagtatgccttagtactcccctgagtgacaaaaaaactttgtttttaaggtactaagttttattataaaatttagaggttgcatacatttggacggtacaaattctttaaacaaggcgtaagtcaatttatttgagctattggtaatattttcggaggtggtcagcattccaggcccttggcacaatggttccatccatccttttcagcttataagttccggagccgatctcatcctcgatttcatatggcccttcccaatttggccaaagtacccccactccgggttcttgagtggctgggaagactcttcttaagaccatatccccaatagcgaattttctgtttttaactttggagttaaaatatttggtcaccttcttttgataagctaccattcgtatttgagactcgtcccggagctcttcaacctgatccagcgcttcttgcaataaagcttggtttgtagctggatcataagtcgttctcctatgggacgagaataacgtttctaccgggaccattgcttcgcaaccatacgccattgagaaaggcgagtggccggttgtggt

SEQ ID NO: 282409 - DNA, 481 bp, Cannabis indica
ttgtcttgacagggggctgggagggacagttggagggggtgaagctgctgtgtttggcagctggtttgataatgtttgtaaggtttaacctatggatcgtattgagaggcttgatatgcttctttggggagtttggagagctcgtaatgacttggtttggaataaggctttgtcgttagagaggatggtgaatgctgcaattacttaccttgattcttagaagaatgctcagctgaaaaatagagttgtgtcgccagtttctggtccgattacaattgggtgtgagcaatgggctaaaccttattttggtgagataaatgttaattgtgatgatgctgtctttgaggatgacaatagtctcggcatggggtggattgctcgggatcataatggtttattcattgatgcattggcggttaaaacttatggtcaacccgacctatttttggctgaagctatggcgtgaaggaggcgctcagtt

SEQ ID NO: 282410 - DNA, 548 bp, Cannabis indica
ttgggtctgggtcaggatctcggtctagatctaggtcatgcatttcgatgccagactggctcttggtctgagtccaggttcgtatctggatccctatctaggtccaagtctgtgtttgagattgtgtcccaaatttaggtcaaggtgcgggtctcagttctggtctgggtacatgaccgtgtccgggcccaagttccactctcagtttgggtctgaggctaggtctgtgttcagttctaggtctaggtcttggtcctggtcactgtcctagtcttgttttacggtcctgggttcgggtttggttcttcgtcagggttctggtccttgtctgagtcccaaatctagacaacgactactggtctgttctaggccccgttactcgaatcctgagtcaagatcaggatcacggtcacgggtctcagtctggttctgctacatgtcccaggtcgcatttctgagtttgggttcgagatcgagactggggtggggttctaggtctcgaccctggttttctgtccctagtctggttccatgtttgggtttgagct

SEQ ID NO: 282411 - DNA, 505 bp, Cannabis indica
atggtgtttgtgtgtttttacagggttatcgatgaaatgtcgataggattggataggatatcgatatatgtgttttctgtttgtgtgtttgaacattaatgtcgacaggttgtcgatatcatgtcgacaatttgtcgatggtttcaccttgtttgttttatgtagttttgacatgcaatgtcgacaatttgtcgactgtatgtcgataggttgtcgataataagttgtagtggattcttacggtagttaattgtgattatgtcgacaatttgtcgactgtatgtcgataggttgtcgataataagttgtagtggatacttatggtagttaattgtgattatgtcgacaatttgtcgactgtatgtcgataggttgtcgataataagttggagtggactcttatggtagttcaatttggtaatgtcgacatcatgtcgacattatgtcgaccttttgtcgatgttcgtcgtttgttactgcttttatgacaatgtcgatagcatgt

SEQ ID NO: 282412 - DNA, 643 bp, Cannabis indica
caacttaatgcccctatctatgttcaaaagattgaaattaggagaagccaagcccacaacagtgactttacaaatggcagatcgttctttgactcatcctcggggtataattgaagatgttttggtaaaggttggtaagttcatcttccctgctgatttcttaatacttgacatggaggaagatgagaatattcctatcatcttgggaagaccattcctagcaacgggaagagcattaattgatgtacagaagggggagttaaagttgcgtgttcaaaaagaagaagagactttcaaggtatttgccgcaactgaaattcctacttgttgtcgagtggaagttgtaaaggatgatcgagaagtaactaccaacaagaagaaagggaagtctaaagaacgctttcgaacttttcgacgacgtatgaaaagactgttgtgtgggaattatgaaggtgactctcaatctaaggaaagctttaaaaattgcaacattggaggtcagttttcttcgtttggcacaaaggccctcatggatgcgagaggtggattctacccgccaccaccaccgccgccatactgacatggcgctcaggtaagttacctttcctttttctttaatgtcacattggggacaatgtgtcac

SEQ ID NO: 282413 - DNA, 706 bp, Cannabis indica
tccaagtccaagtcctagttccagtcccagtcaacttccggttttggttccaattttgggtcacacggtacgggttcttgtccacttttgggtttgggactgggtttaggtccgggtgtggtttcgggtcctgttggggttcaggtccagggctgggtcataaatccagacactgactaccgattttgtccaagcccgggatccagatccgaaacccaatctcgggtactagtgtggttccatttctggtgctgggtcacgagctgggtcctaggttcaagttcgggtctgggtcaggtactaggtcttggtcctagttttgtttcccaggtacctatcctgattcttggtccaggtcctggttattgtgtgggtttgggtcacggtctaggttcaggttcatgtcccagtctcggttcgggtttaggtctctgtctgggttttgatctgggatcgggtttgggtttaggtcctggtcctggttctagtcctagttcgattctagttccatttgcaattcttagttcgcgttcgggtttgagttcggatcggagttcgagtcctggtctgagttttggttcatgtctggatttcagtctaggtcagatcaggctccgggtgtgggttcgcgtcctgggtcttggtctaggtcgggtctgagtcccaagttccaatccagatctgagtctggattcagttctgggtc

SEQ ID NO: 282414 - DNA, 639 bp, Cannabis indica
acgtcaaggaactcacacaccaatctcgtattctcaggtcctgatgtcacaggttggctggtatccactgcagtgactatgaatcccaaacaaccttttctcatcaggtccttagctttcaacagtgttattcttggtatgcgtgccccctgaaccttacccacaaacaccgctgggttagcactatcgggctcaaacaccaccatcttccgcttacagtcgatcgttgccccatacttagacaaaaaatccattcccacgattatgtcaaaatcagacagttgctattcaattagattggcggtcaattcacaaccgtcaatccaaaaggacaaagaccgaatccacctagtggatactataaggtctcgcgagggtaacagggtaccaaaccccgaagcataaatatcacatggcttatggaaactttttataactctactcgacacataagagtgagtagctcctgaatgaaacaacacagtataagaacagccattaatagacaagtcacctgtcactactgacagactagcatcagcgtcagcccgagtcatagtaaaaagtgtttgaatttattttacaaggatcttagatctactcacaagtatgttgtttaacaccctaactatgaacttt

SEQ ID NO: 282415 - DNA, 516 bp, Cannabis indica
ttcagcgtttactgtcctacagtttggtaggctcttcgtatcaacacggtagcttgcccactgcaatcttcgatctctgcatggtgagctcttaatgcctccatctctttatctctccattcagcaaacatacgcctttgttcgtcaaatgcgagatttattgcagcacgcagttcatcctgatcatgatgcaaagtgttgctatgactctgcatgagtccgagcgcgacacggagattttgcaattcggttgcatcttcgatggttgtctgggccttggttccaggcagaacagtcgtgttatgaatgccctggttgtgtgccaaactgttattcccagtctctcgcacaccaggtgtagtttcagtaacagaagctgtttcaccattcaccacgcttcccgtctgtccaagattgacagcaggcggaacccttgaactccctgtgtcctataatgctagacccagcgtctgtgaattttttgggtgagacaggcctctacaagtttgcaccatc

SEQ ID NO: 282416 - DNA, 665 bp, Cannabis indica
ttcaccctccggctgaaaagttatcatcgcttacaatcaatgctggccgaatacttggatagaaaatccattccgagtataatatcaaattctgctaattctagttctactaggtcaacactcaactccctatcttcaatcctaactggcacagacctaattcgcctattggagataactaactctctgctaggcaatagggttccaaaccttctttcgataaaatcacaaggcctacctaatatattaattacccgtgttcccacacatgagtgtgtagctctcgagtcaaataacacagtaaaataggagttgttgacaagaagctgaaatgtcaccacaaaaggactggctgcagcatcaacttgagtgatagcaaacactcgagtaggtacgggttttgcctctagcttctgctcttctttctttgtctgagggcaatctttcttaaaatgccctaccatgtcgtactaaaagcatgtcttccggttgcactctcctggatgatgtttcttacaacatgggcactcaaggtaagaataaccctggcgtccacctctgcctttgttcccacttaaccgcttgctctgtcccgaaccaccagatttcgggttagcctttcttttctgatcagtagtggaatcaccactatccctaccataaac

SEQ ID NO: 282417 - DNA, 687 bp, Cannabis indica
acatggatgtaatataatgaacaattagcaaattagaacttattcttgatcttaatttcgttccaattaatatgttactgctgtaataaaattgataccaattaagttcttggacatagtatcacagtaccttatttgagtggagaattttaaaattctaagcccatcttcatttggatgacacttgtgataggaactttagaattcaactgagaaagtaaatctaaccattcatatggatagaaataacagaattttgaggataagataggagaatttgcaagtctattcgaaggacttaggcaaaattccttatcctcatgaaatgttttatggtatctctaatgattacttaatcttaagaaagtattttacaataatattaatactagattgctatgttgatgacttagcctagaaggaacttacaatttcagactaggataatatgtcacaacaagatatcccgaaaaaacaatagtatgaggttaaatgtacttttatgtatgaatttaatcagactcctactattgagtgggagccatctaagatgtaatcaaacaaggaacattaggagacagtcaagaaagatttttgaaagtggcctatatgttagatgataggggtgtattttagaatcctcatatctacaccaactcataaccaatttgagatggtggttactct

SEQ ID NO: 282418 - DNA, 600 bp, Cannabis indica
ttttagtaaatataaatatatatatatatatatgtgtgtgtatatctatggatcaggtaggaaaataagaaagagtagaaaaataaaacatgttaggccattaaaaggaattgagaggaacactaattgtgtttgaatcctttcaatatttatttttagtgaataagtgagaataatattgatcataagaatctaagaacctgtacaaaactagtttcaacactcattaatagttttttgacaaatatttttgagtcatagttggtcatttttactaacctctttgtataagaattttacaatgtaattttttgtttacttattgttgttttcttttgacactattattaattggttgtaagttgttgttatgtttcatgtcattttgtgtgtgctatatattgtatatatagtgggaaatttatggtcaattgatcttatatttcttagatgatgatgatgcttaattggtttgacttctccttgttgtcacttcagtattttaatagtcatttagaataagcaaaacaattatatttatagagcttctaccaatgatacattatgagttttcaagtctttctttgtaggttggttgtc

SEQ ID NO: 282419 - DNA, 614 bp, Cannabis indica
tttgactaacattcggcctatgcagagtggggaagtcactttcggcaatggcttagctggaaaattcgttggtatgggaactctcaattttgaagggttacccagattgaaaaatgtgatattagttataacaccctaactagcataggcgtgctatcgtgattttaaacatactgtgcagctcgttgctaatcaacgaggttattaaaaatcgtgaacaattaaaacttgcttatttaattaattaaaaaaacttaaagtattacatatataatatttcgggatctcgtttacaaaatactttacaaaagtttgctatacatataatcaaaagtttgtcgcgtagcgactatacaacaaaagcctcgtcgtcccaaagaatcgtacgctctaggcgatagaccgcccccgacatgtacaatcttcacctgctcgtactcacggttcctcagctttagccttacctttacctacacatggaaatagcactgtgagtcgacagactcagtaagaaaaagcataacataaacatacaaataacccgggttacaacttggcgcccatacaccagatcataaccctaacccccgtgtcccacacggtactgagtctag

SEQ ID NO: 282420 - DNA, 407 bp, Cannabis indica
ggattcttcacaatcttccaacaatgattgagataccacttgatgtgtgtgggcactcactcattcactcaaggttcgaaattgttgaagaagaaaagagaagggaatggtttcgactatagagaaagaaggcttaaaattttactgaaggaatgtgatgtctgatcaatcactttctcttaagccatcactatctatttataggtaaccacctaggtttaggttagaattatttggcattaaaataatagaaaaataaatggtaattgcttagtgtggccggccataggatgtggattgggccccactttgcaattttgccattttgtcatttttccatcccattttctcaaaaacgccaattttccaatttagccacttaaatgccaattccaattatttaataa

SEQ ID NO: 282421 - DNA, 669 bp, Cannabis indica
aaagaaagcccatatacaagctgcatgggacctctcctttcactatagaagtacgacaagcccaacttcccaaaggattttgtctatccgaatccctaaaatataaaggtacctctaaccctatagattatcttgaaaaatttaatactataatggaagtggatcaggtaccgcagcttgcaaaatgccgcattcttgcggcaacgctcgaggaaaacacccatgactggtttacccaattgcctgaggccttgatatcgacatgggaaacctttgtcgacttattcctcacgcactttcaggccacgatgacctataggccactctatacagctcaggcgaacatcaaataagaactcggtgagtctttacaagactattttaaacgctttaatgcagaagtaacaaaagttgagaagggtcccgagtcttcgcttgtttgcatgttgataacaggtattttgcccagaactgacttctggaaggagctacaagcccgaaggccagaatcgctagtcgaattctttgctatggccgaacctcataaaaggatcgagaattctctggcagagttggagaagggcaaggataaacgcaaatcaccaataccgcgatcaagatctcgcagtccccgagggaagaattccagaggccgaagtccgagaagac

SEQ ID NO: 282422 - DNA, 538 bp, Cannabis indica
gccccctccggacatctgtcaaccagaaaaccctagaaggatttcctggacaaaagtcgggtgcaaagaactcacagaaggcgacattgcgcgtaaaagaaaagaaagggcagaaaatcgagaaaaacaaagtcttctctatgccctagaagaccagtacacgaagagcgtatggtcctttgcaaaaaataacaacaagtacgtgacaagagtaaccctaacaccagagatggtgaatctagacctgttacgtgaaaaactcaaaagaatacattcccagaaacttcaaataccaaacccagaaaaaacaaacagataagtaaagcatgccatgaacacaaacagtaaagcaagggatgcgagaaacttacaatgaagtgttgaaactgggggttatgttgtcgatcaaacaaaggaaaggtagattgacagtggtgaatgaaggttaacagggaaatgtgtaaagtgttcgaaggttttctcttggtctgaggattttttctctctagaaaactcgagcaaagttggcaagaaatgg

SEQ ID NO: 282423 - DNA, 972 bp, Cannabis indica
aggtttcatgtcaaaatggtcaaacagagttgttttgtctcagccaacaggtcagaattattagatgcaagcaggatgtcatcaacatacagtaccaagaaaatgaaactgctcccactgaccttcatgtatttacattgatccaccacattctcccactgaaaatcatatcaaacttgagataccattgtcttgatgcttgtttaagcccatatatctacttcttgagtttgcaaaccatgtgttcttcgccagacttctcaaaacctacaggttgagtcatgtacatcctcagataggtcaccattcaagaaggcagtcattacatccatttgtttgagttctagatcaaaataggcaattatagccataatgattcgcaacgaatctttggtggaaacaggcgaaaaagtttctttgaaatcaatgtcctctctctgactatagcctttagccacaagtcgagccttgcacctctctacttgcccatttgagtcacgtttgatcttatacacccatttgcacccgatgggtctacaacctttgggtagttcaaccaactcccaaactttattttgtgacatagaactcaattcttctttcattgcatccacccacaatgcagatttaggactattcactgcttcttggtaaatgactggctcagaatcatctcccacattaaactcatgttcctgcatatagacaagatagtcatcaggaatagcaggcctacaggctctttgtgatcttctcaccacaacctcatcgtccccccaaatcaagattttcatcttgtactggatcttaaggttcaccatgagcttctattggaacttgttcaatcacagggtcattagtaggattagaagcggaagcggaagcaacaggtacagggacatagacacctcttccctgaatacaatttcctgacccttgatttgaaccaattcatcctcaaaatagacagct

SEQ ID NO: 282424 - DNA, 485 bp, Cannabis indica
aaagctacagtctcagacaaattccaagagaagaaaatacaactgcaaacgcgttagctcgattagcaagcagcaatgtaagtgacaaggtgagcttggttcctatctagttcctcgaagagcctagcatcactggcacggaagaaatcgaaatgattggtacatccccaaactggatgataccaatagcagcctacctcgagtctgggaaacacccatataatcgaaatgaagcttgaaaaatgagaaggaaagctgcacggtatatcatagtagagggaattatgtacagaagaggattctgaatgccattgctcagatgtgttactcaagaagaagctgcacgacccctatctgaggtgcacgacggattctgtggaaatcatgccgccgggcaaagcttatctaagaaaattctaaggcaaggttacttctggccaacgctgattgaagattcaaaagcctatgttaagaagtgtgacaaa

SEQ ID NO: 282425 - DNA, 535 bp, Cannabis indica
gtacatgtcgtgacgatcttcggaagccaacctagcggctctgatacgaaattgtaacaccctagctagcctaggcgtgttaacatgattttaaacttgctgtgaaaattgttgctaatcaacgaggttaatgaaaaacgtgacgaattaaaatttgcttatttaattaaaacttataatattacatacaaaatatttcgggatcccgtttacaaaatactttacaaaagtttgccattcatttacaaaatatttgtcgcccagcgactaactacaaaagccctgatgtcccaaggatcgtacgctccaggcctaaccgccctgacatgtacaatcttcatctactcgtcctcacggttcttcaactttagccttgcccttacctacacataaacatagcactgtgagtcgacacacttagtaagaaaagcataaatcatataacatacatatatcccgaattatgatcaaacgcccatacccctaaccataaccctaatccccgtgtcccaaacggtactgagtctcgaacgtt

SEQ ID NO: 282426 - DNA, 599 bp, Cannabis indica
gttcggcgattcttgttcaggttctaattttgggtcctaggtctaggtctgggttcgggtttgttcgtcgtctgggttctcgtcctagtctgagtccaagatctagacaccgactactggtttgttccaggccccgttacccaaatcccgagtcaagatttcgatcactgtcacaggtctcagtctggctctggttcaggtcccaggtcccatttttgagtttgggtttgggatcaagactggtttgaatttctaggtcctgaccctggttgtgtgtccctagtctggttccatgtttgggtctaagtttaggttcgggtttgggtctcgagtacaggtttgggttgggatctgggtccgactcccaattcgagtctaggtctgatttggagtccgagtcctggtctggttacggttctagatctatgtccaatttccgttatgattcctagtccaagtcttagttccagtcccggtcaacttccagtcttggttccaattttgggtcacatggtacgagtttgggtccacttttgggcttgggactttgttcaggtctgggtgtggcttctggtccttgttagggttcgggtctaggg

SEQ ID NO: 282427 - DNA, 703 bp, Cannabis indica
aggagaagaagtggtctttaatgtgctaaaggctatgacgtacccaaaggcaagtgataactgtttcttcattgacttgattgatgaaattgtgggtgagaaaaagctgctagatgatcctcttgaactaagtttaactgaagatgaattgacggagcaagagggacaagaggtcatgggttatgtgaagtggcttgattcctatgggcccttgaacagaagatattttgaggaattgggagcagttccaaaagagctaaagccatctactgaaaagcctccagaacttgaattgaaggtgcttcctagtcacttgaggtatgagtttttgggtcaagataaaaagctgccagttattgtttcagcttctctctctgatgtggaaactgatagacttctgagggtactccgagctcataataaggccatcgcttggacactaggtgatgtcaaaggaatcagtccttcaacagtgatgcatcgaattctcatggaagacaatgccaaaccaacaattgacgctcaacgaagactcaatccacccatgaaagaagttgtcagaaaagaagtagttaagtggttggatgctggagttgcttatcctatttcagatagtaagtgggttagcccggtgcaagtggttccaaagaaaggtggaatgacggtgatcaagaatgaaaagaatgagttgattcctacaaga

SEQ ID NO: 282428 - DNA, 676 bp, Cannabis indica
aaacatagtctctagcatactatgctcgatgtgctctatcacatacatcccacagccaccgctgtatgagacaataaaaagtaaataaataaaagtatgcaaattaaattcaagttaaataaaaaaaatcaattgtaattaagttaccttgattctgtctgtcgaacaatgctccggtccatgacttttgaagtaaaacttctaacctggctctctgaggcggtcagttgaggcaggaggatcatgtcatgactctcgaataggccagcctgcagcatcaaagttggtagtatcttttcccactttgccaagtgactcttcaattcactcggggaaatcgatccgaggctcgagtcaaatatgttcaacaaccaatgatctacctctagtgtcacccaatgccttgcactatcgaagaagagggccatatatattctctccttattcttccaactgtccaagtattgacctttatcccctcgaatcaaatccaatatgccctcatcccactgaaagttagtgtggtcatcacccgcagcttcccaccgaccaataactcctgatgggaaaatacacagcatgatgacacatctattttggtacacctccggataaaagtgttgtcgcctcctcatcaaatgaaatgccgcatccaaatgctaaaacatgaaaatta

SEQ ID NO: 282429 - DNA, 724 bp, Cannabis indica
gttacttacaaactaaaatgtaattactttactcaaaaatagaatcaaaattaacaaactatacaaaaagcataggtaaaagtgtcaggttacaatttgaagcaaaaataaaatttaaaattcaacaactatgttactttttttttaaataaacacgttaatttgagcaaaaatacaatcaaaactcaacaaactataccaaaatcaaaagtaaaagtaccacgttacttcctaaagcaaaaacaaaatttaaaattcaacaactaggttacttttcaaattaacacgttactcaactaggtatattactaatacagatgtcatgatttattttgtaaatgaacagattactttcttcataaaactctgtcataactcaatacattaaacaaaattcagtttgcatggtagtagattatttgcacaaagtagcaaagtccaaatttgaacatttattatctttgaaaaattgtccttctactaatatttgcaacttgtgagtttcaatgattgttttatcttcctccctttttcttttgtttcttgtagtttcttcaatgatgaaacaacttcattagtataatcagcaagtcttctggaattatggttacttgattggtggctcacttttagctacttggtatgagatctcaatattgtcccaatcagtgtttatttcatttttgatcaaataaattcccaagatcaaataatgaacaattat

SEQ ID NO: 282430 - DNA, 533 bp, Cannabis indica
caatgaaaaacgatttttgaattaaaagttatgacgaaaacaagtttgaggcgcaggggtatgcaacggaatggggtgtctggccgagcaaagaggctgcaaacagcctcatttgaccgtgggacgtgggcgcgagctgcccttcagagaaggagctgtccgagcgtccgcacgggcgtgtgtggattcaaatcctgatattttcgttcaacttcaaaaaatcataactaattcataaaaaatccaaattgggttctgtaaaagcctaaatttattaattttttgtctactttccaaaaaaaataatttcagatcgaaataaaaatatttcagtaacatatattgcgatttctaaactatcatcaaataagcacataaatcacatgaaaccatccaaatcaatgcaaaacatcgttttaattcatatttcatgaaagtaaatcattaccatgactctgataccagttgttggaaatattttaccaggatctagatttattaacaagtatctttcattaacatcctaatatgaa

SEQ ID NO: 282431 - DNA, 684 bp, Cannabis indica
gataacctcagaccaatcaatcgaatattgattaatacgtaatcgatcgaacactacttgaaaatgaaaacggctcttctgctcagaaatgaaatgttccaaatgttcctgtaaattcttgctcccattggaccatttgtatctatatgcattaggatcccgattcatggatctctcggttcgagaaataaaaataagaggatcgaaccatttcttctgactctttttcaaatttgagaaatgttggttgatcatatatttcattatagttctatgattcagagtatcgtttcctatttgatccctttgaattacatattcgaagttgcgatcggatctattcattaaaaagaatcgattcaatacatttcttatgtacccataggtgctatattggatttgaatcagatttcggatcaatctatattgattaactgcctccattatgttgttgctagcaaataccattatttttggttttggatcttccaaatcattcccgcaggaggtccggacccatttttttctgatccttcgataaaaagattcattttcttcataaaaaataggaggtagaaccaataaatatttctttttcgattcatccctggagttgaatacctcattcaagaattgtttttgatccaatctgtaggaatcaatagaaagggcaaatcccttatg

SEQ ID NO: 282432 - DNA, 764 bp, Cannabis indica
tcctaaactttatatgtgttttagaattcatattaggatgttaatgaaatatacatggtagtaaatctagatcctggtaaaatattcccaacaaaatcagcattgataaaatttctgagagcaaagctagacatttttgcctggtcgcaagaggatatggtcggaattgatccttctataatttcacatgtcctaaatattgatccaaatttctagcctgttcaacaaaaacgaagactgttggacaaggagcaatccctagctctgaaagaagaggtagaaaagctacgtaacaatattttcataattgaagctttctacccagcctgggttgctaatcccatactggtacccaagccaaacaagaaatggcgagtttgtattggtttcagcgacctcaacaaggcgttccccaaagactgtttcccccttccaagaatagatcagcttgtggacgcaacaacagggcacggaatattaagcttcatggacgcctattcggggtacaatcaaatcaaaatgcatccaccagaccaagagcatacaagtttccgaacagatatgggtctgtaatgctataaggtcatgccatttggtctcaaaaatgttggagctacataccaaagattggtaaacaagatgtttaatgaccagatcggacgaaacatggaagtatacgtggatgatatgctcgtcaaatccaggaaggcttgggggcatatagatgatctggacgaatgcttcaaagtcctcaggaagtacaa

SEQ ID NO: 282433 - DNA, 440 bp, Cannabis indica
tctccgagtcacgaggaggccggtgaaaggtcctgaggtggagggtttgatcccagcaacattaataatgttctccagctggtgaggacaagtcagggtggatcgaagctcggccgcttcccaaccagtcgcacgggacttatacccctcctgggcaacgggtcccagagaaacctcctccagcgtggccatatcttttcctttcttcttcgaagattttgagccagaagcagacattttgtgtcacatgggaaaccctagagagattccctgaacaagtgtcgggtgcagtgaaatcgcagaaagtggttttggaacaagaaaaaaaagaaagaaaaaccattctatgccctaagcaactgttgaacgaagaacacatgactctcttcaacaaagctgtacgattataacagaggcatgataatggcgattctgcaact

SEQ ID NO: 282434 - DNA, 428 bp, Cannabis indica
ggcataaaatccaacagttagttggttttattcaagtttggtatttgaactcaaactttggtttttaaggatgaaatgttgtgaagcttgctgtttttgatgttgtgattagattatgttttctatagttatattatggtattgtggagtgatttgagcaggttttgttggctaaatagttggatgagcaagctttgagtttttgaactcaagcttgactcatcaatggtgatttttgtatttgtgcatgaagctttgttttgttgctttagaaatgttcattggggtctaattagcaggtctgaaaagttttaattggtttggggttgatttggtcgagttatggaatttttagtgtttcctgcactgaaccagaattctggttcagagaggcctgtaggaaccggaattccggttagggaaccggt

SEQ ID NO: 282435 - DNA, 340 bp, Cannabis indica
ctggaaaaattattctaatttaatgatggcccaaaattaataaattaatttacaacaaaaaatataattttcctatttaattaaatatataagaaaaatttcaaatatttaagtatgatgatgaaaatcaacttaaatattaattttctatttaattaaatacactagaaaaatacttcaagcaaaaatatcacctatctagattttcctttgactaattaattcaatttctaataatatattttaattcatttattttaaattaatcaataaatgaaaaaatcattgatttaagttggtccaaaaattaattaaaataaataattaatttacaacttaa

SEQ ID NO: 282436 - DNA, 503 bp, Cannabis indica
tctttcagctttgccattcatttcaggtgaataaggtgcagtcttatcgtgtatgattccatgtgagttataaaattcaataaaagcagtagaatcatattcagtgcctctatcgctacgaaacttcttgatttttctactaagttgattttcaatttcagccacaaaaatcttaaacatatcaagagcttcacttttatttttcattaaatacacataggtaaagtcagaacaatcatcaataaaagtgataaagtagcgtttaccatttctagtcaaagttccatcaagttcacaaatatcagaatggattaaatctagaggctcggtttctttttctaacacagatttatgtggtgttttagtaatcttggcttggctacaaaattcgcatttttcaaagtcatttaaagataatttaggaattaggcctaaactactcatgttcttgattatgcgtttatttacgtgacaaagtctagcatgccaagtattaaaagaac

SEQ ID NO: 282437 - DNA, 530 bp, Cannabis indica
aaaaaccgaaatttttttatttaattattttcgaaaattattatttaaaattaaataattcctacatccaactatccaattcatcttgttgcaggagtatgtgttttagcttgtatgtaagttttataaaacctattattgctcttgattttgcccaatatacgtggaccaaccagacaaggacgagtggacacaaaggttttaacacaatagctaagtctttataaagaaaggcattatcccggatatgcctcctggagaaggcatacgaagttttctatgctcccggagatcaaggtggccccaaagtgtctccgggagatgtcaggcttcctctgagcagtcatctcccatttaatgccgcatgggaggaggcgtgttggaacttccacacgcaataaagtctgacgacacaacccctgatctgcacctacaaggctatgaccacttgagtctaatgacggctactctgtgaagaatcacatcagtcaaaagacaataaggacaatcccacataaaatccctacagc

SEQ ID NO: 282438 - DNA, 512 bp, Cannabis indica
acatcgagtctcggacggtcgtgcttgacaagtgtccccatccaaaggtagaagcagctcggatgaagtctacacgcaacttcggaagtcccgtatagacttgggggggcaaatgttatcccaatttttgcactctgacttggcatcgcataaatggtgacacgtggaatccacatggagcatctgctcgggaagcataatctgagcaggatgtctcgctagcatgcccagagcaaagtttttagcaatccgtgcagagcaaccaacacttagcgaattcagctttcgcatcgtgagtcatcaacgaaatccctgtaacttagggattagacttcagggatatggcatacacacgatcccacaatcagtgtattcagtatcaatcccacgatctttgtactcagtattaaccccatgatctttttgtttatatacattgtaacgagaggggaaactcttcctctccaagtttactagccctataaatagtgatgcatattcactgggcaaaa

SEQ ID NO: 282439 - DNA, 421 bp, Cannabis indica
agtttaggagaagcaagttggtacggttccaattaaagagcatctaaaatcattcaagcgatcctacatcagaagaatttttgaaaataaatatccatataaaaataatttaaattaattttagaaaataataataattaaaaaataaaaattaataaatttttaattattaatattattttattttttaaaataaatatattattatgatatgtataaagttttaattgtataacagcagtcctatagtaagagtatataccttaaatcataataatcataaaatctaaaatcaacggtaaaaaattagttccctaccaacagggccggtcctgaaatttagtgggccatagggaaaaaaatatttttgggccctcatttagaaaaaaaaaatatggtatttttaaaaattgataaaaaa

SEQ ID NO: 282440 - DNA, 620 bp, Cannabis indica
tcggaatccaagggcctccgttttttgtctcgttttctgggtagttgggatcaacattttaagtgatggcagataatcttaggtcaattcctatcatgtctccatgactccaggcgaattcatcttggttcgccttcaaaaagcttattaattgctatttgagttgctcgtctaggttcttcccaatgtacacgcatttggtgggatatcctgggtcgagaataacctcctccaattcttcaattggttttagtaggtttctttcatcttgaactcgaggatcaagatcttcatctttcttctcgttttctcctgccaagatcgtcgtcggttgatgaccagccatcctatgctatagctctatgcgataacaatcgcgagccagcatctggtcgccacgcaccacccccacgccctctggggtttggaactttaaacataagtgcttgattgagttgattgctcctagtccgatcaatgctggccaacccaacaatatattgtaagccgagggcaggtcgacaaccaaaagtcttgcataacagtagcagtttaaggtgccttccctacggttaatgcgagctcgatgatgccaaggctggcaatgctatctcaagtga

SEQ ID NO: 282441 - DNA, 227 bp, Cannabis indica
tgcttagtgaaaattcacaaattcgacatagtctaactttagaattataattgattaatcataaatcaattatcgagtcttacaagcagtatggtctcaactataatggggaccatggatctatatttctgagtttctaataagtcaaaatgaaattaccaagtaaattccctcctccatatagatgatttacatcgagatgggataaatttaccgtttcaccctca

SEQ ID NO: 282442 - DNA, 707 bp, Cannabis indica
ggaccactgaatgtcaaagctagaggtggttatgagtactttgtcactttcattgacgattactctagatatggtcacatttaccttatgcataagaaatctaaaaggtttgaaaaattttaggaatttctagcgttggctcaaaactaattgggtaaaaccttaaagatcttgcgaactgataggggtggagaatttatggatatgcaattcaaagatcatttgatctaacttggcattgaattccaatgaactgcccctagcactccacaacaaaatggagttgcagaaagaagaaattgcatgcttagctactcaactcttcctacgtccttctgggcatatgcatttcagatggcgacgaaattttaaatgttgttccatctaaatcagtccctaagacacctttagaattatggaatggtcgtacacctagtttatgccattacagaatctgggggtgccttgctcatgtcttaagaaagaaagatggcaaacttgaaaagcgaactgaggtttccatgtttgttgaaaattctaaagagactaggggtggactattttatagtcgcaaggatgataaattgtttgtttccacaaatgccactttccttgaagatgactatattaagaatttcaaaccagaaagcaaagtagtgtttgaggaaatgctttcagatataactccttctaatgttccatcctct

SEQ ID NO: 282443 - DNA, 384 bp, Cannabis indica
ggagttgaagcttgacggataccctttgtttcgtgcgactggcttctatggtgaacctcagaggagtttgcgtgggaattcttggagacttatttggcagcttgatggggaattgattcttccttggtgtttaatgggagatttgaataatgtccttcatcatagtgacaagagaggcggtcgaccttatccaagctcgttaattcagggatttcaagatgtggtttcaaattgcagtcttattgatatggagttggtggggtatcctttcacttgggagaaagggaggggtacggaggcatggattgaagtccgtttggatagagctctcatcacgcatggttggaatgatctttttccggatgtaaggttagaaaatttaga

SEQ ID NO: 282444 - DNA, 661 bp, Cannabis indica
agcttgtggtggatttacaggaccacgaccctaagccctgccacggccacggccgtgaccacggggattctagggattctgatttccttggccgcctccggtctcaaccatgttaccctgacttcttgtatatagctgggcgtccattttataggacttagcctgtgaacccataagccaagcaagttagacaacgatcataaaacttaataccactcttatggacttaaaggcaacacacttaaaataaataattataatctaatatgcttcctaacatgctttaataataatttaaaatactaacaagtacgggcttactgaaccgtgaaccgagctttctcagatgaagattgtacatgtcttggcaagcttcggtagacaaacctggcagctcggataccaaaattgtaacgccctaatgctaacgcacgctacaatgctttttcagttacattgctgtctttgctaatcaaaaaattttcttgaaaaacgtgtcaattaaaaattaatataattagaaaacttttataatatactaaactgtttacaaattctgggatcctgttttcaaactttttaacttgatcttcaaaatacataatattcatgtcgcacagcgactaaaaaatacaaatcccagtatgtctcgataccgaac

SEQ ID NO: 282445 - DNA, 849 bp, Cannabis indica
atatgttgatctcgtaaaaagattatcgaataaattaatggaattatcaattttctatgttagttctaagttgagactagactaaatataatttaataaaaattattttcaaaaatattgcactgtagttatatcacatgaatagattgagaagagtaaaaaaaaatacagatattacaaagtacataaaacattcaaaagtagtgaaacaaagtacccaagctccccacgcctaattttcaagaaataataacaaaactaatctaataagaattagggattgaaagagttagcaacatcgataacaaaacggtatttaacatcagatttgagaagacgttccatggcagtgttgacataatgaatgggaataagttcaatatgagatgtaatgttgtgtttggctgcaaaattaatcatctcttgcgtctctttcattcctccagtgcaacttccacctactattttccttcctgcaatatcataaaatcacattctttagcaaaactgaactaaaataattcacacaattaattcacattgtacatcatcttttatggtagattaaatttgcctataccaaccctataatatatataataggctaatttagatttttatcccttaaactttacatgtacgaaatcatcccctgaatttttttcatcgttataaattctccctgaactattgagatcgttagatttaagaacttttgtctaatttcattcaattttctaatatcagtgattgtttatgtactaaaccatgcccccccaaattttgatatctaccgaatcatgccactcgaactttaatatatactaaattatgctctctgaactttca

SEQ ID NO: 282446 - DNA, 588 bp, Cannabis indica
ttgtatgagacaaagcaattgttatatgaccattttgatatgaaagaccttggtgaggcttcatatgtacttgggatacagatccttcaggatagaactaaaggtattcttcggttgtctcagagaacttatatttatcggattttgaaaagattcaatatgcatacttgttcacgtggaaaggcaccaatagtgaaaggtgacaaattctcaaagggccaatgtccacaaaatgacaaagagagagatgaaatgaaagtggttccttatgcatcagttgtggttagcctgatgtacgctcaagtatgcatacaacctgatattgcttttgttgttggcgtgttgggtagatttagccattggaaagcgactaagaaggtcatgctgtatcttcagggtaccaaagatcatatattgacttatcggcgagctgacactcttgatatagttgggtttaatgacgtcgattatgcaggatgcgtggatgataagaaatccacatctggctacattttcatgatggctggaggagctgtttcgtggaaaagtgtcaaacagacactcacaacatcctcaacaatggaggca

SEQ ID NO: 282447 - DNA, 641 bp, Cannabis indica
gcaacaaatcaatgaagcatataattcatttaacttaggttctattcttcatcacaaataaaaattgcaatttgtcacaaacacttagaatcctagactactaggtgaatagtaatcctaagatgacgaaagattaaagtaaaacctaatttagtgaccatctaaacaagattaaaacaataaacataacattgacatagaagaatagaagcaatttgatatataatgtaaactaaaaattaacattcaataataaaattaagaattcatgtctcgggttttgaaataacccttaactaaaagaaaactactttgaactagacattataacgaaaatcataatatttagtgagagtagaaggagaagaaaagaactagaatgaagccgatctccgtctcttccttgctatctcttcgagtttctctctctaatttgtagttttagaatcaataaattcatagcctaaaaggtcctatttatagtgcttgaaaagatagatgcccccttagaattaggattctatttattgtgcttgaaaagatagatgaatccccttagaattaggattctatttatagtcttaggaaatatctcactaaaagaaaagataactcatcttaaaaaaaaaaaagataaaaaa

SEQ ID NO: 282448 - DNA, 1232 bp, Cannabis indica
taatatgtttataagattcatgttatttgagtatgtatgtaaatagtgtgtttataagattcacattatttaattatgattgttatgttatttaaataatgtatagtagtttggcattatttaaattaggtagattataatgtgacatggtttgaccgagaagataatggttaaatacttgactgttgggtctatatggtagatagggggccatttagtagtgggtacgattttactgaacccagccctccgccatttagtccaatagctcgagtttatttgccaaagtcggactcgggcgtaatcattattatgtgatttagcttagaacctagttattagtgactagtgatataattaagtttatgttttgctatctgtctaaatatgtgcatgtgcattttagttaggatttacttttatttatgtgactacctgacacacatttccttactgagtttagtagctcacccttattaaattaccatgtgcagaccaaagtaactgaaagtctagaatgccggtggcgagtggaactttggacgcttgtgtgtgtgaactcgctgagggccatataactgcgggcggtctagggcgctctatttatttatttacgctattaagtttatgtcgcaattattttagttattatttattatgtcttttgtacgaaaactggccagttgtgaatattttcaagtattaaataaaaatgggacattatgattttccgcgattaacgcttgtaaataaaattaatatttttataaaagtacgggcgttacacacacggggatccaattcatcttcttccgccatctctggctcaataatttcacggaccattaggacgggtaggtgggcggcaacgttgtaacactgcctggcctctacctagttccctctcacggttcctattccagcctcctgagtagggaatttcaggcataagtgcctaattgacgtgactgcaccaaaatccaccagggccggtcggccgaggattgcattgtaagctgttgggtagtccaccaccacaaacgtgcagtatttgaaagtgctttggggtgtgtccgggcacaaggtgactgggagcctcacttttcccattgggatgagtgttgttccattgaaccctgtgagctgggaaccgcttggtgaaagatcccggtccgtgaggcctattgctgtgaaggcttctttgaataacaagttcacagaactcccgttgt

SEQ ID NO: 282449 - DNA, 572 bp, Cannabis indica
acaaactctaattacctcttaccacacataacacacatatatatatacacatgttattacccttactaaccctaaggggttattaactaatagggcttttgaggtcttttacggtatactataatttaatgggccaactatagtattaagggtgctctcatgtgcctctaacatataattaagttgctaaccatcccattatggttatgagtaacattaggcacatagttaatgattgagtattatggaattaaacctatgattgtattagtccattataataattctaacaataatatcatcaataaaaggcctaaaaacaacattaaactgagggaaattaacccacttacacacaacacaagaatcaacttcagccttaaagaaaatcccaaattaaaagcccattgcagacccacttggagagccatcagctcagccaccactactacaaaattgagctttagtgacactatttagtgacccgcacaaaagtgcgtgtcactaaagggttaggggtaaggttttagtgacacgcacaaaagactctgaaaattcaatgttagtgacct

SEQ ID NO: 282450 - DNA, 725 bp, Cannabis indica
gggtggacctcctcgggaagttttcccacggatgcgtgtgagtaaggacaaagcacgcttgaaacactcgtattggtctgtagggtcagtcatcaatccatgaagcagctagagtaacgtactcgtgtataagagccattcattccgtgggtgtaaggacccaatggaggcttgaagcggggatgttacaaaatgctttgcacaggtataggtgccccccaagtgaccgagtagacgtatgactcttggtcacttgtcttttgcaaatatattgcttatctattctgtgttttgggtttgaccaaaccttttgtacgcattgtatggtaaattatcatgctgattgttttgactcaattgaattttgaaatactatctttattcatttattggtcgaaaagtgtatttgttaccgtagtaacttacatcagagctatttgatctaatctgatcttttagcttaacatgaaataaaacaaattgcagacataagaaactgtactttagcgtggtcacccgacctgagtactttgtttcttttatcgaaacctttgggcgtagtccgcccagtaggccattcacttaagagaaaatgttcatttagtacttaaagttgtcatccaacatggtactttattgctagtattttcttaaatgttctccattccagtatcgtggtactagaatgagttgcattttttcgtcatacttacctaatttgtatg

SEQ ID NO: 282451 - DNA, 461 bp, Cannabis indica
ggctgatagtcagaacgctggaggaggccaagaactgggtcagtttttgaacgggtaggcccccgagggggtagagacctgcgggacgccctcaacagaaatagagacaatcgtggttccaacatagtgaacccacctgagccagaccaaggggaccaagcgaatgttggtgccaatattgctcaacctcaaacagccacagatccagtgatccaggctcagttggacgagttaacccgattggtcaaggacattaccgcacaaaacccactgatttggacctagaaaggaggagagggtatgccttctcccaaatgattaatgacctccctattccagcaaagttcaagatgcccacttgcaagtacacgggtagtgaagacccactaactcatgtggagaacttcaaaatccaaatggaccttcaaggaatcagggatgaccttaggtgtcgaattttc

SEQ ID NO: 282452 - DNA, 683 bp, Cannabis indica
agaggagaacatccactgcatccggtggctcgagtcagaacaagaggttccgggggaaccagaatagaggtagccgtcagggtggtgcagagacccggttttcttatcctgagtgccccagctgcaaaaggcacaatcagggtgagtgcaaaggtcatggatgctttcagtgtggcatgcccggacacttcaagagggattgtccccagctccgattagaggcaccgagggctccggcgagacccactccagctagggtgttcgccatcactcaggctgatgcagatgccagcccctcagttgtaacaggtcagctttcagttaataactagtattactcagtgttgtttgattctagggccacacattcttatgtggcagccaaaatctccaaaaggtggagagttagttatctccaaaaggtggattaggtttatgccgatcagaatagatggtagagagttaagtgctgacttgatagagatgagcctagtagagttcgatattattttaggaatggatttcctatcgaaatactcagccagtattgattgcaagaagaagatggtgatcttccaaccggaaaatgatgaaccatttgtgtttgttggttcagttcggggatctcggatcccggtgatttcggccatgtcagctaaagagttattacatggcggttgttt

SEQ ID NO: 282453 - DNA, 517 bp, Cannabis indica
attaattgatgtacagaagggggagttaaagttgcgtgttcaaaaagaagaagagactttcaaagtatttgctgcaactgaaattcctacttgttgtcgactggaagttgtaaaggatggtcgagaagtcactaccaacaagacgaaagggaagtctaaagaacgatttcgaactgttcgacgacgtatgaaaagactgttgtgtgggaaatatgaaggtgactctcaatctaaggaaagctttaaaatttgcaacattggaggtcagttttcttcgtttggcacaaaggccctcatggatgcgagaggtggattctacccgccaccacctccaccgccgccaaaccccttctgatggggctcaggtaagtttctctcaccctggtttattttcacacattggggacaatgtgcattttagtttgggggggggagacttaaatttttcgagtttatttgttttagtttagtttgttttagttttttttagtcttgtgtgatagctaaattgaaagat

SEQ ID NO: 282454 - DNA, 668 bp, Cannabis indica
cccttgatttcactttcataaaatattcacatggcatttaaaattcagatatttagatagagctcaaaaagagctttccaacgatatatagaactcccaaatcggagtccggatcacaaagctatggccatttgaagttgcaaaaaggatctgcccttaaagaaatgagcgcgccgcagcatgctaaataccatgccgcggcatctgggttcaaaacccagaaaaacagcagcaagaacacgatttccgcaagaaaaatccaatcttttcaccccaattcacaactaaaactcccaaaccataaaataggtttttaatcatcataaagggagtttaaaacacatgctcaagcatcaaaatccaacattataaccccataattttagattgcaaatccatgaaaaccaaagctttaacttgagctacatctcaaacaaacttccattaacaagagcttgaactccaatttcaaacaataaattttagacctcaacaatagaaaattacactaatcaaatcctctaatttctgcccaaacttaacctatacaaacttatgaatttaaagctctaagcatgctcaagacaaccccaacaaccaagaacatgcatcaccaattcaataccacaaccacaacacattttcatgctcttcaacaattaatttca

SEQ ID NO: 282455 - DNA, 796 bp, Cannabis indica
ttcgttttttcttctcttccgggttccgggcagtggaacatccagaactcctcacggagtgggttaggattcctccttacgagcggaacgcgcctactcaggtctttctccggaaagcccaggccttcgcctcttatgaccgggcggacctcgacgtcgggggcctggttacgacggagaattgccaaaaggcaaaactcatcttgccgcatcaatccgtggaggactctaacctttccagggttatctgtcccaatgtgagggcgcctgccgcggagaagatcttccgggaggagattatcgccactgccgagaagaagtaccaggactatctctaccggaaggctcaggagaaagcctactctaaggctcaggcagcttccgggaggccactccgtgtggggagcccggtcgagaggagaagcaaggcgatcgctgggaagccccttcatattggggactcgacggagagaagggctcccaggccaaagccttcggctcagcagccgaaaactggggctccgggcgccagcacttccggctttggtggtaagtctcctttagcagttcattacgtccctcctgttggcgagtacgccagtcttaggcctgtagggttcgatgagcctctttataggtttaggatgccctcgacccggggggagaccatatgaaggagttttatttttccaacttaggagatttcctaggtcggtcccggatgggttctggtcctccagagcccgtccccttagacccttcagcttatatttcatccagctggttccggccttcg

SEQ ID NO: 282456 - DNA, 391 bp, Cannabis indica
cgtgatccctggccaggaacataaggtttgcaagttggataaatctctgtacggtctaaagcaggcacctaaacagtggcatgaaaaattcgacactttagtcatttcaaatggctttaaagtaaacgaaagtgacaagtgcatctattacaaatctaaaaacgacatatgcacaatcatatgtctatatgttgatgacttgctcatttttggctctaacattcatgctgttaacactgtaaaatcaatgttgtgttccaactttgatatgaaagacctcggagaagcgagtgtaatccttggaataaagattactaggtctgataagggaatttctctagatcaatctcactacattgagaagattctaaagaaatataattactttaac

SEQ ID NO: 282457 - DNA, 510 bp, Cannabis indica
tttaaaagtttcgacttcgcctcgggcgcctcttttctttgtagacccacttacatctgattagacgatagtcatcaggtgcgtctacatattccaagactttcttctttttcatggaatccatttctgaatccatgccagctaaccatcatttccgttctggagttgccattgcctgtttataggtcaatggttcgtctgcaataccgtcaccaacgaccatattgatttcaccttctaagccataacgagacggttttgtagaaaccctctcactacgacgaggagcgaaaatcttctgaacaggaactttagtagtagttttctcagttatttcgactgagggagtgggattatcctcttcttgagtggaagaggacggaacattggtaggcgttaaatctgtaagcatttcctctaatacaactttactttttggtttgttgtctttaatatagttatcttcaagaaaagtagcatttgttgaaacaaacactttgttatccttgt

SEQ ID NO: 282458 - DNA, 821 bp, Cannabis indica
agctgttcctctacgcctcaattgtggtagatacgatttggagggcccgcaacgacaaggtacataataattcaatgggtaacattaaacactatattgactctattttgtcttgttacacagactatggctcctgccttctttcccctccacagtctgttgagactcaggcttggtctccgcctccggaagattggattaaaatcaactgcgatgtcaaagtcggaggtgagactatgtgtgcagtggcgattgcgagagaccataatgaatcagttttgtgggtggcggcaaaaaggttacaattcactgacccactcactggagaagctgcggcctgtcttttagccatggagacggcggtctcattacatcatccttttgttttagtggagagtgattctgatgttgttatcaagaacctaaaaggggatgactctatttgggggattgagaactatgtgcgtcattgcaaactcctctctacttttatgactaattgtaatttttcttatataactagaaactgtaactacgcggcccataatgtggctaaatgggcatttgcccacaatgttacgggcatggtagaaatatctactatacctgttaatatcttttgtaatgaccatgaggtctaactccaattttatttataaacgcatttttccaaaaaaaaaaaaagaatacaattgcataatttaatttttttcttaaaaaatatctacatatacatttaactttaaattatcctagttaaacctaacgataattatattaaatgttatcccaatttttgcactcttacatggcatcacatg

SEQ ID NO: 282459 - DNA, 625 bp, Cannabis indica
ttgtaaattctagatctgcttattggaagctcggatatatagacccatggtcccctcactagttgagatgatattacttgtaagactcatttaattgattttaattaatcaattataattctcaagttagactatgtctatttgagaatttatcacttattaagggcaaaacagtaaatagagaatttgaagggtatatttattacatgagaaactttgattagttttattattaataaataaatgacaatatattatttgataattaattataattattaaataattagaattgacatttatatggttgaataagagaattggcagtttttgacaaaatgggaaactaggaatgatggaaaaggaaagttggaaaagtggaaggcttgtttccacattgcctaggccggccacctttgcttcccttttcccatttatttttcattttttaatgccaagtaattcaaccataaccctatgtggtcttctataaatagaaggtaaaggcttcaggttttacacacactttaacattattttctttcactcaaaaatcatcttgaagccgccactctctctctctctaccttctctgtttttcgaaatcctctaagtgatagagtag

SEQ ID NO: 282460 - DNA, 840 bp, Cannabis indica
  modified_base (50)..(50): a, c, t, g, unknown or other
tatttagagcaggacactaaattgttagtgtagttgttaatgttttttgngtttttgcacatatttccctgtagcgaagttctatggttcgtcctctacttctcaatgattccaactatttatattggaaggttagaatgagggcatcatcaatcccaagatgaaaaagcatagagatcaattctttcaggctcgtctcattcggttgtggtagattctaaaggtaataaaatgttgaaagctaaacttgaatggtttagtgaagatgataagttacatgcttacaataaaaattttacatgctatatttaatggaatagatgaagtttttatcaaacttatatattcttatgaatctgccaaagatgcatgaaaaattcttcaaaccaaattcaaaggaataattgatgttaagcgatctagatttataatgcttcaaaccaagtttgatgatcttagaatgtatataatgaatatatgtctaaattttatgaaagattatcttatattgctaacgaatcttctcttaagcaaaaaacttgatgaatcggtgatagttcgaaaaattgtgagagtccttcctaacaaatttgacgttaagttattggcttggagaagtaaaagatttcaggaagatgaaggtggaggagttgatggggtccttgcgtacctttgaaataaattaataaatcaagaaaaaagacaaacccaagtccacagttgatagaggtaaatgaattacttttaatgttgctaaaaaataaattttagatgaagaagaagatgagatggatgtttcaactaaaaactttcaaaaatacatgaaaaagataagtgaca

SEQ ID NO: 282461 - DNA, 598 bp, Cannabis indica
ttattctaacatattatggccagctgccactttcaaattcagccaccaattctaagggtaaatgactaaaatacccttccccacaagcataaacatcaaaatggtccatgggataaaatggtcctttctaaaatcttgacaaatcccgacattcccaatgtctaactataccgccctgctatactagaatactaagatgtgaatctactaagccatacaccgcgttctaattttgtcgggcaccgaacatgcaaaaatattaaatttctatatatgacatataaaatgcattctgaattcaaataaatcaccataaataattattaaatatcaataaataatttttcataattaaaccctaattatctgctaatttccaaatttaaattaagcggtcttcacaactatccccccttaaaaggatttcgtcctcgaaatctaacctgaataactttggatattgggttatcatgtctgattctaattcccaggtggcttcatccaccttgctgtttctccagagtactttgaccaaggctatggtcttattccgaaggattttatcctttctatcaaggatctgtactggctgttcctc

SEQ ID NO: 282462 - DNA, 486 bp, Cannabis indica
accatttatcattaaccagatcaaaaatgtaaaaaacttgaactgcttggctagccatgatgaatggatcattcttgcttcctctcttacttaaatcaaccaaagtaaaaccaagcttgtcagtttttactccaatattgttgttaacccaagaacatttaaaaagtggaattcagaacgcaaaatatttgagctcccatattttttcaatgaccccgtaatacgtcatactacctaaaacagggtttctatcttttgcacttgcaaagtgcatagtttcttcgacgatacgtataccaatattttgaacctctcgagcatcatctcttgactttgtatgaaaacgtttaccccttacaatgaacgcttcatgctttgctaccgcaaaagttggtccaagggaaatacgactcaacacatcagatactccatgattcggttcgttcaactttgctataatggtattccttaaccacccaatgaaag

SEQ ID NO: 282463 - DNA, 783 bp, Cannabis indica
tttcatagtgggaaatattttagagaaaataaattatcgggattgagcggggttatggaaattgaccattttacccctagctttagaaatacctaagttataccttaaagggcatttttgtcatttgaaaaaaataagagataggtggctgccttaggttttgacacctagctaagttgatttcagcaagggattaattaaatccttttgtctcatttgaagaaaaatcaaggaaaaagaaaagattgaattttagagttttctcttgaacctctctctctctctcttgctttcggctgggacaaaccaagggagtttgttgttgattgttggatttcagcaaggatttcaaagaagaaatcaatctaaggtaagttccaatgaacccttcttagttttcaagtttttaagttaggttgaaatggtgattttgattatgaggggctgttaggttttaaaatgcttagggttcaatttctagggttagtttgagttaatctaagtccctagcagctggttttaatgcttgatgttagttctaagcaagcttgagttttgaaactcaagctttgagctttaatggcaacttgagatttattgatttgttttgtgaattattggttggaaatggttgtttatgcattgtataggtgtactggagagtttgataaagtttggttgagatttgaggtcatgggggaaatttttgggttcccagcacagaaccggaattccggttctgggggacctgtaccaaccggtcgaccggatggtgacccagaa

SEQ ID NO: 282464 - DNA, 751 bp, Cannabis indica
aagagacaattagtgtatcatttgtaccttgagtttggatgtaaagaattggctcactcttgctcctcctgaatccttgctcggtaaagtagcaatcaattctgctataccaggcttgcggagcttgctttgcgccatataaagccttttcaatttgaggactttatcttcatgtccttgtaccacgaacccttgaggttgctctacataaatttcttcttcaagataaccaatttaggaatgccgacttcacatcgagttgaaaaatcttccatttcttctgtgcggctagagctatgaaagccctaataatgtcaaggcgtgcaactgaagcaaatgtttcgttgtagtcgactccgtattgttgtgagtatcctttcgcaactaaccttgctttgtgcttttggatagagccatctgcgttgagctttgtcttgtagacccacttgactcctatagtatctttgtcttgtggacgatctacaagctcccaagtctcattcttcacaatcatctttatctcttcattcatagcttttctccatacttcttgtttatgagctgcttcaaagctttctggctccataagtactaagttgcatgtctcgtagatttctgatagtggtcttgttcgccttactggtgagtctggcggagattttatgacttgtgcaggttcttgtgttgttggttgagtaagaacttcattttgatcagtttcttgtcttggcggtagaggaatattgactgt

SEQ ID NO: 282465 - DNA, 701 bp, Cannabis indica
acaaagttgaccgatgcttatcagatttgccttgagtcctttcacatacagtacttcagtaagaggtgcagctctactcatcaccaagtctccttttccaataatatggcccttatttccatcaccaaaagtgacaactccctcctttgcttctttgtaattgactaacaatttcttgttgcccgtcatgtgtcgagagcaaccactatccaagtaccactgtccttccagaaatgcagacagtgaaacttgagctaccaacccaacattcgattcacgatcagccctcaatctccactcacattgagatccttcctttcgagttttattgggtttttgaaaactcataggtcgattgatcatagctttcaagtagttctgcagcttatagcatctgggtcgaatatgacccctcctgttacagaagtgacacactgggatgaatctctccatctgagatatattctccggggcaattcttcttccttctaacttcaccttggtaggtccagatggaacatggaattttccagtggggtctgaggactgaggtgtcgagggaaatgatgattgcttgtcatcctttttgtctaggttgatcactggtgtaatggactcttctacccccaagttatctccttgcttatacaacatcttgtatccgatagaggttcgatcaccataaggtttttgaagttgaa

SEQ ID NO: 282466 - DNA, 611 bp, Cannabis indica
ttttatattttgatttttttttagtggtgctatatcgtcaactttctatttcaatctttgcgtctgaaaatatatatatatatatatgcctatttttttttctttcttttagtttttgttttcatggtgataattgttataagtacaatattaattaagttagtagaatttcaaaaaaatttgaataatttacaatattgacaatacagctcttgacagacacactaatagtagtgtgtggggactagcgctatatagccccaataaaataaaattaaacatgttctatttaattaaataattatacaacaaaatagtgaaaaaccattataatttttatgtaaattagtaactataaatatttttataagaattaagcaagcttccacaaataaaaaattatgggttcgtattatagtttttgatattccaatcaaccattaattgtatgtgttcaaaaaattttaaatttattttcgatcgtgtaaattttgaaacttttaacaaatttaaaaaaaatattagaactataataaatactataaaatataattttttttttaaaaaaaagtaagttattcctgtatttattttcgtatacacactacaag

SEQ ID NO: 282467 - DNA, 610 bp, Cannabis indica
caaagctaaagtgaggagccgtgagggcgagcagatgaagattgtacatgtcggggcggttaggcctggagcgtacaatcctcggtacatcagggcttttgttgttttgtcgctaggcgacaaatattttgtaaatgtgtagtagacttttgtaattgtattttgtaaatgggatcccgaaagtttataaaagttatatgtatggtttaattaaataagcaaaattttaattattcacgttttccaataacctcgttgattagcaacgagctgcacagtacgttaaaaatcacgctaacacacctatgctagttagggtgttacaggagccatccctatagtactctgatagcaattgttgtatgaaaactctatcaatggtaaatatttactccaggagcctacacaggcttgcaacatatcttttagtatctgaattgtcctctcagattgaccatctgtctcgctgaagactttcccaaaacgcaaaagtgaactttggatatgtatctgatataatggacttcggagccccatgtaatcttactatttccttcacatataattctgcatattgatccactgtaaaggttgttttcaccagtagaaa

SEQ ID NO: 282468 - DNA, 508 bp, Cannabis indica
aaaaccaaagaggtgcaaagcctaactggtcgaatcgccgcacttagcaaattcgtgtcaaaatcaacggataaatgtgttccattcttaaacatcctgcgaggaaacaaaaagttcgagtggaccgatgaatgtgaaagagcttttcaagatctaaaggcacagcttgcaaaacctcccgtactttctcaacctttggacggtgagtagctggggatatacctagctgtcaaggagcatgccgtgagtgtcgtgctgatcagagatgagaacaatgtacaacacccagtctattacattagtaagagactcatcgaggccgagggccgatctccgttgatagaaaagctcgcctactggcttattctagcaacaaggaagctgaagccttatttctaagctcatcctgttcgggtatataccgaccaaccattacgacaaatattgcaaaggccagatgcttctggacggttactcaagtgggcggtagaattgggtcagtacaaaa

SEQ ID NO: 282469 - DNA, 904 bp, Cannabis indica
gaatgtaggtaaaagaggtttagttggcatcggatcaaatggtatggaaagttctagaatcacaaaatttgtaaaatcaagtgttccaacaaatcttttgatggtgcaaatttgaagtctgctgtaatagattcaaaacctgtcgttgcataagctgtttctgctgacgcaaaatctccaggatttgcaaaaagcataagatctgaggtaaaaagatctgttcctacttgtcatttttgtggtagaaaaggacatatcagacctaaatgtttcactttgcaaaatatgtttaaaacaaattattttggtaatttagaaaaatctcaaaagaaacatagaggtttgaaacaaaatggattaagaaaaagtgtctagctggtttttctgataaaagtgctgcatctcaaatgtggtattttgatagtggttgctctagacatatgacaggtgacaaggaccttttgattaatattcggcctatgcagtgtggggaagtcacttttggcaatggcttagctggaaaagttgttggtatgggaactctcaattttgaagggttacccagattgaaaaatgtgattgttagttgaagggctaagggctaatttacttaccattagtcaaatttgtgaccaagggtattctgtctcatatgacagtgttcattgctatgtacttaatgatgatgatcaatgcattttgtaaggattttgatccaatgataatgttatccctaactcctgtaatcacttgtcattcaggcatcaacaactctacagatttgtggcacggacatattaattataaaaaaatctgaaaaaaaattgtcaaaatgcaggtatgttcgaggtctacccaagcttggtaaagaaagtgtggtaagtgtgaaccatgtcaatttggt

SEQ ID NO: 282470 - DNA, 966 bp, Cannabis indica
ttggggtgcaccagttttgtttgtcaagaaaaaggatgggtcgttacgtatgtgcattgattatcgtgaattgaacaagttgaaaataaagaacaaatatcctttgccaaggatagatgatttgtttgatcagttacagggaaagaccatcttctccaagattgaccttcgatctggttatcaccagttgaggattcgggaagaggatattcccaaaactgcttttcgtactcgatatgggcactacgagtttttagtgatgtccttcggtttgactaatgcaccagcagcatttatggacttaatgaatcgggtatttaaggacttccttgataactttgtgattgtgtttattgatgacattctagtctattctgaatcgaaagaagctcatgaacaacaccttcgtatggtattacagcgtctccgagaacacaagctttatgcaaagttcaagaagtgcgaattttggttgtccaaagtgagtttcttaggacacgtggtaagtaaggatgggattctggtagatccagtgaagattgaagctgttcgagattggccacaacctaagacaacaactgaagttagaagtttcttaggattggctgggtactataggagatttgtagaaggttttgctaagattgctactcctttgaccgagctgacccgaaagagttataagtttatgtggactgataaatgcgagaatagctttcaagaattaaagaagagattgattactgcaccagttctaagcctgccagtcagtgatgaaaagtttgtgatatactgtgatgcctcaagacaaggtttgggttgtgtgttaatgcaatcagggaaggtcattgcctatgcctctaggcagttgaaggattttgaacagcgttaccccactcatgatctagaattggaagctgtggtttttgccctgaaggtttggcatcactatttatatggtgaaaa

SEQ ID NO: 282471 - DNA, 600 bp, Cannabis indica
cctaatttgatcaatgatccttgttgcccctaattttgcccaatatacgtggaccaaccagacaaggacacatggacacaaagggtttagcacttaaattaaatagctaagtctgtataaagcaaagcattactttagatatgactcccggagaaggcatgcaaggtctcataggctcccggagagcaagatggcatcaaagcatctccgggtggtgtcaggcttcctctgagcagtcatctcgcatttaatgccgcatgggaggaggcgtattggaactgccacacgcaataaagtctgacgacacaacccccgatctgtacctacaaagctatgaccaataaagtctagtgacggctactctgtgaagaatcacatcagtcaaaagggattaaggactccctcataaaatccctaaggcacctagggattagatgatgcatgacccatggtatattcattgggaacatacaactttattgatagttacagaaatacatgtaccttaattctggggatcaccccacgaaaaacactataaatactcccccaaagctcattaatgggggtcgagaattctgggttgcataagtgctagaa

SEQ ID NO: 282472 - DNA, 658 bp, Cannabis indica
aaaacaagaaaaactagggttcttgaaaatcttccaaccggcagaccggttgcacaaccggaattccggttctgggaattttagaaccccatccggaattccggatgcacaaccggaattccgtttcctcgcaggattcaaccaaaaattcataactcacttaaatcaaatccaattcaccccaaaccttccagacctgctatttagaccctaaggaacatttctaaagcatcaaaaccgagcttcaagcaaacaatccaaaatcaccattaaagcatcaagctttgaggtccaaactcaaacttgattaaacaacactatcatgcattcaaatcagttcaaacctacttaaacatgcataatataacctctgaaaactacaacaagcatcaacaaaacaacagcaacagatttcaacaatttctcttgaaaaaccatagttttgagtaaaagtttccaagcttgaatcaaagcatcaaccatgcatcataaacagatccaagctactcaaataatcatgctttaaacctcagaaacaacaacaaaatcacagcaacaacatcaacctaaactaagcaggcaaaacatcattttcttcccaaaatttccaagaaacttaaaagaaagtttccaagcttgtacccattgctcgttgcaa

SEQ ID NO: 282473 - DNA, 846 bp, Cannabis indica
ttttctgaggtgaaacattactattgggaagaaccaatcctctacaagcactgcgccgatcagatcataaggagatgtgttcctgaagaggagatgtattctatcctaaatcactgtcatgctttaccatgtgggggacattttagtggaaatagaacagctgcaaaggtgttgcaaagtggattcttttggccaacgctattcaaggatgctactacttttgtaaaggcatgtgatcgttgtcaacgaacaggtaatatctcaagaagaaacgagatgcctttaacaggaattttagaagttgaattgtttgatgtatggggaatagactttatgggtccttttccttcatcctttagcaatcagtacattcttttggctgttgattatgtgtctaaatgggtcgaagcttcagctacacctcaaaatgatggaaagacagttctccgcttcttacaaaagaacatttttactcggtttggtactcctcgagcaatagtaagcgatgaagggagccacttctgtaacaagcagtttgaagcactcctctcaagatatggtgttcgacatcgaactgctttaccataccatccccaaagtaatggccaagctgaaatctctaaccgagagattaagatgattctggagaaaacagtgcaaagatcaaggaaagattggtcaaggaagttggatgacgcactgtgggcatacagaacagctttcaaaacaccgattggcatgtccccatatcggttggtgtttggaaaggcttgtcatttaccggtggagttagagcatagagctttttgggccatgaagactcttaacatggaactaaaagctgca

SEQ ID NO: 282474 - DNA, 735 bp, Cannabis indica
gttgtggttgtttgctgctggaattatttggtttggtttgaggtcaagctcaagttttgagcttgagttcttgttggagaagtttgattgttgtgttgttgaataatttgaaattaggggtttacatgttggaattgttgttttagctttctgttgtgatgattcttatctgtaagaagttaattttgggtatggattgattaaggttcgaatatatggtaaagtgggcatgtttagaccttaaaatctggttttctgggtttttcgaacccagtggccgcggccagatctatggtcgccgcggccataaaacctggcagagagccatctttttcctgaatttgttttggccataacttttgactcgggactccgtttgggacgttctttataccgttggaaagctcttttcgagctctatgtgattatctgtatttgaaatgccatgaatttattttatgaatgtgaaatcaggggttaaccctatttgtgaaaatcccggattgtgtgtgactaggattaccggcacctggtcaggagcacccggggatttggaatctctactattgcgggacaacaggtaagacagtgattagcacgtagagtatgcgcagtggcgcttatgttgagaatgatatgcatgaatgttaagtaaccgggattaggggttattacccgtaataggaaacggtctaaataggccctaggggttattaccccgtagttgatatatgt

SEQ ID NO: 282475 - DNA, 511 bp, Cannabis indica
caaagtctttgctgcactatacctatatacaacaagtattgttaatcacaagcagtccaatcaaattaaaataatattttattatgatatcattgaaaagttaaaagtacaacaaataaacatgtgtccccaaagaatgaacacacttacagcccatttggtttgctgtaattatctttggaatggaatgaaatttattattttttattttatgtccaaataaacatgtgggcccaaatgaataaacacacttacagcccgtttagtttggtataattatctttgaaatggaatgaaatttaatattttttactttatgtccaaataaatattatggcccaaatgaataaacacactatacactattttttctctctttaatgatttcttactttttatgtttctttattttaatcaaacgaaaaaagtaattattaaaagaattattatttatattaattattgttatcccaatttttgtactctgacgtggcatcacatgaatggtgac

SEQ ID NO: 282476 - DNA, 496 bp, Cannabis indica
attttctaacattttgggatttttgtctccttattgaatcttttcaaatctgcattgtttctatcaaaattaatgagctcacatcgttgttgtgttatacggagactaaactatgccatttgttatgtttaaccttcacatcaaaaaacatgttgttatattctatatttggattatgttaaaaatttgatcttatgaagaatacgtttaattagcttaatgtgttttactatgcagtatattcatatacagtccttctttttcttttctatcttcgaaaggatagttaataaatataatatatagcttttttttttgaaataatatatagctttttttcactctctctaatatgaaataacaaaaaaaaaaaaactgaattatccatgcgcgttgggtccacatgagtcaaaaaaatcataaaattatcctttacaaaaatatacactgatatttttaaaattttttttgatgatcttaaaaatattataaaata

SEQ ID NO: 282477 - DNA, 668 bp, Cannabis indica
aatgcaaacccgtcatttcaattttttttttgaaattcaaaggttctcgactaaacctctttgatgaaagtggagtcgaaccattataactccttaaccaaacctttttgacgagagaggggtcaaatcgttataacaccttgaacaaacgtttttgacgaagaaggaatcaaacaactataattttttatttaaaacctatccgacgggaaaggaaaatcaaaagttataactcgtgtataaaactgaatactaacggttctcgcgagctaggaaagtactaaacgtggcataatgacgccttgataaaagtacttgaacctagaaaatggataaataatataactattcatacaagctaattaagaatatacaaagtgataaaatcattaaagtatatttaagtttgcttaaggcaaattataactgctataccgaggcagaattgacaattgctcgaaaattaaaaagtttggtagatcaataactacataaacaggaagattacgagcaatggaaaaacccaaaagtactgtacatttgatcaaaatagagttgtttacattgtgaattaaaacggaagcaaacactattgtattaagttcaaatgaaaatagtacaaggcttttaagataaaaaaaaacacaagttgggttacaaacttgtct

SEQ ID NO: 282478 - DNA, 762 bp, Cannabis indica
aaaatggacaaaatgagtatttatgccgcaaatttccctttacaaaatatttgtcgcccatcgactaacaacaaaagccctgatgtcccgaggatcgtacgctctatgcctaaccgcccccgacatgtacaatcttcatctgctcgtcctcagggttcctcggccttagccttgcccttacctacacataaacatagcactgtgagtcgacagactcagtaagaaaagcataaatcatataacatacataaatcccgggttatgatcagacgcctacacccctgaccacaactctaattcccgtgtcccacacggtactaagtctcgaatgttcgtacgatggtacttttgacatagtaacaacctatactcggtacgctagtcatactctagccgtaccaatgtgttatcgtatcagcctatacttggtatgtcagtcatactctgaccatatccatgtgatactgtcaaatagtacagtactatcgacgataatatcagcctatactcagtacgctagtcatactctagccgtaccgatgtgatactgtcagatagtacaaaagccaacatacatatctaatgtaatctaacaggcttcctaacatgcacgataaacatgtaaatacatatgcatactattatactaatcttacctcgattctgaattcaagtgtgccggtcaacgtgagtggaacaaactgctcgacgaattacaggctcctaaatcacatcaatcacaacactgataagcgacacgct

SEQ ID NO: 282479 - DNA, 648 bp, Cannabis indica
tagactcacctacgtgaatgtggaagtggggccgcttcctatgaaatttgggcaaatttctagagcgttcactacactgggatagacgtgcatggccattaaagcacgggcttttggattacacccaagaaaggttgtgcgtggtacatcgttagagatagagttcaagactacgagtcactctagtatattctaagttgtattcacaacgcaaaggttcaaatcgaaagatacctttgtttatgctcaatcttattgcttagaatactgctcgaatagatattttttaaaaatttcaagtgggggattgttggaactttgtgaaatgttaaaaaatgatgtgtgtgagtaggagtcccacatgggatagaaacacttcatttgaagtgtataactagtgcaagtttgagatatgggtttgggccccaaggggtacccagttttgcgcgcatgggtgaggactcacacaccggaccaccacacacgcgtgcggcgccgccgccgccgccgtccgaccgaccgagccgagcgggcgggtgtggtgtcaccttattttttggagaaaatttatttcttaaattattatttatttaattaattaaaactagttttttttttttaaataaaacgtgtttgattaattagtaa

SEQ ID NO: 282480 - DNA, 600 bp, Cannabis indica
gattggctatctagtcacggtgcgacaatcaattgccgaaagaaactgatcgtttttgaaacaaaggctggggatcggtttatattcaagggtgacaagctagcccttgggactccattaatctcttccctgaaagctagtcagctaatgaaggcgggatgcatggcattcttggccagcgtagtggatcgagcaatagagacgcaactaaatgtggagaatgtgcacatagtctgtgaatttccagaggtctttccagaagatctaccgagactacctccagacagaaaggtggagttcatcatcgaattagccccagggactaatccaatttcaaaagctctatacagaatggcacctaatgagttaaaagagcttaaaatacaactacaggagctcttagacaaagggttcattagaccgagttactcaccttggggtgcgccggtactcttcgtcaagaagaaagatggaagtatgaggatgtgcgtggactaccgtgagctcaacaaggtgaccatcaagaataagtaccctctgccaaggattgacgatctctttgatcaattgcaaggctcggctgtgttctcaaagatagat

SEQ ID NO: 282481 - DNA, 421 bp, Cannabis indica
gagcgtcttcctggaactggaaggtggcacacaccactctgtcattcccggtgacacccataaagtttagaattttggtgatcaccgttagccactgttcggccttcatcacatctggacctcccagaaagaccggaggtgcttgcttccggaaccgttcatacaaaggttccattctgttggccgccacaactatttcggcctgagcagcacgggcgggtgccactggaactactggcacaggcactgcaggagccccctgctgcctcaatctctgaatctctaagtcttgttcttcaattctggcttgcatttcagcaaacctaacctcccaattctgggctccctgatcggcttggggagcctgggcagcctgtggcgggttctcatcaccccgaccacgagccctgcccctgggacc

SEQ ID NO: 282482 - DNA, 665 bp, Cannabis indica
attccttttttgtctttcttctttactccattaaaaattgatttccgccaacacttccttccaatttatccaattcgaccagccttctttccaaataacttttatcatctgattgttaccgaaagtcgacttactccacgactttatgttatatatcaacacctaaacgatttatatatccaaaaccagtgggttttaaggataccactacctagtagggctagcgaattcttagagaaccttgcatgtccattcggacaatgaaagccattacagtgcatacttttgcatattctgatcaatcctccatacttccgtatccattccattgttccatataaccaagttgttgcattaatggttatggtgaatcgttccatctttctcaaaagatttgaagacatccgttaaatcctctttaataacttcccagctagtttgaaagactgtaatactaaaaccatcaggacctagagccttactaccttcacaactaaagatcgtacttttaacttcatcttcttcaaaaggcctttctagttgtccctccaagaaatccaaaatttttaaccactcaattccttcaatacttctccatcttgtcttctcagaagtgtataatctcttaaaaaaatctcttcaaccacatcttcttcttgccttct

SEQ ID NO: 282483 - DNA, 686 bp, Cannabis indica
gtgtaagtttttatcttagttattttacggaacctattttttttctctcaaatttttaactagctgataaatataaccagttttttatattatatttgagttattgtgtgttattattgtgtttatttattttgttatggaactggttatttttatatttatgcctcaatattttttgaaattaatctccattttttttgaaaaattataatcggttttatgatgtattatatgttatgagattttttttattgtagaactagttttatttttaatttatgtttcagtgttttaggaattgatttcccctttattttttaattattattttgcagtacttgtttgtattcattatgttatataaccggttctattttagttataatcggttttgagttatttcgtgttattgatttttattcattataatactgttatagaaccggttctattttacttataactggttttaattatttcgtgttatttatttttattcattatgttacagaaccggtttatattttaattataactggtttgagtaactttgtttttttttttttttttttttttttttttattggaaccaatttctttgtcttaaatatttaactagttgatacatatgtataaccggtttttttatattatatttttagttattgtgtgttattatttgtatt

SEQ ID NO: 282484 - DNA, 540 bp, Cannabis indica
ggtaattccgccaaatctttagcacaaataccagtgctgcgagttctagatcgtgagtagggtacctctgcttgtactcctttaactgccgagaagaaaggctatcacctttccagcctacataaaaacactgacgagaccttgtctcgaggcatcacaataaacaataaacttttccttatctgaaagaagggttaatactggaacggtaatcaagcgctgctttaactctagaaaacttttctcacaccgatcaatccaaacaaacttcaagttctttcgagtcatctccgttaagggtacaataatctttaagaaaccctcaacgaagcgacgattataccccgctaagcccagaaagcttctaactacagtagctgattttggtgttggtcaatctcgaacagcttcaatctttgccagatccaccataatcctatctttatccactatgtgccccaagaaagagagacgaggtaaccagaattcatactttttgaatttagcatacagcttgtgatcttttagtcgttgcaaaac

SEQ ID NO: 282485 - DNA, 763 bp, Cannabis indica
atgcatgtaccttaattctggggatcaccccacaaaaacactataataccccccaaagctcattaaagaggtgtcgagaattctgggtttcaaaagaactagaagagtaaaaactcaccaagaacattctctgtattaaatactatcataaatacacagactcgtggactaaggctcattgacgccccaaccacgtaaaaaacctccctcttatttcttacagctctctaaattattattattttattggttaccgaaaacctcggtcaacaaatactaattaattatgtcaatgagaaaaaattataatattacgaactttaaacattgtttttgaatatgttattatatataaagtataataaaacttatacacattactaattacataattagcttgtttatataagaccgtcaaataattaaataaatattataaaagatgaaagttggaaagatcgtgctatgtataagacaaatagatataattttcttatagatacatatataaatatatttttatatagactcactatttttttttaaaagattcaaagatcaacaaaaacttagtatttacaacaatatattaactataatgtacacgaaaaagataaatcaggatattattactatttgattagaaagaacttgataaagttataaaattaaaaatgatcatttagtctaaaatctttaatttctattatattgaaattatacgttgcaaaatataaataataattattatatattattatta

SEQ ID NO: 282486 - DNA, 637 bp, Cannabis indica
tatacatataatttttttttctttaaaaatactactaaagtatggggatcccttgtttataaaatttccttagaacaaatttcaaagccattattaccaaaataaagttacatttccaaacacaaagaaaagaagtcgatcctgcttcccggaagccaagacaccacggctgatatgtacattactgggagacctctgactcatggccaaatgcagcacctaatctccttacctgcaccatgaagcactcgtgagtcacaatgactcagcaagaaaagctactaattagaaattatggaaagtgcaagcagatttcataataatataatatacataccagtaggtcttacatatgttaatctacatatacaaaaataacctaacgcttatgcaagcacacataatacataataaagaatatttatagctattcataatcaaccatctcagtgattcataaagtaccctaatcacacatcattataaacactcactttcagtacttcataaatcactttaattcatatattacagtaaccacataatcttagtgcttcataaagcactcaaacacataatcttagtgcttcataaagcactcaattcttacatccctacaataggtatttttaccccc

SEQ ID NO: 282487 - DNA, 780 bp, Cannabis indica
tatatatataaaaaaaaaagagtgaaatcctggttgtactgggtcaaactcggagcggcctaatcgatgcgaggagggagacgaggtccgatgcgtgcctccaccatggcatcaagctttttcttcttctcccggaatttggcgatcatctcctcgggtttggggtagaaggtaagcttgatgttctggtcatttgtagaccaagccatgaagacgccatcatcaaaacgcttggcgcaccggctgcaggagacgggagaaagaagctcatctctttttgccttctttgaggcttgttccttgaagtccctgagctccttcagctccgcggccagggtggccctggattctaagtttgcctggtgagtttcctctaaggacctcaccttggcagccatctcctccaaggcttccctggcctcccgaagctcccgcctggccttcgcagtggcttcaccttccgtcctcagctcctcctggtgcctggcctccagcctatctctccgcagggcctcctcccggatcattgcctccgcctgcgcttccctccgcttggcctcttcctcattagctttggcagcggcctcccggcgctcagcagcctcctgataaagccgcctctcagcagtaagatcctgaagaatcttcctgacttcgtccatgtccccaaaatcggacaggacgaaaccatggttgattatgttcttggagagacggccggcttcagcagcaagctaaaaaaatatacaagtataagtaagaatctccgaaaaagaaaac

SEQ ID NO: 282488 - DNA, 500 bp, Cannabis indica
cctcactatttatagggcaggaaacttaaggaggaagagtttcctctctcgttacaatgcgcataaacggaaagatcgtgtgatcaatcctgaatgtaaggatcgtgggattgaggctgaatacaccgatagtgggatcgtgtgtatgccatatccacgtaagttgatccctgagttatagggattgagctggtgactcacgatgcgtttggttgaattcgctaagtgttgctcattctgcacggatcgttgagtattccattcttgacatgccagcgaggcatcctgctcggcgtgttgatccgaacagatgctttaagtagagtccacgtgtctccattctcgtgatgccacatcagagtgccaaatttgggataacatttgccccccaagtctgtacgggacctccgaggttgcgtgtagacttattccgagctggttcggcctttgtagggggacacgtgtcgagcatgaccgttcgagactcgatgtgaagctga

SEQ ID NO: 282489 - DNA, 816 bp, Cannabis indica
actgtcatggcctttcgaaacatggggaatggacgtcattggtccttttacgccaccctcttccaaagcccataagtatattttggccatcacagattacttctctaaatgggccgaagccgtaccactaaaagaagtacgggcagaagatgtcgctgattttataaggacccacgtaatttatcgatacggggttcctattatctccgacaatgccctttatttcaaatgtaaggcaatggtcaagttgatgaacaagtacaaattcaagcacagtttctcggctagttacaacccgtcttcaaatggtcaagcagaagcatttaacaaagtgttatgcaaaatcatgaagaagacagcgacaaagaataagagggattggcatgaacgcctcctagaagctttgtgggcttatagaaccactgtgaggactgcgactggttgtacaccttataacttggtgtttgggtctgaggcagtgttacctttggaggtacaaataccttcattaagaattgctactcaactaacaaacccagatgaaaatgtgcaagtccgtctagccgagcttgaagcattagatgaaaagcggcttgctattcaacaaaagctcgaaatttaccaagcccaggtagctggggcattcaacaagaaagttaaatttcgatctttttcggttggagatctagtgcttactgtgaaacgaccaattgtcataactagaaggatgaaaggcaaatttgaggcaaaatgggaaggaccttatgttgttactaaggtcttcctaagaggggcatatgaactttcaaattcaga

SEQ ID NO: 282490 - DNA, 552 bp, Cannabis indica
attagatataaaagatcgttgaactgcatattattcttaacttttctccatccctatcagatcaaaagatctttttattaaacaaattctcaaaaattgttttagaattaacaattattcataaacatagaaataatttctagtgtttatgtagtcttaactctgtaaagagtttaaatacctatagaatttgtatcaataataaaaacacttacacatacaaacaaaataaacataacaatttgtaatagatcattgatttaagttgattcaaaattaattaaaataattaatttacaactttaatctatctttcaagataaattcaaaatcatcttgcataattaaatgcaattttgaaaaatgattaataaaataaataaaatatattttgaaaattattcaaatttaagtttgttgaccgagattttcggcaactattagaatataagtatattaaagagctgtaagaaagtaagatgaagatttttacgtggttggggcgttaatgagccttagtccacgagtctttgttattaatggatgtattta

SEQ ID NO: 282491 - DNA, 632 bp, Cannabis indica
acacgaacccataataggaaaaactctaacccagacctgaacccaaaattggaccgaagcccaggactcaaactcagacccagaccaagaatcaaacccaaacctagacctgcacccgaacccaacctcaaactcagactgggatcagaacccaggacttacacccgaaactaaacccagactcaaatcgagatcgaaacctgggactcagacccgaaccttgacccagacccaggaccctaacccacacccagagcccgatctagacctagaccgagatccgaacccaaacccaaactcggacaaagactcgaaccctaacccaaactcgaacttggaatcacaactagaactggaaccggactaggtttaggaccaggacaaggacaaggacgaagacttgaacccaaacccaaataaaaacccaaactgggactaggacccgacccgaacctagatcaggacccaaattaagaccagaaccaggacctgtacccagaatcaggatagggaattgggaacgaaactatgaccgtgacttaagacccgaccccagacacggacttgaacctaagaccgagctcgtgacctgtcacccaaaatggaactagactgggacccgagatcgggat

SEQ ID NO: 282492 - DNA, 936 bp, Cannabis indica
ataagaatccaacgttgtcctggtaggcgagagtcaagataactcttattttgtgagcttccaccattatttcatacttcgtaaatttatctctaagtagtcatcgtaggggatagtctaatagagatgaaaacttacaaagcacttatcataagagatcgttacggtgttaaatgtttcaacgaataactatctattagggagacgaaatctagcgtctcaaggttatattgaaaacaattagccatgtaggaccaacaatggagatcgaatatccttataactaaagctcattattttaaggagttgtattttcatttgatacttattttgatctatttattttaacatatttttatttaattaaaactactaatttagattactctaaatataaatttgaattaatatttataaaattataccctaagagatctgaaaaatagaaaaaaatatttcatccttagtattaattttccaataaatattatgaaaattacttaatttaagttggtccaaaattaattaaattaattttcaactcaaatttaattttctatacatatatacatgacagaattcgaaatctaatttatttagaaatacttttcgaaattcacattaaaataaaataaaataaaactgaaaaaattattctaattgatgttgctttaaaattaataaattaattttcaacataaatataattttcctatgtaattaaatttcttaagaaaaatatcaaatatttcagtgtctagaacataatcaacttaaatattaattttcttatttaattaaatatatctagaaaaataccaaaaagtctacctagatatatctatctagataattcataaactaattacttattttctaatataatattatttattttaaataaatcattaatgaaaattacttgattttatttga

SEQ ID NO: 282493 - DNA, 694 bp, Cannabis indica
gttatcccaaattttgcactctgacgtgacatcacgagaatggtgacacgtggagtccacttggagcatttgcttgggaataatagaccgagcaggatgcctcgctggcacatccagaataagatattcagcgatccgtgcagagcactcaacacttagcgaattcagctttcgcatcatgagtcatcagctcaatccctataactcagggatcaacttacgtggatatggcatacacacgatcccactatcagtgtactcagcctcaatcccacgatccttgcattcagcattgatcacacgatctttctatttatgcgcattgtaacgagagaggaaactcttcctcctcaagtttcccagccctataaatagtgaggaatgttcactgggcaaggggaccgagagattgaaagccgatacgcagctaagctaagactatattattatctaagaattatatattcagagatactgttgtaagagctataagaaaaggaatcttcttccttattcttgagtcaatataaataacgaggattaggctattaccgaactgctcggggctgaacctctataaaattcttgtgtcttattattgctttattatatattcattacgacatatcatttatcgcttatcaaaaagactcattgtcgttggttaaaagcgaagtcaacattttggtgcttt

SEQ ID NO: 282494 - DNA, 656 bp, Cannabis indica
tggtcattttggtgtgtattttttttacccaaatgttttaccgtgggctgccctatattgacccaaaaaaaaaatttgaaagtaaggaaaacaatggaatggtgatggctgtcatgtgttgagttaggtaaagaaactatggtcttaaattttttagttcagaatgttacttagcaaatgtgatgttttttgttatctgttgtgagtgattgttgtactttaattagaagttgtagtttggattttactattgttatgaatttgttttgaaaaattggatggtttagacacaagattcatgagttaatgagatacactattgataaaaactatggcagtttggattttttgtgtatatcaattattggagaagttattgaaattggttatgacagttagtagtgaagcattgttttgttaattctgatattaaatgttttccaactggttttgtactctgttcattatgaattaagaggtacaaggtacccagattggttaagtttgggggaattttgtctattcatgtgtgtgctttatgttcttggttctcacggattgtaccaactcgtttgtaccactttttggttatgggagttagtagttaagtgttgttttgttcattgttttggttgtggaaatcatttagttgaaaa

SEQ ID NO: 282495 - DNA, 461 bp, Cannabis indica
gaaactgaccatcaaactgaccagaccgtaaccgaatttttggttccacgtcatcaccgaatttggcggtcggttttggtttctgtttttttgacatggcggtcggtttcggtttttgaaataaaaaaatagtttaaccaaaaaactgcccaaaaccgccaaaaactgcctaaaaccgcctcaaatttccaaaccaaaaaccgccaaaaatcgtacggtcagttttatacagttataatttctaaacagtcgattacggttttcgtaaaataaaaaccgtaaccgaccggtctgttataaaattgtaaaaaccgaccataaccgaccgattttcacccctagttctagacacttaaatatttgatatttttcttaagatatttaattaaataggaaaattatatttatgttgaaaattaatttatttaattttagtagcaacataaattagaattattttt

SEQ ID NO: 282496 - DNA, 363 bp, Cannabis indica
ttccttttagccaacgacaatgagtctttttgataagcgataaacgatatgtcgtaataagaatacgtaaataaagcaataataagaagacacaaaaattttatagaggttcagcccccagcatctcggtaatagcctaatcctcgttagttgtattgacttaagaataaggaatacaataatatctctgaatatataattcttagatagccttagcttatagcatttcggcgtataatctctgtttacagtttttcgatccgatcccttgcccagtgaacattcctcactatttatagggcaggaaacttgaggaggaagagtttccactctcgttataatgcgcataaacagaaagatcgt

SEQ ID NO: 282497 - DNA, 619 bp, Cannabis indica
caactctttctcactgccctcgattttattataatgacaatgaacgtgactggaatttatatgcaacccgtaagtttaaatgtgagaggaactatgatttgcatgctcatcgggtttatgggattgtaaagtttattcaatttcatcaatgggaaaacactctcactggtttcaatgggttcattgcaaacattgttaaggatttctatgctaatctcactgatgattttcttgatgagaattctagactatatcgaagagtatatgttaggggacattggttctctttttctgaaaaggacattgctcaagctttgcaattgcccgagaatgtctccaatgcagtgatgtctatggatcgtgaattgatgctctctgaactcacgggtgcacgatctgaattgaaaccaggagagagtcttcgaatcactcatctcacatttgctcatgcatctcttatgcggtttgctctaagcaattgggttcccaactccaacaagaccgtagtgtctcaagatgtggcatcattcttataccgcatcacctctggagcttcaattgatttggcctcacacattctgaaccagattgtttcattccgaagaggtaaaaagccaac

SEQ ID NO: 282498 - DNA, 556 bp, Cannabis indica
caatgaaatatcaaatcacaattcaagtcaataaaataattctagcaaaaagaaaattaactcataatagattgtgcaaaaattacaaagtttaaaagaaaagagagatagaaataaaaactcatttggagcttgtcacaatactccaagttcctctcccaaatttctcttcttcttcctcttaattttttaccaatctctaaataaaaatactaaattaaaaccctaaataaaactctctctttttttctttcttttttcctttttttcttctttttctttttcttcattttcttcactgtagggtccctggagtagcacactgccgcctgctttcctcaattccccttcttgtatgtaatgtaattcatccactgctccttcctcatataaatatatatataattctatttaattatttttttttcattgaaaataaagtcatgggctgcccaaatttcttcatttgggcttttttttgtttttttttttgtttttttgttccaacatcatggcccataatactaaatgtcaattttgtatttaaattcctaca

SEQ ID NO: 282499 - DNA, 1041 bp, Cannabis indica
  modified_base (1016)..(1016): a, c, t, g, unknown or other
gcataaaacccaacaattacttgctctagcaaggattctccgccccgcattcgatggggaataagtggggatagaggcttggatgagttttaaaatagttaagagtgaactttgccttacagttgttaatagttctagctttccatttcctttgagcattctcattgttcttttagggcttggaatttttttgtagagattgtgggcatcacagttgttaagtcaactttgccaccctttttgactcgttggaatccatcttaatctatctaaaggttgtgtagccactattggagctttccttatatattttttcttcaccactcactcatgttctgtactttccttcttcctacacacctctgtggcatgccccatccttttgcaatgagcatgcatgttaggcttccattcacacaccactaaaaccctaatttcctcatcacactcattaacaaaggaaatctcctttggacactcttgggataatcgtacgtcaatcgtgactcttagataattaagtcgttccttctattttgtgattcagttaaccatcatatgctttcttatctggtagggaatcttgaacaacactctctcacccccagtatttcaaatcaagtcctagtagttgcacccaagttgggaaagttctcacatcctctttcttgatgtccattgaagcatcccaagcctttataattatgggtttcttattaaagagaataaaaccccaagctatgacatcatctctaatttcttcatctagaaatctagctatgaaaactccatgtatgatcaatccgacctaatcaactttaaccttccaaactatcttgacaaacccaacaaaaaccaatatcagagggttagcacaagacatagcataccaaagcaaagttccataatctaatctcttcctctatatcccttcttctttagattcttagttctagatctcttcctctatatcctttatcctctaaattatattcccatatttgagaatattcganagggggggggggggggggtcggtgg

SEQ ID NO: 282500 - DNA, 913 bp, Cannabis indica
gagcagtttgatatggtggatgtggctgagacggtgggattcccggggttgaggttccacgacaatgatggacaagaggggtcgccaaacatcctatatcggtgtgaattaaacccagtggcgaagacatggctgtacttcatgagtgctcggttggtgccaaataaacacttctccgatgtccaaatggatcgcctgaaatatgtgtacgccattatgaaggggtacaacataaatattggacaagtcatccggcatagcattgaccagattgtacaaggagccacgggaggtggttttggtttggcgggtgtcataacagaactctgcagggcatatgatgttccacaattggagtatgacaacacggtggtgccacttcgcaagatggatatcacatttgtcaacaggctaaaagagccacatccttatggccagcctccacctgatgcaccgcaaggacgaaggcggcaacgagagcctagtgttgaagaagaagaggagcggcccccacaattgcttgggcctatcgatccaacgatgcaatatactcatgcacagctgagttatataattcagcagaacaaccacatgcaaaactatatggtgcagaggagtatccatgatgagggacaagttcaacaacttaactctctcatcaacagaatgaacatcgggattgatgacccgaattatttggcgcaacctcctcggttctacccatatgatcagccgccgccacccaaccctttctgagagggtctcaggtaagtctcttctctctgcattttattgtatacattggggacaatgtcatatttagtttggggggagagatttaaaaaattttattttctgcactttaattttctgttttagtttttttgttttagttaaggaatggcaataagct

SEQ ID NO: 282501 - DNA, 749 bp, Cannabis indica
aaaaaatcgcgactttccacgactacactagcgacatgttgcgatataggaagaacatttattaattctggaaaaatttaaaaactgcgactttccacgattacactagcgacatggtgcgatgtaggaagaacttttatcaattctggaaaaaatttaaaaatagcgacgtttcacgattacttttgcgacattttgcgacattaatggaacttttattcatttagtgaaaagtcgatatctagcgacgtttaacgattacattagcgacatgtagcgacatgtagccttgcaatatttgcatagagatccaggcttcacttgtttaccatttaaataacctaacttgcagcgacggcagccttcggggaaccctggtggtggagccggccatacacctgttttgttaaattttttttcaagttgtagaaacctccactcattcataaatcgttcatcttcaaaacgtttcatgtcgtcaagcactttttgcatttgaggcgtaatttccccacaatcaggctcctgcttgatctcttcaggagtaagaatcaggtatttgcccttgttccttctagtagacattgctaagagaattatcttgtaggggtaaaaattaagaaaatgtgtaacttatgagatagacaattggcttttatagacaaaactagtagttgggaaggtgggataataaatgtaaaaattgaattacacaattgtacacatgtttgtcatgcacaaagcaatct

SEQ ID NO: 282502 - DNA, 603 bp, Cannabis indica
ttgctcctcctgaatccttgctcggtaaagtagctgtcgattctgctataccaggctcgcggagcttgctttaggccatataaagcttttttcaatttgaggactttatcttcctgtccttgtaccacgaacccttgaggttgctccacataaatttcttcttcaagataaccatttagaaatgctgacttcacatcgagttgaaaaatcttccatttcttctgtgcggctagagctattaaagccctaatagtgtcaaggcgtgcaactggagcaaatgtttcgttgtagtcgactccatattgttgtgagtatcctttcgcaactaatcttgctttgtgcttttggatagagccatctgcgttgagctttgtcttgtaaacccacttgactcctatagtatctttgtcttgtggacgatctacaagctcccaagtctcattcttcataatcatctttatctcttcattcatagcttttctccatacttcttgtttatgagctgcttcaaagctttctggctccataagtactaagttgcatgtctcgtagatttctgatagtggtcttgttcgccttactggtgagtctggcggagattct

SEQ ID NO: 282503 - DNA, 609 bp, Cannabis indica
gcttataaatatgattagtgttagatttgtaacctataaataaatcactcattctttcttttactgtgggtgattgattatttaatcttacctcattaagtatacttttctatgatgaaacaaaatctttgatatttggttaaaatgaataaaaaaaacgaactatttttttttggacatttatgttcaccttttaatttttttttttttttatatttctatataatacgattattcattatagagtttttattttttattttttttttaaattctcacatagcttaaaaatgtaattaatgttagacttgtatcttataaatatatcgctcattcttctttccagtgattaactaaatcttacccaattaaatacttggtaaaataaaccactaagaaaaacaaccaaaatttaattttacatatcattatagtttagtcattctttggattcttttgtttttttttttaaaaaaaaaataaattaaaatccatgtaggacaaaaaggagaatggtcacaactttgtaacctgaataattttggagaatatgtagtatcgataatagtttgaagacatgattttttcaataataatttaggaaaaata

SEQ ID NO: 282504 - DNA, 537 bp, Cannabis indica
cataaaccaagaattcagttatataaacacacgaatagatatatatttaaaatgataaatataataatttttaaaatattttgatagtataatttaaaaaaattattatatgatgtaatataaaagtgtgcaataaaataaaaaaaattacaatatattttgatggataactttatcaataactactatttattacaaatacaaatttagctttttatgttttcaataatatttattaaatttttttaaaaaataatatttaatatattttttttgaaacacaatatttaatattttggattcatttttgcataggtgtagtttttttttttgtagcattttttataggtatttttagattattaccacctatgaaaaagtaacttttgtaattaatgaaattagattagggtgacatggagcattgcaccacccgtagcgcaagttagttcgaagcgtagagtgcaagataaagtgcaccaccgcacgacccctgttccttacccctaaaaagaaaaaaaagaagaaagaaaagaa

SEQ ID NO: 282505 - DNA, 571 bp, Cannabis indica
acaatctaaaacacatactcctgcaacaagttagatttggatagttggaagtaggatttatttaattttaaaatattgaactttattttaaaattaaatttcaattttttaaaaataatatttaaaatttaacctacaattttgaaaaattaggttttaattaacctaaatatcatttcaaaataaatttgctaactttccttttaaatttcatgttatttaataaattaaatattcaataaaatagaaaatggtaaatacatacccttttctgattttacaatttaatttaagtaagaataacaaaatttaaaagttaacaaaaatatcttatttcctcttttaaaatatcatgattatagtaatcttattctaaataaggtcaaattacaaaaaaaatattttaataaaaaaattaatttctgaccttatatttaaaaataagataaaataatcaaaatttaaaagaaataagaaaaaagaataagcaatacttgattttaacctatttttaaattctaaattacactaatatctaaaattaattttaaataaaattaatttatttctg

SEQ ID NO: 282506 - DNA, 526 bp, Cannabis indica
aagcttttgacaaacagcatgatccgtgacgtgtattacccggaatggctagccaatccagtcctggtgccgaagccgaacgggacttggcgagttggtatagatttcactgatctaaacaaagcttgtccgaaggactgcttcccgctacccagaatcgaccagatggtagatgccacttccagattcaaactactgtccttcatggacgcctacgccaggtacaaccaaataaagatgcacacggcggaccaagagggcactggcttcagaactgataagggggtatactgctacctggtcatgcctttcagactgaagaacgccggtgcgacctaccagagaatggtcaaccagatgttcaaaggcctcttggggcgaaacattgaggtttacgtggacgatatgctcgtcaagtctaaagcatgcaataaccatgcagacgacttagaagagtgttttgaggtagtctggagatacggtatgaagctcaacccaaagaaatgcacctttggggtcaatcagg

SEQ ID NO: 282507 - DNA, 645 bp, Cannabis indica
acggtttcaaatcttggtacatcttggtggtgccgggatgtagagaatatggagtagaatgagcctcctcaaagatctcgttcctcaagtccacactgttcgggacacaaaccctggctttatacaaaagcatcccactatctgacactgaaaagtctttggcttgaccagccaatacctcatctcggatcttcactaactccggatctgtcgtctgagcaacctttattctttctaacagatcagattgcagcgttaagttgtgaagctgacctacccacaaaaccctactaagtcgtcgtaggtacttcctacccaacctaattaccttttccgtttcgtacgtacgtcgtagggtagggtaggaagtacttcgtaaccgaaacctagtcgtacgtaccgacccttacgttcccggggaccccccgggtttacccctttttcgtcgtcctacgggacgggactacggtcccggaccctaacctaacttaggttcggtttccccggggtttacccgggtaggttaaagggtaaaaagtaacttcctaccaaactaactactaaattaacctttcccttacctaacgtacgtcctacccaaaccgaccgtcctttgtctcatgttcaaatctttctgagtaaaga

SEQ ID NO: 282508 - DNA, 673 bp, Cannabis indica
taaattagtttgacataataaaaattaatagcaaaaattaattatctttcttgaaattaatttaagaaaaacatagtttgatgaatattatttctagataaactatttgtatttttcttgtatttaattaaataaagaattttaactaactagattctttctgaaacttacttttattatttcattaaatattcctatttaagttataaattagttattactaattttccttattaacttaaatttgaatatcttttgaatttaatattaagttgaggaattctaggaatttattattgaagattcttaaaacatattttttaagttggtttaaacttaaaatggaatatccttaaattaggtagttaccacctaattttgatatttaattaaatttcatttggaaaattttaagttgcttattatagtctaactccagacttcctaccctatacatcaaattatgtcatgaacaagaaggaacaagactttcacatgctagtcaatgaccttcagacatatgaaaatttgattaaaggtcccaagaagagagggagtaaacctcagaattctggaaatggtaataggatgaataatcctgaggcacacgttgcctctacttccaaatccaagaataagaagaaatggaaaaatgccaagaagcgagctcaag

SEQ ID NO: 282509 - DNA, 778 bp, Cannabis indica
ccataagggtgaggaggtttgaggcgaagaacagtggacaagttaatactgcgttgtggcgccaccttggtatcatatgagtactgcggtactccatgtttctcacaaaggtcggtgataattccagcaagcccaagtccaccaccagaagacccctcaaccattatgtcaaatgtcactcgaatgatgtcccccacattcaaattgtaacctttcataattccataaacccatttaatcctgtcaatctgagcatcagaaaaatgtttgttcgggagcaaccttgcactaacaaagtaaagccatgccttggctaccgggttgagttcacaccggtacaattgatatggttctccagcaagctcatggaacctcaggccaggataccctagagtttcagctatatccacataattcaaactcctttcccgaaattgctgtttcaagggttgttgttctacagtgaaggttggtagctcataaagagcatgaattgcagctgtggaagcaggcactctaaccccctaactctcactttgtcatcctctctttcaggccagttggctaaaaattctaaagctagagtttggttgctacgctcagtgacatccacgaacttagtccactgcctatttaaaatttgatctctaatagacgcaaatgcaggaggaatgtttgcagtttggctcaggttaacaatgtcaatccctctatcttcaatgaatgccctatctttcaatttcaaaaaccgctcttgagcatccatattggtaaacct

SEQ ID NO: 282510 - DNA, 513 bp, Cannabis indica
gcataaatcatataacaaacatatatcccgggttatgattagacacccatactcctgaccacaaccctaatccccgtgtcccacacggtactgagtcttgaacgttcgtacgacgctatttttgacagagtaacagcttatactcggtacgctagtcatactctagccataccgatgtgttacagtgtcagcctatactcggtatgtcagtcatagtctgagcataccgatgtgatacggtcaaacagtacagtaccatcgaccataatatcagcctatacttggtatgctagtcatactcttgccgtaccgatgtgatactgtcgaatggtacgaagcaaacatacatatctaatgtaatctaacaggcttcctaacatgcacgctaaacatgtaaatagatatgcatactgttatactaatcttacctcgattccgaattcagatgtgccggtcaacctgagtggaacaatatgctctgcgaattacaggctcctaaatcataataatcac

SEQ ID NO: 282511 - DNA, 840 bp, Cannabis indica
ttataatgttatttaatgcacttcatacaataaattaaacccactaaataatctataaaactctaatagactttcatattgggctttaattgagtaattatcctaattcgtaaaaacaccataattttaccttgacacttactataatttcaactatgtttagaaatctatcaatactattctaagcaatagtctctattcactattagtagaaataaataaatacttattctcacacaaattgtataacaaataaaatttaaaatatatgtatatttttaccgggtattacattctaccctccttaaagaaatttcgtcctcgaaatttaactaccaaatacacgagggacttcatgtttgtcaccacttactacatgacctccttatctaccttatggacccaacaaatatgtacttaacttttatcttattggtcaaactacaacacatataacatatacagcctaatttaagtattgttattcctttatacattacttaaataacaaaacatactccatcacaataacttatatatacgtgctttaaatacataaattttgcaataacatgctcgtaattttataaaaaaaaactcttctcttatgaacatccttatatgccacttgagaacacattatacaatacaaaaataacaaacaacaaggagtagggtagaagaacttatgcaaacttctctttaattgttcccattctttcattgaatgttaattttttttttttaacttaatttcctccataaagctacaattccgttattatagttacgtagcataattattaagaatgttgccctacacataacgatccaatatat

SEQ ID NO: 282512 - DNA, 526 bp, Cannabis indica
ttcaaccaaaaatctcaaaaaaatttctcacccaaaaccattcacaaacattctcactaagagaaaactgatctaaccaattttagcatcagtacttggtggtttggttgtgactttgttgatagcagtggctgtttttgttgtcttgaaaaagaaaaagatcccaggtaagtaattataagattgtatattttatataagtctattacaaatgaacaagcaattaatatatagaaattaattttgtagctttatttaataaatttattaaaacattaaatattgcagatcccagtgcttaaaagaatgcatttgaatcctcaaaacgacaattacaaacaattttgagcgaattcttggaaaagggggatctggaaccgtttaccatggcttgatagatgacaatactcaagtagctgtgaaagtgctttcttctacttcaattcaaggttaacaaactctactcaaatatcccaaaactgaaaaaaaaaaccagtaaatttctcccacaaaaattctcatctat

SEQ ID NO: 282513 - DNA, 1052 bp, Cannabis indica
aacaatttttagtttaatttttttcatatccatgtacgttatagctatttaagatatcctacaaaattttgacaaattcggaataatttacagtatagaaaacaatgttcaaacagtctattttacacgcgtataaaataaaatagtcacgcgtgcaacacactgcttgaacgcaattttcagcgtgttaaacttttccgaatttcttaaaattttgcaggatgtcttaaataaccataatttacatgaccatgaaaaaaaaatttgactaaaaaattattttggatactaaaacagatagagacgtatcgatatatcccttttaagagggtgcattatagaatttttccaattagatttattgaactaaaattttaaataataaccttacgaaaaaaaactttagattaataaagaaatatcaaaatagtacttttcgcatgtagaaaaatttatgaaaaatgatccttagtttaaacccacgttgttaaaatcaatagcaaagtcacattaaccattttcgatcagttattctgcacaagaaatactaataaaaaaatgtgtcataattatcatatttaactgttttgtattatatgagccctaattcccaaactgtccgatcacatggaatctaactgtaaaaatgccacattttttttttttttttttttgaaagaaagtatgttattcaattcaaatcaaatcatctgttacaggagcactaagaaatctaggacaagcatcagtccaaacattaaccccaacagaactagtaacagacttagctagtgcatgggccacaccattcgcattacgcgagatggcacaacaagaaccaccaccaacagcagctaaaagagaaataatttcctcaacaattggtttaaacataagactagactcaggagagttaatccaagaacaaaccacagaagaatcggactccacacgcaccacagaaaatcccaagcgaatggcccaaatcagacccacccggatagcaaggagctcggcgaccgccacctggtagtcccccacagcgcccaccg

SEQ ID NO: 282514 - DNA, 413 bp, Cannabis indica
gacttcataaagtctgtacgatttccggacggttttgcagcaaacttagacaaaaatgtaaatttggatacgggcaagatttccgggctcaaatcacatgattgtcatgtgttgttacaacgtttactaccggcaggtatccgtaagttcttgaaaaaagaaatccgggacacaatcattgagctgtgtgtgtatttcaaacaattatgctcaagaacacttcatgtttcggatttagaaaaaatgcaaacaaatattctaactattttgtgcaagttagaaacaatttttccaccggctttcttcgacataatggttcacgtagttatgcatctccctaaagaagctatactaggtggaccagtgcagtacaggtggatgtatcccattgagcggtcaatgtctgtgtacaa

SEQ ID NO: 282515 - DNA, 777 bp, Cannabis indica
agttacatttgcaattctgagttcgagtttgggtttgagtttgggtcggagttcgagtcttggtttgtgtttgggttcgggtccggatttcactctaggtccagatcaggctccgggtgtgtgtttgcatcctcggccttggtctaggttgggtgcgagtcccaagttccaatctcgatctgagtctagatttagttctaggtctaagtccttggttctgatcctcgtctgggtttgagttttggtctgggtctgggtctagctttgggtctgattttagttgtgggtttgagttcgggtccgagtctatgtccgtgtttctgtgcaggtgtggaccctgatctgggtctaggttcgggtccagttccaagttggggtccctagtgcgggtccaagtttgggtctgggtcagatctcgatccaaatctaggtccagcttatcgatcccagtctgggtctttgtctgagtctaggttcatatccgtatccctattgaggtccaagtttgtgtttgggatcgggtcccagatttagttccatgtccaggtctcaattccggtctgggtcaacgaccgtgtcagggcccgagttccaatctcagttcgggtctgaggctaggtttgtgttcggttctaggtcagggtccgggtcctggtcacggtcctagtcttgttctagggtcctggttcggtgattcttgttcatgttctaattttgggtcccaagtctaggtctaggttcgggtttggttcttcgtctgggttctggtcctagtct

SEQ ID NO: 282516 - DNA, 327 bp, Cannabis indica
ctggaactatctgcgcggcggattacaggctcctaaaccataaaaatcacaacactataagtgatacactaaatcacttcccggggacttaactaggactaaagttaccgtatcgataaaaagcatggcaataccccaaataacataaaaacgagaaaaactagggtttctgaaatttccccaactcgtagaccggttgcccaaccggaattccggttctgggaattttcgtaaccgatccggaattccggatgcacaaccggaattccggttcctcgcaggcagaaattcaaaatttcataactcattcaaatcaactccaaaaca

SEQ ID NO: 282517 - DNA, 495 bp, Cannabis indica
ttcttgctctagttggttaattttcttgttaaaaagcttgagttttcaaagtgaaattgtgtgaattgttgctgtagttgttgcatgagttaggttttagtttctgcagtttttatatgcttgaatatgagtttgaatcatggtttgatgcttgttgaagagctttaaccaagtttgagttttggaactcaaagcttgggctttaatggcactttttgtatctgtgcattctgggttgtgttattgctttagatatgttatttgggtcctatagaacaagtgtggaaggtttgtggttgtttgggtgtgatttggttgagttatgaaattttgaaaatctgcgtgcgaggaaccggaattccggttgtgcatccggaattccggatggggttctgaaaattcccagaaccggaattccggttggacaaccggtctgccgattggggaaatttcagaaaccctagttttcctcgattttatgttatttggggtatt

SEQ ID NO: 282518 - DNA, 516 bp, Cannabis indica
caatatcaagcatcccctgaagttgtagcttaagctccttgagttctgctagagccattctatatggagttttagaaacaggttcggctctaggtgctagatcaatcacaaagtcaatttctcgctgcggcggtaatcccagcaactcctcgagaaacacgtcgagaaaatctttaacaactctgaccacttcaggcccaaatgtttcaggtctgctagagtcaatcaccaccgctaaaaatcttacacatccactatgtagtagatccctagctcttagtaccgaaataactgggatccgacacccctgaactgctccaacataaacaaatggatcttcaccctccggttggaaagttaccattttccgtttacaatctatactggtcaaatacttggacagaaaatccatcccaagtatgatgtcaaattacgttaattctggttcgataaagtcagcactcaactccctatcctcgatcctaactggcatagacctaatgcgcctattagaga

SEQ ID NO: 282519 - DNA, 1006 bp, Cannabis indica
atttttttttacttatttttacatcttgtgcatttagagacacaattataaatagtgggttaaatatagcacaaatttatttttataccaaatttaacacaaattttatatcttgcattagaaaaatagtacactcccctaaatggttgttaaatggatgttttggtagaccccttttatttttttttagcatttaggagagtttttttagtttaatttttttttttcataatcgtgtaaggtatagttatttaagaccacttgtaaatttttaaaaaattattttgaataattttcagtgcgaaaaatatgtagtataagaaaaaatagtcatgtgtgaaataacctatttaaattttattttcgagtgtcaaattgacgccatggagcttcggctccaacgacattcttcacaaaggtggatggtactctgtacctcagaaaattggatttggggggcggggggcgactcggggtctctaaagctcagggtggagtcctttttgttgtacaatggccagagtttgcaccattgtgcacaaccaaaagagagaggggggagacagagagagaatggattggggttttaggagttagggatccctttttgaggtctatttgggcttaggaggaccagagctctgcgtttggccagagctaagggttgcatgggttaagggaaggagagaaagagtggacacgaaaaaaaaaaaaagagaatgggaattaggattttcttcgtatttagtttttcattcttttagtataaaaaattgatacatttttttttggcaaaaaaaaaaaaataaatctgatacattttaattgtacaaaattgtattgaaaccctacatttaaattaaataatgtttttgtctaatttatttccaacaaataatttcgctcttcaaataaattttgtaacaaaataaattaaaataacatctaatatataataaattagtaattataaagggataattgcggtaaaagtctccaaaaactt

SEQ ID NO: 282520 - DNA, 670 bp, Cannabis indica
tgaaaagcctgctcacatttttcagtcctgtagaactttttgttgccttttagaatctgaaaaaactccttgcacttatcagaagatcgcgatataaagcggtttaaagcagcaactttacatgtgagcctttgaacctcttttggcttggttggtgatggcatttccaccaatgccctgatttttgcaggattggcctctattccccgctggttaaccatgaacccgaggaatttcccggagccaactccaaagacgcatttcagagggtttagccgcatcttatatcgtcgcaatatatcgaacatggcctgtaaatgggcaatatgatccttcgcatgttgagattttacgagcatatcgtcaacatatactttcatggtgtttccaatgagatctgcgaacatcatgtttactagcctctgataagttgcacctgcgtttatcaaaccaaaagccattactttgtaacagtacagtcctcgatcagtaatgaacgaggtgtgttcctggtcgggctcatacatcgggatttgattataccccgagtatgcgtccataaagctcagaagttcatgacctgcagtcgcatcaacaagttggtcaatgctaggaaggggatagttgctttgggacaggctttgtttagatttgtaaagtcaacgcatgt

SEQ ID NO: 282521 - DNA, 750 bp, Cannabis indica
ctttcgagcgtttttagactgtcatgtcaccggttcatacttcttctttatatctattctatataaagtgtgcctatataaccgaattcttggtttatgagaaattcatgggtcactttttatttatattaaaaataaaataatttattattaaaaataaaatagtttatgagaaattcatgggtcactttttatttatatataataaaataaataaaataaatcccattaaatctaaaaaaaaatacgattgggtttttgttgttgtacatttatgatttttctcttcttcttctcttcttctcttctagaattaccattttcctataaaaacactcattaaaagaaaaagttatattttagcacatacagtataactaagaagtcataaaatttataattttgtcttctgttaaataaaaataatagcaacttgaagcattattataattatgctgctttgtacatgctgcgacaaaaaggaatgtcaatcttattaatttctccatgttctagctattaatgcaaaccagaaaaagaaaaacatttactaaaacccaccaaaacttatcataattaaacttgaggcattagatgcaaaaaaaaaaaaaaaaaacaaaatacagagagtacattacagcactgtttttgatcacgtgctcataaattagaagcacaattaaatatattagcgaaatagtgactaacatccaaatttcagagttgatgtagaactttagaagcacaatt

SEQ ID NO: 282522 - DNA, 520 bp, Cannabis indica
ttgaagagggtcaagaacaaggggtgtactcgggttgatagagagaaaactgtgactgttttctctggtgtgtgtcgagtaccatctgagctgtgattgctctggttattgtaattgtactgttgctctcttattcacatattaatgaagattggtgatgtttctcagctggagtatggccagggatcatattgatctctaggaccggaaccaggataaaatcgtgtgttgttctttgtttgatttcggatttgattcattgtggagattaattggtttatgttcattttactgtcaaagttgtgagttcattgcagattttatgattgaatcctcaaggttatttccgctgaaattacaacaaaatcagagcttaggttcaagatccatttgaggaattcaagaatcaagattcaatcaagactcatctgcaaccagttatgacaggatcagcaagatttgaacttgagaagttcaatgggacaggggactttggcctatggagagaaagtttgaaggg

SEQ ID NO: 282523 - DNA, 247 bp, Cannabis indica
caaaattgcataagtgaggcccaatatccaaagcccatggccggccacacttaatggcttttatcatttattttttcattattttaatgccaaataattctaacttaaacctaggtggttacctataaatagatagtgatggctctcattcacacttaacttttcagatgaaatttgagcctcctattcttttctctataggccgaaccacttccttctcttttcttcttcaatttcgaaccttgag

SEQ ID NO: 282524 - DNA, 609 bp, Cannabis indica
tgaaagttaaaatttttattttctgcaatttttttttgtttatgctaagctaaagatcatactaagatcaacataataactccaatataagttactatggtaacaaacatattcccgaccaataaatgaataaagatgtttatttcaattcaaattgagtcaacattattagcaagttatacatttaccattaaatgcgtacaaaaggtctgctcgtacccaaagacccgaacagacaaaaagcatacttgtgaaaaacaagtgacaaagagtcaaaagtatgctcggtcacttggggggcacctacacctgtacaaagcatttggtaaaaacaaagtaagaagcaaaaaaaaaaggaacaaaacgaacacagttgcacaacgatcataaacaaggaacgaaattcattaaggatgacaaagcatttaaactcgagattaaaggctgcccggttagcgagttgttcaaaaaatgaaaaatattccaagtttaaagaccgcttggccggtcactttgtcttaaaagaaggcctactggccgaacagacatatacaaaaaaatgatggtaaagagaaggcaatcagatagtaggagtcccaggctcttggt

SEQ ID NO: 282525 - DNA, 547 bp, Cannabis indica
ggcggatccaccatgatcccatctttatccactatgtgccccaaaaatgagacacaagataactagaattcacactttttgaatttagcatgaagcttatgatcccgtaaccgttgcaaaatgctctgagatgcaactcgtgctcgtctttggactcagagtacaccaaaatgtcatcaataaacacgatcacacatctatccaggtaatctttgaacacccgattcataagatccatgaatgtcaccagggcattggtgagtccaaaggacatcacgaggaattcataatgtccataccgagtacggaacacagtttttgggatatcttcctcttgaattctcaactgatgatagcttgagcaaagatcgatcttggagaagaccgtcttccctttcagttgatcaaacagatcatcaattcgaggtaaaggatacttgttcttgatagtaagcttgttcaactcccagtaatcaatacacattcgcagggtcttgtctttcttcttcacaaacaataccggaccaccccaaggtgagtagctcgg

SEQ ID NO: 282526 - DNA, 504 bp, Cannabis indica
cctagttgtgacatattatcttattctgaaatttctagactaagtcatcaacatagcaatcaaattgagataccataaaattttatgaggattagaaatctttgctcactttctcagtagtgttcttaagttcctatcacaagtgtcaaccaaatgaagatgggtaaagaattttaaaattctcccactcaattaaggtagtgtgatacattgtcaaagaactttattggtatcaatttctattacaacagtaaatataaactggaacatataatcaagatcaagaatttattctgataattgctaattcattatattacttccatgtttaaaattatgtgtcacaaagagtactgtggtatatagtccacccctaagtatatagagattatgatccacccctaagggatatagagatcacggttctctaagtgttatagagattatgtggagtttcgaatataatccagagttcaatagatataaaagatcgttgaactgcat

SEQ ID NO: 282527 - DNA, 318 bp, Cannabis indica
aagaacatgaatagcacttctgagattgaacctaagcatgtcaagattaagatcttttgatctaagagcaactagtgatattgactcaaaaggatacaacgataagattataatatctttaccaagttcaatatcggtcccagtccaatgtatactccatacatccgaaactagcatactttgccaatgttctggaaagaacataacaattattcaaagtgtaagtatatttcaccgctgattatcacatcagtgtaaatccaatgcattgatgaaacagggactttgtcttttcaagcatataatcacaatcacatt

SEQ ID NO: 282528 - DNA, 778 bp, Cannabis indica
tggtccacagcctcctcttacgaaaaatgaaagtggacacagaaaaggaggatgaggtttggtttcatgtagggagaaatgacatgagattcggacggatagagtttggactcattactggcttacctatgggtagtgcccctacagacgaggaaatacacgccaagtccaacgaccatctagttcggacttattttgaagggaagagttctgttcagttggactcccttatgctccaacttgagaggtgcgaagataaagatgatgcctacaagcttggactgatcgctttattgaaggtgtattagtatcaaaggagggcaatgtccaagtttggcctgagatgttgaagtttgttaacgatctcgaattcttctttaagtatccgtggggcgagcgcgcttttcgtaagctgatggagacattaggaaagaatatgcaacattacaaggataatgttgacaagaagaaggggaagaagattgctcaggaggcaaagtacactgttagtggctatgtacctgcctttcagtactgggcatacgaagcaattgagaagttggggaagaagtatgcccactgcaacgggaccaagttccccagaatgttgagctggaaaacaccggagggccagcggaaacaagatgtcaaggcaaccgacattgcactgttattcaacagtcgggtatgtttctttactgttcagtattttatttaaatttattgaaaatgaacattcgcgacattgttcgcgatgtgttagcgacattatgcgacg

SEQ ID NO: 282529 - DNA, 551 bp, Cannabis indica
tgaattaaggcatcatttttcgccatgaactccatcatcaatacctcaaatgagcttgattgagccatttgatgaggatcttcttctatgttgaactcttgaaaatccttcaatttctcatcatttggtacttgagtgtaagtgtcaaaatttggctccaaattgttgtagttgtcctcccaaacatgatcattgtttggacaattacaacaccactcattgtactccgccatgtcttccaacatccaataggcttcatcgattgataattggtagaaattggtggtaccatctcctctttctacccattttcgtgtgcttggattcaacccatttaggaagatttctaattgacactctttggacaaccatgatatggaaacctcactagaaatgccttgtatctccaccatgcttcatacaagggctccaagtcatgttgaacaaaattcataaggacttgtagatgagacatctcaagaccttgcaaaagaaaccaaaacaagacaaacaaagcgtaaaatagaacaaggaaaatagaataaacaaat

SEQ ID NO: 282530 - DNA, 583 bp, Cannabis indica
gtcctgaagctagtgcactcttgatctgccatgtgcatttttatttggttataaccggcgtatgcatccataaaggacagtaatttgaatccggaggtagcgtctaccatctggtcgattctgggtagaggggaacagtcctttgagcaagctttgtttagatcagtgaagtctatacaaactcgccaggtcccgttaggctttggcaccaggaccggattggctagccattccgggtagtatacatcacggatcatgccgcttgttaatagcttatccacctctttatctaaggctttagccttcactgagtcgaggggacatcgtttctgctggaccggcggcatgttcgggttgacattgaggacatgggtgatgacgtggggacttatgccagtcatgtcttcttggcaccatgcaaaaacgtcaatggcacccttcagtgtctttattatcttttctttttcctctgggtctaggctctttcctagccggagtactttggtggagtcgaggttgcacactgatatctcctcgacgtcctcaattagttctaagattttttcggatcccacacagggat

SEQ ID NO: 282531 - DNA, 838 bp, Cannabis indica
ttggcatcttcaagtttcttctttagtgtatccttcaaggtcttgaggactgcttcaacttgaccatttgcttggggatgtgcgattgcggagaagcttttgatgatgccatggtttgcagagatatcagtgaaagattgactgtcgaactgtttttcgttgttcgaaactattttgtacggtagtccggaccggcatatgatgttcttcactataaagtcttgaacctttgttgatgtgatagttgcgagtggttcggcttcagtccacttagtaaagtagtcgactgctaccactgcgtactgctgtccgcctttacgtttaggtaattgcctgattaggtcaattcccaaaatggcaaagggccacggactttgcattcgtgtcagctcattgggcagagctcttagtatctttgaaaatctctggcatttttcgcacttcttgacataagctttcgaatcttcaatcatcgtcggccagaagtagcctagcattaagattttctttgataagctctgtccggctgcatgatttccacagaatccgtcgtgaacttcatatagaagtcgtgcagcttcattttgtgtgacgcatctgagtaatggcattgagaatcctcttctgtacatgatcctgtctacgatgatgtatcgtgctgcctttcttctcattttccgagcttcattttggttatttgggagttccccagagttgagataggctgctattggcgtcatccagttcgaagatgtgtcgatcattttgatttcttccgtgccggtgctgctaggcttttcaagaaactggattgtgaccaggttcgccttgtcactta

SEQ ID NO: 282532 - DNA, 628 bp, Cannabis indica
tttcggtgcccggtattttggaactcggcgtttggctcagtagaaatcacaacctagtttgttagcagtttggggtcgggttttagacattgggaatgtcgggaatggccgggaatttagaatttcccaaaatacccctttagtgtattttatgtgattttagtgtggaggggcaaaatggtctttttgccccaatgttattttgtcttttagtgattttatttaattgaaaaagacatgttaaatgcttactactttgctgaaataaagttaatatatgttaagtgatttattagtttattttacaaaatttcaaagtttaaaaaatagagaattggaaagctttttctctctttctctctctctctttttcggctgaaagcttggggttcaagagctggatttttgtggtgattcaagcttggtttgcaagctctagtaatcctttgttgaggtatttctttaggtgaattctctaccttgtttcttaagatttttgatgaaaaaattgagtaaatgcatgattatttgagtatgttgttgctgtgtttaattgttgtttacagaagcttgattaggttttaattgaatgaattagctaggttttaatgcatgctagtgtgttgtt

SEQ ID NO: 282533 - DNA, 577 bp, Cannabis indica
ttctggaatgagttgcagcaagaaggagctgctagcctccaggacttccagaagagagtccaaaaatatatcaacctcgaagaagcccaaatcgtggcttatgggggctactatcccaccggaatagcagggtatatgcccggagtatcgccctcgggtactgccccgactgcaaccccacaaacaagtggcatacaattctctgctacccccgggtatagccagggccaagctttggcaccagcatcttctcattttggcaacccgtccggagtgaatgggcaagctccttcacactctgctccggctgctagcctaacaggcccttcccagggatcaaggagtaaaaggtcctccaaaggcagcacccggacgggagagaagcgccagaaaaaggggtacaccccccaatatactcaatacacggagctgtcggactcccaagagcgtgtgtacttcgctactaggcaaaatacacactaccggagaccacaaccgttgtacaaagatagctcccggagagatccgagcaaaagatgcgagtaccacaacgacattggtcatagcaccaatgagt

SEQ ID NO: 282534 - DNA, 663 bp, Cannabis indica
acatggctggtctcgtatgccttctacagctcggcatgagcagcgtacataccctgagtgtcagcctcgatcctatccaaccttgccactaaattagtgtactcggcaccacgaacgcctgatgaagatggtgcactgggctaagggtctgaaccagtggcctgaaaaatatataccaaaaaaatacggtaagcatacgacacaaaaacaataaaaaatcaagttatacaatcataaaaacaatcataattggtacctgtgtgtctggtgcctgagtgtctggtacctgattgtctggtacctgagtatcagcctcagcctctgtgtcatccacaccatcatcaaccaggttttccacaccatcgtaagatatggtcctcacaaatgcctcctcctctgtccgtggaagtagccccttcaccacttcaacattctgtttatggttcaaaaaatatcagaataaaaccatttagcatttattacaagcatttacgttaaataattactctgaacataagtgaaattcatacccgtctagaaaataatgcactgacttctttcgtcccaatatcacccttgctcatccaactaagcatcctgggaaaccgaatcccgtgattcgtgccatatctcttccctacctccaaaatggcctcgtacgcc

SEQ ID NO: 282535 - DNA, 428 bp, Cannabis indica
atgcagaaatgataaaacagcaaaattgcataggtgtggcccattatccaaggcccatcgccggccacacttatagggttttattatttaatttttcattatttgaatgccaaataattctaacttaaacctaggtggttacctataaataggtagtgatggctttaggaaaagatgatacatctcattcattcacagaaatttttctaaccgccacttccctcttcttttcttctttatcttcgaaatccttgagtgaatgagtgagtgcccacacacatcaagtggtatctcaatcatagtgtgtaagactgtggaaaaccaaccaacaagaaggagattcaacatcaaaggaaggagagaaagagggctagagatcagaatggaaggagtaataatattccgctgcaccgaatgtaaggttttct

SEQ ID NO: 282536 - DNA, 895 bp, Cannabis indica
atttgccccccaagtctatacgggacctctcaggttgcgtgtagacttattccgagctggttctgcctttgtatggggacacgtgtcgagcatgaccgttcgagactcgatgtgaagctgactgggcatccctttggtttttggctaattaatgctctgacaattaatattttgaaatatgattttctctatccacggctgacggttgcacttgattacttttgatttcccatatttgcttttgaggcgggaagccgaggcgtctgaggttccttttgatacagttaccccctttgcctataaaatacccatagtactggcacataacccattttatcacccttcgttgttaagtaaactccagagcgaaaagagagttttctggcttcaaagttgccgaagtttctgatttcctttatgtttttctttgtatgtttacactttgaatgcaactatgctgtagaagaatgcttaggaaaccttagggttagaaacttctgcgactcttctttaccatgtcttcatgtgggcttacagccgtagagcttgtctttgaaccgcattatgtctgtcttccatcttgcttattctaagcttcatgaacttttttgccctaactcaagaaaactttctgacttcttgagttttgacttttctttaaacatagtcgttctttaatctgttgagtactcctggtcggcatattttcttgtttttcgtttgatactccgtccaacgctcatcttgtgtgttgtcttttgtagatgaacccaggtgagtcttgggaactcgggcatcagatcaaccagcatttgcttcaacttctgcacgaggttcatcctcgtcttcgtgctagtcctccttctagcgaaggaaattcttctgaccttgtacc

SEQ ID NO: 282537 - DNA, 612 bp, Cannabis indica
ctgtttgtttctgagtttttattgaaatattgttattatttttaaatttagcttctaaatctcatctgttaaattcgaatatgagattaatttggggttttatgtttttcgtttttttttttgagtaattatataaatatgtgtatatataaattgattcttgaatgtgggctgttcttgtagccctccattcaacaggtttacagtcagatgctttccctacctaatctgaagatgaagatgtattgggcaagaccaagttgaagatggtgtcaattgaattttttgtttcttgaggctgttatttttttttttatgaaatgtagaatatggccactgtcttttttgaattggggctcatttttttattgtatgatttgctcataattcgttattgaatttttttttttttttaaattaatttgcaattttttttatgtttgatttttttattaaatttattagttaaactaaattatattaattcataattaatatctatggttaattaaaatattatgaaattataattaattaaattattattgtaaattttataatatagaagtttgaaattagaaaattaaatattaatattttttattgaaaaaa

SEQ ID NO: 282538 - DNA, 504 bp, Cannabis indica
tcaggaccatcataatttttaccgcttctcagggtaattgctttgcagttttctttggggtttacttcagttgtgctaggcaaattcccttgaggacgggttgctacttgagttgctagttggcccatctgtgtctgcaggtctttgattgaagatctagtttcagtcatgaattgaagcaataaatctgtttgcaaactagaatttccaccagaggtttgttgctgattaaactgttgattctgattctggttctgatttcgttgctgatagaacccactgtttcttcggttattaccctggttgaacccataattgttgttgttgttctgtgaataatttccaatggctttagcttcatccattggcaaatcatccacatctgcttgacactctgaaaagtgatgacttcctccacataactcacaaacaacttgggcttgtttagcttgccctgcaattagctttgtcaatgcctcaacctgagctgtcaactttgtgatg

SEQ ID NO: 282539 - DNA, 716 bp, Cannabis indica
tcccaagttctaatcccgatctgagtctggattcagttctaggtctaagtcgttagttctgatcctggtctgggttcgagtttgggtccgtgtccgagtctagctttgggtctgcttctaggtgtgggggtttgagttcgcgtccgagtttgtgtccaggtttgtgtccaggtctggaccccgatctgggtctaggttcaggtccaggtccaagttcgggtcccgagtgcgggtcgaagtttgggtctgggtcaggatctcggtccaaatctaggtccagcatttccatcccagtctgggtcttggtccgagtccaggttcgtatgcggatccctatctaggtccaagtctgtgtttgggatcgggtcctagatttaggtccaggtccgagtctcagtttcggtctgtgtacacgaccgtgtccgggcacgagttccagtctcagtttgggtctgaggctaggtctgtgttcggttctaggtcttggtccgggtcctggtcacggtcctcgtcttgttctagggtcctggttcgacgattctagttcaggttctaattttgggtcccaagtctaggtctgggttcgggtttggttcatcgtctgggttctggtcctagtctgagtccctgatctagacaccgactactggtctattccaggcctcgttactcgaatcccaagtcaagatctggatcactgtcacgggtctcggtct

SEQ ID NO: 282540 - DNA, 532 bp, Cannabis indica
tactttccactgtgttgacagcataataaacaagaatatcattgtgataagggtttggatgaatttattaatcaaataagtaaatagatgatcacatgaaccaaataacacattaaacaagtaatgaagttaaatctgtttctttattgatatgactagaaaagattacatcgaaatagagttttatttagggcacaaagcctaacaattagggcatccatctagcacgagactttccatttaggtcgccaactcacttgaattcgaaaacgaggtaagaatagtgtataacatgtgatatatatgcgagtgtatgtgtgtgtaaaatatatgtgcattcttgttgtgattcatacactgccaacacttgtacggtagtggtgcagagtgcattggtaaagtgtgttgggttttgtgccctaaataaaatacatttcaatataatcagatttacttattaataaagatcagaaataacatcttatgttgcatggttcacatgatttatttcatgattatatatataatgtat

SEQ ID NO: 282541 - DNA, 281 bp, Cannabis indica
ttgaagggtgtaatggtaaatccctatgcaatgtaaatcatctatagaggatcattgtttattggattgtaacaatggataattaatatcgtatctatatcttggaacatatagagcgttctatataactgagagtgcaattccaaattctatagtggtgcaaggaggaattaataagttagagaatttacttggtaaattctagatctgcttattgggagctcggttatatagggcccaagggcccccatactagttaagacaaactgcttgtaagactc

SEQ ID NO: 282542 - DNA, 875 bp, Cannabis indica
gaggtcagcgccttgactaacatcaagcagctgcctacggagacactaaagaatttcataaagaggttctgggaagaagcctgtaaaaccaagaaagtagatgacggacaacagcttgctcttctccaagcaggcatccgtacggggactcaattctggaacgaattacaacaagaaggagcttcaaaccttcaagacttccaaaagagagtccagaaataaattaaccttgaagaggcccaaatagtgacctatggaggatattatcccaccgggatggcaggatatgtacccggagcccagctctcaggcactgtgccagcagcaactccaccaatgagcggcatacaattttctgctactcccggatatagccaaggccaggcctcggcccccgcatcttcccatttcggaaatcccttagggataaatggacaagccccctcgcattccgctgcgacagcaagtttagccggtccttcccagggctcaaggagtaaaaggtcctccaaaggcagcacccggacggagaataagcgacaaaaaagggggtatactccccaatatactcagtatacggagttaacggactcccaggaacgtgtatattttgctactaggcaaaatacgcactaccggagaccgcctcctttgtacaaagacagctcccggaggaatcccaataagagatgcgagtaccacaacgacatcgggcacaacaacaatgaatgcaaaaatctcaaagacgagattgaaaacttgatccgattgggacacctctacgagtggatcaagaaccggttgccccatcgcaacccgggtcaggcggctggagctttgccgcaaggagcaccaaggggtgcagcatgagtatt

SEQ ID NO: 282543 - DNA, 755 bp, Cannabis indica
gtatcagttcgttggaaaccttggaagttatttaagatatgatagttttgtattttcacatgtctttgttacttgctaaatgcttaataatttttaaattgtgtgtgaatttatattgaaccatttattttttctatcattaattgtagttgtaaatttcgtgtaaaataagaataattttgactttcgcctaccgggacatcgttggattcttattttaaatcgaaattatcgtaagttttcctcttagcttattcattttgaattttcttaaatagtatatcattggatgaatggtttataaattatttgcttatgatgtcattctgttttctcttaaaaaatcgaatggcgcatataattatattcccaacattctatcctaaaatgatataaatcctcgatcttagaaatctcctacttgtatatgtttactttaggctaattaaacttagagttagattagtagttgtggtccaagctagaataaaactcattgtatatttggtataaatttaagtctttgactaatttagattccaaatagaaattttatatttctgtttcctggactacattatacattacagtatgcctttcacaagttttgaatatccattttctgtcaatggattcaaactgtatgtttatgtatagaatatgagtttagttttctgtgaccaggatccacttggactattctaagaactctttattgtaactagaccaaagtaatcaaaagaccacaaccacat

SEQ ID NO: 282544 - DNA, 631 bp, Cannabis indica
ctggacgaatgttttaaagtcctcaaaaaatataatatgaaactaaatccctcaaagtgttcctttgaagtcagctcgggaaagtttctacgcttcatcgtcaatgcccaaggaattgaagccaatccagagaagattcaagccctcctggatatgaagtcgccaactaaaaccaaggaagtgcaaagtttgactggttggatcgccgccctcaacagatttttctcaaaatcaacagataagtgtgtcccattcttcaatatcctgcgaggaaacaagcagttcgagtggacagaggaatgtgaaaaagcttttcaagagctaaaagcataactcgcaaaacctcccgtactctcaaaacctctggacggagaagaacttgaaataaacttagctgtcgcggaacatgccgtgagtgccgtgctaatcagagaagaaaacaacatacaacacccagtctattacatcagtaaaagacttactgaggccgagggccgatacccattaatagaatagctcgcatactgccttattctagcaacaagaaagttaaggccttatattcaagctcatcctgttcggatgtacactgacccaccattacgcaatattgcaaaagccagatgcttct

SEQ ID NO: 282545 - DNA, 784 bp, Cannabis indica
ttttgtattttgaggggtttatgctcgtaggaaacattcatagggctgtatttttctgtgtagaactgggtaatcccagaagaaaatagacctgaaatttgcatagccgtgaactttaggaagaatgtttgaatagtcgcacctttcctatttgtttatttcttgaatacacgcgggtattcggatgaacacttcgaatactcgcatgcctacttgccttaggtttcacagagactttatcacttatagtcgttgtttagaacctaggattttatattctctgtatattttgttgtgaggacattggttaagtcttttaaatgctgggcgtgtcgcaatattccaatgctcatacgtgcgatcgtatgttccttgaggtactgcgatacgcccagccatttgcgacatacgccagtgttccaatataagcgtattctttggctagtagatttgctcgaaacggtgggtgtttcccagtaacttcagggtcatgctcaaaaacgcatgccccttgggtcactgggaaacccccagccgttttttgaggtacatcgctagctggatatgcgtgacacattcgcaggttgtgattggttaggttcctcgaaacggtgggtgtttcccagtcacttcagggtcatgctcgaaaacgcatgtcgcttaggttactgggatacacggagccgtttttttgagatatccttctattcacacacctacgatttcgtgtcttggtgggctgattggttttcgcaagaattcgaatcagccttctaagacgatt

SEQ ID NO: 282546 - DNA, 496 bp, Cannabis indica
aaaatgtcaaggtagttgcctatgcttctcgacaattgaaaccacatgagaagaattaccctacgcatgacctagaacttgctgcggtaatctttgtcttgaaaatttggagatgttatttatatggcgtaaagtttgagttatactcagatcataagagcttgaagtatctttttactcaaagggacttgaacttgaggcaaagaagatgggttgagtatatggaagactatgatttcactttgcagtatcaccccgggaaagctaatgtagtagctgatgcactaagtagaaagcctcatagtactttggcatgtttggctcttgaggactggaaaaggacaatcacaatgggtgattataacttgcaatactatgaaggggaagaagtagcttgtatctctaacttagtggctacaccagtactacttcaacaagttaagcaacgtcagtggcaagatgaaaaactaagactaatttggaaccgaatccagga

SEQ ID NO: 282547 - DNA, 685 bp, Cannabis indica
tagtgtcgacaaaaaagtgaaaaccatgtttaacaaaaagtgatagtattctataacaaaatactattaaattatttgaatttaaattattttaaaatactatattttattaaaataaaactctatgcgattaaaatttcatatttatctttattcaaaaagaaaaaaaaattgataaaaaaaatgaaaagtttctattattatctctactgcctttctagatgtgaataatggtctcttctttcttccatattctttattttttgtatattgtgtttgcagcatatatgtaaattattacgtaactttaaaaaactttgctcctggaaactaatgcatatgccgagcacttagaatcatttgttagctgtaaactttgttgggtttttttcgccattgatgcttggttttgtgaactttgataaaagtcacgcttcttttttattattattattacttatatattttgttattaagttgtgaagaagaaaaaagagaagtgcggattggaatattatgtgtgatcccatgggaatgtccaaattgtaataggaaaaggaatacaataaataattaaagaaaacccaatcgtagatgtacaacagcaaaaacccaatcgtatttttttggatttaatgggatttattttattatatataaataaaaagtgacccatgaatttctc

SEQ ID NO: 282548 - DNA, 96 bp, Cannabis indica
ccaataagctagatctagaatttaccacttaaattcacttgacttattaattcttcgttgaatccacacatagaacttagaattacactctcagta

SEQ ID NO: 282549 - DNA, 534 bp, Cannabis indica
agaaaggacacttcagacaaccaaaattcgcactttaaaactccgcatacaatttgtggtccctaagtcgctgtaataccatctgaagatgatgctcgtgcttcccttctgattgagagtatacaagaatgtcatcgataaacactataacgcagttatcgaggaaatccttgaatactctattcataagatccataaaggccgcaggagcattagtcaatccgaatgatattaccagaaactcatagtgcccatatctggttctaaaagcagtcttcggtatgtcttcctctcgaattctgagttgatgataaccaaatcatagatcaatctttgaaaatactgcctttccctgaagctgttcaaacagatcatcgattctgggcaacgggtacttattcttaatcatcagcttgtttagttcccaataatcaatacacattctgagggaaccacctttctttttcacaaacagaatcggagctcccgagggcgatacactaggtcgaataaacccaatgtcaagcatcccct

SEQ ID NO: 282550 - DNA, 761 bp, Cannabis indica
gagccaaagcttcaagaggaggccaagcagagggaggccgaagtggaggcgaggcaccaagaggagctcaaagcagagggcgaggccgtggttgtggccaggcgcgagcttcgggagaccagggaagccatggacaaaatggctgccaaggtgaagtccctagaggagttgcaccaggcagacttgcagtctaaggccaacctgactgtggagttgaaggagctgagggaattcagagactaggggctaaaagagatgagctcctgacccccgtctcctgcaagcattgcgccaagcgctttgacgacgacgtctacatggcctggcagtcaaatggccaaagtattaagcttgacttctatcccaagcctgaagaggctcttgctaaattctgggagaagaagaaagacttgatgctttgcttgaagcgcgtcggggcactcgtcttcctcctcgcatcgactaggccgcggagtccaacccatttcagcattataatcatatctctcttttttttttatttactatccatttttctttcctttaagataattttaatttagctgtttattttctaagggagacagttattaggccgtcccacggcctttatatttttctttttggtacctgccctttgggtcaggatatttaatatatatatgatcgctttgtatacatattctttttgtactttgtcttttacttttagtcctgctttatttctgtccgtgtggtatgtcttagtaccccctgagtgg

SEQ ID NO: 282551 - DNA, 792 bp, Cannabis indica
taaaacaaaaagtgcatttcaaaataatctcaaccccttgatatccaaatcaagtgtagtatgtagtatactctccgtaatgggatctgacaagttgtatttaatacaacctctcctccaccattacatttccttaatcacaaaatccttgatattgtgaaactcatctctatatgtctactcctctaggaaaacggaattctttactttttggcaactacttttgcgttagtaaggaagtaacactagtagttaataaatgttggaacaaatgccaaaaatgtgtagaactttccttagactgaataagtatatttcctgcaactttaacattcagtctctctggtagacttagagacttcagataggtttttacacttctccaaaatcactactccacccttagagtaatcaccatctcatcagcaaactttctagcactaaggcaagtctagaaatcttatttggtgtagtctaagagtattaaaaacacccttattgactaacatatagttcctcttcttgatcttaagattcacttgattgtcttccaatgttccttttctggattaatctgatgcctactcattactcccactgaacagaaagtgtctggtctaatgcataggaaagcatatttgagacctctcactgttgatcctaaggaattctttcattggccttatctattctggaatagttgattcttttgcttagataaataaaatctatgtctagaattcgagaagcttctatagatttccattaaaaaaatgctccagcatcttacta

SEQ ID NO: 282552 - DNA, 608 bp, Cannabis indica
cggaacccgagactcagacccgaaccacgacacgaacccagacatagacctagacctggaccaaagactcgaattctgacccaaaccttgaccaaaacatggatttaaaccaggacccatacctgaactcggactaacatttcaaccgcaagtcggaccctaacctgaaccagaacccaaaactaaaactagaccaggaccaggaccaagaccagggactagacccggacacaaacccaaacccaaatccaaatcagaatccagactatgaccaggactcggaccgggacttgggatctgaacctcaatttgaacctagaccacgactaggatctacgaccaagacttagatgggagatctggacctgaatggaaactcagactcagacttaggacccagactgagaccttggacctgaactggaaccagactgagactagagatcgagatccagatctcagctcggggcttggacctgacccgtagttggtgtcaggatctgggacaaggacccggagccaaacccagaaccagacagggatcctgacactgactcaaacaaggactcagaccccgaccaagaaccagacccgaacccagacccaga

SEQ ID NO: 282553 - DNA, 599 bp, Cannabis indica
gtttgtgttgtataatttccatgaaaaatattttttctcttttttaaaatattttatttggattccttgtgaaaaattaagaattttttttattacagaactcgattccgagaaaaatcgaaaaagatatgaattttgaaaaatcgggattcaaggctgtcgagtgggtgctcgtgagcactaggaactcgatcagcccctcccccctcatccacgcacgtgaatcttgcagctgaccgattctcggtcaggcatgctgcaggcgccgagtttactcggcatcatctcctcctccgcgcgcgtttggggctgcttgcagcctcctgggctgctgcatgcagcctctcctgggcagccactttcccaattcgaattttgtgggatttttcccaaaattcaattattcatgggattgtttcccaaaattcatttttcctttttaaatatttctaatttgaaatatttccaattttaaaattttttcaattgggaattttttccaattttaaatatttctattttggaatatttccaattttaaatatttcctattatgttcagatttaaaaatttgttaacttctttaatatttatttatt

SEQ ID NO: 282554 - DNA, 786 bp, Cannabis indica
gaaatagtcttaaagggatgctatatttcttcctaattgtagaattctttgttgctttgaagtctttagatttgatgggtcttaaaaaaatattgttaggctctcatattgaaaaaaaatgctaaagagcactcatgatacttaatactcttgtgagctatactattgttattggtgcaactcaatagttggtcccatttgttatactttaataaatattataggaaatcgttaaccaattatagtgtaacacttcatcgtggtgctagacatcataggtgtcccataacaatgctctaataaaatatgtagtatttctcaagaataatataaaaaaaactgtataattttaaaggtaaaaaagttagggcctttagaataggtgggccctatgagcagacctaaccgactttaatctagggtcgactatggttacttttgttggattatcatatataaatatatattttcttaaaaaatctatacatacttgccaagagagattttttcgttacatctcctatctattttaggcatttaagagaatttttatttattttttattagtcatatacgttgtagttatttaagatattctgtaaaattttactatcttcaaagaaatttaatacattgaaaataagatttaaacagtctattgcacacgtacgtgtgtgaaagaaactgtttgaatattgctttatattgtaaatcattttaaattttttaaaattttacaatgtgttttaaataactataacgtatacgactatataaaaaaattag

SEQ ID NO: 282555 - DNA, 631 bp, Cannabis indica
gtttactagtattagatgtagtatcattggaagggaccaataatgaacttagacaagatatcataaacttaccgttatatctttctaactcaatatcaatggttgatcttacgtctatagatcttaatcctgatatggttaggttcagcttagttgtattatttatgttcttcaagttgttcgtggatgttaccaaatggttctagtggatatttatatcttgggaacatggtagtttaattgagtgggaacgctgatcataaatatggaatctatagcttctataagtattagaagtgaaacgatgatttccttcgagcttagctgaatagaaataaatgattgaggcctcatttagtaataagattagtttactgaagtatcatttataggtagctaagtgttttaaggataaaatacattgaagggtagaatggtaaatttgtctattttcgatgtagatcatctaaagaggatctttgactattaggattgtaacaacatataatcataacgtatctatattgtggtacatatagagtattctatataacagagagtactattcaattccaaatttatagtggcacaaggcggaattaataagttagggaatttacttggtgaattc

SEQ ID NO: 282556 - DNA, 901 bp, Cannabis indica
ggggacaaacttaaggatggtttttacgggttccgggcccaccctgctaatgaaggggtggtcccgtataataggcaaactcacgttaaggagtatcgccatcgttttttcttctcctccgggttccgggcagtggaccatccggagctccttactgagtgggtcaggattcctccctatgaacggactgcacctactcaggtctttcttcggagagcccaggcctttgcctcttacgaccgggctgatcttgacgtcgggggcctggtcactacggagaactgcaggaaggcaaaactcatccttccgcaccaatccgtggaggactctaacctttcccgggttatctgtcccaacgtgagggcgccggtcgcggagaagaccttccgggacgagatcattgccactgcagagaagaagtaccaggagtatctctaccggaaggctcaggagaaggcgtactctaaggcccaggcggcttccgggaggtcacttcgcgtggggagcccggttgagagaagaagccaggcgatcgccgggaagccccttcatattggggactcggcggagagaagggctcccaggccgcagccttcggctcaggagccgaacactggggctcctggtgccagcacttccggcgccggcggtaagtctcctttagtagttcattatgtcccttctgttggcgagtatgccagtcttaggcccgtagggttcgacgagcgtctttataggtttaggatgccctcgacccggtggggagaccatttgaaggaattttatttttcaaacttaggagatttcctaggtcggtcccggatgggttctggtcctccggagcccgttcccttaggcccttccgcttacattacatccagctggttccggccttcggaca

SEQ ID NO: 282557 - DNA, 669 bp, Cannabis indica
atattataaaagagaaaacttggaagaaaagaaaaattaaggaggtttagttggttttatttgaaattttagggaccaaattgtaatgagtggtgtaattcaaggacttgttaatgaaaaatatcctatcttgtatatgtgttttgttttggagtaatggtagatacacatttaaattgcacattgttattatacatattattgtgtgaaaaaaatgtgtaatttgagtgtgtgttgatcattataatttgttttggtttatttggtttatggacattttgtcccaatgagttgtatttgcgaaaaggttttatttaatgtatgtttgtaaatggtagaggttcttcttaatccggaaataaagagattaattattatcaaattattttgtcttttttgttttgtatgggtatcacataataattaataataataataataataataataataataataataataataataataataataataatatataagccatggtcattaccatcacttttgttttctttattactatagttgaatttaataataatgataataaagttagttatagtattataatataattaaaataaaaataatgtctcatctagttctctcaaattgatggatagtttgtaataatattaaaacttaaatttagtgttaaaa

SEQ ID NO: 282558 - DNA, 629 bp, Cannabis indica
caggctcaagttacttgtgagctatgtgggggccctcacacctatgaggaatgcccggtggatgtgaacagtttaccaatggatcaagcaaaagccattgggaactattctcaaaacaataattatgggcacaaccaacaggggttctaccagcagagaaatcagccccaacaaaaccaacaacaactgcaacaacaaagtcctagtggaggcttaaatatccaagctgacttattgctccaattcatgatggagactaaagcctctattaaaactctagaaactcagatggaacaattggctactcaagtggcaaaacaagctcaaggaaattcacctagcactagtgaggcaaaaggaaaagagcaatgtaaagcaatttccttgaggagtggaaagagttatgagggacctagtggcaagcaaccagttgaagatggggttcaggatcaacaggcacagacacaggcaccaaaggaaaagaacactactgagggtcttgcaccgaaagaagcttcacctccgatcagcatagatcaccatattaaaattccttacccttaaagactctacaagaacaacctcgacaagcagttttcaaaatttcttgaaatattcaggaaactgca

SEQ ID NO: 282559 - DNA, 1008 bp, Cannabis indica
aaatattaattagctacccaaagtataggagagtaagaaaagaattaatgatgaagaagtttttggttatggcgttggtagtgggtgtgatggttgtggggtgctttggtcgactacaaccggatattcatctgaatatggtacctaacaggtgtagggtacctggtgaatattgtcattgggcacaagacaaggtttgctgtgaaggactgagttgtgaaggtgagtggggatggggtgagaatcgaaaatgtgaacctgtctcacgctgtatacaagctggtgcacattgtgctttgctctcaggtccctgttgctacccaatgagatgttcagctcactcggacggagtatgtacttattagtatatataattatataaaaaaaaatacaatgtaacaaggctacagtagtcttgtatgtttctcattgttctgttctgtgctgtgtttgagaatgtacgtaggtgtgtgtactggtgtggtttgtttaagcaataatcagaagtgcccttgggacatttgttctggctggtttggtctagtttgacatattatgaccttagggtatttcttgtatgtgtgtcttgttttatttgtgtatgagttcttgtttggttgcatgtctattaattatcttcttgcgtagaaagaaaatggcctatttggatatctcctccatgtattattgctatgtagcaaaaacaaaaactaagaaaaaaaaaagtaatctagctacctaaatgcataaataatgaattctctgtgatcaaaacacctgcaagaatcaagaaacatcaagagcaatacactaaaaatagagtgaaagcacgaacaacaatcaagaaagaactaataccaaaaacataaactcatgagaaaagtaaagtaaatgcacaggagttttaacgcccctttctatatgctttgaaaaaccgagtttttgcaaatgtcaatgatatatataaaaatataaaacagtataagcctgcagaagcagaatgtaatt

SEQ ID NO: 282560 - DNA, 435 bp, Cannabis indica
ttttttcaatattttaatgccaaataattctaaacaaaacctaggtggttgcctataaatagatagtgatgcctcatatcaaaagatgatgaacacttgccttcagtgaaaagtttaagccatctattctataccatattcgaaccactctactctcttcctctcttcatattttcaaacccgatagtgatagagtaagtacccacacacatcaagtggtactcaatcatagtgtgtaaggctgtgaagaatccagattcaagagaaggagattcgggcttagatcttggtgatactctgctatagacaggatacaagggttagagatctgagtggaaggagccattataatttcgctgcacccaatataaggtttgtcaaactttatatgtgtttatttacattgttttagaaattcatatttaggatgttaaa

SEQ ID NO: 282561 - DNA, 907 bp, Cannabis indica
ctgaaaataactaatatttaagtatcaagaataaaatcaacttaaatatttaattttcaatttaattaaatgtattaaatataagaattaaataattaagtataaaatcaacttaattattaattctaatttaatactaggaaaaatattctaacttagattgtaccaaaattaattattaaacaattaatttcacaattaataaattttcctaatttaaatattagaaataataactagtactagaaataactatctagaatatatatcattaactaagtgtttttctaaaattaactttaaaatattaaatgaaaaataaatttcatatattttaaaagttaattatgttgctaattcaattttaattaggttagactaatataattaacctaatacaattatttaaataaggcaaatgggccttcacaattggggtagttgaatttgaaaatattatggttagaatctctataaaaaatatctaggttaatttaaaatttattaattatttaaattatcatataaggtgattttaatataatattttaaattaaaagataaggctatcattaaattcaaaatatgtcaaatattaaaatatgtgaccttataattaaataatatataaatattaaagaaattaacaaatttttaaaatctaaacacaatttaaaaattaaataataaatttttaaatttaaacctcaaaatatcaaaaattaataataatttattaaaaattaaatattattaatttaaatttatatttaagtttaaatatatcaaaaagaatatttaattttaaaattggggtttgaaaaatgcaaaaatttgaaatttggggaaaaatcccacaaaaaaattagattttggggctgctgtcagcaaggctgcacgtgcagcc

SEQ ID NO: 282562 - DNA, 672 bp, Cannabis indica
ttattgcgtacggttagctctgtgaggtaataaaataattcagtggtggtcatgagcgtgggtccgattgttcctgagaggggtattagacaaggtgatcctctatcaccttatttatttcttatttgtgctgagggcttctcatctttgatacgaaaattcgagcgcgatggtcggcttaaagggtgcaaggttgctactggtgccccggttatatctcatatgcttttttgcagatgacagttatgtttatggtcgtgcgcatgatagagaggcttcgcatattttacatcggcttcagttgtttgagctcgcttctggacaacaagttaattttggtaagtcctctgttttcttcagtactaatgtgcctaatgctactcgagaacgattgtgtgggatccttcgaatgagacttgctgatgaacatagtacttatcttggcctcccttgtgcaatgggacgaaataaggatgctatcttggggtttttgaaagataaaatgcaaaagcgcattcaaagttgggagggtcgtttcttgtctatcgctgggcatgaggttctaataaaatctgtagcgcaagctttgccaagctttgctatgtctgtgtttttactgcctctgaaaacttgttcacatttggaaagcattatggctaagtattggtggag

SEQ ID NO: 282563 - DNA, 592 bp, Cannabis indica
ggggagtttataatgaccagttggctctacaatattttctaaattgcttggctcatatagtttgatcaagttttaatttttagattttttggtctccttttttagaacaacaataacgtttttatctgcattctgaatgcttccaactttaaggcatggaatcgagatgtgaaaattactctaggcataatagatttgtacttatgccttcgagaagaaaaatctgctcatcttatactaatgtcagaattgttgcccaaaaatgcttcatgcacaatgaaaaaattcaaatcatcttattctcattgctatgaaagttcaattccataacattcatttaatgctttgccaaacacctcaaatgcaaaagagtttttcaatgctgtagaaaaactatatgacactggtgaaaatgctgaagctggacatcttatggatgaaatgacaaccactaagtatgatgaattaaaaggagtgcgagattttattttgaaattattaatgttgagtccaagttgaaagatcataatattcatcttcccaacttttacaccatttagggcgtaagtgtctcccgctcttctcccatggc

SEQ ID NO: 282564 - DNA, 134 bp, Cannabis indica
ggtgccgagtcacgagctgggccctaacttcaagttcgggtctgggtcgggtactaggtcccggtcctagttctgtttcccaggtccctatcttgattctgggtccaggtcccggttattgtgtgggtttgggt

SEQ ID NO: 282565 - DNA, 508 bp, Cannabis indica
cgaaaatagagagagagagtttgggagaaaatgatttttctttatctttggtttttctcaatttttctaacttttaataaaatgaaagaaatgcaacatttaatcttattatttcagccacaacaattagacaaaacacattacacaatactaataagtccactaaaggacaaaacataattggggcaaaatgaccattttgcccctccacacaaaataacataaaggggtactaaagagtatttttggaaaattctaaattcccgaccaatcccgaaattcccaaagtctaaataaccgtaccacaatactaacatactaagttgtgattttactgagccaaacaccgagttccatgttcccggcaccaaaaatgcaaaaatatgaaatctcactatatgacataaaaattcattctaaattctaaaataacaccataaataattatttaaatatctgtaagtaatttcataattaaatcataattaactgctaatttctaaattaa

SEQ ID NO: 282566 - DNA, 661 bp, Cannabis indica
ttctgctccaggaattaaatcaatgatgaaatctatctcccgctgaggtggtaacccaggcaattcctctggaaacacatccaggaattccttaaccactttaacctcttcgggtccaagtaacacgggtttactggaatccactaccactgctaggaatccaacacatccactgcgtagcaaatccctagctttcaatgctgagattcttggaacacgagaaccttggaccgaaccaacaaagacaaatggttcctcattctccggttcaaaagttaccattttccgtttacaatcaatactagcagagtatttagacaaaaagtccataccaagtataatgtcgaactcggccaatggtaactccacaagatcagcgctcaattctctatcttcaattctaattaacactgatctaacccactttcttgaaataattaattccccattaggcaacagggttccaaaccccgtctcaaaaatatcaccaggtctatcaagctggtcaagaactcttgatgacacataagatcgagtagcacccgaatcaaataaaacagtgtaaacaaaatcgttgattagaagctgacctgtaactactgaagggctggcagcagcatcagcctgagttatagcaaatacacgagcaggggcaggcgca

SEQ ID NO: 282567 - DNA, 600 bp, Cannabis indica
gatccggatctggacccagggcttggacaaaacccgtagttagtttctggatttaggacccagccctggacacgaaccctgacgaggacccggacctaaacaatatcccaaacccaaaagtggacaagaacccgtaccctgtgaccgaaaattggaaccaaaactggaagttgaccgggactggaactagcacttggacttggaatcaaaactgaaattggacctagatctagagcagtaacaggacaaggacccgaactccaaatccgacctagacccgaattgggagccggacccggatccccacccaaacctggactcgggacccgaacccgaacctgaactcagacccaaacatggaaccagactagggacacagaaccagggtcgggacctagaaccgcacccaaacttagaacccagtgtctatcttgaacccaaacttagaaacgggacctgggacctgaaccagaaccagaccgacacccgtgacaatgatccagatcttgactcgcgattcgggtaacggggcctggacctggtgcccaaaattagaacctgaacaagaatcgccgaacaaggaccctagaacaagactag

SEQ ID NO: 282568 - DNA, 520 bp, Cannabis indica
agtaccccaacctaccttgcttgcgggtggacttcaaatcaatgaaccaggcaactttgtgaggagaaggagtaccccactcctgggaagcgtagaggacgaagagggcacacaaatacttaatgcccttaggagtgaactggaccgaagtccaccacatccttgaagtattgatgcaaaggcatcaattccccttgctgaccatgggcacccgaccaggtgcacagccccttttcaggatttgtggcacgattgttgtgggcggaaatatagcaatccaggtcgcccaggtatccgccctggtcgagagtttgaaggcgtgcctcggtaaccctcgacggagggcttacccacccgacgcccaaagcaccctgccttctatgaggaaccgcagtagcaagttcctcactgacgtagtccacgccctcaaccaggacgtctccgtcagtatcgactggctccccagcctcgttgtactccccatagtttaggggttcaacctctgcctcttcctccacct

SEQ ID NO: 282569 - DNA, 746 bp, Cannabis indica
ctggtaatctatgtctaaaatcaccaccgcatactattgtaagttacccaaaaggttttttagagcaactttcaaaccttgttcttggaatatctcttaaggtcttatctaaagcttcaaaacaaaatttatttgccataggtgtttcatcccaaatgatcaatgaagttttcataagaagtttagctaatagggtaccttgacgaatttcacaagttgactctgctgtaacatccaaagaaatatgaaatcttgaatgagttgtcctaccattaggcaataacaaagcagatattcctgaagttgctacaggcaagactattttggattgagacctaagctttgcaataattgtattccataaaaatattttaccagtgccaccatgtccattgataaaaaataaatttccttgttcattttctacagaatgcattattgcttcataagctgacttttggcaaggatttagagaagcaaatgatttctcatgcaatatatttaattgttctctgtcataatcaagttcttcgttgattagtctattacctaatatcctattaacgaagaattaggaaggggcattccatctatggctttcaaactttttcccatcttcaacataatcatttcaattttgtatagagtgtatgattcaacttgttgttcagttaattgaagatcttgtttctaatatttcctttgcaatgaagttatatcttctgacaatgtagtatagttagatt

SEQ ID NO: 282570 - DNA, 443 bp, Cannabis indica
cttgatggattaaatgtgaagatcaagcatgaccttatgatcaccacagacgacaagaccacctatgctgagatggtggagaaggcactgcgagctgagggcgtagttggatgtatgtcagagtcagttagtactccagtgagtggcggggctcctactcctcctacatcaggctttagaggggaggtagtggtttggccattgaccagaagaggagaacatccactgcatccggtggctcattgaagaacaagaggttccaggggaaacagagtagaggcagtcgtcaaggtggtgctgagacccagttttcttacccatagtgccccagttgtaaaaggcaccatctgggtgagtgcagaggtcagggatgctttcagtgtggcatgcctggacattataagagggattgtccccagctcagatcagaggcacctagggct

SEQ ID NO: 282571 - DNA, 944 bp, Cannabis indica
tatcatttttattttttttcttcttctttcattttttctgtttttttttttatttttttttattttttttttatgaaaaaatgtataaaaaatgatatttaacaaaaaaaaaaaaagaactagtccaacccggtaccgtcaaaacccacccagacttggtccaaccccctcggaggtgagttttcacgtgatcacagttaatttctttgaggttttccaagaaaaaaaagagtaattttaagtctatgtttaagttgttttcatgttttccattcattaacttatttgtttcataatttttcattaactataaatttatctatttttactttaattataatatttgatgagtcttaaaaaattttaaaagagaaatttaatgtaatagattaaaaatttagaaaaataaatacaaaagtacatcaatacggaaaaaaatttatttgtactctttgaattttttttatttgcaaagtacatctttagtgaaaaataatgaactatattttagttgttttataattgtattatagttgtcatgggaatttttttttgttgttttatagttgtcgtgggattaattttacgttttttttttactttttttctgaacaaaatgtatttttgtaattttaaaactttacaagtatttctataattaaaaaatttagaccataaaattataaataaaatataaaaaatggtatttttgaaaagggaaattttatttacaccccaaaaaagttctaaaggcaccccattttgataatttttattttatataaaatttatatttttaattgtactaatttttttttaaacttttttcttttcaattcatattcttaaaaaaatatacctatcaaacaaaaataaaatgtattttaaatattatgataaaaaaattaaaataaaaaattaatgtgaaatttttttaagaaaaa

SEQ ID NO: 282572 - DNA, 571 bp, Cannabis indica
atattcatccgtagtgaagtaggttctgtgaatacatgtactgtagtcggatgggtggtaagcttttatattgctaaatgttgttgtgattcttttatattgttttgaattgcgttttgttgttattaataggtttggattttttggaaacgttcaattataactgttatgctgccgaaattttggtagaattaggataatatttaattttagtttctcttaaacttggttgttaagattttatcgaaagtgactttatcggaagtcgagtatataatttttggtataagcagtatgctttcttggttgttagggtttgacgtgtaaatctcacaaattatattgaataatattttagaatgtctaaggatgaaaaaaatccacataaaatttaaacgtactaacgatgtatcgtaaaacttaaactaaagtaaagataattatatttttagaactagaaccctaaattctattatcctagacaacacttgactcataaaactggaattaaaatattaatgggaaatgcaatgataattagaaattatttaagtcatcatcacttgtttta

SEQ ID NO: 282573 - DNA, 733 bp, Cannabis indica
agatgttgcatttacaaatatttatctatcaagatctaacactactatgtttgtctaatggatgacaattcattaggatttgtcccattaaatacaacaagccaagttagaccaacaatgaagattcgaaattaaactacaattaataacagaaaacaacatggctaaatataaattcacacacaattcagaaattatcaagcatttagaaaataacaaagacatgttaaaatacaaaataggcacatcttaaataatttctaaggtttccaacaaactgatacagtgtcccggtaggcgagagtcaaagtatcattcattgaatagagttgtcagcttatctaaagtggaaaccattctagcaaccttttattcgatcaaaataagaatccaactgttgacttcacttttagccaacgacaatgagtcttatttataagcgataaacgatgtgtagtaatagatatacgatacatcaataataagacacaggaattttatagaggttcagccccgagcagttcagtaatagcctaatccttgttatttgtattgacttaagatcaaggagaaagattccttttcttatagctcttacaacagtatctctgaatatataattcttagataatagtatagtcttagcttagccgcttttcgaccgatcccctgcccactgaatgtacatcactatttatagggctaggaagcttgaggaggaatagtttcctct

SEQ ID NO: 282574 - DNA, 399 bp, Cannabis indica
aaatgacaaacattctagcaaccttttattcgatcaagatgagaatccaacgttgtcccgtttaggcaagagtcaaggccattctatcttatgagcttccaccattgtttcatacttttgtaagtcttactcctagcagccaccattagggtgatcagtactaggaataaaacacttacaaataatacttatcttttgagattctacggcgttaaattgctaatgaacgttcatccattagggatgattaatcactaaaacaagaactatgtagaaccaacaatggagatcgaatatccttataataaagctcattatttaaagtgtattttcatctaatatttattttaatcaatttattttaatatatatatatttaattaaaatttccaatttaga

SEQ ID NO: 282575 - DNA, 631 bp, Cannabis indica
atgatttgacttgttgtgtcacttttatgacagctttttatatttttgggttttatttttttataaaatattttcaaatattttaaaggttatataatcattaccataaatccactctcccataatccttgttcatcttcttcttctactacattctcagctggttacaaggtgtgggtagttttatatttcttttcaaaaaattttagttattacattttcttatcaagctttcctcttaattttcccctccattttcgttcctttttctctataaatactactcctcctcgatctaaatggcagttacacgttcatcctcatcatcccctgttgctaaaaattccccaaaacaaccccagaaaatgaaacccaaaccaacaataggtaagaaatatttgaaagataatcatcctagctctacttctcatgttgcccttaaaagaaaactacctgctagaacttccaagaacactcgaggaaaacgtccttgaactgttgtggagaactcggactttgattttgagttggagactgagtttgtgaagtctcctaaatctgtgaaggtattttcgtattgatcttgtgttgttttaggggtttttttacattttcattgtattgttcattt

SEQ ID NO: 282576 - DNA, 465 bp, Cannabis indica
ctcacataacacgctacgaaaattttcagctgccatagtggaagaagctacaagtgtctgtttgacacttttccaggatatagctcctccagctaacaagaaaatgtagcctgatgtagaccttctgctatcttggcatccagcgaaatcagaatcagaataccctacgacctccaaatgatctgatttcctgtatgtgagcatgtaatcttttgttctctgaagatacctcataaccctcttggctgctatccaatggtccataccagggttgcttaaatatctgcctaacatcccaacaatgtacgcaatatctggacgcgtacatacctgaagatacattagactccctacaactgatgcatagggaatctttttcatttcctgaatttcaaggctgcttttagggcattgtctaagactgaatttgtctcctttagcaacaggggtatcacctggtctaca

SEQ ID NO: 282577 - DNA, 618 bp, Cannabis indica
tcgaagtatcagggagtaatagaaagtatcggggaaattgaggtgaccgtcaaggtcacgaatcctctttcaagtcatatcttgaatgtccgaaatgtaagaatcaccatcagggtgaaagatgggccaaagctacgtagtatacttgatatagattatatgaatcggacgttccaagattacctgattagatgtgtgatcgtgtttatcgatgacatcttggtgtaatctgaaacagataaagaacatgagttgcatctcagatcagtttcacaatgattacgggacaataagctgtatgctaaattcaagaagtgtgagttttggttatcccgtgtctcatttctggggcacatagtggataaagatgggatcatagtggatccgacaataattgaagctgttcgggattggccagtaccgaagtcagctacagaggtcagaagttttctgggtttggctggttattatcgtcggttcgttgagggattttcaaagattgttgtacccttaacggagctgacccgaaagaaccagaagtttgtttggactgatcggtgtgagaaaagttttctggagttaaagcaacgcttgattaccgctcctgtactaactctt

SEQ ID NO: 282578 - DNA, 449 bp, Cannabis indica
ccaaatttcttgaaagtaaatcaatgaccagttgttggaattattttaccaggatcttagatctactcacaagtatgttattttacatcctaaacatgaacttctaaaacgatatgaaacaaacacatataaagtataaaaaaccttacactggttgcagcggaatataacgtctccttccactcagatctctaacccttgtatcctttctatcgcaaagtatcaccaagatctgagcccgaatgtccttctgttgaatctagattcttaactatcttacacactatgattgaggtaccacttgatgtgtgtgggcactactctatcactaaagggtttcgaattttaatggtgaagaagaagacttaaagtggcggctaggttaaggagagaaggcacttagttttttcgaagaaagatgattttttttctgcagccatcactaacta

SEQ ID NO: 282579 - DNA, 452 bp, Cannabis indica
ggggtggtcccttataataggcaaactcatgttaaggagtatcgccaccgtttcttcttctcccctgggttccgagcagtggagcacccggagcttctcacagagtgggtcaggattcccccctatgagcgaaccgcgcctactcaggtctttctccggagggcccaggtccttgcaacttatgaccgggcgaaacttgacgccgggggcttggtcatgacggagaattgccggaaggccaagctcatactgccgcaccaatcagtggaggactctaacctctccaaggttatctgtccaaatgtgagggtgcccgccgcggagaagaccttccgggatgaactcattgccaccaccgagaagaagtaccaggaatatctctaccggaaggccgaggagaaggcttattccaaggcccaggccgcttccgggaggccacttcgcgtggggag

SEQ ID NO: 282580 - DNA, 588 bp, Cannabis indica
ctaacaagtatgttgaattaacatcctaaatatgaattctctaaaactatgacataaacacataagagtttaagagaaccttacattgattgcagcggaatataatgactcctttcatttaagatctctagcccttgattcctttatgtagcagagcattatcaagatctgaacctggatctctttctctccttcgggttttactaccattgtcttactcactatgattgagtacttgacttgctatgtgtgggcacgacactcattcactcaagattcaaatatggaagaacaatgatggaggttgaaatcactaaggaaggaactctctcatctaggttgattgaatagtcaagttgacattggttaaaaagttggatgaatgagagtatcatgttccttttatagtgtttcaactagggcttagggttgaattatatagattaaaaagaataaaaatattaggcaaaaaacacttcatggccgtacacttaagtggaccaatttctagttagatttttctactttatttcagccacttattcttcttttcaacaataccatcttttccaattcaatactataaat

SEQ ID NO: 282581 - DNA, 1067 bp, Cannabis indica
aatgccgcatgggagaaggcgtattgaaactgccatatgtcttaaagtctgacggcgtaaccccccttctgcagctactacgctatgattaataagcctagtgacggctactttatgagaaatcacatcagtcaagaaggataaaggactacgtccattaaacccctaaaaagcctagggattagaccatgcatttcctatgatgtatccattgggaatgtgtgcctttactgaatattacagaaagacatgtacctcaattctagggatcaccccacaaaaacactataaataccccccaaaatcattaaggcaggggtcgagaattctgggtttcataagaactagagaggaaaaccaccaagaacattctctgtaataaatactctcataaatacacagactcgtggactaaggctcattaatgccccaaccacgtaaaaatctctctcattaattccttatagctttcttaaatactattattatattggttgccgaaaacctcggtcaacattttggtgctttcattgagagctgaaggaagcgtctgaaagtagacagtaacattacaaaacaacaatggtggagactcgaaacacacgtcaacctcgtcctcctcaagacgctcaagacccaaacgatgaggacgtggcctcaagagcaaatgtgggctctgaggagggagaaggaacccacgatgacgaatatgaaggaaactttgatgagtacgacgcctacgacgaaggcagctacacagagctggtactcttgagacaaaaggctgctgatcacgaagctaaaatcgcagcccaaaaagaacaaaaccaaaagatgcaagaggtgatgctggccatgcaaaaagccatggaggcagcaggaatccacatgcatcataaagccatccctgctggacttggagagacaccaggagaatcctcgccaagtacccaaaagcagaagtctagggaacctagccctataaggtatccctccgaagggaaccagaagaaaaaccatacttccactcctaggaaaaagaaaaaggtgcaggatccgcgaaaggt

SEQ ID NO: 282582 - DNA, 556 bp, Cannabis indica
gggttagagatctgagtggaaggagacattaaattccgctgcaaccactgtaaggtttctcatactttatatttgtttatttaatatcgttttagaagttcatatttaggatgttaaataacatacttgttagtaaatctaagatcctggtaaaattattccaacaatggcttccttcacattttttggttcaaattgagagacaaaacaaagaaagctaatcaaattaacataccttcttcgggttaccatgatttcttcaaaatttccaagaatgagatctttgggatggttcagtttaactctggtgcttggttccttctggatagaatcaatgatgatgtttggatgagtcgagataggctattctggttctcctgtatcagttgcaacgacagattcttcatttgcgtcgtcagaattaagttctgctgcatcagactctacttttggtgcttctggtggagtatccataaagctatctatctcagcctctgtgcaaaattctaaaaaatctttgaaattatcaacaaccacattagctgattccaaaaca

SEQ ID NO: 282583 - DNA, 636 bp, Cannabis indica
accatcggtccccacatggagagtatttgtggatgaagcctccaatgaaaacgggtccggagcgggggttgcaatgatatccccaagcggacttcggctccaggctgccctacggttcgacttctcagcttcaaacaatgaagccgaatatgaagccttgatagcaggactgagattagcaaaggccgtgggggccaaaagagtagaagtctacagcgactcccaactggtcgtaaaccagatatcgggagagtaccaaacacgcggcgaaagaatggccgcatatgtaacaatagtccgggaactgctccacgagttcacggactataaagtagaaagaatccccagggaaaagaacgctcacgcggactgcctggctaagttagcttcagacagtgaaattgaaggactgggggtagtacccgtggaacgcttggcagagccaagcatcaaaataaaagaggccatagtaacggttgggcaagaacccaactggatggtccccatcatagaatacataacaaaaggtgagttgccccacgaaagggcactgtccagaaagatccagtatcaggctcatcgctatataatgatggataaaattctttaccgaagaggactcagcatgccttattt

SEQ ID NO: 282584 - DNA, 655 bp, Cannabis indica
ggtttttttttttcttttatactgtggacacaaaaaattaataccaatgacttcatcttcgtccctcacgcatagaacttgcccggcaacaccaaaacacccggaaaatacccattaattctggtgaaagaataaatgaaacaaaaaatttagacactaaaaacccaccaaattattttaaaaacgaaaataaaaaataaataacaaacttatatctgaaattcataaatcaaaaacaatcactagcatctgaattgtattagaatacatcctatattgagaaaaatacaaattaatattgcacaagtattaaaacaaacaatcgattattaattcacgttgaagtattcaacgttgttttagagtcgttcttgcttaataacctgcattttattgtaaattggggatatgaataataagtaggcaaccaaatcataacaggaccacaaaaaacaaaagaagaaacgacgagttgttttctactatttttttgatgttgttgtatgtcaattaaaatgtttaattactgatattctgtaaaaatatttcaaacaactgtacttgggagtccaatcctatagaaggaacatcaaaactactaaaaacaacactaaaacaacacgaaaacaacccaaaaacaaatgaagcataaata

SEQ ID NO: 282585 - DNA, 634 bp, Cannabis indica
ttcaagactaactggttatacaataccagtctagttcgaaaacagatcaattatcataaagctatttggagttcaaccattgtgccaaaacacagatttatcatttggcaagtggttaactctcatctgctcacaagggacaagttggttcgttttcagattgagctaagttctaccttgtgccccatgtgtgaagttgctttggaaacccatgagcatattttcttttcttgtgagttgtcgagcagggttcttgatttggttttcaattggatgggatataaaggttggccgactgactatgcaggttggtgcatttaattagctttgagagggaatggctctttgcacaggatcaatgctgctattttggcagctgtggtttataatatttggctcaatagaaacagatgtatctttaatggcttctctaaatctgtttgtggtgtagtgaatgatgtaaagaatactgtaaaatatagattacaaattgtgaacactagaaagctaactactcttgagaaaagatatatgtcaaagttgcaaagtagttagttctagtgtagttgggtctgttgctccttgttaggagtttgtgtttgggtcctgttttgtttattggtggttgtatttg

SEQ ID NO: 282586 - DNA, 548 bp, Cannabis indica
caccaaggcgactacttaagaacgcagacatcctaaatgaaatcaagcgttaggcccgcgagtttaacattagaatatgaacagtcaactcccatgttaaaagggcgcatgcgttgctgaatttagtaactgctattcatttattgatgttaacattatttagtttagttattgtaattcaatgtgtaaatacggattgacaatgaatgcaatccttgtataactaattggacacctgctttgtatataaaggggtgatccaccgtgaaatgagacctacgaaactcttgctacagtggactaagcagacggtgatctgactgaacaactataatcctttgtcttattgttatttccagttttctgttaagcatttcatattcccatttcgagtactcgccattttaggttgaatactcacaattgttctttaagtaattttcttcttgccattgataacattatatacatttggtgttgcgaattttgctcgacaacattgtggtagaatgcacatgcaaagaagaaagcatactagaaagcaaccc

SEQ ID NO: 282587 - DNA, 550 bp, Cannabis indica
attatttaatctgacacttcagtaaaacttgttggaaagaatcagagtggcccaatttggaagatcctgaattggttaagattcgaaatgatgtcttagcaggcaaagctaaggacttttcaacttctgacagtggaatgctgttgtttaaagcacgagtgtgtgtccctgatatcaatgagcttaagaaagaaattctggaagaagctcatactaccccttactcattgcatccgggaaccaccaaaatgtatcaagacttgaaaccctatttttggtggtatgggatgaagagggatgtggtggattatgtcactaagtgcttaacctgtcaacaaatcaaagctgagcatcaacgaccggcaggattacttcagccattaacacttccagaatggaagtgggaagacattgcgatggactttgtggttggcttgcctagaaccacaggaatgtacgactcagtttgggttgtggtggatcgctttacaaagtcagcacatttcttacctgttaaagtaacttatacagtggatcagtatgctgattt

SEQ ID NO: 282588 - DNA, 526 bp, Cannabis indica
ttcgctcactataccgctccgccatcaccgaatataaagtccccataagtaggtctcgatggggattcccatcgatatcaaagtagtactatgtaataaaataatttaaaattatgttaatttataaatgaggacataaaattattacaacttttaataattaaaaatcactcactctaattcgattgagcacttgatccttgtattgttggggtacatcagaaaaatttagatgaccacccgggcacaacatgcttacttgttggccaagaaatcgaacataattgcttgcttcagtgccaacaactttgcctgtttcaagatctacctccaccggtaagggcttaccagcttctctccttttttttcgagattagcgtttgcggcaaccccacgaccctttctgaccggaggtggaactatatatattcgagggaaaaataattttattagtaaatcatacattcactatttatattcagaacaattgtagatttgaaaaaatatgaaaacctgcttcgcagga

SEQ ID NO: 282589 - DNA, 797 bp, Cannabis indica
atatcttcccatttccactcaggaatatcaagagattgcaacagccctgcaggtctctggtgttcggccttaacttgctggcaggtaagacattttgctacaaattctgctatatcatttttcatacccggccaccaatacctacctttcagatcattgtacattttggttgatcctgggtgtaaagaatagggtgtagtgtgcgcctcttgtaagatttttgattgcaactccgctttcttaggtacacacacccttgccttgtatagtagaataccctcttcattaactgagaagtccccggctttcccattttgtagttcgacccgcttcttgattaaaaactcatcttgggcttgttcttctttgatattctctaataaatttgattcaattgtgaggttagctagctttcctgttactaactctattccagatctctcgatttcctgttgcaacggcacttttaatgcccttaacattgataagcttgcatagttgcgtctgctaagtgcatccgccactacattagcctttccaggatggtacagtatctcacaatcgtaatcttttaccagttccaaccaccgcctctgtctcatgttgagctctttctgcgtaaagaagtattttaggcttttgtgatctgtgtatatttcacacttctctccatagaggtagtgcctccagattttcaatgcaaagaccactgctgccaactctaagtcatgagttgggtaccttgtctcatactcctttagctgcctagaggcataggctaccaccttctcattctg

SEQ ID NO: 282590 - DNA, 445 bp, Cannabis indica
actccaacccgaactcaaacccaaactcgaactcagaatcgcaaatggaaccagaaccgaactaggactaggaccatgacaaggacctaaacccaaacccgaacccagatcaaaacctagacagagacctaaacccgaacctagaccgggacccaaacccacacaataatcgggacctggacttagaatcaggatagggacctgggaaacagaactaggaccgggacctagtactcgacccagacccgaaattgaacctaggacccagcttttgaccaggcagcagaaatggaactagattgggacccgagattggaatccggatctggacccagggcttggacaaaacccgtagtcggtttctggatttgggacccagccttggacccgaaccctgacaaggacccgaacccacacccggacctgaacccagtcccaaacccaa

SEQ ID NO: 282591 - DNA, 775 bp, Cannabis indica
tctgaatacccgcgagtattcgagttgttcatctgaatacccgcgagtattcaaggcgtgaaacagtgcctattcaagcatattgtatgcggttatgtcaacctacaggtcatattctatgaaattacccaggtttttacctaaaaaacatagcctcatgcatatcatctataaacattcatccttaaacaaccctcatgcacactaaaaacccagaaaatatatagtccccactcaaacagaaaacgaagcatggtgaagattcaaaaaactaaccttttactttgataaatctgtttccacgaatcgcccttgacagcaatgcagaatcaagaagaatccacgaataaaggcaaaaatctgggcaatttacggagatttttcttagtggtttctctgagagtgaaagaacaaagaagttaagggagttgaaggaaaatgagggaaaatggggacttttggttcgaattagggggtttaaatacccaaatccctcattcattgggatcatgacacgtggcagttggaatgcctagagtcgcccaatccaacggccagagatggccatgcctacacagaaatcaaagagttttgtgacgtggcaccataaatgcaataaaagtaatgattatagccgtcattttttgaaaccctcgaagggacaaccaaaggtcacctccttgtgacaacctttcacctgtctctcgaatgtagtttcccttgtgaccgcacctgtcacatcgcgaaactaggggcatgtgttatagtgagattt

SEQ ID NO: 282592 - DNA, 249 bp, Cannabis indica
gggaaagttgcaaagtgaggcccaattccttttgtatggccgcccacaatgcaagagaattaccattttattttttccattattttaatgccaaacaattctaacctaaacctagagggcattctataaatagaaagtgttggcttcaggaaactcataactttgcacattgtttccttcagagaaaagccaagccgcccctttctctcttttcttctctcaaaatttcgaaacccttgagtgaatgag

SEQ ID NO: 282593 - DNA, 632 bp, Cannabis indica
agtgtgatattgttattgatatagttaagtataaacataaataaataaacgcaaaggtttaatatctgaagaacaacaatcttaaaataatggccaaagacaaccgttgtaaattaatgaccatatttgctcattttaaatttgttcaaaggggaatgtacttaaaattttaatagctagtttctgactttgttagtagtgtatatagacagatctacctgtgccagagagaaatggctctttcttctacaacagccggagagagtgccttaaaaaaattaagtttagcacataataattcaacttagtcaactgtatatacatcatgctgggaatcgtaggatcaaatttacacaattcccactacgaattgatatgcatataatattttagagcatacccagaaacttccgcatatgcaagcaagcaatcataaatttatatatagaataagtttaccaaacagtatcccatattcccatgtcacatgtgcccatagaattatatagaacttgattaatgcagatataagttaattaaactgagtacaaattagccataatataaagacaaagagtataagatcaatagaagtatgtaaagttctttttggcaagttaggtgacaaaata

SEQ ID NO: 282594 - DNA, 653 bp, Cannabis indica
tcaaaagatgtcgcacaacgacacaaaattgtgagccctagttgtcccgaagatccaacactcctagtcgaactgtctcgatatgtacaatcttcaaccggctcaaaactcactgccgttcaacaacagcttttacctgcacataacatagcatatgtgagtcaacagactcagtaagaaaagcgtaaaatgtaaatatataactgacctacgactaagtgcccatacacctatcaacaagtcataaacaatacaaacatgtagaattgagtctcgaacgttctcgaccatagtataattgaccataataccacatgcacttagtactctagtcgtactagtgttgatagcatcaatccatactataagtacaactagccataataccacatgcactcagtactccggtgtactagtgttggtagcactagttcatgctttcgaaagtatagccaatcataataccacatgcactcaataatctggcgcagtagtattggtagcattggttcatactttctaaattgccaaacacatacattcacgattgttggaattaattttaccaggatcttagatctactcacaagtatgttgatttaccaacctaaatatgaacttctaaaacaataaacaaaacacataaaagttaa

SEQ ID NO: 282595 - DNA, 524 bp, Cannabis indica
gtataaggccacttgccatggatgccaccaatttcgaaatcaagccagccatactacagatggtccaatcttcagtccagtttggggggctaccatcagaagacccaaacatgcacctcgccaacttcgaagagctttgtcagacattcaagatgaacgaagttagcgttgacgctaccaggctaaggttgttcccattctcactaagggagcgagccaagagttggttggtatctttgccatccaattctatcaacacttgggaggaattggccctgaaattcctgtccaaattctttcctcctgcgaagattgccaagctgagagctgaaatcaacaactttacccagcatgacaacaaatctctttatgaagcctgggagagattcaatgatttattgaggaagtgtccgaaccatgtgattgaaaagtggttacaagtgcataacttttatactggattaatgagcaacacccgaacactaatagataccgcagctggtggagcttttatgaggaaaagt

SEQ ID NO: 282596 - DNA, 243 bp, Cannabis indica
tagaattgcactctcagctatacagaacgctctatatgttccaccatatagatacactattaattatccatttttataatcctaatttgatctatgatcctatatattgatgatctacattgcaaagggattaaattactgtaacaccctacaatgtattttatccttaaaacacgtaaccccgtataaatgatatttcgtttggttaagctcgaaggaatcatccttagctctatattcgcc

SEQ ID NO: 282597 - DNA, 578 bp, Cannabis indica
ttcacacctcagtatgggtagctctatcctagtaaggggcttgacaagaaactgaaacaagacatgctcaactctgtataagaacattatgtaatcccaatcacacaaaaaaagtaacatgaatgttttaactcaacctcaaaagtatgataagtacaagatactatctaattataatctaaaagcataaacaagatttgtcaaataaagatcaaacacaattagatgcaagcaaagaaaaacttaacaatattgtacaaaaacatgagagattagacaatgcaaactcccaataattttttgagggagtcaaagcgacttgagtctagggccttggtgaaaatatcagctaattatttatcagtatcaacatattctaactgcaaagatttaatttcaacaagttcccgaataaagtgatgccttatatcaatcatcaatgtgttttgttcgagaatgttgaacaggatttttgaaaatatttatggcactagtgttatcacaaaaaatagttaaaacacccaattcaaatccatagtcaatcaacattgtttcaaccataacaattgagcacaaca

SEQ ID NO: 282598 - DNA, 552 bp, Cannabis indica
ctaattcatgttgatccaaaattaattttaaaaaaattaattttcaacataaatataattttcctatttaattaaatatttaagaaaattatcaaatatttaagtatcatgataaaaatcaacttaaatattaattttctatttaattaaatatcactagaaaaatacttcaagcaaacagacaataactatctagactttcattgactaattaatttattttctaattataatatattttagttcatttattttaattaatcatttaaatgaaaaaatttattgatttaagttggtctaaaattaaaataattaatttttcaactttaatctatttttcaaaaaaaaattcaaaatattatacatttaaaattaaaaatgcaatttcaaattctataaaaaaataattaataaaaaaaataataataatatttaagtatcaagaataaaattaacttaaatatttaattttcaatttaattaaatgtaacaccctaattaacataggcgtattacgtgatttctaaacatgatgtgcagctcgttgctaat

SEQ ID NO: 282599 - DNA, 778 bp, Cannabis indica
agtttttatgcggtacaggggtactcgcactctgtacttagacatatttctaatttactttggacaaatttatatcctcgcggggataattaacctttaacatttttggagtacacgggtactcacgtttttctttaatacatatatattcgactttaattacagcttggtgtaataagtagaatagcttacaagacttgacaaaatttgtttgaatttgaaaaattaacaaacatgaggcatttcctcaatagtacattatggcatatatacccccctatacttaggatttttttttatgaaaaatgtctaagtataagtacaagagcgaacatagtttaataatgcgagtactattgataatataattttaaactttcgccattccaagctcgtggaatcgcagtaccatcgagtgctgcgagtcggtatgtggcgtcacctatttttttcgcgatgagatatggtccttcccaattatctccaaagaccccatgcgttgggttcttggtatttggcattacccttctaaggaccaagtctcctgctcgcaggacctttacttttaccttagagttaaagtatcttgcagttcgctgctggtaagccgcattttttaagtgcgcttgatcgcgtttttcttccagaagatcaaggtagagtaactgcttctcctcgttctgcgagatgttgaaaacatctctgcgtagggacctgccccaatttcaactggcaccatggcctcgcacccgtaagaaagcgagaagggtgtttcgcc

SEQ ID NO: 282600 - DNA, 590 bp, Cannabis indica
tcctgtaggctataccgactcatttttacaggcttgtcttgatgacagagagtccacatcttcgatggtttttactcttaggggtggagcagatgtttggagaagcactaagcaaactgcaatatcagactctaccatggaggccgagtacatagctgccgctgaggctgctaaggaacttgtttggctaagaaagttcttctcaggacttggtgttgttcctggaatggaaaaaccactggttttctttgtgacaacactggtgctatagccaatagtaaagagcctcaaagccacaagagaagcaaacacatagagaggaaataccacatcatcagagaatatgtggcaagaggggacgtactggtggagaaagtggacactgaagacaacttagctgatccattcaccaaagttttggctgcaactacatttgaaaagaacagatcgaatttaggattaattgaaatgtactgattgttttatgttagtgcaagtgggagtttgttgggctttgtacctaaataaaactctatttcaatgtaatcttttctattcaattatcaataaagaaacagatttaatttcat

SEQ ID NO: 282601 - DNA, 719 bp, Cannabis indica
tgttttattatttttctgtcaaaatattaacagaatattctgattagaaaacgttaattataattgattaattttagctaaataatcctaccaaaatttaatctaacaaatttctctctctagagcaaaaaccctagcctccaacacaacctttaccagtttataaccttagttataatttcttaagctatattttataattttaattttcattttaaaatttgaaaaataatgaagacaacatgctacatattatacaaaagtattgcatttatatatcccacgatgtttcaaaaatactttggaaagttcatcttgaattaattattaatatgtaataaaagatattagttattatattattacttcaaacaaaggaaagttctagcggtgcttctactttctaatcatctcttggtttcgggcagaaagtcatattcatgtgttatgtgtacgttaaatttttgttaataggacagggaagagagtatagtcttacagaacttgaaatgtgaacctgagttgtcagtatatacataaacctcaattttggcttctttaaccagctgccacacacaagttacttactctgaatttataaccatttacaattttttaacactcaaaaagttaccgagtttgttttctatagctctacttattaaggtagaaaaatatttttagattgactcctctattccgtttattaaatgaattat

SEQ ID NO: 282602 - DNA, 738 bp, Cannabis indica
tggatttcccgacctttgttctcacaacttcaaggtccttaataatgttggggttgttacgatatcttccaggttgtggcgtctgtccttctggattggaactcatctcaaattcttccttgaacattagagttagccgttcaatctcttcctttgcacgcgtgtacgaatcctctttttttgctgcatagaaagtgaagttataagttaatgaactgagagatccaaacctagccatctcataaatgtgttgttgttcttgtgccggggggttaaaatgtaggtggagatttgtcttcgcggatttgctccatcgcttcatgagaagagtattaggtattcttctcatgtttaatcttttcattgtagcccataaatgtctacaagggtacccctgactttcatatagcatgcagctacagtgtagtgctcgttggccttcacagtaatgaactcggtattggacttccggatgctgaaactttccaatggtgtatatctgccactctccttcttgctcctgacttatgacaaaataattattctctaaatcaagctgctcagcaaccttgtggtacatagttcttgtgtagaattcagcacattggttgtagtacgtggtcaagcatgtaggattaggtgggtgaggtcgagtgcatatgcttttgaagtcatttgcagtctcattgtgtctgagctttgagactgtcatatctatggttgttacaaattcaggca

SEQ ID NO: 282603 - DNA, 628 bp, Cannabis indica
gtataatcatatcaggccaaaatggtagcaaccattaatggtaaatggatgtcaggtaagaaaaaggaataccagccaactgaaaactgaataaatttaaaggattagagaattaaagagtaataaaggagaagatacgaggtaaaagaataataaatgagagtcaaaagaaagaagagactaaaagcacttctcagaaacaagaaatgcaataaatgcaaagagagaaaagaaatcaaaacgccaaaagatcaacaaacaccactaggatgaacacaaacaagaaaggtaccagaagaaaggaacaagatgtaaccccctagagagttccagaagtaaaccatatattgatattattttagtagttttttttttttttttttttgagattgtccaatttgattatataatactttagtctttattttgattttatatttcctataataaattctttctctaattgttatttttagtcttatattttgaggttttaattattgtacctatttttttgtacaatttttttgttaagcactttgccagaatatacgttattcttcttctttttcaataagttaagcacattgtttaaacttttatattatagaaagaagaaaataagttt

SEQ ID NO: 282604 - DNA, 503 bp, Cannabis indica
gagaaggtcgggcaggtagcgtatcggctagccttaccaccagcattatcggctgttcatgacgtatttcacatttctatgttaaggaaatacgtatcggattcgactcatgtcttgagttatgaagccattgaactgcagccagaattaacctatgaagaacaacctgttcagattttggataaaaaggaaaaagttcttcggaacaagactattgtattggttaaggtgctctggaggaacaacaaggtggaagaagccacctgggaatttgagtcagatatgaggactcaacatccagagctattcaggttagatttcgaggacgaaatcctattaacggggggataattgtaatgaccgctctagcaatgtggattagtaaaggcaattagcactaatgtttattattttattattttattattatttgtgaatttctttaattctgaaccccaatatttagaaataaatattagagttataatttctcaattctggag

SEQ ID NO: 282605 - DNA, 617 bp, Cannabis indica
ttctaccttgtcatcgggcaagacacccttttccagatatgcgacgattggagtaatccaggtgacctcctgaacggtatctatctccatgatcacttcacgatttatagttgggtgagctaacacatctaccggaattacatcgagcaattcggcttctctggttgaggccaaacgggccaatgcgtctgcgtgtgaattttgagcacgcggtattcgagacacaattacttttttgaatttctgcattagctcgcatacaatggctaaatatttaaccaatctcccgcctcttgccagatattctccattcacctgacacaccacgatttgggagtcgctaaaagcctgaagatactcgactttcatctcgagagcgagtttcaatcctgcgattaatgcctcgtactcggcttcattgttagatgcagaaaattcaaaacgtaaagcagcatgtaccttaaaattactgggactgattaataagactccgctaccagaaccctcgctatttgaggctccgtcgacgtacaatgtccacagttctctattcgctatagcgatgtcacttttgtcctctatgagtgctacctcggtgctggggaattcaaggataa

SEQ ID NO: 282606 - DNA, 535 bp, Cannabis indica
tgagcttggggagaagcctttcgtagctcgtagaggatataatatggtgttgatgaaatgtatggatccattggtggtttattagtcaatatcattgatgaagtcgaatcaatgatgtcaagtgcttcctcatcctccaatgtcacaatatctactctcttcatctaacaactcttcttcttgttgctcactctccacgtggctatccataccctcacttgtgatttcatattcaatgatttcttgatcatggatgaattcattctcttccataatttcattcaatccacgacattcattatttaccaagtaagaatctgatgtagccaaattttgagttaataccacttcaaaaggatcttgatcttcaattgtaggctcattatcttccttgtatcaactaatgccccttcttcatcgtaccaataactctcataactttcattattggagttattatattctgaatcatgagccattgaattatcacataaggatctcaccatgttcgttaagcgattaatctctcctggaa

SEQ ID NO: 282607 - DNA, 998 bp, Cannabis indica
ctgaggagagcaaacatcacgaaaactcagtcgtacaaaactctccacaaattaagcgactatcccttgtgaaatctcctcagtccaaagaggagaacttgaaggtatctaaccaaaaacgaacctttaagtatatccctaaaagtcaacgaggagtagggcaaaaagctttgacaccgatcgaagattcgatgacagccctgatgacaagctttactttaccactaaggaaaatcgatcagtcactacccaagggtaaaatgcaaatttcagtttcctttggtaaagatagcaagaaaaataaaagagtcattactctcaataaaacgtcctccacttctgtaactccgaaaaccttcaaaacaatgaagaaaaatgttcatttcaagaagcaaaaaggagtcacaatccatcaaaatagtgattgtttaaaagcttcttttgaaccagatgagttaacagaggaggaacaaaaaatgtttcacagcgacgatgttcctacaccttccccgcgggtctcagtatttgatagacttgaaccaagcacatccaccccacgagtgtcagcattcgaaaggcttgttttcccaagtgctccacagtcaaagggaactaaaaagcaaaaacagtggatgccaaaacagaagaaatctttgagaattactattcgggggcatgaaacacaagaagatggagaaaattttgctcaagtcaattacctctctttcgaagaaagcttgaccgtagaagatgaaggctcaagctcaaacccttcggaagattttatagacatctttcaaccagcacctcaggaattcgaagatggaggacaagcaactgtggatgacttaatagagatcaatctcgggaccgaggatgatccaaagcctgtgtttgtcagtgctttattatctgaagaagagttaccacagtacatacaagtccttcgcgagaacaaagatgtatttgcttggttataccgagacatgccggggttg

SEQ ID NO: 282608 - DNA, 513 bp, Cannabis indica
gttcacatcggtacaattggtatggttctccattaagctcatggaacctaaggccaggataccctagagtctcagcaatatccacataattcaaacttctctctcgaaattgccgtttcaagggttgctcctccacagtgaaagttgggaggtcataaagggcatgaatatcggctgttagcaggcactctaacccccctaactctgactttgccatcttctctttcaggccagttggctaaaaattccaaagctagagtttggttaccacgctcagtgacatccacgaacttagtccactgcctatgtaggatttgatccctaatagatgcaaatgcagggggaatgttggcagtttggcttaggttcacaatgtctatccctctatcttcaatgaatgccctatctttcaatttcaaaaaccgctcttgagcatccatgttggtaaacctaactctatcaagattagagcgacccctaggtgggttggatgatgaagctcccccttcctca

SEQ ID NO: 282609 - DNA, 278 bp, Cannabis indica
attcttcacaaccttacacactatgattgagtactacttgatgtgtgtgggcactcactcattcactataggctcggtttagaagagaggaagagagagagagtgtggtttcggctagggttaggaaggaggctcaaattttatctgaaggaatgagatgcatcatcttttcccttaagccatcactacctatttataggaaacaatatatttattaataagacttaacaaagtctcttaataaacaaattaaccctagaaactctttcttcacaatt

SEQ ID NO: 282610 - DNA, 240 bp, Cannabis indica
atatgtaccacgatatatatacgttatgattatccattgttacaatcctaatactcaaggatcctctatagatgatctacaatgaatagggacaaatttaccattctacccttcaatgtattttatccttaaaagacttagctacctatcaatgattgttgcccctaattttgcccaatatacgtggaccaatcagacagagacacgtggatcaagaaattcacaatatttgctaagtct

SEQ ID NO: 282611 - DNA, 746 bp, Cannabis indica
ctggaaagaggccccctccggacggttgtcaacaagaaagccttagaaggatttcctggacaaaagtcgggtgcaagaatctcacagatagtgacattgcgcataaaaggaaaaggaagaggaggggcagaaaatcgagaaagacaaagtcttctctatacccttgaaggccatcacgcaaagagtaaatgggcctttacaaaaaataataataatgtgtaacaagagtgacccaaacaccagagaagagaaatctaaacgtattacgtgaaaactcaaggtgaaacattcccagaaacttcaaacactagacccagaaaaacaaatgaacagtaaagcatgccatgaacacaaacagtaaagtgagggatgcgaaaaacttacatgaagtgttggaactgggggttgctgttgatcgacgaagaaaagtggactgacagtaacgaacaaaggttaaacaaagaaatctgtaagtgtttgaaggttttctggtctgaggatttctttctctctggaaaactcgaagaaatttggcgaaaggatgaaagtaaccaaatgaaggaaaggtggtggcttttataggccaaggtgcatgtggaacaggcacaatcacctaccaatcgaacggctggggaggcgcacgattcgaattcccaagaatcaacggttagattgattcgtaattaaggcggtggaaacgtttgagtatccgtctgacacacattaatgcgccgtatcaatcaatg

SEQ ID NO: 282612 - DNA, 442 bp, Cannabis indica
cgaaatccttttaaggggggaatagttgtaaagaccgcttagtttaatttggaaattagcagttaattatgcataatctataaaaaaaatttatagatatttaaataattatttatgctgttagtattgaattctgaaatgcattttatgtcatatagtgaatttcataattttgcatttccggtgccaggcaacatggaactcggtgtttggctcaataaaatcacaacttagtaagttagtattttgggacgatttattagacattgggaatgtcgagagtggtcgggaatttagaatttcccaaaatacccttttagtaccctttatgttattttagtgtggaggggcaaaatggtcattttgccccaatgatattttgtcctttagtggactttatgtgatgaaaatatataattttaaatgttatttgttggctgaa

SEQ ID NO: 282613 - DNA, 706 bp, Cannabis indica
taccacatgcactacgtactcgtctcgtactagtgtcggtaacactatgtcgtaccctttaaacatcatatactgtaccaatgcactttgtaccacaactgtactagtattggtagtatattattcacataaaacaacatgaaatttacatacttacacatatacatatacatatcttatgctagcattaccttgtttcctgattcaagtgtgtcgatcaacctaaatagatatattgctcgttgaatggaggccttatgtcacaatacgcaaaataagtaaacaacttgctaaaatctttacgaggacttaaactcaaaactagaaatttccctatcaataaatatcatggaaatgcccttaatattaaggaaacacgataaaaaaatactttggaaaaactatcaggaaaaacgacatgctattttgtataaacgatagattgtttttctaggcagtctttcagtaaaaacaatgtaccgttttctcagtaaaaatctgctattttctactgtagaaaaataataagtgtcaaaaaaaacccaaatctatcccaaatctcaaaatattctataaaaatctaattagttcctaataaacacaattcaagcataaaacacaagtataactcaaaactctcaaaaatcaccattcgttgagtcaagtttgagttcttgaactcaaacttgctcaacaccactcacac

SEQ ID NO: 282614 - DNA, 735 bp, Cannabis indica
  modified_base (721)..(721): a, c, t, g, unknown or other
cacttacacattcagacgatagttgcaggatggttgctgcgtggttgcgcggtggttgcatcagacgaaggtttcaatcaaacgatagttgcagggtggttgcagggtggttggtaggtggttggccaaaggttgccttagacgaaggtttcaatcaaacgaaagtttcggggtggttggctgaaggttgcatcagaagaagtttacaatcagacgaaataactgttagcaaaatggttaggcaactgtaatgcaactgttgtgaaacattaaaaatcaaaacagtgtttccacgtacgtaactctatctatatgtctcttaatgatttaatatgaataaattcaccattagaaatttagaaaacaacaaaaatacacaaagataaacattttattataatatttatgtaattattttattattatacttgagttggattgtttaggaactccagctcaactttttgagatctgtctttcatgaatttaaaaattgaagtcaggacattagttttatgcaaattaaattggattttcagttaaattttagtttcgtagtagtttttctacactttttttatgaattcgaagcaactcctgttttgattgattctggttgtcttctcaggtgaagtcgtcggaattaatggtggttctctttctgatttgaattttttgtttctgttgcgttgggttgctgcgtgttgcacgtatggttgcncgatagtgcccagg

SEQ ID NO: 282615 - DNA, 657 bp, Cannabis indica
attagatatgataaatttaccgtaatatttatttaattcaatatcacctagttgacctagatcaaatgatcttaatcctaacatggttaggttcgatcttaagagataatttatgttctttgatttcttagttaagcctactttttgataagggtgatacgtacattttgggaacatagtagtacaattgagtgggagtgctaatcatatatatgaaatctatagcttctatctggacatagaagtgaaacaatgatttccttcgagcttggctaaaaaaaagataaatggttgagtactcatttcagtgattatgttagttcactgaaatatcatctataagtggctaagtattttaaagataaaatacattgaagggtgtaactataaattaatccctatgcaatgtaaatcatctatagaggatcattgattattgggattataaaaatggataattaatagtgtatctatatcgtggaacatatagatcgttctatataactgagagtgcaattccatgttctatggtggatgcaatgaggaatgaataagttagtggatttacttggtaaattttagatctgcttattggaagctcagatatatatgctcatggtcctcatacgtagtggagacaatactgcttgtaagact

SEQ ID NO: 282616 - DNA, 582 bp, Cannabis indica
tcgcagaagttttagtcaaccgctactcaaatgcatcaacggggaagattgcggttacatacttcgtgaggtacatgcgggaattcgcggcaatcatacagggggtaactcccttgcattaaaaatcatgcgacaagagtattactggccaaccttgcgacaggatgctctcgcttttgcgaagaaatgcgacaggtgtcagcgaatagccacatatacccaccaacctccgagtaacctacattctatcacaagtatgaccctttgcagtatgggggattgacttaataggtgagctacctaaagggaaaggtggagtcaaatatgcggtagtcgcagtagactatttcacgaaatgggctgaagccaaagcactcgcaaccatcacagcaacgaaattgcgcgagtttgtctataactccataatttgtcgatttggtattccatacaaactcatctcagacaatggaagcagttcgattgtaaagagatgcgacaattatgtgacgatctgggaataaagaaggcattctccggagttgcatacccacaaagcaacggacagactgaagctgttaacaa

SEQ ID NO: 282617 - DNA, 732 bp, Cannabis indica
tttgctctgcctgagcaaggggttgatcttcattccctttatatcctaatttttcacccacaagatgtggcatgtccacatagtcaaaaatgaaagacacgtggaagacaaccaatcaataaccagacaggtacactccatgcagcttccaaggtaagaacaagacaagtctttagacactggccggaccatagctggccggccaaggaaggttttccgaccaaggaggtctgcctgaccatggaggcctggccaactaaggaaggctggctagccaaattggacaacaaagttgtacaaagaagatgaattgcaaagttgtatggagaagttgtacgacaaagctttacaaagaagctaaacacaaagttgtatgaatatgctaaatcacgcccccaaataagggttggctagccaaggtagacggacatgccacacagaccctaaaaacaaggttggctagccaaggcagacacacatgcttgatagaccctaaaaatagggctgatcgactagaacttgcaggcaactcctaataggctgaacaagtcgcgaggtccacagcaagccctctagaagattctaaagctaaaatacaattttgggattaactgttgggttttatgccctaaataaaactcatttcaatataatcagatttacttattaatatagataagaaataacatttaatgttgcatggttcacatgacttatttcatgattatatgt

SEQ ID NO: 282618 - DNA, 582 bp, Cannabis indica
agtggactaagcagatcacaatctgactgaaccactataattctttgtcttactgataatttccagttttgttgattgttctcacattcccagttgagtactcgtcgttctaggttgaatactcgcacttgtcgtttctctaaaaattctcttttgtattaatcaaacaatataatttagtgttgcgaaattcacccgataacaccgaggtgatctgcgtgatcatctcaacgcagttttcagggcacgctctcgcggcccacataatactgagacactccgtgatccccatgcgggcgatcagggtgccaacactgataataacccgcctaccgcgccgatcgcgaccactgggattaatgtcccagcaaatcttgccgcagtagttgcgagccccgcagttgcagcgactccgactcctgcgacaggaggaattgaccaaagcatgcttctgcaggctttgaaaatgctcgagcagcaacgtaagcctatatataagttgcatggcacctcgccttttactacagaggtgcgacaagctcaacttccaaaagggtttcgtctatctgagtccctcaaata

SEQ ID NO: 282619 - DNA, 852 bp, Cannabis indica
atactattttaatctggatattacagagaaaggtggacattctaatggtgaagtcaacctgagtaggggcagaccaggtccaagaaaaccttggaataacagaggtagaagtcaaggcagaggttcaaacaaacagggaggttttcaaagaggcagatcaagttctaaccctagaaactctgatgaaactaatggctgttacaactgtggtaaacctgggcatttcaaaagagattgttatttcttgaaaagaaataacaaacaaaaaccacatggacagggagattctaaatactcaaactctaaacctaaatctgatatgcatgatgctaatattactgctggatatgaaagtggtgaagtgtaccaagttggaccatccatcaaagatgaatggatccttgactctggttgcactttccacatgactaataataaagctttcatgtttgatttcaggaaaacaaatgggggcagagttatacttggaaataaccagacctgtgatatacaaggctctggatctatcagttttaaaatgcatgatggaatggtcagaactctaagtgaaattagatatgttcctaatctagccaggaatctaatttcactaagtgttctagatgaccaaggcattgttagcaagattgaatctggccaaatgaaaataagtaaaggggccctaactatcatgaaaggacacaaagatggaggcttatactacttaaaaggacaaccagttgtaccttgcaattatactgctcacagcaacaatgatgactcaaatgcaatgctatggcacaagaggctaggacacataagtgagaaaggactgcaactaatgagtgaaca

SEQ ID NO: 282620 - DNA, 623 bp, Cannabis indica
taatttaaaaaagataagatttagggaatatcgttaaccacctatgaaaggtgttgggcaccattggtgtccaatatcaatgctctttagttataattatgtgatacttaacatgaaagttatagtttcaaaaaaagaatcctagttatcatcaatttaatgaaatggttggttttgttggtgtataattactcaaaagatctactttctagaattacatagctttgatgattgttttaatattgataatgcactagtatttttcaatgaataattatttagggctgagcatcggtcggtttggtcggtttttttctatataaaattccaaaattcggttttggtttggattggtacaatccaaaaacggaccaaccaatccagaatctatcttaaaaccgatcattttgaacctcggtttggtcggtttaaactgcccaaaccgaacatttttttaaaaaaaatatgatccaatttattctataacacattattttacattttacaactacaaacatacaattaatgttcaaaactatatttattctttaatttatattataaaaataatatattattttatatattattagtaactataatacatgcaaaaaaaaaaactt

SEQ ID NO: 282621 - DNA, 751 bp, Cannabis indica
atgagattttcttcttcttcttcttcagctacatataacagagaatttcttaactaggtatttaaacatcatcatttttaccaaccttttctttgggagaaagaacccatgattattactgttagtagcttttggtttgaacttttttccatctgggtcttgcttcattctcatcacagttttcaaatctgagattattgtcactaccatgcctcctctttaatggaaattttcccactttcttatacataaatgttagtgtgtataaataggtaggagaaacaaaggattgagaaattaagggtatttcagcaaagaaaaaaaaagagggagaaattaagggtatgacgtggcaaaagggactgtgagaagaagacaagagccatggtagtagtaagtaatgattctagaatgagaaagaatatgaaagtgagaactgagaaggggtctcaatcatgatcacatggcagtaagtaataagcacaagcttttcatttgtgtttttggttttggtcaaaagaaaatcactatactttgattttcttttccaataattcgatgaccaaattcttttgttatggtgtttatacattttattaagagagaggtacattcatgcacacattacaattgaattagtttgatcatcttttctttggtcataaatgaaaccctaatttatttggtttctaatattatgaataatatcactttgttatgaaaacatatggtataatttgaatctattttg

SEQ ID NO: 282622 - DNA, 513 bp, Cannabis indica
cccaattttttatccgttttttaaggctctgctatagaaaggaatgatgggctagagatcttgaacggaaggagtcattatattttgctgcaaccaatgtaaggttttcttaaacccttatgtgtttatttcattattttagagaattcatacttaggatgttgattcaacatacttgttactaaatctagatcctggtaaaatattcacaataacttcatcttcttcttcttcttctaatttcgaaatcatatagccatcttcacaaactaaattctagccttaatgattgagtgcatgcccacacataacaagtgagtcctcaatcatattgtgtgagactgtgaagaatccaattcaagtgaaggagaatcaggctcaaatctgagcgatttgagcgaaaggagtcatttaattctgctccacacaatgtaaggtttctcaaactttatatgtgtttaaattacattgttctagaaatttatatttaggatgttaaataacatacgtggt

SEQ ID NO: 282623 - DNA, 537 bp, Cannabis indica
agtaaccgatccaatccaatccacacatatttataacaaaattaaaaaattatatatacaaataacattttaatgtaaagaaaatagtaatttaaaagtctaatacatataatacaattatattgcaaaacttaatagataaaatgtatattctattcttatattttttttctacatacaatttaaaataaaattaaatatttttttatatatacaattttttttcttcctttgaatttgttatttgttattttatttatttaatgtgttgttggagacataaaataactataatttgttttattttgttgctagttatgtgaaaaaaaaaatatttttttcataaatattaaataatttaatattaaaaagtaaccaatccaaagtaaccgatccaatccgcacttttgcggattggattggattggatttgagctattgtgcggattggattggatccaaaaaataaaatccgcactaagtagcggagttaaatagttgtttgaccaaaaaaactaagcagattggatcggagtg

SEQ ID NO: 282624 - DNA, 647 bp, Cannabis indica
tttcacatatacctcgcgtactatcaacaaaacttagaatgatgactttgccctacccatttgctatatgggggatcgacctaattggggcattacccactgggcgaggaggagctaagtatgaggtggtagcagtcgacttcttcactaaatggacaaaggctgagcccctcgtctccataacctgcaagaaagtccttgactttgtcatcaagaacattatttgtaggtttagaattcccatgaagatagtatccgataatggaatccaatttgatggcgacttattcactgaattctgcgagaggaataaaattatcaaaaacttttcgtcagtatccaggcctcaggaaaatggacaagtggaagccattaataaaaccctaaaggatactatcaagaagaagctagatgctgccaagggcagatgggttgacgagctacctcaggtgctttgggcccacagaactaccgagaaaacagccacgggacacactcctttctcgctagcatttggcttgaaagcaatgttacttgttgaagtgaatatatcgactcacagaagagagttttataatcaagaagaaaaccaagaactcttaaaattgtccttggatctactaaaggaaaaacgaactgagttgcaa

SEQ ID NO: 282625 - DNA, 620 bp, Cannabis indica
aagagtcatacgtctgctcggtcacttggggggcacctatacctgtacaaagcattgggtaaaaataaaacaatcagaattgcacgacaattataaatagagaatgaaattcattaaggatgacacaagcacgtaaacttgggattaaaagctgcccggtcagcccgttgtccaaaaaatgaaaaataattccaagtttaaagatcacttggccagtcatgatgtcttagaaaaggccctaaggccgaataagatatatcaaaaaaagagataaaaagaagtgtttaaacagctggagtaccaggctcttggttcgattattctaagccaactggagcaggaggatctgttatttgaataggagaagcatcagcagcctgaacgaaggttgaagtagcttggccggaggttgaagcagccgccttgttcccaccataagccacttgggccgcgcagtactcaagatacatgtcctttgcgtcgcccaagtagtcaaagtttgcccggggattagccttccagaaatcaaagaagagctagagatcggctgtctccaaggcattgaccttctccttcaacctatccacctcggtcgaaagctccccctccttggcatcctt

SEQ ID NO: 282626 - DNA, 953 bp, Cannabis indica
acaatatacaataatagaaattaagaattacaaagctacactacaaacctcaccaattatttttactaaaattacgtttcactctattttttttgtcactaaaataagtaaaataaaataataataagagagaacagatgagaaaatgtattttctctactctaaaatctgatgcctttacaatgcaaaatggtgcaatttatagtgaaactttgctctccaaaatggtattttagtgtaccatataatggagaacatggcacaaagtgctgagaatttggtgaagagtggtagagttggttggcctagattggttcagtcagcttctagttgggccgcaagtggtggacaaagctgaagtggggaattgatggaaggagaatgattggccatgtaagatatgtaaatgttgatgatgatgagcttcttacgccactttctattaaagagagttaccaaccatgtgatgagtgaagaatagtaaagcccaattaatttcctcaagcccagtttgaacttcttaaacttttattgacatcatattaattgaggcttcccacacagtccatatgatatgatggatattatttgggccaatcttcatttggagttgctatcctctatttcatcttttaccaatttatgcactaaatttgaaaattaacataatattagattaaattaaatatttctaaataaaataatttatgtaattaagctcataaaaataaataatttaattgtatttattcagccaaataacatataaatatatgtaaattttgcactgtaatcactttagttagatgctgtaagcatttttttctagttggctaaatctatagaagttcttttcaacttctagatatagatttcaatttatctaaagaaaagtctcaactattctagaaaagataaaggtccaatgaaagaattccttagaatgaacagtg

SEQ ID NO: 282627 - DNA, 518 bp, Cannabis indica
tctgtttcccaggtccctatcctgattttggatcaaggtcccagttattatgtgggtttgggtcccggtctaggttcgggttcgagtcctagtctcggttaaggtttaggtctatgtctaggttttgatctgggttcgggttttggtttaggtactggtcctggtcctagtccttgttcagttctagttccatttgcaattctgagttcgagttttggtttgagttcgggtcggagttcgagtcttggtctgagtttgggttcgagtccgtatttcagtctaggtccaaataaggctccgggtgtgggttcgcgtcctgggtcttggtctaggttgggcccgagtcccaagttccaatcccgatctgagtttggattcagttctaggtctatgtccttggttctgatcctggttttggttcgagttttggtctgggtccgggtctagctttgggtgtgattctaggtgtgggtttgagttcgggtccgagtctgcgtccgggtttgtgtctaggtctg

SEQ ID NO: 282628 - DNA, 908 bp, Cannabis indica
gtagtcagtgtctagatttgggacccagccctggaccagaaccctgacaagaacccgaacccacactcggacctgaacccagtcccaaacccaaaagtggacccgaacctgtaccttgtgacccaaaattggaaccaaaacgggaagttgaccgggactggaactaggacttggacttggaatcataactgaaattggacctagatccagaaccgtaaccggacgaggaccaggactccaaatcagacctagaccagaattggaagccggacccggatcccaacccaaacctaactcgggacccgaacccgaacctgaactcagacccaaacatggaaccagacaagggacacagaaccagggtcgggacctagaaccgcaccccagtctcaatcccgaaccaaaactcaaaaatgggacctgggacctgaaccagaacaagaccgagacccgtgacagtgattcagatcttgactcgggattcaggtaacggggcttagaacagaccagtagccggtgtctagatctgggactcagactagcaccagaacccagacgaagaacaaaacccaaaacaagacctagacatgggacccaaaattagaacctgaacgagaattgccgaacaaggaccctagaacaagactaggaccgtgacaaggacatggacacagacctagaaccgaacacagacctagcctcagatccaaactgagactcgaattcgggccccgacaaggtcgtgtacccagaacggaacaaagaaccggaccttgaccaaaatttggggcccaattccaaacacagactcggacctagattgggatccggatacggaacctggactcggacaaagaccccagactaggatcaaaaatgctggacgtagatctagaccgatatcttga

SEQ ID NO: 282629 - DNA, 546 bp, Cannabis indica
aagaggtacttctggtacttatcttccgccatggcgatgatgtcatcccggaataccttctctgcggccggagccctcacattcgggcagatgactttggaaagattgtagtcatccaccgactgatgccctaggatcagcttggccttctgacagtgctccgtcgtgaccaactcccctacatcaagggccttcttgtcgtacgtggcgaaggtcttggcccattgaagaaatatttgagtaggttcggtccgcatgtaagggggatcctaacccactccgtgagaagctctggatgatccgtggcctggaaactggaagagaagaagaagtggtgacggtattccttcacgtgcttctgataattaaaggggatcgggccctcattcaaaggatgggcacggagaccgtaaaagccgtccttaagtttatctccctttttagggatagaaacgagttcataaaaatataaaatttttgccagactgggagagccccagctccgggcagcgtaaaaaataaacaagccttagagcaggcggtaag

SEQ ID NO: 282630 - DNA, 500 bp, Cannabis indica
taaaaaaaaaaaaaaaaccccaaaaataaaataaaacaattaataataaaacaataattaataaatcaataaaacaatacaataaaaaataataaaacagtaattaataattaattataaaaccataatcaataattaataaaataataattaataattaataattaattattgttttattaattattggtgaagcactctctcgggtacttgttcccaatctagccgagtacccaactgtgaaaagtccagagcagcttccaatcaaccactctaagtgggtccgcattcaagagtgtcgaagtagccctagactttttcttcatttcagtgtactcatcgaaccacctaggtcgctttctcttcctccggttctccatggagcacatgcacctcagaatcctgagtatccccgatgtaggtgatattcgttttctcaggtgtacagaacatgtcatcatcatccaatttgtaatcatttgggagaatgaagtcatttt

SEQ ID NO: 282631 - DNA, 837 bp, Cannabis indica
tttttttgttaaaactgaaaaaaaaaaacccaaaaaataaatacatatgttaaaaaaaattaaactaaataaaagacaattgataaattaaagaatattctcacaaaatagtgatctaaaaataaaagacattgataaatttatagaacttattatgatgtgattttaaaattgttgtcctcaccgttttatagacacaactgtatttttatcaccgtatctcacttatagttatcattatatttagggactctttgaaatgagttaatattagcaagagaatggtaatgtgaaacattaccttcacattaccttgtttgttctaagggtttaaccttctaatgttattcctttagtaatataactactctggaagaggataatattgataactaaaaaaaatggtggaattgaattattccattttattgtattaatttgaatactattttttgattaataaataaatttaaatatcattaatattttaattattataaaaaatattgcgatatatatttaatctgtgagataattttttttttatatttttaactgagttatttctatgttattagcataatatatagatgtattatacataaattttatgtgaatagtgtacataaatgacataacaaataaaaataaataatatagtaacaaaatatatagaaaagtttattttaattaataaaaaatacaataaaatttaatatttactaattaataaatacaatatatttctttaatgaatcattattttacttttatgtataattaacattaaacagatataataaaaattatttttatttttatttttaaaataattaa

SEQ ID NO: 282632 - DNA, 530 bp, Cannabis indica
caggtttggtttgatccgggtatggctcccaatttgggtataggtctgatttggttagggtcttggtccggttacggttctagatctatgttcaatttcagttatgattccaagtccaagtcctagttccagtctcggtcaacttccggtttttgttccaattttgggtcacagggtacgggttcgggtccacttttgggtttgggactgggttcaggtctgggtgtgggttcgggtccttgtcagagttctggtccagggcggggtcccaaatccagacactgactacgggttttgtctaagccctgggtctagatccggatcccaatatcgggtcggagtctggttctacttctggtgccgggtcttgagctgggtcctaggttcaagttcaggtatgggtcgggtactaggtcccgatcctagttctatttccctggtccctatcctgattatgggtccaagtcccagttatggtgtgggtttgggtcccgagtgtgggcccaagtttgggtcttggtcaagatctc

SEQ ID NO: 282633 - DNA, 886 bp, Cannabis indica
tgtttctgagcggggatttgagtatgggctccggactgcacattcgccgcagtattctgctcatctattccccttcttctgtttaggtcgtcccttaggtcacggggtgttcccaacctttcgaacacagaagaacctggctgccttagcgattggtttgcttggttggcaagtggaatggctccattattttgcgtggatccatcgagcatgactcctcctgatgaattcccggacaaggtctgtcctcctacctcttggcccacgagtggaactcgtgaccggagattggacggctgaccgttgtttgtttgggaagcattcaccgttgggtcatcctcggtttctccaagggcaatgacgctcggcgcctgctggcctatagtctgataggctcttcgtatcagcacagtggcttgctgactacgatcttcgatttttgcatggtgagcccttaatgcctccatctctttgtccctccattcggcaaacatacgcatatgttcgtcaaacacgaggtttactgcggcacgtaattcttcctgatcgtgatgctgggtattgttgtgaccctgcatgagtccaagcgcagcacggaggttttgcaatttagttgcatttctgatggtcgtatgggcgttgatgcctggtggaacagtcatgttatgaacgtcctggctgtgtgcggaaccgttgtttccagtctcttgcacgccaggcgcagtttcagtaacaggagttgttccatcattcaccacgcttcccgtctgtccaggattgacagcgggtggaaccctcaaactccctgggtcctacaactttggatccagcgtctgtgagtttgatgggtcggacaggcctctacgagtttgcaccatcgtgtcga

SEQ ID NO: 282634 - DNA, 514 bp, Cannabis indica
tcattccaaattctcaaccaattcacaaattgacctatagaattattaacacataacagatactcattttaacatattacatgcattaaaattccgtaattcagattgcaaaagccaactcaaaatcatgcataaacatggcacatccaaactctttgaacaagagcatcaccttcaactacttctacaatttttgagccaacacaacatcacaataacacatgattcaatactagaaaatagggctgtacagaaatttttgtaaaccgaccaacccgaataacccgactaaaccaaaccgacaaaaccgataaaaaatacaaactaacataacttgacaaaattctaaaccgcccaatctataaattggacgggttgaattttgacccaaaccgcccaaaccgatttaacccgattttcagtttttttttatatattatataatatataatatatattaaaaaaaaactcaaaccctaaattttaagtctctcagcccgcctctctctctctc

SEQ ID NO: 282635 - DNA, 653 bp, Cannabis indica
aataagaaaagtttcaatgtcacatggagtgatgatgaaaccgaaagtgatgaagaaaattctgagaatgttgccctaacttctgttttgactaatgtgttgtgtgattcacaggtgaaagctagactggtatgtttgaataataccactaaacaagaagaatcagattctgatgattctgaaatctgtgaagagtctcttgctgaatcatacaaagtcatgtatgaaaagtggattcaggttactactgaaaatagagagttgattaaaatgaataaaaaactgtctcatcaaattgaaatgtttgaattaaaattaaagaatatgagacaaatttttgtgtgaaagatgaaaaaatcactcttttaaagaaggaacttgaaaattttaagaaaaatgttcaaatgcttaatcctggatctattatttttgaaaaagctgagaaaagaggttttgcaggcattggatcaaatggtgtggaaagttctagaatcacgaagtttgtaaaatctagtgttccgacgaatcttcctgatgctgcaaatgtgaagtctgctaaaacagtttcacaacgtgtcgttgtagaagctgtttctgctgctgcaaaattcccaggatttacaaaaaagagtaagatctgaggtaaaaagatt

SEQ ID NO: 282636 - DNA, 537 bp, Cannabis indica
gaaggtaattgcttacgcttcaaggcaattaaaagaatacgaacagagatacccgacacatgacctagagttagccgcagtggtttttgcactaaaaatttggcgtcattatctctatggagtgaaatgtgaaatctacaccgatcataagagtttaaagtactttttcacccagagggagttaaacatgaggcagaggagatggttggagctagtcaaagactacgactgcgagataatgtaccatcccggtaaagccaatgtggtagcggatgcactcagccgtagaggtcccggactagtttccactttacaagggtatcaagggaattagtggaagacatggaacgagctggtatagagtttattacagggcaacttgcaaaggtcacacttcaatccactttgttagaaagaattaaggaggggcagacgacagatcaaaagctcagtgaactaaagcaagaaattttgaatagtaacgccaaagattatgaaatatcagacacgggattaattcggttcaagggacgaatt

SEQ ID NO: 282637 - DNA, 560 bp, Cannabis indica
tcaatcgcatagatatggtctcgaggtacggccagttcggtataattgacgaagcgaggtccccctttccttttcggcgaggactccttctttgggggcgacttagccaacttcgggcttcgcggtttgcgcgggctgcgtcttcttgggcttcggcccctggaattcttccctcgcggactgcgagaacgcgaccgcggtatgggtgatcgtcgtttgttcttgcccttctctaactctgccaaagaattctcgattctcttatgaggttcggccatggcgaagaactctaccaaggattccggccttcgggcctgcagctccttccagaagtcggttcttggcaagatacctgttattagcatgcaaacaagcgaagactcgggggccttctcgaccttcgttacttcggcgttaaaacgcttgaaataattttgtaaagactcaccaggctcttgtttgatgttggccaaagtcgtatagggtggcctatacgtcatcgtggcctggaaatgtgtgaggaataagtcgacgaagttttcccacgtcgatatcgatgc

SEQ ID NO: 282638 - DNA, 520 bp, Cannabis indica
caaaaacaaaaatgtgttctactgacgccccgtctgggtacgagtttgggccaggatctggtgggctcgagtttaagtctaaggcctgtaaggccagggtccggggccaaggtccttgtttgggtacagggctgaagtcttggggtcgggactcgagttagtgtctgaggccaagtctagggtctaaggtcgagtccggggtccggggtctgggacagagtccgaggtctaaggtccaggactagggctttagtctagggttgaggcttgagtctaaggccaaaatcgtgatttggtcggggtctggtctggggtccaagtctgggtcttgaaatagagtcgagtttggatccagacccagaatcgcgatctggtcagggtctgatctggggtctgagtctgagaccagagtcgagtttgggtctggagctagggtcggggtttaaaataatgacaaaagaagatgcaaataccttgaaatttaatacatgtatgttaatttttttttttgaaagaaagt

SEQ ID NO: 282639 - DNA, 830 bp, Cannabis indica
atatgttcaaaagtttaattcccatgatttgtcagttcattggatttaaattgacatgataatcagcgataaggtattcttacaccttgaaaaagtgttatgtcctttctagggcattggtaaagtttacaagtatcggatgtatagaatatacattggaagggaccgatattgatcttggataagatatcataaacctatcgttatatctttctaagtatataccaatggttgatcttaggtctatggatcttaatcctgatatggttaggttcaacttagttgtattatttatgttcttcaagttatttgtggaaggtaactaatggttttggcagatatttacatcttggaaacatggtagttcaattgagtgggagggctgatcatagatatggaatctataacttctataagtatttagaagtgaaacgatgatttccttcgaggttggctcattagagataaatgattgagatctcatttcagtaactatattagtttactgaaatatcatttataggtatctatgtgttttaaggataaagtacattgaagggtagaacagtatatttgtccctattcagtgtagatcatctatcgaggatctttgactagtgggattgtaacaatggataatcataacgtatcaatatcgtggtacatatagagcgttctatataattgagagtgctattcaattccaaatctatagtggcgcaacgcgaaattaataagttaggaaatttacttggtaaattctagatctacttaatgaaagtttatttatataggcccatggtcccctcactagttgagataatactgct

SEQ ID NO: 282640 - DNA, 673 bp, Cannabis indica
tactccaaatctgtcacatgttattgagtatgaggctatccctcttcaggaagatgtgacttatgaagagcaacctgtcaaaatcttggcaagagagctaaaagtgtaaggaacaaagagattccagtagtcaaggtcttatggaggaaccacagagaagacgaggctacttgggagttagagtccgagatgtatatgaagtatcctcacttgtttaattttcaacttgaggttgtactttaaaatttcgggacgaaatttctttaaggaggggagaatgtaaagactcggttttgaccgagtcaaatgtatatatatataaaatattaattaaataatgatatatatatatgtatgtaaaatatatatatatatattattttgaatatactgaaccccttcgttcccctctctcattctatctatctttctctcttttcctctctttaaaatacaaaaataaaacccataaacctccataaccaccacactccggcgacccacctccggccaccgcccgacccaacgcgccgaaaaaatcgaaagcccaagtgtcggcgacctcaccccccaagcggcgccgctcctctcgccgccgttgactcgggatcgcaagtcaaagtttgggatttcaaactttgaacggattttccggtcacctccggcgtccgtt

SEQ ID NO: 282641 - DNA, 648 bp, Cannabis indica
gtcgattggggtaaccgtcgtaataactgtagacgaaaatagtcttattttttgcttcattttataaccgatgctaatttttttttgcttcatttaataactgacgccaaaagtattacacattttgcgtcggttcttaatgaagcaaacaaatttgcttcatttaataaccgacacaaactaaaaaaaatctaatcgaagatggtttcagatctgagacagttcgatcaaccaccccgaactcatcatcccagaatctagcagcgcgccacaacctcgaaacctaaaaaaaaaaccagatctagtgcgttgagagagagagagagagcgatcgaaataccatatgtgtgcaacgactctgccatggcctagtgcgtgctgcaacaatgacgccaccacccaaacctgcaaaaaaaaagaatcaaaccaacatttcaaaataaatgaggaatgagagagagagagaaagagacccgttattttctcgtagagatgaagatggtggtagggtgcacatagagaggagggtcggagagcgggtggttgaaaccacgtgagagaaagaggagggacggtgttaatgaggtttttgattttgaagagagagagagagagagagagagagagagagagagagagagagagagt

SEQ ID NO: 282642 - DNA, 537 bp, Cannabis indica
attatggacaaaaattagtagaaaaatagaaacaaaaggttaataaatagtgataatagtgactgatgagtttgtgatttttcgtttttagtaataaatattaaaagaaagcaaataaaatgtgtaatcaatagtagaagaaataaaggttttaagaatcattcatatgcttgtttagatatcttgtactcttgattcacaaagttgacacaaataatatatagtattaaaattcattatattttgagtatacaagttcttgaaaataatagaaataatttaatcttatgtagaacctataaatgacattatacatcaagcaataatgcaataaaagattaaacataaatattatttttactaaatagaaacatatagaaagagcataactaatcctatatatctttagtaaaaacaatgacaaagagatagaaatagagatggtggtgatagtgaaagaaatgaacattataatcacttttcttaatttttatgcacataggaagagcatgattaaacctatatgtttaataaaaa

SEQ ID NO: 282643 - DNA, 442 bp, Cannabis indica
ccccattgggataagtgttgttccattaaaccccgtgagttgagaaccattcggtgagaggtctcagtccgtgaggcctattgcagtaaaggcctctttcaaaagcaaattcacggaactcccgttgtcgatcaggactctagccaccactttattggcaatgggggtctctatgaccaacgggtcatggtggggaaaacgcaccgtcttagcgtcttcttccgtgaatgtgatgggttggtccatcagccggggcctttgagttgggagttgagtaacttcccaaacctcattgtgtttcatggcccctgcataccgcttcagttccttgcgggtagttcctccgatatggggtcctcccgagatcatggccactctcccattaggtctgggtggcacgccggggatatgctgggcatctccgaggggaacaactagagcc

SEQ ID NO: 282644 - DNA, 521 bp, Cannabis indica
cttcttcttttagcgcttggtaccttgcggggtccattttgcggcgcttctgtcggacacctcgcacttcggggtcaatgttcaagcaatgacacgtgacctgtggagatattccgaccatatctgaatgtttccaagtgaaaacatcaagattttgtttgagaaatgtcgttagtttttctcgctgctgaaaagtcaatttagagccaattttcaaaactttaccattatctacgggatcgataggtacctcaatagtgtcttctgcggcttgggcggtcgcggcataatcgaggatcctcggatccatatccggtctatctttattcgacacttcttctatcctaaggacctcctggggaggaggtggtgcctctaacagatagatgacattaaccgatttcttctctgcgagcttgactgctgcattgtagcattctcccgagtctgactggactcctcgcacagaacctactccaccgggagtagggaacttcaatttgagtgttggaaattatttt

SEQ ID NO: 282645 - DNA, 611 bp, Cannabis indica
tagcaataagcttcactgagtacagatgtccagagcaaccagatggcgaccagtgtgggtattatagcatgagatttattaaatcattcatgactgaaaataatcctacacgaaaattggaaacagaggtaaagacactaattattttcacaaatattaaagtttttaagtacttttattatgacctattaaattaatgatttgtttcgtttgttgcagtttaaaaggaacatatcatcctcttacactaacaaagaaatcaatgaaatacgtgacgaatgggcaaagtatgtcatgcagatgatagcagcaggcaaatgactaataacatagagtatgatgaccaatgatcgctcatggacgatccccatgtgatctaagaaaatgattgataggtttgacatcgatcttagttactattgtcttgcttttttagtttttaggaagtgatctccagctatttgattaaagtcccaagtgactacttggagacttattttgttcttagtatacatatttttaaatgttcagaagatattctacaaaagattgcaaaatgtaaaaacttaattggatttccttcttttgtattgcattactaaactttgatg

SEQ ID NO: 282646 - DNA, 712 bp, Cannabis indica
ccgacttgagtggaaaacaagctaagcaattccggtcctatgtcacgacaatcaaaactcaataaaaaccttaatcaaatttctgataatcaactctaattctcacaatcgaacacaccctactttcccccagatcaaactagcttaaccatctctaaaacaccctgaattccactccgaaagacaccccgaatcagatcggacttgaggagaaaaacccaaaatctccctttcctgggaaaaacggtcggccgtttttcagacacccagaaaaacggcctgcctttttttcctggcagccatggtgatttctggtttttcaccccaaaaaccaatcaaacctccaccaaacctaaccaaactttccagaacagtatattatggcaattataacataaccaaacaaccatttcaatgcaatatatcaatttgctcaaaatcacacttcaaagtgaagaaaaacacaattctatccctatgtagcttaattaattcaaccagcccctaactccaatcaaattaaacttaaacaagtttcaaacaccctcaaaaactatcctagaatcatattctatcaccaaacaacttgcagcccccttgaaaaaccaaaaccccaaccaaaactaacttaaaaccaaaagaatttaggaaacatgcaacaagacttactcaaggcttcaagttgagcttgggagtaaattctgctagaaac

SEQ ID NO: 282647 - DNA, 519 bp, Cannabis indica
gggcagtcaattgggattcaatgccaagttcaattaaatgatctttgaactgcatatccatatattctccacccctatcagttcgcaagatctttaaggttttacccaattggttttgagccaatgctagaaattcctgaaacttttcaaacgtttcagatttcttatgcataaggtaaatatgaccatatctagagtaatcgtcaatgaaagtgacaaagtactcataaccacctctagctttgacattcagtggtccacaaagatctgaatgtactatgcctagtggttccttggcacgctctccctttgcagagaaagaacgttttgtcattttgccttctaggcaagattcacaaactggtaattcacctaaggtgacatttttcaatggaccacctttggttaacctgtgaagtctatcatagcctatatgaccaagacgtaagtgccatagatatgtttcatcttcattatcgatcttttgctttttgtggtttctaggtttagctaccttaa

SEQ ID NO: 282648 - DNA, 564 bp, Cannabis indica
acaggagcggtaatcaagcgttgctttaactccaggaaacttttctcacaccgatcagtccaaacaaacttctgttctttcgggtcaactccgttaagggtacaacaatctttgaaaaaccctcaacgaaccgacgataataaccagccaaacccaaaaaaattctgacctctgtagctggcttcggtactggccaatcccgtacaacttcaattttggccggatccaccatgatcccatctttatccactatgtgccccaaaaatgagacacgagataaccagaattcacactttttaaacttagcataaagcttgtgatcccgtaacctttgcaaaaccgctctgagatgcaactcatgctcttagtctgtctcagagtacaccaaaatgtcgtcaataaatacaatcacgaacctatccaggtaatccttaaacacccggttcatcaaatccatgaatgccgctggggcattagtgagtccaaaagacatcacaagaaattcacagtgtccataccgagtacggaacgcagtttttgggatatcttcctctcgaattctca

SEQ ID NO: 282649 - DNA, 1015 bp, Cannabis indica
actaattcgttgctttgtttccaccaggtcatggagacttatggtcttctttgagctcacgaattgtgccaggaaagctttttgcatgtcatcccaagtagttatcgatcctgggggtaactgagtataccaggtgaatgctgcctcttttagagattgcacaaattgccggatcaatagtgcatctgattgggcagattcaccacatgcagaggtgaaataggccaaatgctcatggggagaaccattaattccatcaaacttttcaaacttttgtctgatgtagtttggtggaaatggaatttgatcatagtaagccgggtatggcttatgatatccaagaataggcattgttgcagcctgatattcccgaataccctccatgataagagccttcaggtcctgctgaggttggacaccagctagtggtggttgcacaccttgtggtggcggttgtgtgttgcctacaggcggcattgaggacgaggattgttgcccaatctcactctccttttgtctcatattaacttgatgagataattctgttgagagtcgggctacttcttcatccctctcagccaataatctttgcagttcctgaatcttctcttcattactgattgtcccagttactaacactggcatatttttatcattgccaatggttagtgcttcgaactgagtaatgagatcagcagacaccccctcactgtgttcaataaagggagtgtcttctaaagagtgttcagatgtacaacacccctcttcctgaactttttgaaaagagggattcactgattcctgaataggagttgtacgcatggcacgagctctcgatcgagttacagggcccgtgtaggaggtaggcttaacagttgaagtgacccttgttggtcggtagccctggagaaacatccagtcaccatgttctcttcggaatgagttagggcttgctttgggaacccttacactatcgcttctagccttctttgggaaggaaaaaggcgtcctacac

SEQ ID NO: 282650 - DNA, 80 bp, Cannabis indica
ctactcatacactagaatttcgaaattgaaggaagaaaagaagagagggagtggtcagccagatagggagagagaaggct

SEQ ID NO: 282651 - DNA, 637 bp, Cannabis indica
ttttttaggatgagcttgatcgatccaacaaaagtaatcacatcctcgactttcgttgttctcctgaatttaaaataagtacatcaccatatttacaaagcctagtttaaaatattattaaggcgttcgaagtcttacatagtgcggacatccaaagaagcgacgacccggatttgctctactgctagaagtccaaacataagctagatcaccacagtagcaatgggggtgtcccccaagtgaatttttccatgaagggaaatccctctcgaacccgtaggggtcctctccagaaccagccaccatgttttttttttaacaaaccaaattagggtgttagtgaggcttgaaaaggagtgtttccgtcgaccttatggtggaaataggttgtgaaaataaatttaggggggaaaccgaatttctttgaaaacgttagaaagtatattaaaattggggagcatatttcgtgctgcctctcaaatatttgcttcaaagtctttggtgcactatacttatatacaaaaaagtagtgtcaatcacaagcagtccaatcaaattaaaataatattttatgttaactctatgaacagttaaaagtacaacacataaatatttctccccacatgaataaaccaca

SEQ ID NO: 282652 - DNA, 564 bp, Cannabis indica
aatttcttggctgcaaaaataacccctcttgagctttcgcgtcaacaattgaagaagttcttttctgaggttaaaaattattattgggaagagccaatcctctacaagcactgcaccaatcagataattagaagatgtgtgcctgaagaggagatgtattctatcctaaatcattgccatgctttaccatgtggaggacatttcagtgggaccagaactgctgctaaggtgttgcaaagtggattcttttggccaacgctattcaaggatgctactacctttgtgaaggcatgtgatcgttgtcaacggacaggtaatatctcaagaagaaacgagatgcctctaacaggaattttagaagtggaattatttgatgtgtgggggatagacttcatgggtccttttccttcatcttttagcaatcaatacattctattggctgtcaactatgtgtctaaatgggttgaagctgcagctacaccacagaatgatggtaagacagttctccgcttcttacaaaagaacatctttactcggtttggtactcctcgagcaatagtaagc

SEQ ID NO: 282653 - DNA, 505 bp, Cannabis indica
tgtcgacatgttatcgacaaacactcgacaaaatgtcgacaacttataaataatatgttgattgcttttcgtcgacatgctatcgacacactgtcgacaacacgtcgataatggtcatcactgacctttcctcgtaaaagtatcgacaaaccatcgatatatcatcgatatatcattgataacaactggaaaacccagatttcgactgaaaaccagatctgccagatctcaaccatttcaaaccaaaaaacagcagttccaacaaatacgacacatataacaattttaaactacataaagtctaacaaaatgcttaaaacacaacttacccattgtaatggtgtaagattcttgagtgatattgggttgtgcttcggttttccaccaacacccaccgagaaacaaccattcaagagggaagagagagtgggacggacgagaaagagggaaatttttgagaagttttttcagttttttctagagagagagagagtggtgcacgaga

SEQ ID NO: 282654 - DNA, 910 bp, Cannabis indica
ctgctcgttgatggctcttcgagcttgatggagccttcggctcggtcaggaaatcactcattgagtcgaccggtctgttcttccttatatccttccatagttcaccaaggacttcaatgccccccagtatcgaggataactttccatcctcggttacccgcgacactttagtcacttccgtcatgaatctactaatgtatgcccggagtggctcgcctggtcgttgctttacttcgaccaaatctcccagatgcaatgggagctgacgtgaggaagagaactgtgcatggaattccgaagagaaggttttccatgaactaaactttccaagagccaacttgaaataccattgttgtgcggcttccgacagagtggcggggaagattctgcagcatacgtcccctcgtactccttgtaaatccatttgcatctcaaaatacttgagatgggaaagaggatcttctctcccggtatacattttccatgttggcattttgaacttgtggggcagtggcaggagattgatctctggtgagaagggagttccacgagcacggtctaactcaagatcattgttacgctgtccggccatgacatgaaacatattcttcaactcgtcaagctgggcctgtacggctgggctgacttgattggcattttggtcagtttggattacgtcagcgtctttctgagcggggatctgagtatgggctccgagctgcacgatcgttgtagtattctgctcgtctgttccccttcttctatttagatcgtcccttaggtcatgggtcgttcccagcctatcgaacacagaagagcctggttgccttaccgattgattcacttggttgataggcggaatgactccattattctgattggatccgtcaggtatggctcctcctgatga

SEQ ID NO: 282655 - DNA, 674 bp, Cannabis indica
cgaaaagtgaaggacttgatggacatagagagcttctctattgctggaggaatcttaagtgtcctgtttttgttaatttggttagtagattttatggtgagctatgcaaggacttgttttctactgactcagatggagtttatggctcccaaaaactttgaaacacttaaccgtcttagttcttaattcaaactacacattttcctattcactaatagtatttcatcaagcttttgtatgtgctcacttttgttgtatgagaatgtgaacacacacaatatctacctaactttctccaactcttgttgaaaaagagtatatatcagatgattttttttttgaaggttatctaattaactttaaccagaacaaaaagaaagattgcaaaattaactagacatttatttacagttcaaaaaagaaattaacaggatccatgcaatccataacattatatatctgtgaaaaactgacaattggaaactacaaactcacagctttgagggctaaattcaaacaatctcaacaagctgcagtttgaaaaaaattcccataacatctctcagtagctagaggctagagttaactataaacattttcaaagcaaaagaaaatcaggctctgcgaaattacaaatcagtcagaacaagcacctccatctaggatttaccaag

SEQ ID NO: 282656 - DNA, 743 bp, Cannabis indica
gttttcttgaaaaatttgaaaaatgagtaaatgcatggatgatttgaagatgttgctgctgcttgttgctgctgctgtttctatgttttaaatgttgatttaagtatgtttaattaggttgaattgcatgctagttattcttgttctagttggataggtttcttgttaaaaagtttggttttcaaagagaaattatgtgaatttgtggctgtagtgtttgcatgaattagggttagttttctgcagtgttattatgcttgaatatgagtttgaatcatagtttggatgcatgttagttgttattagcgaagattgagtttggaactcaaaactttggctttaatggtgattttcatggatttgatgctttagaaatgttttaggggatatttagaacaggtttggaaggtttgagattgtttggattagatttgagcattgtgtgaatttttgaagttctgcctgcgaggaaccggaattccggttgtgcatctggaattccggatggggttctgaaaattcccagaactggaattccggttgggcaaccggtctaccggttgggtgattttcagaaaccctagttctcctcgtttttttgttatttggggtattgccatgctttttatcgatagagaaacttttagttcctagtttaagtccccgggaagtgatttagcgtatcacttgtagtgttgtgatttttatagtttaggagcctgtaatccgccgcgcagatagtt

SEQ ID NO: 282657 - DNA, 537 bp, Cannabis indica
tttattttaaataattattggctgaaataaggtgttatatgcattaaaactttattttctctcaaattttacacttagcatattttagaaaaaactttgaaaaaggaaaaccctctctttttctctctattttcggctgtgcatgggggtgcttggagctggatttttgtggtgattcaagcttgatttgcaaaactctagtgaattcttgattgtggtaggtgtcttctagctttcttctcttattttcttaggaaaagtttgataaattgatgatgcatgcatgagtttagttgctgttgctgctgtgattttgttgttaatttatgtggtttaaagcatgttaattgatgttaattgagctgtgttgaaagcatgttggatagattgtttaaagtttgagttttctatgcaaaaatgtgatttttggaggaaattatagtgattctgtttctgtgttgttgctgtagtttctaatagttttcagaggtgattttatgctagtttaagtagaattaagctagtggaatgcatgtt

SEQ ID NO: 282658 - DNA, 484 bp, Cannabis indica
ttttttcatcttggtactcatgctagcgagccaaaaattatcgtagacttgcaaaataaggtgtccttcaaggacgacttcttctggacgtctggtctctcccccattggcacaaccacttttcgcaaactccgtaagtgattgttctctactttcttatttacatcagttctcctttctcaagtacttgactaatgtgttgtttgttttgacagctcttctgacgagacctacattgtaatacccggaattaagaaaaaggattagcaaagccctaattagataattatgagttaattgaggaattatattattatatagttcaatatatgtgaaattatatgaaatttaaaatgttaaagaccccgttggtgagccaggggcattttggtaattatgactcgagaagggtaaattgttgagattaatttaattacgtgcttaatggaactatattattatatagtatgcctgtgttgtcttt

SEQ ID NO: 282659 - DNA, 257 bp, Cannabis indica
ggcataaaaccaaactggtttgagttcgggtccgagttcgagtctgcgtccaggtttgtgtccaggtttgaacctcgatcttcgtctaggttcgggtccatgtccaagttggggtcccgagtgcgtgtcaagtttgggtctgggtcaagatctctgtccaaatctaggtccaacatttcgatcccagtctgggtcttggtccgagtcgaagttcctatctggatccctatctaggtccaagtctgtgtttgggatcg

SEQ ID NO: 282660 - DNA, 799 bp, Cannabis indica
aagtggccataggtgggtgggtgtgttggaggtcttggattcgagtctcgaattaaacataattgtaatatataaacggttaaataaaaaaaaaaaatgaggaataagtaatatgtcattaaaagttatatgacatgagcatgctattaataagaaaagaaaggccaaacttgatgggagatacatttctatcgacatccttcttttcttcctttggatgagaatgcttagaaattgatcaaacacatttctttattgaaaaaacaacaacaacaattcaaaacattaatcttagcatacatatttatcattatctataataaattattaaagagttggggtgatattttgtctaatagccttgaaaaagagcaacaattgatgatgatgaggaaggttttgtttaacaacatgaacttgtttaaagtgattaacccattgatgaagatgaggaaattctttgggatcaaacaatttcacaccaactatctcttcaattacatcataccactcaacaatcatgcctccaagagcaatgtccaatattccaatctcttctcctccaaagaacttattattggtattattattaatcttttcaacacaaaactcttcaattcttctcaacatttcaacactctctttctttgctttctcttgctcttctccaaaagttctaaataccatccaaattgatggcccctacataacattacaatatacaattaaagaatgggaaaaattattacaaattttatgggattttatattatttgtgcaaaaatatagcatttttttt

SEQ ID NO: 282661 - DNA, 548 bp, Cannabis indica
cacccccaagagtaaacaccatcctagatgtaaatttcctgtcatcaagacatgcctggaaatctgaatcggtatagcctatgggatttaaaacaccacccttgtagactaacaggaattgccttgtactcttcaagtacttcaagatatgcttaacagcattccaatgttcctgtcctggatttgtctgataccagctcacgattcctactacataatagatgtcaggtctggtgcataacattgtatacattagactagtaactgtagaagcaaaaggaacccttctcatgtcctctatctcttaaggatcaatgggacgttgttccttagatagacgaataccaaatctagaaggcatggttgcccctttggtgttggtcattgagaatctctctaaaaccttatctatgtaagttgtttgagagagagcaagggatatgttcttccggtttctgatcatctaaataccgagaacataggcaacttcacccaaatctttcattttgaattgagtgtctagccattcctgtatgtcagtcattttc

SEQ ID NO: 282662 - DNA, 629 bp, Cannabis indica
ggggtggagcagtggtttggagaagtgctaaacaaatcgcaatttcagactctaccatggaggcagaatacatagctgctgcagagactgctaaagaacttgtctggcttagaaagttcttcacaggactcggtgttgttcctggaatggaaaaaccactggttttgctttgtgataacactggagccatagccaacagtaaagagcgtcgaagccacaagagaagcaaacaaatagaaaggaaataccttatcagcagagagtatgtgacaataggggatgtactggtggagaaagtggacacagaggacaacctagctgatccattcaccaaagttttggtagtaactccatttgaaaagcaccgccagaatctaggattaattgaaatgtactgattgttttatattagtgcacgtgggagtttgttgggctttatgccctaaataaacactatttcaatgtaatctctatcatttaaatatcaataaagagacagaagtattttcatcaattatttaacgtgtcatttggttcatgttatcatttatatgtttatttgatttatagattcatccaaacccttatcacattcatattcttgtttattgtgtcgtcagcacagtgga

SEQ ID NO: 282663 - DNA, 419 bp, Cannabis indica
tgtagaaaaaaagaaaaaaaaaaaaaacgtgcggattggaatattatgtgtgatgacatgggaatgtctaaattgtaataggaaaaggaatacaataaataattaaagaaaaccaaatcgttgatgtacaacagcaaaaacacaatcgtatttttttggatttaatgagatttattttattgtatataaataaaaagtgatcatgaatttctcataaaccattttatttttaatataaataaaaaatcatccataaatttctaataaatcaagaattatgttatataggcacactttatgtaacaccctaactaacttaggcgtattacgtgatttaaaagtctcgggatcccgattataaaaaatatttacaaacgttttaactgattaacttttacatcaaaaagaaagtcgtctaa

SEQ ID NO: 282664 - DNA, 534 bp, Cannabis indica
attacacccccaaagtatgaaaacataggaagtggactacgcaaagcttgaatcaccgtaagacaatcagactcaatggtaactcgattccaacctttctttttgagccaactcaatgcctccctcacacccatagcctcagctaattctggagttacaaccccgattttacagctagaaattgcttccaaaacatgccccgtagcatccctagcaacacaagcaaaactatacctgttaggatcagagaaaagagccgcatcggtattaattttgatctctcctgttgctggtttttgccaagaaagagcaccatcggctgctgtcaaaaaagcagcagtaggaacgtactctttgtcttgcgctttactccattgttccaacatactcgaagccaagacagtgacagtcgccacactagcacttttatccttccaaacacaatcatttctaaccttccatatagcccaacaagtcatggctatgatcttcctttgatccccctcaaaagtttgaaagcaagcctctatccaa

SEQ ID NO: 282665 - DNA, 1022 bp, Cannabis indica
atgctcacctttagacataggtggtgtgtggacctattttaccagaacttaacgtggtagttttttgtaggtttttgcaatgttaatcttgtacacataaactccccttttgtaattgtattataatctcaccaaatttatatataacaagtaaatttaaagctatttaaattgttgcttgtatcaatttatttcttttttaaatttttcataaatcctgtgagaagatgacttcttgataaattatttcactaggaatcgcattaaaatcgcacattcatcgcgcataatatcgccaaaatacacaaactaacaaatctagattagttcacatcgcagaaaaatcgcaccataatcgcacaatgtcgccaaaaatacagaaccaaagcaaactcaaaaacaggatcctgtcagttaacatcgcacaaaaatcgcaccataatcgcaaaaatatcgccagacaatacagaaacgagcaaccaaaaaacaagatcctgtcagttaacatcgcacaaaaatcgcacaataatcgcaggatatcgccaaaaaatacaaaacaaactacaaactagctcctgtcagttacaaatcgcacagtaatcgcataatgtcgcctaaaaatcggtaaacaaaccaaaaaattattaatctaggagaaaaaagcacaatatccaacaaccagcaatacaacacatattcatttaaaaattggagaaatggttcaaactcgagctttgcatgtagctctgttgtgccctgaaccgtgacatagcgaacaatgacgaggttccactaccacctgaccactagacggtcgacgcttcgtcggtcttctacctgcattgctcttcctaggccgacctactggttttttctccactggtaccccgattcttatgttcttgatatgttccggtagtacccactcatcctcctcgccaacaatattaattgtggcatcgtaggttttcttccacgtttctttagtgtaatatggagagcaaagtgtgtacacgctcaca

SEQ ID NO: 282666 - DNA, 583 bp, Cannabis indica
ttgggtctgggtcaggatctcggtccagatgaaggtccagcattttgatcccagtctggatctagttctgagtccaggtaagtatctagatccttatctacgtccaagtctgtgcttcggatcaggtcccagatttaggtccagctccgggtctcaatttcggtctgggtacacgatcgtgtccaggcctgagttccagtctaagtttgggtctgaggctagtctgtgtttggttctaggtttgggtccgggtcctggtcacgatcttagtcttgttctagggtcctggttcggcgatacttgtttaagttctcggtcccaggtctaggtctaggtccgggttttgttcttcgtcttggttttggtcctagtctgagtcccagatctagacaccaactactggtctgttccagctcccgttactcgaatcctgagtcaagatctggatcactgtcacagggtctcagtctggttctggttcaggtccgaggtcccatttctgagtttgggttcgggatcgagattggggtgcagttctaggtcctgaccctagtctgtgaccctagtctggttccttgtttag

SEQ ID NO: 282667 - DNA, 642 bp, Cannabis indica
gacctagaagaatgcttcgaagtagtccggagatacggaatgaaacttaacccgaagaagtgcacttttggggtcaaatcaagaaagtttctgggcttcattgtcagtcagcgggggatagaggaaaatccagagaaaatccaagctctcctaagcatgccttcccccaagaaacacaaagatgtgtagagcttaaccggaaaggttgctgccctaagccgttttatctctcgatccacagaaaaatgcattcccttcttcaacatcttgaagaaatgtcagaaatttgaatggtccgacgagtgcgtggaggcattcaaaaaactaaaggagcacatggccaaacttccaatcctatcgaaacccgttctcagagaggacttattcctatacttagctatctcaagaatgcggttagcgtggccctagcacgggaagaggaaaaaacccaacatcccgtgtactatgttagcaagcgcatgataggggcggagacgcgatacccggtgatcgaaaaactagtttttggcctcctaatggcctctagaaagctgagacctacttccaagctcacccaatcaaagtattaaccaaccacccgctgcagcaagtcctacaaaagccagaggcgtctggaagact

SEQ ID NO: 282668 - DNA, 508 bp, Cannabis indica
acctagaaaataccctaaaatcttactccaaactcaacaaacataagtcccaactaaatcatgcaatttcaccaagattaaacaccaaacttaacaacatgcatacacaagaacacatcaactatacatgctattaaagcataaaattcagcaaggaaaatcaattagaaactcaattaaaaactgtagagaatacctcaagactaagcaagaataatccccacaatcaagctccaaaaattagctccaattcacaccaattttcttcaaattcaacttgaaataacaagagggtttgggagagagagggggtcggccaagaggaaagcaaaaccagaaaattgcttttcatttcatcaaaaatcaattttaatcaaacatagtaaataggggtcaaatgaccaaaatgccctcatggcttattattcacacctacaccctcacaagggtaaataagtcatttcatgctcaattaatttcaaataaatttcagattatcattcatcaa

SEQ ID NO: 282669 - DNA, 671 bp, Cannabis indica
tcgcttatcaaaaagactcattgtcgttggctaaaagcgaagtcaacattttggtgctttcattgagagaagaatcacaaatcgctcttttcaatattcgacacgatggtacaaagtcgtagaggcctgtccgacccagcaagctcacagacgctggatccgacgttgcaggacccagggagttcaagggttccacccgttgtcaatcctggacagacgggaagcgtggtgaatggtgggacaactcctattactgaaactgcgcctggtgcgcaagagatcagaaacaacggttccgcacacagccagggcgttcataacacgactattccaccaggcatcaacgccctaacgaccatcggagatgcaacggaattgtaaaacctccgcgctgctctcggattcatgcagggtcacagcaataccctacatcacgatcaggaggaattacgtaccgcagtaaacctcacgtttgacgaacagaggcgtatgttcgccgagtggagggacaaagagatggaggcattaagggctcaccatgcagaaatcgaagaccgtagtcggcaagccactgttctcgatacgaagagcctattagactataggccaggaaatgccgagcgtcgattcccctggggaaacgaggactgaccgacgatgaatgcttccca

SEQ ID NO: 282670 - DNA, 480 bp, Cannabis indica
tatgtttttctaaattaattttaaaataatccaatgaaaaaaataatttcatttatttcaaaattaattatattcctaattcaattttaattaggttaaactagaataatcaacctaacacaattatttaaataaggcaaatggaccttcacaatgggttgttcatgtgagggagtcctgtgtttagtatgtcgtacccactactaataacctccgaattctctcacacaaggcccaaaagaaaggaatttaacctttcattaaataattattattcattgaataagcctaatactaattggacctaaatagtcatgattatccattattacaatcctaattgtcaaagatagatgatctacactgaatagggacaaattgactgttctacccttcaatgtattttatccttaaaacacttagctatctataaatgatatttcagtaaactaatataattactgaaatgagatctcaatc

SEQ ID NO: 282671 - DNA, 589 bp, Cannabis indica
caacttagtatgttagtttattgggacggtttattagacattggaaatgtcgagattggccgagaatttagaatttcccaaaataccccctttagtgctctttatgctattttagtgtgaaggggcaaaatggtcattttaccccatttatgttttgtcctttagtggactcagagattggaaattaatgttatttgattgttatgttggctgaaataaaagatttattttgcatttatcctcatttggtttcaaaggaagaaattagaaaaaattggaaaattgcttttctctctagtctctctctctctttcggcctccttgtgcagcaaggatttgtggcttcttcttagtgattctagcttaaattcatccaatctaagtgttcttcaagtgttggtaaggtttctatacctttcccttttgtaatttattgaaaatgattaaaagatgattgttgcatattgatttgttgtgatgcttgctgctgtgattttgttgttgtttacagaggattaatcttgttattttgaatggtttagagctagtttgatgcatgttgtttgctttgattcaagttggtagtttt

SEQ ID NO: 282672 - DNA, 546 bp, Cannabis indica
atgtcaagtatgtttatcttttgtaatttttatctagttatgagcttctaatcttttttcaagattattaagatgatgatgaagcaaaatgtaactagatagtgtttatgtttgtatgttgatttcccatttgtgctataaagttcatggatttttctacaaaaatatgtctttttcatcttcaatatcatgtatttttgattgttaaagcatatttccacttagttcttcattatgcaaaaatataatactctttgattaaatgtctttcattaaattgtttacatctaattcttagaatataagtgttatattttgcctaaacatagtttctttgattttgtgtagtttcattaaattgtaacacatttaatgcttagaaattataccttttataagtgaagaaaaatcctacatttttgaaaataacttgtacttaaaagaaaaatatattttggaaaatatagtgtgatttatttcaactatatatatgaacttggaaatcaatatacttataaatactattgaacttgcattttgtggatt

SEQ ID NO: 282673 - DNA, 544 bp, Cannabis indica
gagtcctctagaagtgctatggggccctcaagaagaatgtcttaactcatttgaaatttataagtcttggtcaaagtcgcaagatttactttagtatcttcaaggcactcttggcatgtgggttcttgtgtaagggtagccattttattttcttacaaaaattgggtataatgttatctactaaaatttccactattatatgaggtggtaagttctaatactagtaagaatgtaaatttggtaaaataatttatcttattattttatttaaaaaatttatttacaaaataataaatttaacacaactttatgacttgattttcatatataatcgcacgcaaagcgcagattatttattaatttatttatatactactataaacacaaaattactttagcttaacgaggtctgggtctcgtatgagatctttgtttgtcagttcaagtttgtttttgttttttggtataaattttagtaaaaaataatataaaataaaaggttaagtgttatccttaaaactagaactactattatacatcttac

SEQ ID NO: 282674 - DNA, 734 bp, Cannabis indica
tcatctcttttggcctttttcaaggcctgatctctaaaatcccttagctccttcacctccacggtcaggttggtcgtagactgcaagtccacctgatgcaactcttctaaggacttcaacttggcagccatctcgtccatagcctccctggcctcccgaagctcgcgtctggccctgcctacgacctcgccttccaccttcaatgcctcctggtgcttcgcctccctttgcttggcttcctcccggaactttgcctccgcaagggcctccctctgttgagcctcctcctggaacgcccgtctttcggcagacaaatcctgaaggatcctcacggcttcgtcaatgcccccaaattcagacatgacgaaaccatgatcgatcagggtcttggaaaggcgacgggtctcgacagtaatctgaaaaaagaaacaagaatgaggtcagatgccttcgacaaaatatcaaaggggggaataaactacaaatactcaccgcggccatagcagagctgatgtcttggacttggtaaacggagttcaaggaagcgcaagccgcgtatctcttaggcagaaactgagtcaggttggagacaaactggttggtcatctccgaggcaaagggagctaaggtgggcccgacaaagcggttgaaccaatccgtcaacgggtccatattcaggtcccacaaatttcaaaaggcgtcctcgtgaagagtgttctgctgctcctcccgca

SEQ ID NO: 282675 - DNA, 509 bp, Cannabis indica
ctgggtgatacgtacattttgggaacatgatagtacaattgagtgggagcgctaaacatagatatgaaatctatagcttctatctggacatagaagtgaaacgatgatttccttcgagcttggctcttctccgaattggattgaattggaaaattcaaaatttgtacttgtgcggattggatgttgattgacatgtaaaagtaaccaatccaatccaatccaatccacacatttaaaaaaaaaaagtatatataaataatattttaatgtaaataaaatagtaatttaaagtctaatggatataatacaattatttcaaaacttaatagatcaaatgtatattctattcttatatataatttttttttctagatacatcaacattaacatttttacattaaccttctctcttaattttattacacatataccacttgcacatcaaatccatgcacctatcaaccatcaatcaactctcaatcacttccctttctttttttttttctttt

SEQ ID NO: 282676 - DNA, 744 bp, Cannabis indica
gatactttattgtttacgcaataaatgtagatttggccagtttagttttcgcatatatgtggcacactgaacatatcaagatacatttcgatagccaaaatattaaatattatcttagatcaattttgtacgcttagagattaattaattacttattaaaattattttgaattctataattgtttttaagtcactattataataaaaggaatacctaataacatttagaatatttcattattaattaacctgccattcagctcattcttcttcatttttcatttctccattaatattgttttagaaatttaagtaatacaactcctaatgaggtattctgatagaatcctttgtttcggaattcaaaaatattaaagagtttgacattgctaatgtgtgaaaagatataatagaatatacactacaaaaaaatactatctttagagacaactttttagtcacaacataaatattttgtgactaaatatgagtaatttgcaatatatactaagttaaagttacatcatttcgtgggtgtaagggcccaatagtggcttaaagcggggacgttacactattaatttttggaaatatcatttacaagtaatgaagtgttttaagaataaaatacattgaaaagtaaaatgaataattttgtcctactcgatgtagaccatctatagagaatcaataattgctgtgattgaaacaatggataattcatagtgtatctatacttggtgt

SEQ ID NO: 282677 - DNA, 685 bp, Cannabis indica
gcgacggaccagtccgacagggggtccaagttaaggtcccacggatcctggtactccgggttattgatactttcctgtacctcaacccgcaaaaccctcctaagggcttccacctcgacatacccccgggagtattcgtccatggcatagttatgcttggctatccgaagctcttgcctcacctcatccccaggaacgggagtcagcacaatgttgggaggagcaggatgttcttccatgggggagacccctccgtcgagaccatgggcaggagtgtcagctctccgaggccgcttgggctcgtcctgggcaaccatcttgcccttgcgcttgcgaatcagagcaatctcaggctcttcttcaccttcttcagcttcctcaggaagagcccggagctctcccgcaccctctgcgacttccttagaaaagccccattgcttttcttgaccttctcccggtagcacctcctcgtcatccactaaatcaatagtgtcagggggagcaatggaagaggcctttagggcaggagctattggggaagaagtaaaggccggaggagcctcgggagtgtgaactccggcaagctggtccaagatggcgtccatggagatacctgtttaacaaaaataggcaagtgttagacatccgtgggaaaccacttacacaagatatggcaaataagcta

SEQ ID NO: 282678 - DNA, 588 bp, Cannabis indica
attagtttttttccagttttattttagttgcaatactgttgtatgattcagagtaagtcatctgatgagttagtagcacaagattctgatgatgatgatcatgctgaggatgatgacaagggattacctgatcctaagaatattgattccgactccgatgatggtgatgagttgggtaaagatggtggtgatgctgctggagttgataaggttgttagtgatgttcctgctactgatgtgaatcaatctgagactactgcaggcagtgaagagagggctaaggatgttgagaatgttaaggcgaaagagctggttgaaaggggatgattttttcgatggtttaagtcagcttgaaattgatgatgaccaagttgtgttggttggtttagaggctgttcataaaatcaatgtaagtgtagcttaatttgtttgctagtaaaatatgttttattttagttgcttgacagttttatgtttgttttgctaactttttctttttttgatttttccaattttaatttttccaggttccagaatccaatccaagtattgttgttgaaaagacagctgccattccttctgatgaag

SEQ ID NO: 282679 - DNA, 599 bp, Cannabis indica
taacaaccctgcgatcattcccacagaggatgtggtagtctcaatacccatccttcggtgtggggtatcggtccccttccatcccttcatcgcagctattctcaggcgatatgatgtatcgccttttcagctaactccaaacagctaccgcactgccctagccttctatgcgatgtacatggagtatgtccatagggccccctcagtagaagagttcagctatttctacgacataaaaagcgtaggtcttcataatggcttctactgctttagcaaatgggcgacttctgagatcaacggagttgaaggaatggtgtcgaacatgggggattggaaatcgaagtggttttatgtctttaaagtccctgggattagaactgactttaatcgcagacctagtatgtcgcgtattttttaacttagacattttctgaattacttttgagatcttttgcttactcgctctttgttgttctcgcagatagaccagttcgaccgacacttgacgcgactagcagagagacagctgaaatcctcgggagccttccggtacaagatcgcgactggcgattactgtgtacaactgcgaagttgcgaga

SEQ ID NO: 282680 - DNA, 530 bp, Cannabis indica
agtatacaagaaccatccgagaggcagcaagagcgaatagacaaacgcctttctaagcaaactcctcgaccaatactcaggtagttaatctctttagttataaactaataggcagagtttgacttatacttatctttcatttatcttcgcagatatgactttcttgaagtccgcacctgtcctgaagatcaagccgaagggtggagcaacgacgacttcgctcgttgtcgaccaaaagaggaagagcgatgcgatggctacccttgccacagactcttccaagaagctggccaagaccgcacaggacaaggggaagaaagtcgtaatcgatccacctgttcgagctcgtgacttcctagccatgcaagagaagttcctggccgagatcccttatgaggatcttgttacgcgctctgctgagctggccgcgcagtcgatgactctgttcataaaagctgctgctactccttcgaaggaagccgattttctgaagaggcaaaacgcccagtttcaggagaacataaaaggct

SEQ ID NO: 282681 - DNA, 524 bp, Cannabis indica
ccgagccaacctcgccaaccgatcaaactgcgttgtgtacttagtaacgctcatatttcttctgacggcctcattgtagtacttggcattgaaaagttcccggaacttttcccaggtcatcgttgtgacatcgtgtatcatggacaccatgtcccaccatactaatgcatcttcttgaaactgaaaagtggcacagaccactctatcattcccggtgacgcccatgaaattcaaaatcttagtaatcactgttagccactgctcggctttcataacgtccggacctcccagaaagattggaggtgcctgcttgcggaacctttcatacagaggttccatccgattcactgcaattataggttcggcccgaacaacaggggcaggtgccactggaatttctggaacaagcactgcaggagcaccctgctgtcttagctgccgaattaactcttcttgttcattaattttcgtttgcatttctgcaaacttattttcccaattctaggcttcctgagtagcttggg

SEQ ID NO: 282682 - DNA, 501 bp, Cannabis indica
agaacatatccaaggcatcaaaacaacccagaaatcacaaatactaaaaatgccattggagctcaagctttgagttctaaactcaaacttgagcaattctaaacaacatgcattccaaccagcttaattctacttaatcaagcatagaataaccacagaaagcaataacaaccatcaacaacattccagccacaaaacataaccatttctttcaagaatcacctattttacatagaaaaccaaagctttacacaacctaactaacatgcttccaaaacaacttaaataaccctaatctaacaagctttaaacctctgtaattaagcacaaattcacagcagcaacaacaactaacaaacatgcatgcatcaaccaatttcaacatttttttctagaattacaacaagaaaaggttagaaactttaccaaagatttgaagaacacttagattggatgaaactagctttgaaaatcaaagttccagcccttggaacaccctcc

SEQ ID NO: 282683 - DNA, 703 bp, Cannabis indica
tccaccagcaccgcctccacctccgcaaaatccgggggataatgcggaggctgttaatgctaatcctcctgctgactggcagcagatgtttcatgaaatgcgaagtgtcatacttcgtcaagaggaagagttgcaacgtttgaggcaacaagctgtcccagctaatcaagggttaccaccagctcctgtgccagtggtgggtaaccaagggtatgttatgccgcaccgggactctgtgttcgagcggtttgtgaagctgcaacctccagtttttctgggaggtattgacattattaaggccgatcagtggatgagcactgttacccgtatcctcgataatatgggggtgacgggaactgagagggtaaattgtgcggcctttatgtttcaagatcatgcccgcgtctggtgggacatagtgaatcaaactcgggatgtcagtgtgatgacatgggatgagtttaagaaactttttgaggaaaagttctataatgtggctgtacggacttcacaccaggaagactttgtgaagttgactcaagggaagatgtcggtggctgaatatactctggaatttgaccggttatctaaatttgctggtgatttggtgcctaccgattttaccagaaaacaaaagtatgttcgaggactgaatgctacaatcagtcgagacttgaaaattaccacatcccatgacactctg

SEQ ID NO: 282684 - DNA, 621 bp, Cannabis indica
ttagctccattgcccacttgaggagccttccggatgcttcaggtttttggaggacctgccggagcgggtgattggtcagaattttgatcggatgggcttggaagtatggcctcaacttccttgacgccatcaggaggcaaaacaccagtttttcaatgaccgggtatcttgtttcggcccctatcatgcgcttgctgacatagtacacgggatgctgagttttctcttcttcccggaccaaggcagcgctgaccgcgtgttcggagacggccaaataaagaaataggtcttctccgaggacgggttttgataggataggaggcttggccatgtgctcttttagctttttgaatgcctcctcgcactcgtccgaccattcgaacttttggcacttctttagcacgttgaagaagggtatgcacttgtccgtggaccgtgagatgaaacggcttaatgcagctaccttcccggtcaggctctgcacatctttatgttttttgggggatggcatattcaggagagcctggattttttccggatttgcctcaatccccctttgactgacgatgaaacccaggaactttcctgatttgaccccaaaggtgcatttctttgggttga

SEQ ID NO: 282685 - DNA, 558 bp, Cannabis indica
gaataaagaatatttattttttttattttgtggctgcatccaatttttgttcagattgcctacgtacccttttaagggatcaagccgttcgtagttctttacatttttttttttgaggagataattttttattttgtgtggctgggcctagttataaactagattgcctacgtacccggagtgggatcaagccttacgtagttcattgcacactcgcctttttttttttaagtgcgctgtctacaccatgggtaaatacctttttgtttaagtgtagaactttttgatgaacttcccattaacacacggataaatgcgtcggccttctgaatttgaaagttcatatgcccctcttaggaagaccttagtaacaacataaggtccttcccattttgcctcaaatttgcctttcatccttctagttatgacaattggtcgtttcacagtaagcactagatctccaaccgaaaaagatcgaaatttaactttcttgttgaatgccccagctacctgggcttggtaaatttcgagcttttgttgaatagcaagccgcttttc

SEQ ID NO: 282686 - DNA, 717 bp, Cannabis indica
cactctcatctttgatcaccatcatctcatgtctattaatccaagcagcttgaagtatttgaggtaagaaactctacatttactcatttattgatcacaataggagaatattcgtaggtctccttttcttattttttcagaatgaaacatgtctcagtaaaactgtcatatctcttaaaatactcatccgattctcacaatcttggtgcctatagaaagcttattcaatttcccataattcttatgaagaaaggttttactgaatcgaaatttatctatgtcaaaaattagtatttctacgctgtttattgtaaatcatttttttttcatgttttctatataagttgtctcagtaaaatccgaatatctctctgaataatgatccgattctagcgatcttggtaccgttcaaaagataattcaattttctaaattttttatgaagaaactattcaccaattattgattattctaagtcgaaattattgttttatttctgtagtccgaaatccatttgcttcaggatttctaaaaaactgtttcggtaaaatatttatatctcttacgttataactccgattttaaagattttagtgtcattagaaagggaattcgattttctaaaacttttatgaagagagtattctctgatttggaatattttagtatcaaaactttgtatttccgatgtctactgtgattcgttactccatattc

SEQ ID NO: 282687 - DNA, 684 bp, Cannabis indica
tccgccgctaatacccgtcagaataataaaaaaaaattaataaatatttataaaaatttatttatatattaatcctatatataaataaataattatttatataaatatttaataaataaaatctaattaatataattataacaatttaataaaatttattgataatttaaaattgtctccaaggtaattaactttaacatattaatcctaataaaatattgtctcaaaattaaactaaattattacaaaacataaataaattattcattaacatcttcattcaggtctctaattataaagtcttgatccggattattttcgttacgagtccccgaagcccgtggcggagaaggcacatatgcttggtctgatgataaacccagcgttaaattaccgagctcagcttggttgaaaatgggagttgaataaaattggttctcctgcgatgaactcccaaataatccaaaatcagcaaagtttgagccgagcggaggagactctgatggtgttcggtataagaactgatttcccaatggcggagcagactgttgttgctgctgaggaaactgctgaggaaaagattggggttgctgctgcaaaaaattttcaaattgctgctgtgacaaactttggaattgttgttgcgaggaaggctgttgtggttgcgaaggaggttgttgctgt

SEQ ID NO: 282688 - DNA, 559 bp, Cannabis indica
tcataacccaactatttactttctgttgacttttaacaataagtcaaccataccaatctcataatgtattgatcatccaagttatcagggtaaggatactatatatataatttgcaaactatgccgaacagaccttactctgtccatcactattatacctcctatacccctacttgtatttgatttattactggagactcactatttataattccttagtcaggaattttttattcttacttcccatactacctttaagcacaagtcaataattcgttcaagcgtctcattttacatccaaacgccaccaaattatcaatacctatcttgtttttttcttctaatttttgcactttcaattggacaagacttagtagtgtgcaataagttagttattgtcagcttgagagagtccttccaaagatctctattactggctttttagattgagaaaaatatctaatatttttccatttttttttgctcttaacaattttagcttttgacaaatccatagtcattctcttctcgggcactatagggcctagaaacaccatct

SEQ ID NO: 282689 - DNA, 550 bp, Cannabis indica
ttaccgtagtaacttacatcagagctagtgatctaatctgatcttttagcttaacatgacataaaacaaattgcagacataagaaactgtactttaaagtggttttgctgacttgagtactttgtttctgaaacctttgcgcgtagtccgcccagaaggccattcatttagaagcgaatgctcattcagtactttgcaatggtctagccgacctgagtactttgaagtggtctagccaacctgagtactttgaggtggtcaatccgacttgagtactttattggtagtatttccttaaatgttctccattccagtaccgtggtagtagaatttgttgcattttttcgtcatacttacctaatttgtatgcttcggagttgagaacttcgaccacctggtatggtccttcccagttaggtcctagtacacctgacgtgctatcttttgtgtttaggaatacccttcttaggaccatatctcccacgaagaatttctgagctttcacttgtttgttgaaataacgatctactttttgttgatgagctaccaa

SEQ ID NO: 282690 - DNA, 634 bp, Cannabis indica
ataacagctccggtgttagctttgccatcagaacaagagaaattgtggtttattgtgacgcatccagacaaggtctgggatgtgttctgatgcaagctaacagaatcatagcttatgcttctcgtcaactgaaagattatgaacagcgttacccaactcatgacttagaacttactgctgtggtttttgttctaaagatatggcgacattatcttcacggtgaaaggtgcatgatttatactgatcataagagtctcaaatactttttcacccagaaggatttgaacttgaggcagagaagatgactggaattggttaaggactacgactgtgaaattctatatcaccccgggaaggccaatgttgtggccgatgctttgagtagaaagggtcccgagcagatttgtactacggttctgatagcccctcagctagcctctgaaatggttagtgtaaggattgagtttgtagttgggaaaatacacagtttaacacttcaatctgatctattagaaagaatcagaaaagcgcaattggaagatctcgagctagttgaggttcgagacgatgtaatggccggtcggcctagagacttttcagtctcaaacagtggaatgttgttatataaagctcg

SEQ ID NO: 282691 - DNA, 358 bp, Cannabis indica
gatacgttatgtcatattgcccttactctattgcccacttaaggaggcgccccgacgtatcgggtttttgtagcacctaacgtaagggttggtcagtgagcaccacaatgggatgagcctgaaagtagggtcgaagcttcctggatgctaagataaggcagtaagcaagcttttctatgagggggtatctacactctgccccaatcagccttttgctcacatagtagattgggtgttgtgctctatcttcctcccttaccaagactgcactaactgcgtgttctgttactgctaggtataagcttaacccttcaccatctaggggttttgaaaggaccggaggctgggataattgttg

SEQ ID NO: 282692 - DNA, 896 bp, Cannabis indica
aattttatatgtgtttaatttatcgttttagaaagttcttatttaggatgttaataaacatacttgtgagtagatctaagatcctggtaaaataatttccaataacgtcggcaagagaaccagagggcggagctgaggacggagctgacgccggagggagtccactgcgcgtgcgagccatgtcagcgtgaaaagcgaatcttggtcaaggagcagcgtgaaaagtggatttagggttttctctctcttagtctgataccatataagagagataaatggagaaagtaaatgattttattattctgaattgttattaaatgatacaacaaaatatgctttatatagggggaggatatccaaccctaagatagacaccaaacccaactaagaataacctatctctatacccaaacactaaatattatttaatatttgatattaattaatcatttcaaaaaaaaaaatccctaattttgtaattattattatttcttataataagtgttattactttcgaagcacactgtaggttttgattttggtaggtcaactattttccaaatgtgtggttaaacatactttaatccatttcattatttattgtctctcttcaaaaagcaaagtctttagaggtatttacttattaaaatattgtatactagtcctcttctcttttcataactcgttaggttaggtgacaaatttttctttaaatgaatatgatttaattttaacatgtggcacacttttacttcacctcataatttttttgtaattcatatatacatatatatatatatatactagattgaagttacgtgcatatgcactatacttagttaatttattttcaaatataatatatttattttaataattataataaataatgtcac

SEQ ID NO: 282693 - DNA, 687 bp, Cannabis indica
aaagctatttctgatcagccatgagtgtaggagctggacgaaaaatgtacatgttcgggccacactagaccaagcgggttggggtctaccagtgatgtatttagtgactctgttttgccgcttagatcgaccaatggaaaaggacttgtaatagcgttttgtaaatatttttgggatcccgacttttgtaacttttagtttgtaaagtttaaattattacaagtttattttcatcttgtttgttattaaagtttaattttcgtgcttattttattagtaatctcatttaggggttagggtttcttaagtatcttgggtagcgtgcctaattatttagggcgttacattttcaatttgaacaatctacttatcagtaaaacttgtttttgcctcagatgtttaacaaagttcaaaaataattttccaagaaatacataacagtacaacacagatgttcatgccacaaattaaaaatattttacaccacaaatataaataacaatacataatagtccaagacatcgcaatacgaataaactaaaaattgatttttaacctcggtaggtgcaagtgcttctgttgtgtcccttggcaccgcacttgccacaatttcgtggtatgataatcctttcaccattacaagcagttaggttgttcttaattcttccaaccttttgcttcttgggt

SEQ ID NO: 282694 - DNA, 589 bp, Cannabis indica
tagggggttcattgaaagaatcagtagtgttagcagattcgtcaaacccagggtcccctcttaacatgtccgccaacacatctgccatttcctcttcgtcattttcaggaagttcaactgcgggctgagagaaagtctccccgtggaaataccaggggttgtacgaaggtggatcccgctgagaaataaatgaacccttatagttgcaggtgtgtggaaattcacattcaaacaccgcatgcatgggcatcgagctaatccgtcagcgttcacgtggttcgttgctaccgcaacgaactcgtcaacgccacttcgaaactctgcagagcgccggtgcgccttcatccaacttcggttggcaggcatcttccactacgaagtaattaacaaaaaaatttaaaaacaaacaaaaaaatgtgcaagtgtcctaatccaccttctcactccattactaaaagggtaaagaacctatcccattcaggtttgtaatatacatatagtgcaatctacgctcttaagattatttcatttttgtaaaaatttcggcagcacctccccacagttcttataagttagcaaacttgtagta

SEQ ID NO: 282695 - DNA, 1220 bp, Cannabis indica
gccatggtaattgatttactttcaagaaatttggaacttaaacgatttgtgtgtgatttggatggtttcatgttgatctgtgtgtatatgatgattcattgatgcttgtgaaatttttatgaaaataattgaatttttgttctggaattattttattggatattttggaaaaaattaagcaatccatttttttacagaactcaatttcgattttatttgaattagttatgattttttgaagatttgaaaaaggataaggtgatcaccctatcccacgcgcgcgcggatggcccattcactcagccagatgcgtgttcggacatgattttgtccgagcaacacgcacaggggtgtctcataccccatttcgcaagcggaaatcatgcaatggacactccagcgccgagaaacctcggctgatcaccttgtggcgcgcgcggatgagtatgcaactgcataccatccgtacaacccacaaatttttcatttttctttgttttttcatactatttcatggaattaacttccgattttttgtgtagttttgtatttagatatttactattcctatttcaattctaattatcagaattaaattaattagattttttaaaattaatttaagatattagtgtattttgaacttgaaaataggtaaatatctattttttttgcttaattatctatcttattataaattttgattattttatcttattttaaatttaaggtcagatattagtattttttaaattaattttttttaataaattgactttatttaaattttaaaataagattattataatcatgatattttgaataaagataagatatttgctaacttttaaattttttatttttattttagcattttttttgaaattatatttaggttagttaaacctaatttttcaaaattgtaggttttaattttaaatttttttatttaaattttatttaaaaaccgaaaattatttttttattatttatttatttttcgaaatttttatttaataaattaattaatttaaaattaaataaatcctacatccaactatccaaattcaacttgttgcaggagtatgtgttttagcttgtttgtaagttttctaaaacctattattgcttgatctaaattgccatggttaacttgttgacagatccaatgatctgattttaacccatggttcaattgtcaataggtcaagtaaataatt

SEQ ID NO: 282696 - DNA, 576 bp, Cannabis indica
caccatgcagagattgaagatcgaagttggtaagctaccgtgctgatacaaagagcctaccaaactgtaggtcagaaattgccaaacgtcattcccctgggagaaacggacgaggatccaatcccagactgcaaatggtcagccgcccaatccctggtcacgagttccgctcgtgggcccagcggtaggcgagcagaccttgtttggtaattcatcaggaggagtcatacccgatggctccaaccagatcaatggtgccattccacccgtcaaccaagccaatcaatcgctaaggcaaccaggcgcttctgtgttcgaaaggttagggacaacccattacctaaggattgatctgaacagaagggagtaaacaaacagaatattacgatgatcgtgtagcctggagcccgtactcaaatccccgctcagaaagatgatgacgtaatccaagttgaccagaatgccgagtaggtcagcccagccatacaggcttcgctagacgaactgaaaaatatgtttcacagcatggctggacaaaaaaacaatgatcttaagctggaccgagcacgcggaact

SEQ ID NO: 282697 - DNA, 89 bp, Cannabis indica
tatgtctaattttatgaattttcactaattaggggtgaaatataaaattgcaaaattaagtaaggcccaataacaccatatggccggcc

SEQ ID NO: 282698 - DNA, 772 bp, Cannabis indica
tttgtttaatggcatctaagaatgggatgttgatacttacttgtttgaacacttctaagatgtcactatattggttgccttttttgagtggaagtaatctttgtggaaaaggagcttttggaatggaaggaagaatttgatcattatcttttgacaagtcatttgtgttggaactttggctttggtctttttcaacttgaggtgtgtaatcgggtttggcaatttgttttccggacctaagagttgaaatagacttggcttcttctttatgacttgggactcctacttcatattggcctttaggatttgggacgggttggctaggaaatctccctttttctctctcagttacggcattggcaagttgacccaattgtgtctcaagtttggcaatggattgagactgattttgcatgatttgttgggtggattgcatgaattgttgtaaagtgtcttctaaggaaggctttctttgtggagggtaaggttgacttggttgggcatgattcggatttggcatgttgaattggtttccttggttcatttgtggttggttttgtctccatgaaaaattgggatggtttctccaattaggattgtatgtgttagaaaatgggctatcatttggtttaccatatgaatgtaatgcattagcctcttcggaaaatgtttcaagaaaagaaggacatgattgatcattatgacaagtactagcaaaaacatcttttttaggttgaacatgagaattcatagtttgacttatgactaaggc

SEQ ID NO: 282699 - DNA, 870 bp, Cannabis indica
aaatcccaacacttccgtcctcgtaacctcttctttttcctacctccggtgagtagccagttgttggacaacctatatcttagccttttagccccctttgttgaggctggatcctggcctcttcttgttgaagataagtctgtcacaatcatcatcttccctaataatgataacttgttggataacaagtggaacctattgcaaaggctccacttgaagaactaaagcctcagtagcttcttgagcctaggcttcctaagtttgagaaccaagaataacttcctagatagttgattatgccaccaccattggggtacgagactctgaaatagcttttaagggtggaacaggaggaacaacctcttacgccttggttggaggtgctgattacttaattccaatttgggaagatgttttgaacttgcctttcccctcgaggtcctcgcaacctccttggcttccctggttttggtggaaatattcctataaaactcataaaaaagacccatttggacggtctgggggttttatgcaaaaaagaacatgaaaagtctataacatggaagcagaagggagaattaactcttctagatgtgcttgctcccagagcaccaccattcgggttaactgctttaaaatggatttcaagtcccgtttccttgttcataggcttgggatacagtcgggtctgattagccaaccacctttgtgttgggaatattttaccaggatctagatttactaacaagtatgttgattaatatcctaaatatgaattctcttaaataatgaaagtaaacacataagggtttaagaaaattttacattggttgcagcggaataatatgactccttccgttcaagatctct

SEQ ID NO: 282700 - DNA, 568 bp, Cannabis indica
ataaagatgcatacggcagaccaggagtgcactagcttcaggaccgataagggggtatactgttacctagtcatgcccttcggactgaaaaacgccggagcgacctaccagagaatggtcaaccggatgttcaaaggcctcctgggacgaaatatggaggtttatgtagatgacatgctcgtcaagtccaaagcatgcaatagccatgcgaacgacttagaggaatgtttcgaagtagtccggagatacggcatgaagctcaacccgaagaaatgcacctttggggtcaagtcagggaagttcctgggcttcatcgtcagccagagggggattgaggcaaacccggaaaaaatccaggctctcttgagcatgccatcccccaaaaagcacaaagatgtgcagagcctgaccggaaaggtggctgccctaagccgcttcatctcacggtctacagacaagtgcatccccttcttcaacatactgaagaagtgtcaaaagtttgagtggtcggacgagtgcgaggaggcattcaaaaaactaaaagaacacatggccaagcctcctatcc

SEQ ID NO: 282701 - DNA, 450 bp, Cannabis indica
ttttttttttttgtaaaatgagtataaatttacaaatatatttaagtgtgcttctacaatgcaactcttatatcattgcatcttctatttgtttcagaattcaaatcttttttcgtagtcctgtatattatatttatttaaaactagacgacaactacgtgcaaagcacgttctatcttttttttgagtttttttttataattctttatccgtttaaaagaaatacataggataagtattttattataatttttaaattattactcatatgtaatttataatctaagatgaagatttaacaattttttcttgttttgtcttcttcaatagagtatacattaaaattcttgtatctttgagtctccatcctctcttgatcatcagtagaagtttgtattatctaacactttcattagaaacaacttttaatatatttagtcttttcttgag

SEQ ID NO: 282702 - DNA, 107 bp, Cannabis indica
atacgtacattttgggaacacagtagtgcaattgagtgggagcgctatcataaacatggaaatactgagagtgtaattctaagttccatgcgtggattaaacgaaga

SEQ ID NO: 282703 - DNA, 551 bp, Cannabis indica
acataatgaataaaataaataactccaaccagttataattgaaatataactagttttgtaacataatgaataaatataaataactcaaaccagttataattaaaatagaactggttctataacagtgttataatgataaaaataaataacacgaaataactcaaaccgattataagtaaaatagaacctgttatataacataatgaatgagtattttttgggataaatatggtatgtgtgtaattatttggtgggttagagcatgttgaatggatgtttttgtttgagatattttatttaattagtttttgtgtgattttttttatcttagttgctttacggaacaaatttttttgtctcaaatttttaactagttgataaatataaccggtttttttatattatatttgagttattgcgtgttattctttgtgtttatttcactacaaaaaataactacttttagtgataactttttaatcacaacataaatttgttgtgaccaaatgagacttttgatcataataaaaaactacttgtgactaaaacat

SEQ ID NO: 282704 - DNA, 563 bp, Cannabis indica
ctcgaacaatacatgcatttgacaatttttttagatttttataattaatatgtccgagtttggcatgccacaaattcgtggtgttgttgatggctgaatgacaagtaaacacaggagttagggtataacaattatcattggatcgaaatccttgcaaaatacattgattatcatcattaagtacataacaatgatcactgtcaaatgagacagaatacccttggtcacaaatttgactaatgctaagcaagttagcccttagtccttcaactaacatcatatttttcaatctgggtaacccttcaaaattgagagttcccataccaatgacttttccaactaaaccattgccaaaagtgacttctccacactacaaaggccgaatgttagtcaaaaagtccttgttacctgtcatatgtctagagcaactacaatcaaaataccacatttgatttgcagcacttttatcagaaaaaccagctagacactttttcttaacctattttagtttcaaacctttatgtttcttttgggatttttccaaattaccaaaataatttgtt

SEQ ID NO: 282705 - DNA, 646 bp, Cannabis indica
ctcagccgaggcttgctgggctcgagttcgagtggaagggcctgttggagtggtgccagccattgatgcagcaggaggaggaacagccaatggaggaggagattccttcgaggattcagaagaggaagtccaggtgcgatagggccttaccgatttgcgagcaacttgcttgggtggacgttttggcttcacggcttgagattcacgctggggaagcgatgaatctccaggctttgcaacagcaggaggaggaactgaggcagcagggggagcactagaaggagttggaacggtttcttctaattttttagagtgccctagattcttggttctcaccattttgaaactgaaagagaagatgaatagtgtctgacaaagaaacaagaaagagggttcgggtaggtggtgaaataagtgacaaaatttggtttatataaccttggaatcaaaacaagaaaaaggaaaccaattttgaaaattcaaatggtaaccgccagcccatgaaccaaaagaggaaaccgcccacttctcaactcctttcccctttcctttttttttttaaaaaaataaaaggaaactagaaatgccaacaaatttttccaaaaataaagcaatctttcaagaataaagacacattaccatataa

SEQ ID NO: 282706 - DNA, 1400 bp, Cannabis indica
gcccatttgctaaaacagtagaagccattatgaagacctacgctttttatgtcgtagaaatagctgaactcttctactgagggggccctatggacatactccatgtacatcgcatagaaggctagggcagtgcggtagctgtttggagttagctgaaaaggcgatacgtcatatcgcctgagaatagctgcgatgaagggatggaagggaaccgataccccacaccgaaggatgggtattgagactaccacatcctctgtgggaatgatcgcagggttagtaaacggaagatgcgctctctgagacggtttaggtcgctgaaacgcgagtcgcagcaaatttaacctcacaaaggtggtgaagtctgatttggaaaccctcgaaattaaatcctcacacgcgaagggctcattcagctgggtatcgtcaaccgaatctgtcccactcccttccgcctcctcttcgtcctcacctgactcgcgaactggggtcgtccattcatcgtccatctcctcgacctcgatgtcaggagcatgcctcgagtggataaggtagtcgcgggccgacacagtggactcgctgtctcgaatgtcgatggtcccaggttctgcgagttcctgcaccatcctttcgatgtccacagaagacatcgggcctagctctattggagcggcctcctcttctgaaatcgaggttgggagaaaactgtcttcctcctggtcatcgtcgccatcgaatgcatggcctcccgagccgagcagttggctatccgacaggtcgctcatctgaaagatagaagatcttttcagcgtgatgaatgtgtgaaaacaaaataagtgatctcacccgcattaaaactataaagtcgcacttgatagaatggtcagcatccttacgaatgctgaccaccccattcatatgcgagtagagatgcgaataagtcacgcatcctgggccaagcgatatacctccagaaacggctgggagaaactcagttactcaaggggcatgcgttctcaagcatgaccctgaaattactgagttactcccaccgttccgagactacctatcagccaaggagtacgctcatttgaatattaacgcatgtcgcaaatggctgggtgtatcacagtatctcaaggggcatataaccgcgtatatgaccattagaatactgtgacacacccaccatttggaaaagcgattaatactctcgcaattcaactcacagcatataaaatcctaaaagatctagccaataatcagaagtaaataagttctgtcagtgtgcgagtattcaaactgttcatccgaatacccgcgagtattcaaagtatgaaacagcgcctatttaaatatttcttacacagtatgcggttattccaatttacaggtcattt

SEQ ID NO: 282707 - DNA, 626 bp, Cannabis indica
ttttttaaaaaaaaactgaaaagaaatagaaaataaaaggaaaaagaagaaaaaaagaaaggaaaatgatggatggttgattgattgatagtggtcacacacatgtcatgggaagagtgtgcatgtggtaaaatagaagtaaaataaagatgaaaggtataaatgtttagtttaccgtgtagtggtatttaggtaataaagttatcattttatattttttatgtaaaaacttcaaaataaaattatgatgtgttgcgccataaaataatacgatcttatcctgccataaaaaaatataaatcttatcctaccgtgccaggagaaaatatgagccgtgttatgttttacttgagccggcttcatttttttatacgggtcttaaatttatactctaattttctctacattttattttagaaattgatcataaaataaatactataaagttatgtattttttatagttttcaattaatttatataatttttcaacaaatttttcactttaaaaatataattaaatatattctaacatgttgcactttagaatagtgattacatgacatattttttcagacttgacatgcttaagctcatattttcgtattgtgtcgtgctcaatctcac

SEQ ID NO: 282708 - DNA, 945 bp, Cannabis indica
aaataaagtccaaaccaaatcctgatgttggtttggttgcaaagctatctctgtctgcctttgttgaaggtcagtggtacttcgacagtggatgttcgcgtcacatgactggaaataagaaattgctagttaacttcaaagatgaaaaagggggatctgtcacttttggggatggcaacaaaggacagattgctgggagaggtgatgtaaatgtgaatggagcagctcacctgactaatgtcttatatgtgagaggactcaaagcaaatctcatcagcatcggtcaattgtgtgacgacaatctctctgtaagtttcactaaaactcaatgtttagtttcatctgatgggtgtgttgtcttaacaggaaacagaactgtagaccagtgctatgctgtatgcaataccatagtgtgcaacaggaccttcttggacaaacctgacttatggcactacaggctgggacacttgaactacagagatctccaaagattggtgaagcttcaagctgtaaagggaattcctgacatgaaagtttccaaggagagagtatgtggtccatgtcagcttggaaaacagcataaggcatctcatcccacaattaatagacttctcacctctcgtgtgttggaactaatgcatgttgacttaatggggccaatgcagaatgaaagtatcagtgggaaaagatatgtaatggtcttggtggatgactactctcggtttacctgggttgaatttcttagagacaagtctgacacatttggatcattctctgccttgatactgagattgcaaactgagaaagactccaaagttggaaaagtttttcgactaagaagtgaccatggaaaagagttcgaaaattccatattctcagagttctgtaatggcatgggaattcatcacgagttttcagccccaaaaactcctcagcagaatggag

SEQ ID NO: 282709 - DNA, 692 bp, Cannabis indica
ccacttggtgaaaggtctcggtccgttaggcctattgcagtgaaggcctctttgaacagcaaattcacggaactcccattgtcgatcaggactctggccacgatcttattggcaatgggggtctctatgaccaacgggtcatggtgaggaaaacgcactgttttagcgtcttcttccgtgaatgtaatgggttgatccattagtcggggcctttgagccgggagttgagtaacttcccaaacctcatcgtgtttcacggcccctacataccgctttagctccttgcgggtagttcctccgatgtggggtcctcctgagatcatagccactctcccgttgggtctaggtggcaggccgggaatatgctgggcctctccggggggaacaactggagccaatactcctgctgcaccccctggtgtcccttgtggcaaagctccagtcgcctgacccaggttgagaagaggcaatcggtttttgatccactcgtagaggtgtcccaatcggatcaagttttcaatttcgtccttgagattttcgcattcgttggtgctgtgcccaatgtcattatggtactcgcatctcttattgggatccctccaggagctgtctttgtacaaaggaggcggtctccggtagtgcgtattttccctagtagcaaaatacacacgttcttgagagtccgttaactc

SEQ ID NO: 282710 - DNA, 698 bp, Cannabis indica
ttcttcacagtcttacatactatgattgaggactcacttgttatgtgtgggcatacactcaatcactaatggctgaattttgttttgtgaagaacactaaggattcaaaatttatagaagaaaagaagaagaagtctcaaaaacctagagagaaagaaagctagtcttattgcctttcaagtattagttggataaatgagactatcttttctttttatactacttctcttagggttaggattgatttatttggaataaaaaatgataaaaatggagcaaaataacccttaagtggccggccattagtgggcccaacactagttagatttttgccatttttctcaaccatttatctatttttcacaaatatcactttttgcaatttcaaccctataaatgccaaaagtatttatttatcaattaaattaattatcaaataaaattttcatttataatgtttattaattagactccacaaagtctcttaattaataaattaaccctaaaatcctatttcttcataatcaagccataacatagtgaaaattcataaactagacatagtctaattttagaattataattgattaactaaaatcaattaactaagtcttacaagaagtttgtctcaactagtatggggaccacgagtccatataaccgagcttctaataagcaaatctagaatttaccaagta

SEQ ID NO: 282711 - DNA, 514 bp, Cannabis indica
tcaatgggaaccaaggtgatctccgagatcaccttgaccaaaaaagatacggacccgcggtctccacgggtacgttaaatgaaggaattatggcggaactcgccatacttcgaaaagacattgcccgagtctcccggagacagaaaggagatgactccgactcagacagcgaggatcgggagccatgtgctaagcacatcttagaggcggagctccctaagaacttcaagatgcccgaaatggcagcttataccgggaactccgatcctagcgaccacttgtcacggttcaaccgtgtcatgacggtcatgagggtcagcaatgacgccaaatgtctgtgcttcccacttaccctaagtgggtccgcggaggaatggttcaaaaaactggaaccgggatccgtgggctgttggaacaaactacagaccaacttccggagacagtttgtcgccgcaagaaaggtcaatctggaggtcagtgccttgactaatatcaagcaactgcccaccgagac

SEQ ID NO: 282712 - DNA, 844 bp, Cannabis indica
aacctagtttcttgtttctcttgttgttactattcatcttccctttcagatcgaaaatggtgagaactaagaacctagggcataccaaaaagttcatggaaaccgatgcaaccccttccaatgcaccccttgctgcttcatccatgcctcctgctgctgcaaaatcaggagattcatcgcttccccagcatgaatctcaacccgagaagccaaaacacatccctaagcaagtggctcaaaaatctgtgcgcccttatcgaacctggtcttcttcgtcttcatcttcgaaggaatctcctccacatttagcagtccctcctcctcctgcatcagttcctgctaccactccaatcggtccttctactcgaacccgagatcagcaagcatctgtcgagaaagaacttcgtgcatctcgaagtcttgataaggcagtgactctagccaagaagaagcttaaagccaatcctccttcggtttcttcttcttcagaagaagaagaaccaacggaagtctcctctgacaaatccgtgtctctgcattccgagaaggagcttccagaggagatgggagtttcctcagacagtgaggacactgaactcgagccagagcctccattgacaaaatctgctccaactcctgctcgttcttcttcagtagcaaaggcttctgctgctgccaaaggcaagcagccaatgaaggggtcttctcctggtaacgttccttcaactctttctcactgtcctcgattttattattgtgataatgagcgtgattggaatttgtatgctacccgtaagtttgaaagtgagaggagttatgatttgcatgctcatcgggtctatgg

SEQ ID NO: 282713 - DNA, 513 bp, Cannabis indica
atcccgagtcttttgtaatattgtttataagtttaattaaaaagcaaaattttaattaatcacgattttccataaacctcgttgattagcaacgagctgcacagtatgtttaaaactcacgtaatacgcctatggtagttagggtgttacaaaattctttgagaattgaagcctttacgcatatattctacttggaaaaagtaaaccatagcttcacaaaagctttccccataatatgtcagtaagtatatagtattttaaaaaaataactaataaacttttctaacaaggtgaaaatcttgaattaaatcaagtatataataaaattatgtatttcaatatatatttgaattaatcttaaagttagcataaagcatgaagaaaataatgtgagagtgatggttcaactacattgtgcttagaagagattttgtctagacatatgatgtgagaaagaaaaatactcaataatctttaaataaataaataaatttaaagtaatatcatttcaaa

SEQ ID NO: 282714 - DNA, 694 bp, Cannabis indica
aaataatttccaacaaatatttcatccccaaacagatggacaatctgaacgcaccatccaaatactcgaggatatgcttcgagcgtgtgcactggacttcactggctcgtggagtaagtatttacctctaatggagttctcctacaataatagctatcaagccacaatcaaaatggcaccatatgagatgctgtatggacgaaaatgtagatcaccgcttcattgggatgaagttggagaaagacgctacttaggtccagaagcagtaagagaagcttcagaagcagttgaaaagatacgacaaaggatgctcaccgcccaaagtagacagaaaagttatgcagatctgaaaagacgggaggttgagttttctgtaggggacttagtgttcttgaaggtatcacctatgaaggggattatgcgtttcggaaaaaggggaaagttaagcccaagatttataggtccttttgagatactggacagagttggtcaggtagcttaccgtttggccctaccgccaacattagcagaaacgcataatgttttccacatttccatgttacgtaagtatgtacctgatccgacacatgtgcttaagtacgagaacttgaacttgcagcaggacatgagttatatggcacgccctgtgcgcgtgatagaaaagggaataaaagtcttacgaaataagactata

SEQ ID NO: 282715 - DNA, 677 bp, Cannabis indica
ctcagatcgggattggaacttgggactgagaccaaacctagataaagacctaggacgcgaacccacacccagagcctgatttggacctaaactgaaatccagacccgaagccaaatttagaccaggagtcgaactccgatccgaactcagacccaaactcgaactaacaatggcaactggaactagaaccgaactaggactaggaccaggacaaggacctaaatccaaacccgaacccagatccaaacccagacacagacctaaacccgaaccgagactagaactccaactcgaacctagacccaaacccacacaataactgggacgtggatctagaatcagggacctgggaaatagaactaggaccgggacatagtacccgacccaaacccgaacatgaacctagaacccagctcgtgacccggcacaagaaatggaaccagactaggaccagagattgggatccagattttgatccaaggcttggacaaaacgtgtagtgggtgtctagatttgggacccaacgatggacccgaaccttgacaaggacccgaaccctcactctgacctgaaccaagttccaatcccaaaagtcgacccgaactcctaccctgtgaccaaaaattgaaaccaaaacctgaagttgaccgggactggaactaggacttggacttgga

SEQ ID NO: 282716 - DNA, 532 bp, Cannabis indica
gagcgattcttgagttcaactctaaatgagagcaccaaaatgttgacctcgcttttagtcaacgacaatgagtcttattaattagtaagcaataagtaatttatagcaatcaatatatggtaaagcaatgtaaagacacaagaattttatagaggtttagccccgagcggttcggtaatagcctaatcctcattatttgtattgactcaagaacaaagagaaaggttccttttcttatagctcttaaaacaatatctctgcatataaattcttagataatatctctagggtaaaatctctcgtcctttgcctagtgagcatacatcactatttatagggctatgaacttggagaggaagtatttcccttctcattacaatggatataagcagaaatattgcatgataaacgcagaatacactgatcgtgggatttggacaggttgccatgtctatgtgatctgatccccaagttatagggatttctttgatgactcacgatgcgaaagctgaattcactaagtgttgatcgc

SEQ ID NO: 282717 - DNA, 240 bp, Cannabis indica
atattgttaggttcagcttagttgtattatttatgttctttgagttgttcgtggaagctaacttttggttctggtggatacttacatcttgggaacatggtagttcaattgagtgggagcgctgatcatagatatggaatctatagcttctataggtatttagaagtgaaacgatgatttccttcgagcttggctgaatagagataaatgattgagatctcatttcagtaattacattag

SEQ ID NO: 282718 - DNA, 1237 bp, Cannabis indica
cctatggtttgggcatctttttgctattccactactacataagtaaaatcttctagagtaggatttactcgtctagtattccccaaaattctgtagatgtttaacctttagacaccaggttactcgtgtagtattttcctttttttttttttttttgtgctttcttaatattaatgctttataagtaaggtttaaggtataattagatcatctccaactcaaaatcaaatctaaatattgtgttaaatttcgtgaaaagattaacatatgttatatttgttattgtgctccaatatgcacaatcacatctgaagaggacaaaaggttaaatataattaataattatcaataaattaaggtgtcgtttggtaatacttttgttttttaattttttaatcacaaaatgaaagtaaaatttttgtttttaaaaaatttattttttgaaaacaaaaatgcgttctgtaactacttttattttttaatttttttttttgtaagagtttattttttttatatttttttttatttttaattttaaaaacagaaaacaaaagtgtgttctgcaaagtttatttttatttttaatttttgattttatttaagtcgggtctaggtccagggtcggattcgggttcaagtcgaaagtcgggttcaacgccagggccgtggggaggggatttgggtccgggtctggtcgtaatttaaaaaattgattaagaaaaaaaaattgtttaaaaaaatattgaaagtggttttttttatttttaaaattttgatttttaattataaaattgaaaagtaaaaacagttttataacatgtttttgaaaaatatttttactttttctacttttaaaaacaaaaaactaattaaaaaagtgttaccaaacgccacctaaatatttaaaaaataatttacgataaaattgtaattaacaaatgtatattaaagttttatcattaatgatcaataatagggattattttacaaatacacaaaaacaataaaaaaaaattataaaaatacagtttcacggaattttaaatatttttacgatttttaaattttatttataaaaaatatgatctttttatgttgtactcttgttaattttttgtttttttgtatgttatttattgttgttgttttgatgttatttagatgttatttttatgttacttttatgtaatttttttattattttcgtgttgtttctatgaaaaaccgtaaaaatata

SEQ ID NO: 282719 - DNA, 797 bp, Cannabis indica
gcataaaaaaaaaaaaagatagagtctaacacaagtaaatgttaaaagaaaaggaaaagttaagcattaggagcagtaggagcagatccatccgcgactttgctgacggcttcattctcgacttcttcagcatccgcaacctcagcctcctcgggaagattccctccaccgccttgagtttgtgtgggtgacatggcgcgaaaagcctcaggcatttcagcggcttttgctccgaggattgaaaagtcgaagtctggaattttggagagagtggtgtatatgtagtccgagaccgcctggtcatactgcttcttcccattctccttctcggcctccaaatcgcgagacatctcctcgatttttgtcggagcactcttagcctcgagctcgactagctccttggccttgcgaagttcctcgagctctttatccttggaactcgcttcttgtttcaacttcttaatgtcctccagaagctaaacgttctgtctcttaacgagttcgacctccttggatccggtaacaaaggccttcgagaacatggcaatgaactgcaaagctaactccgcagagcgaggcaacagctcctcagcaggagtcttgtcgatcttcaattggaattcatcgcttacgaacttctcttagagagtcagtatgttgcggactcggacagctgggtcaatcacggccttcttccctttctcttgtatgccctcagctggcctcttggaagaatccgcgacaggggtaaccactgttatattattttataatataataagtgtagattaaaatgt

SEQ ID NO: 282720 - DNA, 900 bp, Cannabis indica
gcctccgccctcaaggtgtcagacagagccgcactcgtggaagtagcaaatttagcccgggattaggtgtaagccaacgtcaaaccggcttgcataaggaaaaactcagcatatggagctaagtgtgaaaagttaaaagggaagtatcaaaaaagactaaccctggcaagctccttcaagactccgcccacaaaacatccagagatgagtcgttgtcagcaccagccagttgctcaccgacctcaggaactagccggttcatgtagtgagccagcacctccttgcccttcttggcctcaggcagcacgggcacgggtggagttggtgcctgcacccgctcagggatcctcctaaccagttcggacccagttgttggtggcccaaactccttagacttggcagatttgggactggaaggattcgcagcagtcagctcctcagaaaggtcaataacctctccagaaggcctcttctctgaagacccctctccgccgttagacttcttggccggaggggaggcgctagaacttctgcccatcctcttcctcaaagtgtcaatcatctgctgagacatgtctgcacagaacaaaaacagcgtggtaagcaaaaaccaacagaaaatacaaagcatgaaagtcaagaagctgaaaaagaagtaaagcgcagagtgactgcccgcctagaaagtcagaagtccatcatcacctgatatctcaggcataacagccttcccttttccaaccaagggatgagatggccgaacacgtgaaatgggctcccttatgcgaagtgcatgttcaacaggcctgggcgtggccgggagtttctcttcctcttcaatggggtcacctgctcagcctcagcctcagcctctgcttcatcttcaggattcataagctc

SEQ ID NO: 282721 - DNA, 449 bp, Cannabis indica
ttcaacatctcgcagaacaacaagaaacagctattctgccttgatcttttggaggaaaagcgtgatcgagtgcacttaaaaaatgcggcttaccagcagcgaactgcaagatactttaactccaaggtgaaagtaaaagtcctgcgagcaggagacttggtccttagaagggtaatgccaaataccaaaaacccatcacatggggtctttggggataattcggaaggaccatatctcatcacagaaaaaattggtgatgccacataccgactcgcaacactcgatggaactgcgattccacgagcttggaatggcgagagtttaaaattatattatcaatagtactcgcattattaaactatgttcactcttgtacttatacttagatatttttcataaaaaaaataaaaaaaaatcctaagtatagggggtatatatgcgagaatgta

SEQ ID NO: 282722 - DNA, 691 bp, Cannabis indica
tcagtgtaatcaataccttctctttgagtaaagcctttagccactaaacgcgctttaaacctttcaatctgtccctttttatccttttagttcttaaaaaatccatttgcaacctattggtttgaaaccatcaggtaatagaactaacttccacatatacattatgtttgtccatgaacttaatctcatcatccatagcttctatccattttgaagaatgtggacaattaggtgcttcactataagtaagaggttccacaaaatgaccaagatcacattcaccttctccaaggtaaataaatttatcatcacaccttattgacatcttttgtctttgagatctccatataggaggtacttctggaataacctctatttgttgaccatcattttgaatgacatattccacaattggaatttcttcaataacaggatcttcattaacaacaaaaccttcttcaataataggttcctcatcaataataggaccctcgtcatcttagatatcaggagcaatatattcatcaacaatgggagcattaccaactggagtaggatagagactactattatcatctcttgaaaatgacataggaatacaaattcctttagatgactcccccatttcaagagatgttgaaggaatattttcagcaacatcaaattccagaaatttagcagtctgagattc

SEQ ID NO: 282723 - DNA, 641 bp, Cannabis indica
gcggggatttgagtatgggctccagactgcacattcgttgtagtattctgctcgtctgctccctttcttctgtttaggtcgtcccttaggtcgcagggtgttcccaacctttcgaacacaaaagaactggctgccttagcgattggttcgcttggttggcaggtggaatggctccattgttttgagtggatccatcgagcatgactcctcctgatgaattcccggacaaggtctgtctgcctacctcttggcccacgagtggaactcgtgactggggattggacgactgaccgttgtttgtctgggaggcattcaccgtggggtcatcctcggcttctccaaggggaatgatgctcggcgcctgctggcctatagttcgataggctctttgtatcagcacagtagcttgccgactacgatctttgatttctgcatgatgagcccttaatgcttccatctctttatctctccactcggcgaacatacgcctctgttcgtcaaacgcaaggtttaatgcggcacgtaaatcctcctgatcgtgatgcagggtattgttgtggccctgcatgagtccaagcgcagcacggagattttgcaattcggttgcatctccgatggttgtctgggcgctgatgcctggt

SEQ ID NO: 282724 - DNA, 526 bp, Cannabis indica
ttctccacccccatcagttcgcaagatctttaaccacttaccttaatgcttttcaccattgctagaaattcatgaaatttctcaaacatttcaaatttctttgcataaggtagaatctagagtgatcgtcttaagaatataacgaaaaatcatatccacccctgaatgtacatccatatgtgcgaatatagatgatcttactttcaagtggatattgacatatttactctttacagaaaatgattttgtcaaaaccactatgaataagacgcaaatgccatagatataaagaatgtggttgtggtcttttgatgacttaggtctagttacaataaagagtttttagaatagtccaagtggattctggtcacagcatgtaaaactcataatccatacattaacatacagtttggatccattgacagaaaatggatattaataacttgtgaaagtcacactgtattgtgcaatgtattctaggaaactgaaatttaaaatttctatttggaatctaaaatttaaagtc

SEQ ID NO: 282725 - DNA, 756 bp, Cannabis indica
catttttcatactcgttgtcatgtgaaagacaaggtatgtagtgtgatcattgatgggggtagctgtactaacgttgctagttcatcaatggttgagaagctgggacttccaacgcttaaacatccacatccttacaagttgcaatggttgatgatagtggtgaagtgagagttaccaaacaagttttggtatctttccaaattggcaaatatgaggatgaggtatagtgcgatgtggtcccaatgcgggcaagttcttctaggaaggccttggcaatttgatcggcgagtccaacatgatgggttcaccaacaagtactcattcatgttccgtcaacgaacagtcactctagctcctttgacaccaaaacaagtctatgaagaccaagtgagattgaaaaaattgagtgatcaaaagaatttgagtgatgaaaagaaattgagtgataaaaagaacttgagtgagcaaaagaatgagaaaaaacaaccgatgttgttgttcgtttacaaggaggctcttttaaacactaaccaacttggttcttcgctgcctagtgttgttgtttctattttgcaagaatttgaggatgtgtttccagaggaggtaccacatggtgtgcctcctattcgaggaatagaacatcaatttgattttattccaggtgcgtcaatcccaaaccgcccagcatagttgatggtccatcaacaaaagtagctcggtatttcaataacaagtgaaagctcggaaattctttg

SEQ ID NO: 282726 - DNA, 570 bp, Cannabis indica
gtttggttcttcgtctgggttctggtcctagtctgagtcccagatctagacaccgactactggtctgttccaaggcccgttacctgaatcccgagtcaagatctgaatcactgtcacgggtctcggtcttgttctggttcaggtcccaggtcccatttctgagttttggttcgggattgagactggggtccagttctaggtcccaacccttgttttgtgtcccttgtctggttccatgtttgggtctgagtttcggttcggttttgggtaccgagtctagatttgggttgggatccgagttcggctcccaattctggtctaggtttaatttggagtcctgatcctcgtccagttacggttctggatctatgtccaatttcaattgtgattccaagtccaagtcctagttccagtcccgggcaacttctcgttttggttccaattttgggttacaaggtacgggttcgggtccacttttgggtttgggactgggttcaggtccgggtgtgggttcgggtccttgtcagggttctggtccagggcttggtcccaaatccagacactgactac

SEQ ID NO: 282727 - DNA, 614 bp, Cannabis indica
agttgccaagagtgttatgggcctacaagacgaccccaagaaccacgaccggccactcgcctttttcaatggcgtacggttgtgaagcaatggtcccgatataaacgttattcccgtcccacaggagaacgacttatgattcagcttcaaatcaagctttattacaagaagcgctggatcaaattgaagagctcctggacgagtctcaaatacgaatggaagcttatcaaaagaaggtgacgaaatattttaactccaaagttaaaaacagaaaattcactattggggatatggtcttaagaagagtcttgccagccacccaagaacccggagtgggggtacttgggccaaattgggaaggtccatatgaaatcgaggatgaaatcgactccggaacctataagctaaaaaggatggatggaactattgtgccaagggcttggaacgccgaccacctctaaaaatattaccaatagtccaaatatgtcaacttaggctttgtttaaagaatttgtaccgtctaagtgtatgcaacctccgaattttaaataaaactgagtgccttaaaaataaagttttcatgccactcagaggggtactaaggcataccacac

SEQ ID NO: 282728 - DNA, 588 bp, Cannabis indica
tcacatcaaaacctagtttatccaattttagcattcctaattcgcacttttcagattttgaattaggatcatagaacatgtagaaggtgatcaatcttaaacatgtaattaaacacaaatatggataaattcccaataaagaaagaagaaataacaattatcattaaccaaaagtaatttcaatcaactttcatcatctccctaaataggagtttagtttataaaatccataataacatccataatcaaaactaaaacagaaattaacataaaaattaagagtttaagaaagaactagttggtgattgcattccggatcgccaccattgattcctctgcctccttctttcacttttgggcccaatttctgcctctttttcttctaaaacacgagccccttaaatagaaattagggttgctgcctttgaaaaagtcaaaaaatgtccaaaaatctcgtttttcgcccctagtcgcgactacataaagtctagtcgcaaccatagacaaaatacaaaaaatatgctcgctgcctggctcctagtcgcgaccatgaaaaagggtcgcgaccatggaaagtggtggtcgcga

SEQ ID NO: 282729 - DNA, 493 bp, Cannabis indica
ttggcggattggctcaatagtgacgaagaggactccgaagaagaaggaaagaatgaagtggcaaacatgtgcatgatggcacttgatgatggggtaagcatttctaaccaaaatgattgtgatagcgaaaatgatgatgataacttagatatgtcatatgatgagttgtctaattcatttaaggaactatttgatgattttggtaaattgcttgttaaaaaccaaacccttagagagaagaccaacatgcttttaaaagaaattgagattttgaaaataaatgaaaaagaacttatagctaaatctcaatgtgctacatgtgcttcacataagaaagaaattattgatttgaaagcccatgtgagaagcctaaaaaatgacatatataccttcactagaggtaaggaaggctatgatctcatggtgggaaaccaatcatgtggtttttcaaaaaatggtattggttatgatcctagtaagaaacaaaaatttt

SEQ ID NO: 282730 - DNA, 1087 bp, Cannabis indica
caaaaagaactataatcatacctttaatcatacatcataatattttgttttataaataatcacacacaaaattaaacttcaactctaatctcagtttaatctcttaatccatatttagactttaatgatttaactcatattttgtacttaattattgttaatatataaagataaatagataaataagtttagaatactttgaattatgatttcttataaactaatttattattatttatcgatttcaaattatttaggaacatatattatatatgtttttactatatcattattatatttatttttaagtaaatatataataattttatataaattaaaacaaattatataaatcattcaaatataaagcataaaaaattaaattgtaattttattattacatgcattttctctttatatttaaaacaaaacacgcatataattagaagtaaatgttatattcttttcaaaaaaaaaaaaaaaaaaagaagttaaatgttacatgtatggttttttttttttaagtattatggacattgaaacatgccataatgtcaaaaatagttaacgtgtttaggtgtgtatataagttaagtggtatatattttctttttgaaaaactaataataaaaaaaattagaaagaaaaaaacccaataatctgagtgataaaaattttaaaataataaaaaaaaattgagcaaaatttgaaacattataataaagaagaattattaaatttgagatgtgagaaagaatatttatatatatatatacatatatttatacaaattaattctttaattaaactattattattaagaaaaagaaaagtttcaatgtcacttggagtgatgaagataattctgaaaatgttgccctaacctctgttatgactaatgtgttgtgtgattcacaggtgaaagctagattggtatgtctgaataataccaccaaacaagaggaatcagattcagatgagtctgaaatctgtgaagaatctcttgctgaatcatacaaagtcatgtatgaaaaatggattcaggttgcttctgaaaatagagagttgaataaattgaaataaaaaa

SEQ ID NO: 282731 - DNA, 533 bp, Cannabis indica
ccgagactaaacccaaaaccctaaaatccctaaacactaaacacaaaaccctaaatcctaaaccctaacctggacacgggtatagacccatacacataccgagattggatcccaggccccaaacccagacccagatacagacccgaacctagacctagactgaggacctgaacccagaccagaacctagtctgcgacctagactttgattaggacccagatcaggatctagacccgatattgaaaagggactaggactcagacctggacccggacccacactaaaacctgaacccatactaggacctcgactcggacccaaactcgggatccaaacccaaacttaaacttggacatagactgtgacctaggatccggacctacatgggggacccaggccccaaactcaaacctggaaccaaacttggactaaggatgtggacctagatgggggacttagacccgaaactaggccccaaaaccgggaccgagacccaaaactcgaccccatactcgagacacgggacacaacct

SEQ ID NO: 282732 - DNA, 667 bp, Cannabis indica
ggtcccttccaatgtgtactccatacatctgatactggtaaactttaccaatgccctggaaatgacataacacttatccaaggtgtaagtataccttatctagatcaagtgtagaatgtagtattctctctgtaataagatctaacaggttgtatacaatacaatatttctccaccattgcatttccttaatcacaaaatccctgatattgtgaaattcttttctatatgtctactcctctagggatactagattctttaatttttggcaactacttctgtgttagtcaggaagtaacactaatagttaattcattattggtacaatgccaaaaactgtatagaactttccataggctgaataagtatctttcttgcaactttaacatttagctcactggtagagttagagactccagatcggtttttacacttctccaaaatcactgctccacccccagagtaatcaacatctcatcagtagactttctttcactaacgcaagtctagaaacctgatttggtatagtctaagagtattaaataccacccttatcgactaacatatagttcatcttcttgatcttaagatttacttgattgtcttcctaactgttcctttctatggattaattcgatcctaactcattactccactcaacagcaggt

SEQ ID NO: 282733 - DNA, 648 bp, Cannabis indica
ttctcacagatgtaaaacttttcaaacaaacttttaaattcttcccaggtcattatactgacatcccgggtttggcccacgatatcccaccagacgcgggcatgatctggtaacatgaaggctgcacagttcactctttcagttcccgtcactcccatattatccaggatacgggtaatagtgctcatccactgctcggccttaattatatcaaaacctcccagaaaagtcggaggttgcagcttcacgaaccgctcaaataccgagtccctatgcggcataacaaacccctggttacccaccactggcataggtgctggtggtaacacttgatcaacaggggcagccagtgccggttgccttaatcgtcgcaactcttcttcttgacgaagtatgacacttcgcatttctttaaacatctgctgctattcagcaggaggattagcattaccaacccccgcattatcccccggatcctacggaggtggaggcggtgccggtggattggtttgggcagccccaggctctacttgctcgccctgtggtctagatgattgcggagggtccattactagtacccatgtaatcaacaaccccagcgagttaagcaccaataccacacttacgcacttattgccttaaacccta

SEQ ID NO: 282734 - DNA, 580 bp, Cannabis indica
tggacaattcctcaatatcttgttcaaaatattttctttgcgcggcggtaaaaaaaatatgcttttttggagagagatactatttcaccaatcgagttacaggtgtctaacatattcatacctaacgattttccacaaaatggtgacgaaaggtataacttgtacaaatctttccattttccaattcgatccgatccattcgttcgtagagctatttactcgatcgcagacatttctggaatacttctaacagggggacaaatagtcaattttgaaagaacttattgtcaacctctttcagatattaatctgtctgattcagaagagaagaacttgcatcagtatctcaatttcaattcaaacatgggtttgattcacactccatgttctgagaaatatttaccatccgaaaagaggaaaaaacggggtctttgtctaaagaaatgccttgagaaagggcagatgtatagaacctttcaacgagatagtgctttttcaactctctcaaaatggaatatattccaaacatatatgccatggttccttacttcgacaggatacaaatatctaaatttgatat

SEQ ID NO: 282735 - DNA, 549 bp, Cannabis indica
ctaaatctgggacccgatcccaaacatagacttggacctagatagggatctggatacgaacttggactcggatcaagtcccacacatgaatcaaaatgctggacctagatttggaccgggatcctgacccacacgcaaaacttggaccgcactcgggaccccaacttggacttggacctgaacctagacccaaatagggctccagacccggaaacaaaccaagacacagtctcggacccgaactcaaatccacaactagaatcagacccaaagctagacccgaacccggacccaaacccgaacccacaccaggatcagaaccaaggacttagacccagaactgaatccagactcagattgggattggaacttgggactcggacgcaacctagaccaagacccaggacgggaacccacacccgaggcctgatctggaccaagactgaaatcgggaaggtaacccaaactcagaccaggactcgaactccgacccgaactcaaacccaaactcgaacttagaatcgcaaatggaactagaaccgaactagg

SEQ ID NO: 282736 - DNA, 777 bp, Cannabis indica
catataaagcctttttcaatttgtaaacatggttagggtatttatgattttgaaaaccgggtggttgagagacataaacctcttccataatgtacccatttaagaatgcgctttttacatccatttgatacaagataaaattcttgtggcatgcaaaagctaacaacattctaatggactcaagtcttgctaccggggcaaaggtttcctcataatcaattccttcttcttgattgtaaccttgggccactaatctagccttgttacgcacaatgaccccatgctcatctaccttatttctatagacccattttgttccaatcaccgattgatgtgacggtcttggaactaactcccaaacattatttcttataaattgatttatttcttcttgcatagctagaagccaaaattcatcaacttcggcctctttaaaattctttggttcaatttgagaaataaaagcaatgaaattacacaagtttctaagggagtttctagtagtgacaccttgagaaggatcacctagaatttggtctataggatgagcacttttgaatttccactcatgtggaaggttagagttcataccttggctttcatttaccttttccacgggtggttcctctttgggagtttgtgaaggagcattggaagtctctccaatttcgagattttgaacctcatctcccaaacctacaacatcatcatctaaacttttgcttgtaggcgggttagtctcatcaaaagcaacatgaatagattcttcaacaacat

SEQ ID NO: 282737 - DNA, 874 bp, Cannabis indica
ccatacctggttccgaaggctgtttttcagaatatcctcttctcgaattctcagctgatgatatccagacctcaagtcaatcttagaaaataccgtcttgccctgaagttgatcaaacagatcgtcaattctaggcaaagggtatttattcttaatggttaacttattcagctcccgatagtcaatacacatccgaagagtcccatccttcttctttacaaatagaactggagctccccaaggtgacacactaggccgagtgaaccctagatccaacatcccttggagttgtatcttcagttcttttaattcggcaggtgccattcgataaggtgcttttgaaacaggttctgctccaggaattaaatcaatgacaaaatctatctcccgctgaggtggtaacccaggtaattcctctggaaatacatccaggaattccttaaccactttaacctcttcaggtccaagtaacacaggtttactggaatccattacaactgctaggtatcctatacatccactgcataacaaatccctagctttcaatgctgagattcttggaacacgagaaccttgaaccgaaccaacaaagacaaatggttcctcattctccagttcaaaagttaccattttccgtttacaatcaatactagcaaagtatttggacaaaaagtccataccaagtataatgtcgaactcggccaatggtaactccacaagatcagcgctcaattctctatcttcaattctaattaacaccattgtcacccactttcttgaacaattagttccccattaggcaacaaggttccaaatcccatctcaaaaaaatcactaggtctaccaagttgattaagaactctcgatgatacat

SEQ ID NO: 282738 - DNA, 572 bp, Cannabis indica
agtagtaattaatccaattccctgtggttcgacctcacttgcgtgagctactacttgactgcgtatacttgcgtagtgttcataattttcgtaacaactgtaaggtttcttatactttatatgtgtttatttcatatcattttagaagtttatatttaggatgttaaacaacatacttgttagaaaatctaagatcctggtaaaataattccaacagtttgatgacttggctaagaccaatggagaaccatcagtagaagttttgactgaagggtgagcacgtaagaaaaatgaggctaaaaccttaaagcctcatagagacaagggtaaaggcaggcaaagtggatgatgttgggttttatgccctaaataaaactctatttcaatgtaatctctatcttttaaatatcaataaagaaacaaaagtattttcatcacttattgtgtcatttggttcatgttatcatttatttgtttatttgatttataaattcatccaaatccttatacatttatattcttgtttattgtgtcgtcagcacaatggaaagtaatcaagattatgtgattaa

SEQ ID NO: 282739 - DNA, 784 bp, Cannabis indica
tgacaggttaagcatttagtgacgtagtccactacatccctcttcatcccataccaccaaaaatagggcttcaagtcttgatacattttggtggttcctggatgcaatgagtaaggggtagtatgagcttcttccagaatttcctttttaagttcattgatatcagggacacacacccgtgctttaaacaacagcatcccattgtcagaaattgagaagtccttagctttgcctgctaagacatcttctcgagtcttaaccaattcaggatcttctaattgggccattttgattctttccaacaaatctgactgaagtgtcagattaaataatttctcagtcaccaactcaatatttgccctagtcatctccgaggctaactgagaggaaatcatgaccatgttggatatctgatcgggtccctttcggcttaaggcatcagctacaacatttgcctttccagggtgatacaggatttcacagtcatagtctttcaccaactctagccaccttctttgtctcatgttcagatccttctgagtgaaaaagtacttgagactcttgtggtcagtgtaaatctcacacctttccccatataggtaatgtcgccaaattttcaaggcgaacactaccgctgcaagttccaggtcgtgagttgggtaacgctgctcataatctttcaattgccgagaagcataggctatgactttatctgcttgcattaacacacagcctaaaccctgccttgatgcgtcacaatacaccacaaacttttcttgatcag

SEQ ID NO: 282740 - DNA, 343 bp, Cannabis indica
ataatattgtcatttaatatatttattaattagactaatcaaagtcacttaattaacaaataaactctagaaactctttcttcacaattaagcccatgcttagtgaaaattcataaactacacatagtctaattttagaattataattggttaatcagaatcaagtaactgagtcttacaagaagtattgtctcaactagtatgaggaccatgggcctatatatctgagcttccaataagctgctcgagagtttactaagtaaattcactgacttattatacattgtatagggactaaattactgttacacccttcaatgtattttatccttaaaacacttag

SEQ ID NO: 282741 - DNA, 815 bp, Cannabis indica
aaaaaaaacaaagaaaaaggaaaaaaatcacatttcttcttctctcaaactctctttgtctctcttgaaaatcctagggctgctagggtttgttttgttcatcaattcaacaagtttttatcaaatcttagagtaattcaagttgaggtaatctttgatcaagctcctctttgttttcttgaagtttaagaaaaatgaattgttgcatgtttgatgattttgtggctgtggctgttgttattgttgattgttgttttctaaagcttaaatatgtttaattgagtggattagaacaggttttgatgcattgtagttggaattaatcaagtatggagttttgaactcaaaactttggtttatgagtgatatgttgtttagcttgctgtagctgttgtggttagttgctattgtgttctgaggcttagttatgagtttttatgtggattattgcgtgaattagaggctgtgtgaagggttagtcatgttttgagtttttgaactcaatcttgaacctttaatggtgaaattcatttctgtgtatgaagcttggttttatcacttggaatatgtgcgttggggtctaattagcaggtctggagagtttggtttgaattggggttgaattgcatgagttatgaaattttgaacctttcctgcactgaaccggaattccggttcagggaggcctgtaggaaccggtctaccggttggcttccaggaatttttcccagaaccggaattccggttgaggaaccggtctaccggttggggaaaatttgggaaccctagtttttcccaatttttgtgttatttag

SEQ ID NO: 282742 - DNA, 506 bp, Cannabis indica
agtagtaattaatccaattccctgtggttcgacctcacttgcgtgagtatactacttgattgcgtgcacttgcgtagtaattaataattttcgcaacaagcatcactaagatctgagcttggatctctttctctccttctttagtctgattctcgttcttgttgattggattcttcacaatattctacactatgattaagatactacttgatgtgtgtgggcactcactcattcactcaaggttcaaaaattcaagaagaaaagagaaggaaagtggcggctagggtataggaaagaaagcttagaattttctctgaaggaatgagatgcatcatctttttcctgaagccatcactacctatttataggtaaccacctaggtttaggttagatttatttggcattaaaataatagaaaaataaatggtaaactacactaagtgtggccggccatggatagtggattgggcccactttgaattttgccattttgtcattttttcatc

SEQ ID NO: 282743 - DNA, 545 bp, Cannabis indica
gtgtttaaaatactgaattaaatatgattggataggttgaaattcatgctagttatccttgttctagtttgagaatttgtagttcaaaagctatggttttttcaagtgaaattgtgagttttgttgctgtgtttgttgaggtcgaattcctgtgttttcagaggttataatatgcatgtttaagtagatttgaactgatttggatgcatgttagttagatttaaccaagtttgagtttcgaactcaaagcttggagctttaatggtgattttcgattctgtgttttctgggttgtgtagatgctttaaaattgttctttggggtatttagaacaggtctggaagttttggtatggtttggatttgttttgagaaaagtatgaatttttgaaaattcctgcgaggaaccgaaattccggttgtgcatccggaattccggatggggttctgaaattcccagaaccagaatttcggttgggcaaccggtctaccggtggggtgatttttcaggaaccctagattttctcgtttttatgttatttgggg

SEQ ID NO: 282744 - DNA, 784 bp, Cannabis indica
catttaattttattttattttaaaaaaataacataaattttgaaaagttgatatttttgaatagatatttaggtttgttaaaaaacctaattttttaaatttataggtttaatttaatttaattatttcaaaaataatattttattatttaaatattttcgaaattaatttgattatttaattaatttaaattaaataaattctatatccaactatctagtttgttgcatgtgtgtgttttatatattgtttattattaaaaacttgttttataaaacctattattgtttgatctaaattattatggttaacttgttgacatatccaatgatctgattttaactaatagttcaattgtcaatagatcaaataaatagtttgtaactatccagtttgttgcatgtgtgtattttatatattgtttatcattaaaaacttattttataaaacctataatttttttatctaaatttctatggttaactcgttgacagatccagtgatctgataccaatagttcaattgtcaataggtcaaatagataatttgtaacaggtaaaatttgtaatcttctttcatttgtgtataaacctagtaacatgataggatccatccaaatcagtgtgtgcctgtgcctatatgtttactttgggcctagatgcatataaggaacccatttaattttgattattaaaatggactaggttgctaaaataaaattatcacatttgatagatttttatttaggttccaatagtattgggcttattcaatgaataatagt

SEQ ID NO: 282745 - DNA, 344 bp, Cannabis indica
gatttgaaatatgaaaagtaaaaatcaaaatacaaaactacacaaaaaatcggaagttaattccatgaattagcatgaaaaatcaaagaaaatgaaaaaaaattgcaagtgttatggacagtatgcattgcatactgtccgcgcgcgctcactaggtgatatgccgagaaatctcggcgcaacgctgcccttgcatgattttcgcacgcggataaggggtttaagacacccctgggcgtgtcgctcagaaaaacccctgtccgaacacgcagctgaccgaggaacactcggttccgcgcgcgtgggcttgggtgatcaacctatcttttttcaaatcttcaaaa

SEQ ID NO: 282746 - DNA, 790 bp, Cannabis indica
tggaaccagactagggacacagaactagggtcgggacctagaaccgcaccccactctcgatcccgaacccaaactcagaaatgggacctaggacctgaaccagaacaagaccgagacccgtgacagtgatccagaacttgactcgggattcgggtaacgtggcctggaacagaccagtagtcggtgtctaggtctgggactcagacttggaccataacccagacgaagaaacaaacccgaacccaggccaagacatgggacccaaaatttgaacctgacaaagaatcgtcgaactaggaccctagaacaagacaaggaccttgaccaggaccgaaacctagacctagaaccgagcacagacctagcctcagacccaaaccgagactggaactctggcccgtacacggtcgtgtacccagaccagaactgagccccggacctggacctaaatctgggacacgatcccaaacacaaacttggacctcgatagggatctggatacgaacttggactcgggccaagacccagattgggatcgaaatgttggacctagatctggaccgagatcctgacccagacccaaacttggaccggcactcgtgacccgaacttggacctggacccaaacctagacccagattagggtccagacctggacacaaacccggacacagactcggacctgaactcaaacatacagctagaataagacccaaagttagacccagacccggacccaaagtcgaacttagaactaaatcaagactcagatcggtattggaacttggga

SEQ ID NO: 282747 - DNA, 724 bp, Cannabis indica
tgcttttcttatgtaagttaggctattaattattttggtatatttattatattgtatgtcgtttactgcattctgccaacattggtattttgtcgatttatgatatataatatgatatgctgttaagttagaggcgagattcaatttattcaagattatttaatttgtgcgcataacatatatatatcttctggttgtaattaatggtgtagaattgcaactgggttctgaattaatatcggttttagaataggatttacataactatttctctaccttactaagctctttatctgatcaactttctcacctcatcatttttaattcattccaatttctatctttttctatttatactaatctttagtggtaatttgcctccctgtggatacgacatagcccgtttactaccgcgaccgcagtgtaactaattgggggacatcaatgaccaatacgtcctctccttccacaagtggacgaatgtccgggttatgtcccagttgtccccttgtggttgtgccggtgggttacgagcattgtttccgggtgccccctatggttgcacattggcacgtggggctacaagttgttgtgcattcgctccttgttggttgtattgtctattacttgcataatgagcaagaggcccattacgtataagagtctctatctcatccctcaagttttgacactcgttggttgtatggccaatgtctttatgata

SEQ ID NO: 282748 - DNA, 636 bp, Cannabis indica
gctgggaaacttgaggaggaagagtttcctctctcgttacaatgcgcataaacagaaagatcgtgtgatcaatgctgaatgcaaggatcgtgggattgaggctgaatacactgatagtgggatcgtgtgtatgccacatccacgtaagttgatccctgggttgtagggattgagctggtgactcatgatgcgtcaagttgaattcgctaagtgttgatcactctgcacggctcgctgaatatttcattctggatgtgccagcgaggcgtcctgctcggcctatcgttccgagcagatgctccaagcggagcccatgtgtcaccattctcgtgatgccacgtcagagtgccaaatttaggataacatttgccccccaagtctgtacgggacctccgaggttgcgtgtagacttattctgagctggctctgcctttggatggggacacgtgtgaagcatgaccgttccagactcgatgtgaagctgactgggcgtcccttcagttttcggctaattaatgctctgacaattaatattttgaaaatctgaatttctctctctacggctgacggttgcacttgattacttttgatttcccatattcgcttttgaggcgggaagtcgaggcgtctaaggtt

SEQ ID NO: 282749 - DNA, 63 bp, Cannabis indica
tttttattttagggcccaagttttgtggattacgatgctcgaagaatcaaaactcttgaatgg

SEQ ID NO: 282750 - DNA, 451 bp, Cannabis indica
tcccaacccaaacctggactcgggacccgaactcgaacctgaactcagacccaaacatggaacaagactagggacacagaaacagggtcaagacctagaattgcaacccagtcttgatccaaaagccaaactcagaaatgggacctaggacctgaaccagaacagaaccgagacccgtgacagtgatccagatcttgactcgagattcgggtaacgtggcctagaaaagaccagtagtcggtgactagatctgcgacttagactaggactagaacccagacaaagaacaaaacccgaacctagaactaggacccaaaattagaacctgaacaagaatcgccgaccccagacccagacctagaaccgaacacagtgttgggttttatgcttaatatagatcagaaataacacttaatgttgcgtggttcagatgattatttaatgattatat

SEQ ID NO: 282751 - DNA, 538 bp, Cannabis indica
tggccgagtggtgtccatcaccacggccagaaaccctaaacaaccgccatgcagtaactccctagctgacatggccgaaatcactggaacccgagatccccgaaccgaaccaacaaatacaaatggttcttcactttccggttggaagatcaccatcttcctcttgcagtcaatactggctgagtatttagataggaaatccattcctagaataatatcaaaatctactaggctcatttctatcaagtcagcacttaactctctaccgtctattctgatcggcatagacctaatccaccttttggagataactaactctccgccaagtaatagggttccaaaccctgattcataactatcacacggtctatccaatttactaaagattttggctgccacataagaatgtgtggccccagaatcaaacaatactgagtaaaaggagttgttaactgagagctgacctgtcaccactgaagggctggcttctgcatcagcctgcgtaatggcgaacaccctagctggagtgggtctcgcc

SEQ ID NO: 282752 - DNA, 769 bp, Cannabis indica
gacacgtgtcaagataaaagggatatgaatcgatgtaattgctttttatggaataactcattaattacataagcatcagagtatatttaaaacctgctgactttaaggtcttaggcgaggaatcaatatacaaactggcacttattatattagcgagaaaccatatatcgctgaaagcaaatagtgaggcatccaggacagtacacataggaagacgaaagcgacatatattgattgtaaaagcccttacatcacaaactaagggtaacagtcaatcagctcgagaccaaataatcgaggtgcccgtctcgcaatgggaagacttcctataacttcatcctgtcaacgccagtgagcctcacaaccttggcaagtcaagaagctaacattcaaatgagcttcaaagaactctttgtaaataagaaccgcgatcgacacaagacatgcatcgtcgacctcggaaggaaaaatggccgcaactcactattaagatcattggaaccaagcttctgtcaagacaacaccagatacaataaataaggattattttgagccagtaaaagcgagaaaatcacagctatatgattttccaaacttaactgcatttacactacgtgaaatgtaatcaaatcccatgattttagggatgattgatgtaaacatattacagtcaactttgtaattaactgccctctatgtaattataaatagtggcaaataagatcaaaaaagggacgaaaaaaactcatacaggagaggccctaaaaaa

SEQ ID NO: 282753 - DNA, 545 bp, Cannabis indica
accccataaaaattctggcaagctagaatgaatcaacatacaacgtaccatatcaagaagtgtgcgattccttctttcagcaattccattttgttggggtgtccctggcattgtatatcttgcatcaataccacattctaaacaagtatttggcaaaaggcccggggttccttccagtctcatcataacgcccataatactctccacctctatcagaattgacagctttaatcttctttcccttttgaagctcaacattcgtcttgaaaatcttgaaatcatctaaagattcagatttttcacgaatgagctcaacatggccatatcaggaaaaatcatcaatgaaggtgataaagtatttataaccactcatagcaggaggaacaaaaggcccacaaatatcagtatgaataagctctaacacatctgcacatctgtctgacttactctttctaccttggcagtcaactttccttttatacaatcaacacaggtagtaaaataaaaaaaaatcaagatcttgaagtacaccatctttcaccaat

SEQ ID NO: 282754 - DNA, 554 bp, Cannabis indica
aggagaccaacaagacctacttgcaaagagaagattaatcgtttaacctcatcttgcttttggcacttattgatccctctatcatttcaacatagtattctacccatttcctctaagaagatcccccctccctgtgtatgatcctcttcaccagtcatagagcaatcaccagtttcttgtaatatctcaaagttgttcaaactatcaaggccttcatttactttattttcctcccacaccaccttagcgcctttttttacttgttggaagcccttggtatccaacttccctttagcctccatgatctcacttattttctccacccatacttgcttcactacttcctttttcttacaaatttttgatttgtgacccatacccgagcaatgttcacacacaattggtaaccattcataaatcacaggtaaagtaatgtcttggtttagctcattagtaaatgaaactgaatcgggaaatttctggtgtacccaaacttctaacattacccgtgttggaagttattttaccaggaacttagatctactcacaagtat

SEQ ID NO: 282755 - DNA, 1048 bp, Cannabis indica
aagacgccatcatcaaaacgcttggcacaccggctgcaggagacaggagaagagctcatctcttttgctcttgagctgtccttgagtcctgagctccttcagctccgcggccagggtggccctggattctaagtttgcctggtgagtttcctctaaggacctcaccttggcagccatctcctccaaggcttccctggcctcccgaagctcccgcctggccttcgcagtggcttcaccttccgtcctcagctcctcctggtgcctggcctccagcctatctctccgcagggcctcctcccggatcattgcctccgcctgcgcttccctccgcttggcctcttcctcattagctttggcaacggcctcccggcgctcagcagcctcctgataaagccgcctctcagcagtaagatcctgaagaatcttcctgacttcgtccatgtccccaaaatcggacaggacgaaaccatggttgattatgttcttggagagacggccggcttcagcagcaagctaaagaaaaataatacaagtataagtaagaatctccgaaaaagaaaacaataaggagaaaagcaaactacaaaacacttaccacagtgagggagtggctgagatcctggacttggaagatggagttcaaggatgcacaagcagcgaaccgcttaggtgcacaccgggtaagctgggacgcaaactcgccagtcatctccgcagcaaagggagctaaggtgggcccgaggaagcgaccgaaccagtccgacagggggtccaaatttaggtcccacggattctggtattccgggttgttgagagtgttttgcatctcaactcgcaagaccctcctaagggcttccacctcagcatacccccgggagtattcgtccatggcgtagttgtgtttagctatccggagctcctgtctcgcctcatctccaggaaccggagtcagcacaatattgggaggggcagtgtgttcctccatgggagagaccccgccatcaagaccgtgggccggagtatcagctctccgtggccgtttgggctc

SEQ ID NO: 282756 - DNA, 670 bp, Cannabis indica
acgatccaatccaattcaatccgcaaaatgtgaatatccgcacttgtgcggattggattggattgaaaaatctaaaatccgcacctcaaaaagtaaccgatccaatccaatcgacacttaattatatatatttttaaaaaattataatatgtaatatatattaattaaaaaaagacacaaacttctaatttcttaatctttttttgtaatatattgagttggtgtattttatttattttgtaataaaaaacacaagaaaaataattttttttcacatagacatatacacataaagtttaaatatatatatatactagattatttattttagtaattagatacatatatattttattgtaaatctaaagataagtatatatatattgatatatgtatattagtttaatttgtatataaatagaaatcgaaatagattgttattggagattaagaaacaatagtctttttttaatttttttctatgaaatattaaataatttattattaaaaaaataaccgacccaaaataaccgatccaatccgcactattgcggattggattggatttaaactcttatgcggatcggattggatccaaaatatgaaatccgcacttagtgcggattggatgttgtttgaccaaaaaagtgcagattggatcggatgaaca

SEQ ID NO: 282757 - DNA, 1036 bp, Cannabis indica
aactcatcttcttcagccatttctggctcaatggtttcccggaccatcagtacgggcaggtgggttgcaacattgtaacattgccttgcctccccctgatttcctctcaccgtccctattccagcttcctgggtagggaactttaagcacaggtgccgaatggatgtgactgcgccaaagtctaccagggccggtcggccgaggatcgcgttgtaagcggtcgggcagtccaccaccacaaaagtgcagtacttgaatgtgctctggggggtgtccgggcacaaggtgactggaagtctcacttttcccattgggataagcgtcgttccattaaaccccgtgagttgggaaccactgggtgagaggtctcggtccgttaggcctattgcagtgaaggcctccttgaagagtagattcacggaacttccgttgtcaatcaagactctggccaccactttattagcgatgggggtctcgatgaccaacggatcatggtgagggaagcgcaccgtcttggcgtcttcttccgtgaacgtgatgggttgatccatcagccggggcctttgagctgggagttgagtaacctcccaaacctcattgtgctttacggcccccgcataccgctttagttctttgcgggtggttcctccaatatggggtcctccggagatcatggctaccctcccgttgggtctgggcggcagaccggggatgtgctgggcatcgcccgcgggagcaactggagccaatactcctgctgcaccccccggtgttccctggggcacaacccctgtcgcctggcccggattgaggtgaggcagccgattcttgatccactcatagaggtggcccaatcggatcaggttttcaatctcgtctttgagattcttgcattcgttggtgctatgaccaatgtcgttgtggtactcgcatcttttgcttggatccctccgggagctatccttgtacaaaggaggtggtctccggtagtgcgtattttgcctagtagcaaagtacacacgctcttgggagtccg

SEQ ID NO: 282758 - DNA, 531 bp, Cannabis indica
gatccaaaacgaaaacctctcgctccaaaactctttgtaacctgaccagtacttcgtgaagggcgatttggatgatgaatcttccgccatattcttctttgcttctcaatcaactcacaatctctccaactatttccctcgactactctgcctctctattccccctctcaatcaaaacccgatatcaatagtaaaccttttctttattcaaaaaattttaaaaaaaaaaaaaaagaaccttttctattacattgagccggaaaatatgcacttaaaaaaaaaaaaaagaaaattacattttaagggttcttatgacaaagatcacacatttaagttgaaaaatttgagaatatatgcttaaaaataaatagtacactaaaaatatgctagcatattttacattatgcaaaatatacttaaaccatttttcccttacaattttacccccaaacaaacaaaaataaaaacaaaattcataacactttctctctctctctctcattctctctctctctgtctctctctctctct

SEQ ID NO: 282759 - DNA, 299 bp, Cannabis indica
ttcgctttccgaagaggaggccgctccaatagagctaggcccgatgtcttctgtggacatcgaaaagatggtgcaagaactcgcagaacctgggaccatcgatattcgagacagcgagtccacggtgtcggcacgcgactaccttatccactcgaggcatgctcctgacatcgaggtcgaggagatggacgatgaatggacgactccagttcgcgagtcaggtgaggaagaggaggaggcggaggggagtgggacagattcggttgacgattcccagctgaatgaacccttctcgtgtg

SEQ ID NO: 282760 - DNA, 389 bp, Cannabis indica
ctaattttcttacagctctctaaacttataatattttattggttgccgaaaacctcggtcaacattttggtgctttcattgagagctgaagaaagcttctgcaaaaatacacttcactttacaaaaatggtggagactagaagtactcgtcaacctcgcccactagaagatgctcaagatccaaatgaggaggatgtagcctcaagagcagctgagggttctgaggaagaagaaggaattcctgatgatgactacgagggaaacctcgatgagtatgcctacgacgaaggtagctactcagagttggtgcttctaaggcaaaaagctatcgatcacgaagccgagatcgaagcccagaaagcacaaaaccaaaaaatgcaagaagtgat

SEQ ID NO: 282761 - DNA, 630 bp, Cannabis indica
acccttgtagactaacacgaatttcccttgtactcttcaagtacttcaagatatgcttagcagcattccaatgttcctgtcctggatttgtctgatacctgctcacaattcctactgcataacagatgtcacgtctagtgcataacataacatacattagactcccaactgcagaagcataaggaacccttctcatatcctccatatcttgaggatcagtaggacactataccttagatagacggataccaaatctagaagccatggttgcccctttggtgttggtcattgagaatctctctaacaccttatctatgtaagttgtttgagagagagcaaggcatctaatcttccagtttctgataatctgaatatcgagaacataggcagcttcacccaaatctttcattttgaattgagtgtctagccattccttgatgtcagtcattttcttgatattgttgccaataatcaaaatatcgtcaacataaaggaccaggaagactaccacttggttttccttaagttggtaaacacaaggttcatcttcattctgaagaacttacttccattggatataggcctattaactctttgcagagaatgatcttttcaaaaccactatgaaca

SEQ ID NO: 282762 - DNA, 102 bp, Cannabis indica
tttcatgaaagtaaatcattaccatggctctggtgccagtggttagaaatattttaccaggatctagatttactaccatgtatgttttattaacaacctaat

SEQ ID NO: 282763 - DNA, 709 bp, Cannabis indica
atatggacaggtgaaaaacaaactattgagaaaagatttcttgaccaagtaacatcgttgatcaacttgttatcttctattactggatagtaagattaaacttctttacctgtggaccagaagactgtgaactattctccatctcagctcataaacaaagcttctaataaactgcaccaaacacaaaaattaaaaataaataaatcacatatattactatataaacaactactctgaattcaaaatcaacttgaaaagacttagtataagcatattagaactttcaatttcccagtggacgactagacaagtgttgggggaaaacctaagaaaaggaggtacgaatacaaaattttaacgtctccgtgcatttatttcagaaaatacttacacaatcggatgaaacctgtgatgtgcaatgcgttgcgcgagggattttgggtgaggaagacgaagcaagtgaagtggagaactggagatcgatgtgtgtgggtctagggtttaagaaggttgcttttagtaaacatgaataagaaatctggggaaaaaatagttgtgaaattgtatttggaccataaagttatctctaatatttaaaaaaaaaaacaattagcatttttttcccagaacacatgtaccacaatgtcttctgaattttattatttatgtattaaataatgctcccatactttgatatctaccaaatcat

SEQ ID NO: 282764 - DNA, 475 bp, Cannabis indica
ctaacacaagattccttgtactctttaagtatttcagaatatacttaactgcattccaatgttcctgtcctggattagactgatacctgctcacgattccaactgcatagcagatgtcaggtctagtgcataacattgcatacattagacttccaactgcagaagcataaggaatttttgccatgtcctctatctcttgaggatcagtaggagactgttccttagatagacgaataccatatctagaaggcatgtttgccccattggtgttgttcatgttgaaaattatttaacaaggatcttagatctacacacaagtatgttgattaacaccctaaatatgaacttctaaaacgattacgaaataaacacatataaagtattagaaaccttacattgggtgcagcagaattaaatgtctccttccgttcagatctctaacccatgtatcttttctgtcacagagtattatcaa

SEQ ID NO: 282765 - DNA, 663 bp, Cannabis indica
taagaaattagttttttttcttgcagaatcttagtgactcacgaaatgtaagaattcgtgcttatagagatgtaagattagagtgctttatgaagcactaacattatggaattatggtaatgcgtgaattagagtgctttatgaagaattggaattatggaattatggtaatgtaaagcccgcttagttaatttggaaattagcagttatttatgttaatcaggaaattatttatagctatttaaataatttatcatggatatttatggaattcagatatgcatatttatgtcatcagtagtttttatatttcgcatttccggtgtccggtattttggaacgcggcgtttggctcagtagaaatcacaacttagtatgttagattttggggacgggttttagacattgggaatgtcgggaatggccgggaatttagaatgtcccaaaaatacccctttagtatggttttagtgattttatggtggaggggcaaaatggtctttttgccccattagtgttttgttttatgtgatttattaaatggaaaattaggtatttattttattaaatattggctgaaatgagttaattaaatggttttattaggttggtattaaatgactttcttttattttacaacacttagaaaaaaattccaaaaaa

SEQ ID NO: 282766 - DNA, 722 bp, Cannabis indica
tgttaggaagcatgttagtagcctgatagtagaataggcgcatgttttaatttccaaataagcggcattagtaagttctctttgatcatgatctgaccagactagctcatggttacgcaggctgttcagattagatggacgccaggtgaaatacaaggagccagggcaactcggttggatcaaatgaaggtcagagagctcagtttcccccaaatgttcggggccgaggtagaggtcccaggggccgggcacgcggtcggggtgatgctaacccgccacaggttgcccaggctgcccaagctgctcaggatgcccataattgggaaaacaggtttgcagaaaatgcaaactagaatcaatgaacaagaagaagtgattcgacagttaagacaacagggtgctcctgcagtgcctgttctagaaataccaatggcacctgcccctgctgtacaagccgaaccggtggttggaacgaaccggatggaacccctgtatgaaaggttctgaaagcaggcacctccagtcttcctgcgaggtccagatgttatgaaagctgagcaatggctgttgggattttatgccctaaataaaaccgattacaatctgatctaatttttcaacaataaaaagattagaaatcatttatgcttacatgttatattcatgtttatgatttaatttatatatatatatatacacaaaatctgttaagtccagaacat

SEQ ID NO: 282767 - DNA, 728 bp, Cannabis indica
tattcaaggatacaattttcgaaaatgcatgttaaaataaaaaattaatcctggaaaaattattctaatttaatgttggcccaaaattaattaataaaattaatttacaacaaaaaatataattttcctatttaattaaatatataagaaaaatttcaaatatttaagtatgatgatgaaaatcaacttaaatattaattttctatttaattaaatacactagaaaaatacttcaagcaaaaatatcatctatctagattttcctttgactaattaattcaatttctaataatatactttaattcaatttattttaaattaatcaataaatgaaaaaaaaaaatcattgatttaagttggtccaagaattaattaaaataaataattaatttacaacttaatctatttttcaagataaaattcaaaattccagcattatgaaatgcaatttcgaaaattgattaataaaaaaatatattttacttcatttattttaattaatcattaaatgaaaaaatcattgatttaagttggtccaaaattaaaataaataatttacaactttaatctatttttcaaataaaattcgaaattccagcatttaagaaatgcaatttcgaaatttgattaataaaataaaaaaaaaaataattttgaaaaattatttaaaatttagttgaaaaaaataaaattttacaactaaaaataaattttacttatttaattaa

SEQ ID NO: 282768 - DNA, 1015 bp, Cannabis indica
cattgaacatgctgttgatgtgttttcccagaagcatgccactgtgcatgcttcaagcatattactatgaatgtcgttcacaagtttaagactgatgtatgcaaccagcaaatatggcttgcagcttacgcatggaacaagacggaatgtgatatgcattttgaggtgctgaaacagatggaccctgccattgctacatacgtcgagcaaatagggtttgaaaagtgggctcgtccttattttcaggcgatcggtacaacataatgacaagcaacgctgccgaaagcttcaacaaggtgacagaagaattcagaaaatatttagtaactattttggttgacttcatcaggttcacacttcaaaattggtttgcttctcgtctcgaaaaggctagtaagtgcgctactcctttggctactacttttgaaaatgatttaaaggatcaacacaaagatggtatgttcaggagtgtccttcgtaatggtgcccaattgttcaacgttggtacgagtcctcaaggtgagagaggtggtgatgtgaacttagtggagagaacatgcacttgcggacttttccaaacgctcaaaatcccttgtccccatgcatgtgccgcagcagttagtcagaatgtgagcgtgtacacactttgctctccatattacactaaagaaacgtggaagaagatctacgatgccacaattaatattgttggcgaggaggatgagtgggtactaccggaacatatcaagaacataagaatcggggtaccagtggagaaaaaaccagtaggtcggcctaggaagagcaatgcaggtagaagaccgacgaagcgtcgaccgtctagtggtcaggtggtagtggaacctcgtcattgttcgctatgtcacggttcagggcacaacagagctacatgcaaagctcgagtttgaactgtttctctaatatttaaatgaatatgtgttgtattgctggttgttgtttaacaggactatcgcatgaatatttaacaatatgc

SEQ ID NO: 282769 - DNA, 456 bp, Cannabis indica
tccaaggtcttcaacaaactgatatcagtgtcccgtttaggcgagagtcaaagataccatccattgaatagagttgtcagctcatctaaatgataaacattctagcaaccttttattcgatcaagatcagaatccagcgttgtcccgtttaggcgagagtcaaggccattctatcttatgagcttccaccattgtttcatacttttgtaagccttattaaaagtcgccaccattagggtgatccatactaaaataaacacttacaaatagtacttatctttcgagattctacggcgttaaattgctaatgaacgttcctccattagggaggattactcactaaaacaataactatgtagaaccaacaatggagatcgaatatcctaataataaaagctcattatttaaaatgtattttcttctaatatttattttaatcaatttattttaaatata

SEQ ID NO: 282770 - DNA, 581 bp, Cannabis indica
gcatcttgatacgaatttccacttcttttcattccgctccaccagaagtaaggtttaagatcttgatacatcttggtggtgcagggatgcaaggaatatgaagtggtatgagtctcttcgagaatttcatttctaagttccacagtattaggaacacagactctggtcttaaacaacaaaattccactgtctgacactataaagtctttagcttgaccagccgaaacctcttctctcacttttactaactctggatcagttagctaatcagttttaacacgttctaacagatcagattgcaacgtcaagttatgaagtttgcctacaacaaactcgatgcttgatctgaccatattttctgctaactgagatgaaatttgaaccatgctagctacctgcccgggaccctttctgctcagggcatcatccactacattgtctttcccaggatgataaaggatctcacaatcataatccttaaccaactctaaccaacgcatctgtctcatattcaaatctttttgagtaaagaaatatttcagacttttatggtcagtgtaaatttcacacctctctccata

SEQ ID NO: 282771 - DNA, 670 bp, Cannabis indica
tgaaccatgctagctacctgcccgggaccctttctgctcagggcatcatccactacattgtctttcccaggatgataaaggatctcacaatcataatccttaaccaactctaaccaacgcatctgtctcatattcaaatctttttgagtaaagaaatatttcagacttttatggtcagtgtaaatttcacacctctctccatagagatagtgccgccaaatccttaaagcaaacactactgcggcaagttctaggtcatgagtcgggtatcgctgttcataatctttcaactgacggaggcataggtaataacccgattggcctgcatcagaacgcaccccagaccatgtctggattcatcacagtaaactacaaactcactttgtcagaaggcagagctaacactagagttgtaattaacctttgcttcagctcttgaaaacttgattgacacttatctgtccatacaaaatgctgattctttttggtgagttcgattaagggtgttgacattttagaaaacccttcaacgaaccgacgatagtagccagccagacccaagaaacttctaacttctgtcactgtcttcggtcttcaacaatccctgacggattctatctttcccggatacactttgatcccatctttactaactatgtgtcgaagaaaa

SEQ ID NO: 282772 - DNA, 480 bp, Cannabis indica
catgtttgtctactaaaaaggtcactctatggtttgaaacagtctcctagacaatggtacaaaaggtttgatgactatgtgatcaaatctgggtttaagagaagtgtttttgatagctgtgtgtatgtcaagaatgagaagcatcctgtgttcctacttctctatgttgatgacatgctcatagctagcaaaagctcaagtgaaatagacaaagttaagagggtgttgcacaaggaatttgagatgaaagaccttggccctgctagaagaattttgggcattgaaattgagagagacagaaagaaaagaaccctgaaactgtctcaaagcagctacactactaaaattatagaaaaatttaggtttactgatgtgaaaccagtgggcacacccctgtcacaacaattcagactctcttgctcacaatcaccaacaacagaagatgaaaacacctacatggaatccattccatacaccagt

SEQ ID NO: 282773 - DNA, 1032 bp, Cannabis indica
agtcttgtaaagactcaccaggttcttgtttgatgttggccaaagtcgtatagggtggtctatacgtcattgtggcctggaaatgcgtgaggaataagtcgacgaaggtttcccacgtcgatattgatgcctcaggtaattgggtgaaccaatcatgagcattttcctcgagtgttgccgcaagaatgcggcacttcgcgagttgtggtacctggtctacttccattatagtattgaatttttctaaatagtctatcgggttagaagtacctttatacttgagggattcggataaacgaaaccctttcggaagttgagcctgccgcacctctgcagtaaaaggcgaggtgccatgcagcttatatataggcttgcgctgctgctcgagcatctttaaagcttgcagaagcatgctttggtcgattcctcctgtcgcaggggctggagtcgctgcgactgcggggctcgcaactactgcggcaaggtttgctgggatattaatcccagtggtcgcgatcggcgcgataggcgggttattatctgcgttgacaccctgatcgcccgcctggggatcacggagtgtctcagtattatgtgggccgcgggagcgtgccctgaaaactgcgttgagatgatcacgtagatcacctcggtgtacttgataacgtcctccctgttgtgtctgtacagagccggaccttgtatacctgctcggagtgcgtccatgcgatgacgaagaggctgactctgcgtcgttgtctctcgatggacgactgcgaggattacggcgctcaggatcttcgtcaatttgtgcgctctggttaggaaaccttgcggattgatctcttgacatcggatgattcaagtccagagcttcagggttagttcttcgttccctgcgtacacggttagtatgacgtctagaagttgttacctgagggttatcgttgcgaatggcggaactcgaggagggcgtcgagctcgactctgtccatctacctcggcttgtagtgcccgcagttgatcctgaat

SEQ ID NO: 282774 - DNA, 627 bp, Cannabis indica
cgtgtagcagtcccaacacgcttcctcccatgcggcatttaatgcgacttgattgctcaggagaaacctgacacctcgcggagatgccttagcgttatatgagcttccgggagcatattgagttccatgtgccttctccgggacctacgtccgggacgttaccttatggcataaagacttagcaaatattgtgaattgcttgatccacgtgtccctgtctgattggtccacgtatattgggcaaaattaggggcaacatttaccccccaagccttgtttatttgaaaaatgaaacaaggcttgttcaagtgcctccggttgactcctcggtttcctggcacgagctttgagcgcgtgagggtgtatttaatgatggcttttaatgcagcgattcactttttgcaggggtcgattcgtttcacgcccattgattgatacggcgcattaatggtgtcagacggatactcaagcgtttccaccgcctttattgtaaatcaatctggtccgttgatctttgagcatttgaatcgtgcgcttccctcaccgttcgattggtaggtgatgacgcctgttcctcatgcatttttgcctataaaagccaccaccttttcttcatttcggttactt

SEQ ID NO: 282775 - DNA, 553 bp, Cannabis indica
gttagcatgatgaaaccaggtctctttctcttgatttcgattccaagaattttcttggcttctcccatatccttcatctcaaattcacctttgagttggcactttaactcactgattttgtgtttatccttgcctactattagcatgtcatcaacatacaatagaaggtaggtttctttgtcaaaataaacacatggatcatatttgctcttggtgaattttatccttgacatgaacttgtcaaatctgatattccattgtctaggtgcttgctttaggccatagagggatttgtgtagcaagcatacctggttaggattaccattgtcaaatccctcaggttgcttcatgtaaattctctcatccaaagtgccatgtaagaaagctgtcctcacatccatttgatctatttctagatcttgagcagcagcttttgccataatggctctaatggaagcttgtttcaccacaggtgcaaatatatcattgaaatcgacaccttctctctgagtgaatccctttgccacaagccttgccttgaatcttactgaat

SEQ ID NO: 282776 - DNA, 717 bp, Cannabis indica
ggaaggtactttacccatgatcccaaagtcaagcacacatgcccgtagcatgtcttctaatatctgtatagtcctctcagattgcccatccgtctgaggatgaaatgccgtgctgaactttaactcagtacccatagctcgatgtagattctcccagaatcttgatgtaaacttcagatatctatctgaaataatgtactttgggacaccatgaagacgaacaatttctctgacatataactcagcatactggtcaatggagaaatttgtccgaacaggtaagaagtgagcagactttgtaaacctgtccactatgacccacatagagtcaaattgtcccgtggttctaggcatacctaccacgaagtccatagcaatatcttcccatttccactctggtatgttcagtggctgcagtaaccctgcaggtttctgatgctcagccttaacttgctgacaggtaagacatcttgcaacatactcagcaatgtcattcttcatgcctggccaccaaaacatggcctttaggtcttgatacatttttgttgaccctggatgaactgaataaggagtcgtgcgagactcatccatgatctctttcttgatgttctcatccataggcacacaaactcgattcccaaatctcaacattcccgtttcatccactaaaaaaatcactagctttcccagccaaaaccctatctcgggtttttacca

SEQ ID NO: 282777 - DNA, 703 bp, Cannabis indica
atatatatttatatatcattctatatatcttacgatttttttttcttttttttttttgtttttttaaaaaagattattttatatacattttattctcacactatttcttcttccttcttcttttttctttttatttttttcttttgttttttaatgaaaattctccatctatctctaatcctatttttttttttctcttttttcttttatttgctttaagtttaagtaactattaatttttgatgtatgcatgataccttgacagtaacatcaataaataacatcaagatctcgattttcaatatttttccataatttggagacatacaaacctttttctctttatgttgacaacttcaccgtcatcgatatcttcacattattcataatttactcattagtatgaattatttttagtaattttttctcataaaaatattttaaatcaaactttatatatatatgtataaatgtatatatagatatgttttttctgaaaaagataattttagtttatgattaataaccttaggttgatattgtgttttaattatataattataattatgatttatttaaatatatatataaggaataattatgacttgttttaattatatatatatatgaggatatgattttgtcccgtgatgtactttcacggaatgtatttcgtcgtacattagatgagtctcagagtaca

SEQ ID NO: 282778 - DNA, 717 bp, Cannabis indica
ttttgttgctaagtctgtccatgttgctatagaatttgatggcaaggagatcaaccaactcttggctcgctctcttaatgagaatggaaatagtctcaaacggatggcatcatcactaaccccattgactttgaaagtctgacataactccatgaagtttgatagatgcagattggggtcttcagaagggagtccaccaaactggactgaagactgcaccatttgtagtatggcaggcttgatttcgaagttgttagcatccactgtcggtggcctaatgcatgactgaacccccgtaagagttgggagaatgtaatctctcaagctacgaccattagcttgatcttcaacggcaccgccattattaccgttattacctccattattcgcagcattagcgttgtcagccatgatttctggtgtttcagcaggtgctgaaactctctcttgccttttgttcctcctgtttctcctacaagttttctcgatttcagggtcgacgggtaatacaactgcttgcccttggcggcgcatgcactcaagatacctgaaatagataaaagcagctttgcaagagacaggttagaaattcagcaagagaaataaaccaaagtagaagttagtataattttatgtaatatcaatcttaaacaattcccggcaacggcccaaaactgtgcgaaatataacactacgcaagtacacgcaatcaagtag

SEQ ID NO: 282779 - DNA, 535 bp, Cannabis indica
acataaaataatttgaagaaaaaattttaaaaaatatatcaataataatttttaaaaattatttaagtttatatttttttaattatggggtgtatttatcattctatggggtgtaaatagagctcccctatttaaaatattaaattacggtaataccctttaacattttaaaaacaaataaatggccccttggaagcttgaaggattatttatttagaaaaatagatttaaacatattactttttgttggtagcttagattttagagaagatttatattagtgaagtatggccgtactgagagtgacctttagcaatttacaaagtcaacaaatgagaccaatggagaaaaatagaatggccatattcaacaaaaccttaactattatctaaatgtcaccatttggaatgacttggctttaccattgctttctttggtttcaaatctcaatgatattccttctattaattacatattgaaatttaatttctttccttagaaaaatttatataatagacaaaacattttaaaaaaa

SEQ ID NO: 282780 - DNA, 573 bp, Cannabis indica
ttactccatattccttctcagaaatagtttcagtaaaactatcataactccctcagttttaatccatttttagtgatctttatatcattggaaagataattgaatttcctataatttttatgaaggaaactttcactgaattcgtgtagttattggtcaaaaatagtattctttctgatgtactgtaagagtgcgaattttaatgttagggccttgacccatgtgttattataggtagtagtgacgagataacaagtttaagcagcgggatttgaggtaaggaaattagatagttttgtttgtgtttatttgcataaatttaaattctttatgtattggaatatggtttatgctttgttattatgaatatgtatgtggtactgagaatgtgtggtatggacacaatatgagtttatgaattgatatattgattagggttgttttgacttgtatatgttgtatgttgcattcatatattgtgtgttgtatgctgcaagttgtatgctaacgtctcaggtaaagtgagggaccatggtggggtatgatacggggtaaggccgttgaatgtagaga

SEQ ID NO: 282781 - DNA, 589 bp, Cannabis indica
taacttacaaacagcatttgggggaatttgtcccttgggtttatacccttttggtagtgtcatatagacagtttcatttaaatcgccatgaagaaaggcattgtttatatcaagttggtacagagaccaattgttaatggccgcaatggcaagcataagttttaaggtattaaactttgcaacaggggcaaaagtgtgaagataatcaataccttgtttttggttgaagcctttggcaactaatcgagctttacatcgatcaacagagccatcagcgttgtattttattttgtatacccatttacagccaatggcatagtgaccatcagggagagtcacaactatccaagtgtcattggcttcaagagcatcagtttcagtgtccatagcttttcgccatataggatcctttgctgccattttgtagctggtgggttctaccattgtatgggcagcgagagctgctgcacgaaagggctgcgtcaacctattgtaagacaaatatttattgatagggtgagcagtagaagaagcagtagtagtattgcaaatataatcagaaagacgtttcggtttagataaaagtctt

SEQ ID NO: 282782 - DNA, 622 bp, Cannabis indica
agtcatcattggaggcccgcacagagctgtagattcgggaaaaactcaggagaggtatgcccgaacagcacagcacgagcaagaagaagtgatcctttccgtagaagaaaggaagcctaaaatcccacggacaggaaagcccaccatagcattcaacgacgaagatgttgtcaaaatcaagttttcgcacaacgacccgttggtcatagaggtccagatagccaacaagatggtggccagaaccatgatagataatggagccgcttccaacatcttattcaagaccgcctacgaaaagatggggctccatcttaaagatctaaccccctgtctcttgcctgtatatggtttctccggtcaaggagtcgcacctctagggaaaattcgcctacccctcactgttggacaagctccgacaagcatgactataatggcacaatttctggtattagatgttccttcagcctttaacgtcatgctaggccgaccagctttgtatgacttaaaagttgttacgtcgatattccattcatgcctgaagttcccaacaaagagtgggtagggcgtctgagacgaaatcagcagatttctcaggaatgttataaccttgcggtggccaagg

SEQ ID NO: 282783 - DNA, 539 bp, Cannabis indica
aaagtggcgaaattgtaactagtaaagcccatgtatggctggccactatgtgtaatttttgcccattattttattcttttttaatctatataattcaaacctaaactctagttgaaataatataaaaagaacataatgctctcattctcatccaacactttcaacctgccaaatattctagtttcttactctcttagacaactagtagatgagagacaccttctatagagattttgaacctccttcattgttcttcataatcgagctatagtgatagagtgtcatgcccacacatagcaagtcaagtacttaatcatagtgcggaagacggtggtaaccaacccaaagaagagaaagagattcgggctcaaatcttgttatcactctgtgatagaaaggaacaagggttagagatctaagtaaataaatgagtcatattattccactacaatcaatgtaaggttttctaaactcttatgtgtttaatttcattgtattaaaaaattcatatttaggatgttaatgaaacatacttgtta

SEQ ID NO: 282784 - DNA, 551 bp, Cannabis indica
gaaccatgatagataatggagccgcttccaacatcttattcaagaccgcctacgaaaagatggggctccatcttaaagatctaaccccctgtctcttgcctgtatatggtttctccggtcaaggagtcgcacctctagggaaaattcgcctacccctcactgttggacaagctccgacaagcatgactataatggcacaatttctggtattagatgttccttcagcctttaacgtcatgctaggccgaccagctttgtatgacttaaaagttgttacgtcgatattccattcatgcctgaagttcccaacaaagagtggggtagggcgtctgagacgaaatcagcagatttctcaggaatgttataaccttgcggtggccaaggctaagaaggaagtatcctccagccagagcacaaccaagggaaaaaacatttctaagtagggaacttcccaaggcggggatgaagacgtggatcctcgactttgggacccaagcagcaatgttggaccggtggaagaactagaagagattgagatcgatccaaatatc

SEQ ID NO: 282785 - DNA, 651 bp, Cannabis indica
aaccttaaaatatttttattccacattgttgaccgaggttttcggcaaccagtaaaataatataagattagagaactgtaagaaattaagagaaggatttttacgtggtttgggcgttaatgagccttagtccacgagtcagtgtatttatgagtgtattaaatacagagaatgttcttggtgagtatttactctttttgctcttatgcaatcccaaaattctcgaccccatttaatgagctttgagggggtatttatagtgtttttggtggggtgattcccaggattattgtacatgtgtctctgtaaatatccataaagttgggtattcccaatgaatataccatgggtaatgcatggtcaaatccctaggtgctgtagggcttttatgtggaatgtccttattgtcttttgactgacgtgactcttcacagtgtagccgtcaatagacttaaatgatcattacttcgcaggtgcaaattgggggttgtgccgtcagactttattgcgtgtagcagtcccaacacgtttcctcccatgcggcattaaatgcgaaatgactgctcaggggaagcctgacacctcgcggagatgctttgatgttacttaggcttccgggagcatagggggctccgtatgccttctccggga

SEQ ID NO: 282786 - DNA, 558 bp, Cannabis indica
aaataattggtttgattactgattaaattatgagaatcaatataaacataaatatttttatatacacttaagtggattctgaacccttaataatatcccaaaatatttctgaaaatatctgttactgtcatttttatcatttaaacactttattttattttgttaccaaaaacctcaccattttcggaactaggttagagttttattagcttagattaaataagtattttcttcgatttcacgcaattcccatgggttcgacctcgttcttcacaatctccatactacaataaagattcgtgcgcttgcgagttgataaatgtaaaacgtaccattttggattacaacaaggacgctctggtctagtgggacatggtgtctcagattcacgacgtcaccaccatgacctgggaaaggtttcaggaactcttcaacgccaagtattataatgaggcggtcagaagcgccaagaggaaagagttttctcacctaacccagcgtgagaatatgagcgtgaccgagtatactactcagttcgaccggttggcgaggttagcc

SEQ ID NO: 282787 - DNA, 1042 bp, Cannabis indica
aagagtaagaaatgtagtcatttttgctttaatataatccccttttccataagtaattatcatatgtttatattatgtgcatacttctgcaccaaacatgacagtgtaatacaaaatacctaactgaacataaattagggttaacagttaattgtttctgtaattcaacaccatcaagtgcactaattcaaaatacaacatcttatgcactaattgtttttgcatacctaatacattactaaggactaagtcaaaataataattcaaaatactacttaaaagtggtgcatcctatgcattagaccctcctgcattgtttgttggagcagatggcccagctccatcaccttgtgcagccttcctagctttttccttttccattcttttccttctctttagagtttccttggttggattttggatgggtggcctgcctccttttttctttggaccctaaaaaacagaagtattgaatcattattggcaagtaaaaactaataccaaaaccaacaaagtaaggtttagacaaattcatacctgtgcctgaggtgctgcatcattcgggcaatacctcctattatgtccaggttgcctgcattttccacaatgcataattgcaccagttcttctggcagttgaggtagctggaggtggtggctcatcaacacttcttctctttttttcttgggcctgcctggcaaaatgttttctccaggaggaaggattgggttttgacctgtttttggccacttgtcaggacttgggattgggaaaactgtgggtgcataactcttttcgaaagcctctttgctgtaataagggtgtacatagagatgggaattatggttgcacatccaaattgcagctaaggcatgtccacaaggtatgcctgttaactgaaacttcctacaggtgcatgttttcttctctaagtccacagtgttgcaacctcctggattcgtctgaacttgaaacatagttgcatttgctcttgacactccacaccgtttagcaacttctgtttcctttgcaataatcttga

SEQ ID NO: 282788 - DNA, 615 bp, Cannabis indica
taaagtcaagtggaattgggcgcacttacggaggttgacactaacgagtttgcacatcattgaaagggagttcttctttaaatcttctttattaattttaaacttgctcacacatatttgagaattttgtgcatacaatgttttgggaaacttaaatatttttttcttttattttattttgcttgtttgaaaaaaaaaaattgaggcatatgtgctttggtttggtgatttttccacattctaatacatgattgatagtgtgcatagcttgttgaaaaatgtaaatattgtttgagcttgtgactaattcttgtgctagtttcattttgattgagatatgtctaattttgagcacgaatgccttgatcattttattgtgtgtgatttggtgaaagtttgtgtaaatatatgattttgtgatctcacaagtcttagaattttgtttgattctctcttgaggcgaaatcctagacaatgcttaaccaaagacatgatttaggccatttttggaccgtttgagcctttcgagccaaccatagtattatttcatccctagtcaccccctttgagcataattgatccctttattttttttttaccacatgtaagcctagc

SEQ ID NO: 282789 - DNA, 592 bp, Cannabis indica
attgacaatggataatcataacgggtctatatcgtggtatagagcattctatataattgagagtgctattcaattccaaagctcgattatataggcccatgatcccctcactagttgagataacaattcttgcagactcagtcaattgattttaattaatcaattacaatttgtaaaattagactatgtcttatttagaaattttcactaagcaagggcttaattgagaagaaaatagattttggggtcaatttattaattatgagactttgtatgatctaattgataaatacaataaataataattttatttgtataattaattataatcatcaataaataagtttggtatttatatgattgaattggaaaataatggtattattgtaaagaagaataaaatggtttaaactaaagtaggcgaaaattagtaactagaaagtaggtcgattttaagtaggtcgaccgtaacgtgtattttccctaactattttattcttttttaattgtcataaaattactagccctaacgcctacgttgaaatagtacctaaggaacatgatgctctcatctcatctaactctttcaacc

SEQ ID NO: 282790 - DNA, 554 bp, Cannabis indica
gttttcttttgtttttcttctcaccttaaagggtccacttgttttatttgatacaccttagagcgacatgtaatgcaatttttcatgtacatcttaggtgtctactactcaacatattgtcaccttttataattattggttttattttcttccttcgatctccaccaatcattataccaatccccaattcatcatttccatgcttctattattattattattattattattattattattattattattattattattatatattctatacggcttggcaattagccttattcatagaaaaatagtaacttctttttgttttttttagtcaattgaaaaatagtaacttatcactacatgtactaagacgaagaggctatatgtcgcttagtagaggtgttcacaaagtatccgatccaatccaatctgcacgatccaatccaatctaatccgcaaaatgcggatatccgcacttgtgcggattggattggattgaaaaattaaaaatccgcacttgtgcggattggatgtgtttgacctcaaaaagtaaccga

SEQ ID NO: 282791 - DNA, 559 bp, Cannabis indica
ccaatgccacccaatcacagtactcaccacctttcccctcaagaccatactacataaaccagagttttctggcagattgacttagtgggcagtggagctcagcgaatatgacatctcctacaagccacgaaccgcctgaaaatctcaggtattagctgatttcattgtagactttacacctaactctcaagtgcaggcggaaaaagaactttgccaccttacagagggatagaaatggcacatgggaattacatgtagacggttcaagcaatctaagaggaagaggattaggacttgttctaacctcacccaaaggcgagaagatcgagcaagcaatcagatgtgggtttaaagatacaaacaatgaggcagagtatgaggctatgattgctagactcggactggccaaagaaatgggagccaaaagaatcaacgtctttagcgattcacaacttgtagtcaaccaaatgcaaggtagctatcaggcccgagatagcaaaatgacagcttatcttgagaaaacaaaagagttgaaatcgaccttcgacgagttcacagt

SEQ ID NO: 282792 - DNA, 494 bp, Cannabis indica
gcggggcggtataaaaaataaataagcctgagagcaggcggtaagcttgaggaatgagttggtatggcgcaaggccgacaaatacaaggaaattaacaaaataatcttggagcgggagcatggcaccggccatcaaatgagtctgactccaagccccgaagccgtcatagttatgattaggcgtctccgagtcgcgaggaggccggtgataggtccctgaagtggagggtttgatcccagcaacttctataatattctccagctggtgaggacaagttagggtggatcgaagctcagccgcttcccacccggtcgctcgggatttgtacccctcctgggcaacaggccccagggaaacctcctccaacgtggccatgcttttcccactcttcttcgaagatttcgaaccagaagcagacattttgtgttctgtgaaaaacaaaagggaaaaagaaaattccagcagttaggtcccataccaaaccctaagtcaa

SEQ ID NO: 282793 - DNA, 695 bp, Cannabis indica
catgtgtcgggatcccaaaaatattttacaaaacactattacaagtctgtttccactggccgacctaagcggcaaaatagaattacaaaatgcatcactggtagaccccaacccacttggtctagtgtggcccgaacatgtacatacatcgcttagctctcgaactcatggctaatcagagtcagatttaccctttcctgcacagtagagcacccgtgagccaagcccagtaagacagtataattaccaataatcataattaacacatcacataaatattaatgccatctcacatttgtctgtatgacacagacccgcgtgttatatttacacgcctatttatgtctatgtggtatagacctacgtgttacgctcacgcgtctatttatgtctatgtggcatagacctacgtgttacgctcacacgtctatttatgtctatgtggcatagacctacgtgttacgctcagacatctatttacaataaggccttagaacagtgcatctcggttctaattaccgagcctaattcggttatgccttgctcgcataagcctatttatatatatacgtaatccatacattatgttcttacggtagtttatcctggtgatatataccaggtctaacccagttaagtcttattcacataactcttaatataaatgcatgcccacaatttatactataacatat

SEQ ID NO: 282794 - DNA, 507 bp, Cannabis indica
ccatatcttttcaagtactgccccgaccaaattatgagatgttgcattccagattatgaacttttgccacaacgaagcatgtggtggtcatttttctatgaaaaagactgctgcaaaaatcttacagtgtggtctatactggcccactttgttcaaagacactaacaatttctgtcgatcttgtgaaaggtgccagaaactaggtgcgctatcccgacgacacatgatgccattgaacccaatgctcgtaatagaaatattcgactgttggggaattgattttatgggaccgttcccaccttcttctggctacctttacattctcctcgccatagactatgtctccaagtgggttgaagccgtgccatgtcgaaatgcagataacacaactgttgtgaaattcttaaaagaaaatgtgttatctcgttttggcacaccacgagctatcatcagtgatcaaggcacccatttctgcaaccactcttttgagcatttgatgcaaaagta

SEQ ID NO: 282795 - DNA, 738 bp, Cannabis indica
agctaacaccggagctgttatcaaacgttgtttcacatttatcggaccacacaaatctctgatttttcttggtcaactcggttaggggcatagagattttagaaaatccctcgaaaaaatggcgataataccctgctaaaccgagaaaacttcaaacttccgtcacagattttggcctcggccaattcttcactaactcaatcttacttggatcaaccataatcccattctttccaacaatatgccccaaaaatgatacctcagacaaccagaattcgcactttttaaactttgcatacaacttgtgatctcttattcgctgcaataccattcgaagatgatgctcgtgctcctcttctaactgagagtatacaagaatgtcatcgataaacactataacacagttatcgaggaaatccttgaataccctattcatgagatccataaaggccgcaggaggattagtcaatccgaatgacgttaccaaaaactcatagtgcccaaatctggttcgaaatgcagtctttggtatgtcctcttcccggattttgagttgatgataaccagatcgtaaatcaatcttcgaaaacactgtctttccttgaagctgatcgaacaaatcattgattttgggtaacaggtacttgttcttaatcgtcaacttatttagctcccaataatcaatacacattctgagagaaccatctttctttttcacaaacagaaccggagctcccc

SEQ ID NO: 282796 - DNA, 622 bp, Cannabis indica
gggattgaggaaaacccaaacccaaaaaaattcaagctctcctaagcatgacatcccccaagaagcataaagacgtgcagagcctaaccgaaaaagttgctgccctgagccgttttatctcccgatctacagacaagtgcattcccttcttcaacatattgaagaagtgccaaaagtttgaatggtcggacgagtgcgaggaggcattcaaaaagttgaaagaacacatggccaagcctccaatcctgtcaaaacccgttctcggagaggacctgttcctatatctggccgtctccgagcacgcggtcagcgctgccctagtccgggaagaagagaaaactcaacatcccgtgtactacgtcagcaagcgcatgataggggcggagacgaggtaccccatcatcgaaaaattagttttctgcctcctaatggcctcaagaaaattaaggtcgtacttccaagcacacccaatcaaggtactgaccaatcacccgctccggcaagtcctacaaaagccagaagcgtccggaaggctcctcaaatgggcaatggagttaagtcaatttgacttacactacataccccgcatctccataaaagggcaagccttggcggacttcat

SEQ ID NO: 282797 - DNA, 588 bp, Cannabis indica
agctgacaactctattcaaataaatggtactttgactctcacctaccgggacactgtatcagtttgttggaaaccttagaaattatttaagatgtgcctgttttgtatttacacatgtctttgttatttgttaaatgcttgataatttctgaattgtgtgtgaatttatattgaatcatgttgttttctgttattgattgtagttgtaaattttgggtaaaataagaataactttgactcttgcctaccggaacatcgttggattcttattttaatcgaaattatcctttaattattcctcttagcttattctttttgaatttgcttatatcattggatgaatggtttataaatcatttgcatataatgtcattctactttctcttaagaaattgaatggcgcaaatgactatattcccgacattctatcccgaaatgatataaatcctcgatcttaaaatctcctacttatatatgcttactttaagtaaattagactaagagttagattagtagtggtggtccaagaaagaatcataactcatgtatatttggtataaatttaagtctttgactttaaattttaga

SEQ ID NO: 282798 - DNA, 557 bp, Cannabis indica
ttctgaggaaatgtcagtggatagtcggtgcatcgcctcctcagcatatgcattgctgcatctatatgctgcatataaaggttagagaaatcagttagacaacaaaatatattaattgaacattagttgtaaagtaaagtaaaattataaaatactttacttacgtcatctgtaagccattcctgtagtgtcaacaacttccaaaagaatgatggaccgtaatcaccacttttcaaatcccgaagtcggtggttcggaatgagtccacaacaccactttcgaaaagtatccaacaattactcatccggtggcgccaggggatcaaacgacgaagaaggcctctgtttcttcttcatctccgtgtagtcacggaaccatacaggggaatttctcttcctcttccgactcttaacccttgcaggttgtgcctctatcgccaaaatttcaccctgggactcgctgtcatgtacatggataacacctacactgatgggagtagctggagctccctcataaggatcatacccgtcaggaaagacctcctcctcttgtagtgg

SEQ ID NO: 282799 - DNA, 1169 bp, Cannabis indica
tataagatgaattctatctgcataagtgaaaaaatttcgaaagggttttaatttcataaggtctcaaaaatgtacgaaaattttattttctatagtacaaatatctttacaaaatttaaaacatatatttttttaaattattcttatccgaatttttaatagtactcctaatttatctgtgttaagtttttaattcaatacacaacttgtttggtttgataatatctcctatttctattaggatatttaaattgtatgacattatgctcagtaccaataagtttagtgcctctaaaattggtaccatacttacaaatacttgatgttttcatattttatcccaaaaacaagaaagaaagcaaaatcagttacataatgataagatcactaaaacaatatccaacctaatattatagaacttgtgaattatatttttggggtgttgctcaaaaacatatgatacatttatatctttagtcttcaccgtacacataactgaaaaagataacatctttttctctaatacctatacataaggccataataataataacaatacaactatttttattttattgggttcagatttttaaattgaaatgagttttgtcatattgctcaaaaaatctccatttatccaatccccaaatatttaaaatccaaccaaatcaactaacacattccaaaaatacatacatcaaaatacccaaatcaaaacccctaaattatagtacaatgcaactaattcaatttaaacaatgcaactctttattgcaacaaactcaatcaaaataccaaatcacatattcataaataactaaaacaaaaaactcataacacacagtacattccacactaagaaccacaacacatgcacggggggagacagagaaagaaatgcaaactcccttaaacacagaaccagagacagagagatagagagagagagagagagagacaaagaaatacctcgacaaagatatgcaaactcccttcaccacctcaacctccacacctgagacaaaatgaaactattaagtacacgaaaatggaaaaaaccaccacattccataacaaaaatatttttttttctatcaatagaaatgtatgtaaagtagaacgagtaatgtataactcaccgtcgacaccccctcctaaccaactccaac

SEQ ID NO: 282800 - DNA, 521 bp, Cannabis indica
tcaaaattcaaagaaaaaaattactaattagcctaaaaataaaaaataattgtaagaaaaactacaaaaagacaaaaataattcttccttttgtctttttgcaatatgcattcttttatgatatatgatatatgatgtgttagaattaatattgtggactaatataatcataaacttaataccataaacacaatcattaactatgtgcccaatatttgttcataaccataatgagatggttgataaattaattatgtattagaggcacatgagagcaccttttatattataattggcctattaaattatagtataccataaaaggaccacttaagccctattagtgagtaaccccttagggttataagggtatgagatgtatatatatattattgatggtagagtggttttaaggttttatggtaataagaaaatagggattgctccacattgtggctctaagggtttgggttcaatcttgagaatttggttggtgattcttgttggaggcattaaagcaa

SEQ ID NO: 282801 - DNA, 507 bp, Cannabis indica
tttttgggtttgcgactgggttcaggtctgggtgtgggtttgggtccagggctaggtcccaaatccagacaccgactacgggttttgtccaagccctgggtcctgatccggatcccaatctcaggtcgcagtcttgttccatttcttgtggcgagtcacgaggtgggtcctaggttcatgttcgggtctgggtcgggtacaaggtcccggtcctagttctgtttcccaggtccctatcctgattctaggtccaggtcccagttattgtgtgggtttgggtcccgatctaggttcgggttcgaatcctagtcttgatcgggtttaggtctttgtttgacttttgatctgggttcgggtttgggtttagttcctggtccatgtcctagtcctacttcagttctagttccatttgcaaatctgagttcgagtttaggtttaagttcgagtcggagttcaagtcctggtctgagttttggttcgggtccagatttcagtctaggtccaaat

SEQ ID NO: 282802 - DNA, 457 bp, Cannabis indica
ccgatctgggctttaaacattttgtttaccaatctttggtatgtagcaccagtatttttcagactaaacgacattacttgtagtaatgtagacccatagctgttcgaaaacttgtatgttcttggtctggtagatgcattttgatttgattgtagcctgagtaagcgtccatgaagcttaatatttcatgccctgctgttgcatctacgagctgattgatccttggtagtggaaaatagtctttagggcatgctttgttgaggtctgtgaaatcaatactgactcaccgtttcttgttcaatttgggtactaatacgggattcacgacccaagctgggtagaaagcttcaattataaagttgttgttgcgtagcttttcaacttccaaccatatccgcatgtgaccaagcaaaaacatctaggtttgctctcataaattttatcaattctgatttta

SEQ ID NO: 282803 - DNA, 799 bp, Cannabis indica
gacgcttctgaaccagttacctaccaagaagccatgaggagtcctcaatctaagttatggttgaatgcaatgacagatgagtcaagttccatgtcgcgaaacaaagtatggaatttagttgtcctaccgaaaggttgcagacccattgggtgcaaatgggtttacaagatcaaatatgattcaagtgggcagccagtaaagtataaggctagacttgttgctaaaggatatagccagagagaaggtattgatttcaaagaaacattctcacctgtctctaccaaagattctttgcgaatcatcatggctatggttgctcattttgatttggaacttgaacaaatggatgtaaaaactgcctttctaaatggagatttgtatgaagatatctacatgactcaacctgttggttttgaggagcctggcaaggagcatatggtttgcaagctcaataagtctatttatggacttaaacaagcatcaagacagtggtatctcaagtttgatgcagttgtcactgcaaatggtttcatggagaataaagttgatcaatgtatatatatgaaggtcagtgggagcagcttcatcttcctggtactgtatgttgatgatattttgcttgcttctaatgataaaaatctgttgtctgagacaaaacaattgttatctgaccattttgatatgaaagaccttggtgaggcttcatatgtacttgggatacagatccttcgggatagaactaaaggtattcttcggttgtctcagagaacttacattgatcggattttgaaaagattca

SEQ ID NO: 282804 - DNA, 642 bp, Cannabis indica
agtaatggccaagctgagatttctaaccgggaaataaagacgattctggagaaaacggtgcagagatcaaggaaagattggtcaagaaagttggatgacgcattgtgggcctatagaacagcgttcaaaacgccaatcgggatgtcaccatatcggttggtgtttggaaaggcttgtcatctaccggtggagttagaacacaaagcttattgggcaatgaaaactctgaacatggatttaaaggctgctggacagaaaagattactacagctgaatgagttggaggaatttcggaacgaagcttatgaaaacgctaagatctataaggagagaactaaaaggtggcatgaccgaaatttagttaggaaggagtttcaacctaggcaacaagttctacttttcaattcaaggctgaagttgtttcctagtaaattgaagtcaaggtggtcagggccatttacagtggtcaaagtgtttccttatggagcggtggaattgaaaggtgaaggccctaatactttcgaagttaacgggcagcggttaaagctctacttgggaggccaatttgaccaagccacgtccgccatgattctggcgccactatgaagatctcggtcaacgtctagctgagcgacgataaag

SEQ ID NO: 282805 - DNA, 562 bp, Cannabis indica
gaaaaacccgatggatatgcttgtcttccttgggctggtgtggtgcttgagcttgctccttgaccccccccccccaaagacaaattaggatgattcttccatgcttgattgtaagaatttgagaatgccccattgtttctattaaaattctgatttcccatgtaacaaacggactccggattagagggacacttctcaaacacatgcccttctccacaaaacacacatgagacatcatcactttgaatgggagcagctggctgaatatttttagcgttcccaatgctcaaattcttcaaaacattcgtcatggaagccatttgagctgtcaaagccgttattgcatctacctcaaggacccccgccacttttctacttgttggagctcttgtgttggaccattggtagttgttacttgcaatggtctccaaaatctcaaatgcttcgttgtaagacttcgaaaaaatagcaccattggccgatgcatctaacaccattcgagaagctgcattcaagccattataaaaagtctccatttgtatacaatgtggaatgccatgat

SEQ ID NO: 282806 - DNA, 470 bp, Cannabis indica
cctcaaaagcgaatatgcgaaataaaaagtaatcaagtgcaaccgtcagccgtagagagagaaatattaattgtcagagcattaattagccgaaaactgaagggacgcccagtcagcttcacatcgagtcttgaacggtcatgcttgacacgtgtccccatccaaaggtagagccagctcggaataagtctacacgcaacctctgaggtcccgtacagacttggggggcaaatgttatcctaaatttggcactctgacgaggcatcacgagaatggtgacacatgggctccgtttggagcatctgctcggaacgataggccgagtaggacgcctcgctggcacatccagaatgaaatattcagcgagtcgtgattagtgatcaatacttagcgaattcaacttgacgcatcatgagtcatcagctcaattcctacaacccagggatcaacttacgtggatgtggcataca

SEQ ID NO: 282807 - DNA, 500 bp, Cannabis indica
aaattcatgctttttcccataataattcagcagctaaaacaagtttaagatcatggaaagctaccttaatctcttgctcaaacaagctccaagcttccaacaaatttttcctcacaatccaccacaaaatcaagctatttctcacaacttagattgaaaattaagagagggtttgagagaggggaaagggtcggccaagagtgagtgaaaccagaaaaaatcaattcatttcatcaaaaaatcaattttaatcaaacatagtaattaggggtcaaatgaccaaaatgcccccatggcttaatattcacacctacaccctcacaagggtaaataagtcattcatgcataaataattcacaataatttcagattatcactcatcaaataaaatgccaattaaatcaatccaatttacatttcgggcccgaacccggttcggcccgaaattcccggttgtgactataccgcgccaacctgtcagaacacacctgaaaagacaa

SEQ ID NO: 282808 - DNA, 727 bp, Cannabis indica
tgcaacataaaatgttatttatgatcttcattaataagtaaatctgattatattgaaatggattttatttagggcacaaaacccaacaggcatgtcccaaggattgcttcccacttcctcgcattgatcaactagtagatgctaccgctggtcatgaacttatgtctttcatggatgcgtattctggatataaccaaatacccatgaatgtggcggaccaggaacacacgagcttcactactgacatggggctttattgttacaatgtgatgccctttgggttgaagaatgccggtgctacctaccagcgacttgtaaataaaatgttcgcagatcaaattggagtcaatatggaagtgtatgtggacgatatgctcgtcaagtccaaactcttaaagagccacgttgacgacttggaagagtgtttctctatattgaaaagatacaacatgaaattgaacccactcaagtgctcttttggggtagcatcatgcaagttccttggctttattgttaactcaagaggtattgaggcaaaccccgagaagataaaggcactaattgacatgccttccccgaaaagaaagaaggatgtccaaagcctgacaggacgcatagttgcactcaatcgtttcgtgtccaagtccactgataggtgtttaccattcttcaacttattgcgaggaagcactaagattgaatgtacagaatgttgggttttatgccc

SEQ ID NO: 282809 - DNA, 568 bp, Cannabis indica
ccaggtacttttctttcttgcagaagtcggttggcataaatcccgaggccaacctcgccaaccgatcgaactgagtagtatattctgtcatgctcatattctctcgctaggtcaggtgagcgaactctttcctcctggcgtttctgaccgccttgctataatacttggcgttgaagagttcctggaacctttcccaggtcatggtgatgacgtcatggatctgagacaccatgtcccaccagaccagagcgtcttcttgaaactggaaggtggcacacaccactctgtcgttcccggtgacacccataaaatttagaattttggtgatcaccgttagccactgttcggccttcaccacatctggacctcccaaaaagaccggaggtgcttacttccggaaccgttcctacaaaggttccattcacttttccgctaccactacctcggcctgagcagcaggggcgggtgccactggaacttctggcaccgacactgcaggagcaccctgctgcctcaatctctgaatctctaagtcttgttcttcgattctgacttgcatttcagcaaa

SEQ ID NO: 282810 - DNA, 710 bp, Cannabis indica
ccggttttggtggcactgcaaaccggctagccggtttgcaccaggtttcccaaagtctttcatttgttgctcaattctccaccaaatgcaatgaaaccttccagagtacctaataagggcatacacaataaattccagccagtatttcacagaacaaaccaataaaactcaagtttccagtaaagctcaaagctttgaactcaaagctcaaagttgcataaaaccaacaacacccatcaaaaccagctgctaggagttgaaatcaactcaaaaggaccctaaaattcgaaccctaagcatatgaaaacctaacagccactaaacctagaaatcacataatcaatcaaccataaaattcaagaaataaagagttatattactagggcttaccttagcttcaaagacccttgaatctctactgaatttgcagaggaagaagcaaagaatcagctggtttcctccttggtttggtgcagctccaagggaaagagagaaagagaaggaatttctcttgaatttggtaatttctctctaattaactaaatgggataaaatgaaactaattaatttctttgctgaaattaatctagctaggtgtcactaagctagggcagccacctatttccccatttaaccaaatgtccaaaatgcccttaacccaaaactaaggtttttcctaaagctaggggtaaaatggtcaaaatccataa

SEQ ID NO: 282811 - DNA, 1179 bp, Cannabis indica
tgtccttcttttctcttttaataattttgtttggtcagctttacctgttacttgtcttctcccttctatggtacacattgttctttacccaaatcaccatttgcattatttcactcaaccatttattaattttttcattgaagtatttgactactgaatggttttcagggtgagggacctgatttttcgtcaggcatggttgcacaaattgaaagcaatttggcttgcggtttgacagagttgaagcgttcacagaagtgttggggcactgtggttatggtaaggtctcaaacttcttccttattcttatgctgcagtgaatcatgaaaactccaagtttctaaacttaccattcttcataatcttctaagattagagttgctaccttttctttccctcacacttgtgtttacatcttacttaccatttcttttggatgatgtggaagactaagaactcattcttcatattatttaatccttttattcctaatgttattatttttacattgctaatggcccgcattctttagcatttcaaattatttatcaatagaaaatgaacctagtgatcatactaacagaagtgtgaattaatgtttgtttcgtttttagaaaatagtaagcatgataatgcactgaatttgagtggatatcattcaaagttttgctgcttggtagcatattaaaatataagaaattaaaagattgtagacattactctccaaaatctttcgtttagaatagagagcataaaataatatgatccctacaaactaggaattacacccggaacactacaatatctttatagtataaagttttatgtgtattctagattgatgatctcttggtgaacctggactctttgtggtagtttattttgtttattctgattttccttcattctattccttatgctttagtgcctttatgaagctggaaagtacaacaaagtccatctcctagacttattatgtgaggcacttgatccaaatatttacaatgccatcgcctctggtactcaaactaggtcagggaaaggttttgacataacctcttcaagcaatcaatctgtggctcaacaatattggcgaaagggtggtcctatttctcaggtgattcaaaaagtgaggtaggtagcttgtaagaatgcaatatctcttgaacatgtcttcac

SEQ ID NO: 282812 - DNA, 361 bp, Cannabis indica
gattcagagaaagagatcaaggttcagatattgataagtaaaataattccaacatttgttacttgccaaatgcttgataattttaaattgtgtatgaatttatattgaaccatgttgttttctgttattaattgtagttgtaaatttcgtgtaaaaataagaataaatttgactctcatcgttgaattcttattttaatcgaaattatcctttatttttgctcttagcttattcatttcgaattttcttacatagtatatcattggatgaatggtttataaatcatttgcttatgatgtctgtaacgcccgtactttttcataaattactaatttagttacaagcgttaaaatgcggaaaa

SEQ ID NO: 282813 - DNA, 702 bp, Cannabis indica
gtaagaaggtttgttccaatctgtcatttttgtggtattaaaggacatatcaggcctaaatgtttcacgttgcaaaatatgtttaaaacaaattattttggtaatttgaaattttttcaaaagaaacatagtgctttgaaacaaaaatggattgaaaaagaaaaatgtctagctggtttttctgataaaagtgctgcttctcaaatgtggtattttgacagtggttgttctagacatatgacaggtgacaaggattttttagtgaatatcagaccaatgcaatgtggtgaggtcatgtttggtaatggtttaacaggaaatgtcattggtatgggaactctcaattttgaagggttaccaaggttgaaaaatgttatgcttgttgagggactctaatttacttagcattagtcagatttgtaatcaagggtataccgtcaattttgacaatgatcattgttttgttcttaacagtgataaacaatgcattttacaagggtttagatctgttgataattgctatactctcacatctattcttacttgtcattctgcatgtgaaaataccagtgctgtatatatttccaagaatcatgttcaacattctagaacaaaacacattgatataaggcatcactttatcagggaacttgttgaaaataaatctttgcaattagaatatgttgatactgaaaaacaatt

SEQ ID NO: 282814 - DNA, 755 bp, Cannabis indica
tctttgtgtaatccaagtcaaggtttgatctctagtaacttttctttgtgttttcttgagttgtaagaaaagtttgatagttgcatgcttgatattatgttgttgttgctgctgtgtttatgtgatgttttcagaggtttaatcttgtggttttaagtagattagagctagtgtaatgcatgataattgttttgatttcaagattgaaagtttttagcttaaagtttagttttcaaagggaaaattcgaaatctgttgctgtgattattgcatgagttagagtttgttttctgcagtgtttttatgcatgattatgtggtttcaatctagttttgagggttgtaagtgagctttagccaagtttgagtttgaaactcaaagcttggagctctcatggcactttttgtttctgtgcaatctgggtgagtttgttgccttagaaatgttatttgggtcctatagaacaggtctggaaggtttgaggttgtttggattagatttgagcattgtgtgaatgttttgaattctttctgcgaggaaccggaattccggttgtgcatccggaattccggatgggttttgaaaattcccagaactggaattccggttgggcaaccggtctaccggttgggtgattttcagaaaccctagttctcctcgtttttatgttatttggggtattgccatgctttttatcgataggaaaacttttagttcctagtttaagtcccctggaagtgatttagcgtatcact

SEQ ID NO: 282815 - DNA, 713 bp, Cannabis indica
tggtatatatcactaggataaaccaccgaaagaacgtaatgtatggattacatataaacatgaataaggttatgcgagcaaggcataatcatgttagaatcggtaactataaccgagataaactctactaaggccttattgtaaatagatgtgtgagcgtaacacgtaggtctatgttacataaacataaatagacatgtgagcgtaacatgtgggtctatgccacatagacatatataggcgtgtgagcgtaacacgcaggtttatatcaaatagacaaatagtgcggtggcaccattaattatgtgttatatatatggagattaagggttatgcgttcaaggcataatcaggttggactcggtaactataaccgagataaaccctactaaggccttattgtatctagacgtgtgagcgtaacacgtgggtctacgtcatgtagacataattggacgtgtgagcgtaacgggcctatgttaaatagacaaatatgaatggcattattatatatgtgatatgtttattataattgctaatagtatttactgtcttgctgggcttggctcacgagtgctctactgtgcaggaaagggtaaattggtttgtgatcaaccatgagtgcgggagcttagcgattcttgtacatgttcgggcgacactagaccaagcgggttgggtctaccagtgatgtacttttgtaactctgattt

SEQ ID NO: 282816 - DNA, 589 bp, Cannabis indica
ggatcaatagtgcatctgattgggcagattcaccacatgcagaggtgaaataggccaaatgctcatggggagaaccattaattccatcaaacttttcaaacttttgtctgatgtagtttagtggaaatggaatttgatcatagtaagccaggtatggcttatgatatccaagaataggcattgttgcagcctgatattcccgaataccctccatgataagagccttcaggaactgctgaggttggacaccagctagtggtggttgcacaccttgtggtggcggttgtgtgttgcctataggcggcactgaggacgaggattgttgcccaatctcactctccttttgtctcatattaacttgatgagataattctgttgagagtcgggctacttcttcatccctctcagccaataatctttgcagttcctgaatcttctcttcattactgattgtcccagttactaacactggcatatttttatcattgccaatggttagtgcttcgaactgagtaatgagatcagcagacaccccctcactgtgttcaataaagggagtgtcttctaaagagtgttcagatgtacaaca

SEQ ID NO: 282817 - DNA, 543 bp, Cannabis indica
gtctaggagacaggtacaacatcatgacaaacaacgctgcagaaagccttaacaacgtgactgaagaattccgggcatatccaataactactctagttgagttcataaggttcacactacaaaattggtttgctaaccgtctggagaaggcaagtaagtgtgttacccctttggcaactcattttgaggaagatttgataaagcaacacgaggatggtagacgtagaagtgtcctacgtaacggtgcacaattgcttaatgttggaagaggtgctgacggttctgactttgaaaaaggcggagatgtgaacttagttgagagaacttgcacttgcggcatgttccaattgttgaaaattccttgtccccatgcatgtgccgcagcgcttactcagaatgtcagtgtctacgctctgtcatccccctattacacaaaggagacgtggaagaatacttacgatgcaacaattaatgttgtgggcgaggaggatgaatgggtgcttccagaacacatgcagaacatgagaatcggtgtaccagtgg

SEQ ID NO: 282818 - DNA, 509 bp, Cannabis indica
tgaagttccaatgcttcataactcagaacatgggacgagtctgagacatacttccgaagcattgaaacatgaaacacattatgtataaccgccagcgctgggggcatagccaacatgtacgctacttggcctatcctctcaaggatttcaaaaggtccaatgaacctcgggctaagttttcccttcttcctaaagcgtttaatgcctttcatcggagatattcggagaaataccatgtccctgacttgaaaatcactatcctgacgctttggatcggcataactcttctgcctacactgagacgcgagcattcccgctttaatcttatcaactgcttcacttgttatctgaacagcttcggggcccaagaactttctttcacctatttcatcccagtgaattggtgatctacactttcttccatataaaagttcataaggagccatcctgattgttgcctaatagctgctattataagaaaactcaattaggggaaggtactttaccca

SEQ ID NO: 282819 - DNA, 513 bp, Cannabis indica
tccccaggaagcgtgcgagtcgagaacaaagcacgttggaaacacttgtgttggtctgtagagtcagtcatcactccatgaagcagccatagtgacgttctcgtgtataagagtcattcattccgtgggtgtgaggacccaatagaggcttgaagcggggacgttacatactggctcctaagtcacataaagtttttgtttatatcgaaccccctattgagcatggaatgttgaaactacccggatcttttagcttgggtggtagtttcttttgcaggaccgcactgcactcttcagtaagtgccaccatctcaaattcttccaactttcttttcttagataggatatctttcatgaacttcagataagttggcatctgttctaaagcctctatgaatgggatgttgatatgcagtttcttgaatatttcaaggaattttgaaaactgcttatccatcttgttcttgtgtagtctttgaggataggaattttgatgtgatggtcaatgctgat

SEQ ID NO: 282820 - DNA, 672 bp, Cannabis indica
tcactcaaggtatgaaaattttgaagaagaaaagagaggaaaggtggttcggctataggtatagaatagatggctcaatttttccagaaggcaagaaatttcatcctcttttaagtgtgagccatcactatctatttataggcaaccactaggtttaggttaggcattattaggcattaaaataatagaaaaaaataagtgtaaaataccctctatagtggtgggccatagtaatgggccccacttggatatttttctaatttttctaattttcctttattttctcaaaaaataccatttttccaattctaaccatttaaatgcaaaaactaattatttaataattaaaattaatcatcaaataaaatttccatttaatatatttattaattagacataataaagtcttccagttaataaataaaacctagaagctcttttcttcacaattttggcccttgcttagtgaaaattcataaactagacatagtctaattttagaattataattgattaataaaaatcaattatctgagtcttacaagcagcatggtctcaactagtatggggaccatgggcctatacaaccgagcttccaataagtcgaactagaattcaccaagtaaattccctaacctattaattccttattgcatcaactcataaaacttg

SEQ ID NO: 282821 - DNA, 730 bp, Cannabis indica
  modified_base (66)..(66): a, c, t, g, unknown or other
cagattttttgtttgatcagattgatctaattgtacctggaacaatcatcaacaatggtgataaanacttgtatccctcagttgtcatggcgttgtatgtccccaaatgtcaacatgaataagatcaaaacaacttttaacaatattgtgattagatgtgaatgacaattttctttgcttagcataatgacaaatggaacaatgaaataaagaatttgaattggcatgaaacttcaaatctttatttaaaggatgagtctttacacaagagggatgacccaatctataatgccatacaatatcatttcactacaagaaatgtcacttttaccaacacattctgctactgcgctggtaaaagtaacttttaccagcgcatttcgcaaactacgctggcaaagagatcaaagttttaccagcgtacatttgcagtggctaaaatctaacttttaccagcacatttatgcgctgggaaaagtcttttttgccagcgcttttcattttatgctagcaaaagttctaataccaacattgatttgccaacccccttttgccaacacatcataggtaaattctattttaccagcgcaataccaacttttgccagcacaaaaatgtgctggcaaaagtgacatttcttgtagagtttgtgactttggaatcaaaaatggaagaaaaaacagaaacaatttgtttattattgatctgattacagttgatcaggtaatac

SEQ ID NO: 282822 - DNA, 539 bp, Cannabis indica
agaggaagacttgagagaaaatggaatttttgctttctttttccaattttaataaaatggtttttacttaattacctcagccaaataccaccaatacaagctgaataaaaacacaactaagtccactaaaggacaaaatacaaatggggaaaaatgaccattttgcccctctacacaaaaataacataaaaggggtactaagggtattttgggaaattctaaattcccgaccaatcccgacattcccaatttctaaataaaccgtcccactatactaaaatattaaattgtgattctactgagccatacaccgcgttccatgttgtcgggcacctaaaatgcaagattatgaaatttcactatataacatataaaatgcattctgaattaaaataaaacatcataaataattatttaaatatcaataaataattttcataattaaaccctaattatctgctaatttccaaatttaaactgagcggtctttacaacatatgttctggacttaatagaatttatacattaaatataatcat

SEQ ID NO: 282823 - DNA, 587 bp, Cannabis indica
cagttttaaaattcgttgcctcggactaataaccattgcaaaaacacaggaaaggaaagacattccattcctagtcttctacaatggaaaattcgatgatcgaatgaattatgaaaattatgaagccagtggacactacatttctgccaattgtaactatgaagatttgcaacagaaactcaaagatgccctggaatgcaaccaagaaaacactgttttgcaactgaaatatcaagtgaaggaaggataccaaccattgaggataaaggatgatcaaagcctgcatttctacatacaactcaaactgaaagaccccgacttcacaacatacccaatgtgtgtgaatgtcatcaacaacccaacaacaaccatcgatgcaacattctttggaaatgacaattcattaattacacatagaagcgccttccaaccaatgacaaacaaacaaacagtatgaaaactgttttacaactacaaacaaactatcaatgacaaacaactacacagaaaataacagtaaagacctgaaatcgtttggaaacataaaaaaaacagtaaacaactaaccctaaaagaaatcgaaaaat

SEQ ID NO: 282824 - DNA, 644 bp, Cannabis indica
ctccagcgcctcttttcttcttgtagacccacttacatccgattggatgatagtcatcaggtgcgtctacatattcccagactttgttctttttcatggatccatttctgaatccatgccggctgaccatcgtttccgttctggacttgccattgcctgtttataggttaatgggtcgtcatcaataccgtcaccaacgaccatattgatttcaccatccaagccataacgagatggtttagtaaaaaccctcccactacgacgaggagcggtgatcttctgaacaggaactttagtggtagttctctcggttgtatcaacttgtaaaggttcaaccgaggaagtgggattatcctctacttgagtagaagaggatggaacattagaaggacttatatctgcaagcatttcctccaatactactttactttgtggtttgaaattcttaatatagtcatcttcaaggaaagtggcgtttgtggaaacaaacactttatcatccttgcgactataaaatagtccacccctagtctctttagaattccaacaaacatgcaaacctcagttcgcttttcaagtttgccatctttctttcttaagacatgagcagggcaccccagattctataatggcgtaaactaggt

SEQ ID NO: 282825 - DNA, 609 bp, Cannabis indica
gtccgagtacacctgccgtactgtctttggtgtttagaaatacccttcttaggaccatatctcccacgaagaattttcgagccttcacttgtttattgaaataccgagctactttttgttgatgggctatcaactttaagtttgctgtggttcgcttctcttcgatttcatcaagtgattcggccaggagtacgtgattggtatcttggttgtacgtcaatctcctgtgggatggtggctcgagttctacaggcagcatagcttcatatccatatgccatagcaaatggagtctgtccggttgccgttttctcagttgttcgatatgaccatagaacttcaggaagttcttctggccaatttcctttggcatcttcgagtcttttctttagtgtgtccttcaaggtcttgttgactgcttcaacttgaccattcgcttgaggatgtgccactgcggagaaacttttgatgataccatggttcgcacaaaagtcagtgaaagattggctgtcgaactgcttgccattatttgaaactattttgtacggaaatccgaatcggtagaatatgttcttcacaataaagtcttgaactttctttgatgtaatgg

SEQ ID NO: 282826 - DNA, 333 bp, Cannabis indica
aaaatgtgaatttcaaataatctcaacacattgatatacaaatcaagtgtagtagtagtatactcctcgtaataggatctgacaggttgaattaaacacaaacttttctccaccattactcttccttaatcacaaaatccttgatattgtgaaattcctctctatatgtctactctcttgggatactggattctatacttttggcaactactttttggttattcaggaagtaacactagtagttaagacaagttggaacggtgccacaaatgtatagaactttccttattcagtctctctctggtagacctagagacttcagataggttttta

SEQ ID NO: 282827 - DNA, 620 bp, Cannabis indica
gtgtgagcataacacttgcaggttataactttatcatgggtgagtacaacttatggtaattaattgccctgttggatgccaagtgtgagaataacacaaggcagggcaggttacctcatgtctgatcaacatgagtgtatagttgattatcgtatgtgagtataatgtgcggtatgagacttgatttatgcatgtgagaacaacatgcgttgtgaatatatttatggaatgtgaattattgttgattaatattaagagtaactttatgtcaagtatctagttaggagggttatgtcctacatagctcttcttactgggcgttagctcacgggtactctgtgtgcaggtaagggtaaggctaagcagtgagattgaagagctcgaggcgtggactgcatgttagggggctggcgcagtattttgcttttaatgtttttaaatgctaaacattgtggaaccgttattttgatttaactagttcttatttaagtttacggtactaaaagtattttgttttaaacagtgagatctcatgcttagatatttttcaataaagaagtattttattgtctttatcttattaaattgttttatacggactatcctatgtgacatctcgg

SEQ ID NO: 282828 - DNA, 466 bp, Cannabis indica
tgtttaaacaacatacttgtgagtagatctaagatcctggtaaaataaattccaacaatgacctcaccattcaaaaaaactaatgtaacgcccttaccctcaggaacgccacgtgtgtgcttttataaacttattattattactctataaattttagaaaagtgtggtttaatttaaatctttaattaaattcaacataaagactttcattttaaataatgtcgtaatatggggatcccctgtttataaaataaaaatattcttttacaataaatgacatttccaaacatagaaaggaatttcgatcctgcttcccagaagccaagacccaggctgatatgtacattgctggagacctctgattcatggccaaacacagcttccaacttccatacctgcaccacgaagcacccgtgagtcacaatgactcagcaagaaaagctactaattagactttatggaaagt

SEQ ID NO: 282829 - DNA, 671 bp, Cannabis indica
cataaaacccaacataatattgcccagaaattctaacttgattcagccaaagggccaatatccaagtccccttgaatcataattggcacttgagcatgacctatacatttttcttctttaacattaatctttcttaactgtgggcaggttcttttcaaatgacccactacccccacaataaaataagatctggctctacattggctcaaatggcgccattttgcatcttgaacactcatgataaggtcaccatttcttattctcacatttaccactatcctgatcaccctggaaccttttagttctatcccatattggtggttcatttagtttttctcctgatgtactagtaagttggcttcatatattccactacatctagtagtacaatcagaagtgttggtagtacaagaacagacacaagatgagcctattgttctctcagatctcatatctgtttatccttgttgtctattcatatcctgcatagcagatttacatgtttccattattaaaacataaaggattctcttcctaccgtttaccccgagcccaaacaactcattaatagtacattcgattgcccttcttgcatactatcacacattactcacatctctaccattaaactcagtatgtatataatatcatatgcatataccatacacact

SEQ ID NO: 282830 - DNA, 369 bp, Cannabis indica
agtcatctcgcatttaatgtcgcatgggaggaggcgtattgaaactgccatacgtaatgaagcctgacggcacaacccccaatctgtacctactaggctatgatcgataaagtctagtgacgtctactctgtgaggaatcacattagtaaaaaaggattaaggactgcccccataaaatccctacagaacttagggattagaccatgcattacctatgataaattcattgggaatgtagggctttactgatagttacagaaatacatgtaccttaattctagggatcactccacaaaaacactataaataccccccaactacattaaagaaggggtcgaagaattatgggtttcgtataagaactagaa

SEQ ID NO: 282831 - DNA, 648 bp, Cannabis indica
ccgaccaacactcatctcgtgtgttgtcttttgtagatgaactcaggtgagtcttgggaactcggacatcggatcgaccaggatttgcttcaacttctgcacgaggatcaccctcatcttcgttatagtcctccttcttctagtgaaggacattcttctaaccttgtacccagccatagggtgatggctcgtacaaagaaaactacgtgtctggctgacgctactgatcctcaagtggctcggcttgccactctgcccagcgctgaacaggattcgtccgtcccgatggaggaggatcgtgagggggatgctgaggtccaggaggtcgaggagctggacgatgtgcgtcccggcagtcccttcgaggcagaaggagaggaagaggttgaacccccaaattacggggggtacaatgaggctgggcagccaatcgatgctgacggagcttgctgcggcagttcctcatagaaggcaaggcgccttgggcgccagatgggtaagtcctccgtccaagattacggaggcgcgccttcgaactcttgaccaggatgggtacctgggcgagctggactgctacattcccactcacaataatcgtgccacaaaccctgataaggggatgtgcgcctggtcgggggcccatggtca

SEQ ID NO: 282832 - DNA, 660 bp, Cannabis indica
aatgaatgatagttaaatataaacttaccccctcgacaacatgtgaaacaataggcttggagccccagcctcctagaaatttcatcttaccccgactttctttatttttcgctgctctcgcctgaaattaataatttttctaacaattaattatttattattgactatataaattaaacattaccaaaattagaaattttaaaaaatgtaccttttgtttgtctgtgctccaataagcgatgcagtcactccacacctcttgagttactccctcaggaggtgacatgtcggccctctcctgtccaagctcctcaatgttttgtatccacttcttcttgcagtctgccctccagtcacgtaaaccctttgacatctcgtactcaccgtagtctacgaatgtagggttatctcgtgggaggacaaacttggtctgcaaaaagttacacattaatacattaattacaatttaataagagtatagtaatttagaaattaaaaaaattattaaggcatacctcaagtctatcccagagtgcgttgatgtcagctctactgacatcttcccatttgaatttattaatggggatagacatccgagtcatccatttggccatattgttgaatttttttccgtttttgcctacgggggtgccagtctct

SEQ ID NO: 282833 - DNA, 564 bp, Cannabis indica
aacttttcttcaaaaagtttcttgaactcttcccatgtcatcacactgacatctcgagtctgattcactatatcccaccatacgcgggcatgatcttgaaacataaaggccgcacaattcaccctctcagttcccgtcacccccatattatcgaggatacgggtaacagtgctcatccattgatcggccttaataatatcaatgcctcccagaaaagccggaggttgcagcttcacaaaccgctcgaacacagagtcccggtgcggcataatatacccttggttacccaccactggcacaggagctggtggtaacccttgattaactggggcagcttgttgccttaaacgttgcaactcttcctcttgacgaagtatgacacttcgcatttcatgaaacatctgctgccagtcagcaggaggattagcattaacggcccccgcattatcccccggattttgcggaggtggaggcggtgctggtggatcggttcgggtagccccgggctctacttgctcgccctgtggtctagatgattgcggagggtccattactagtacccct

SEQ ID NO: 282834 - DNA, 860 bp, Cannabis indica
catatgcgccattcaatttcttaagagaaaaacagaatgacatcataagcaaatgatttataaaccattcatccaatgatatactatttaagcaaattcgaaatgaataagctaagaggaataatttaggataatttcgatttaaaataagaatccaacaatgtcccggtaggcgagagtcaaagttattcttattttacacgaaatttacaactacaattaataacagaaaacaacatggttcaatataaattcacacacaattcagaaattattaagcatttagcaaataacaaagacatgtgaaaatacaaaactatcatatcttaaataatttccaaggtttccaacaaactgatacagtgtcccggtaggcgagagtcaaagtaatcattcattgaatagagttgtcagctcatctaaaatggacaccattctagcaaccttttattcgatcaaaataagaatccaacgttgtcccggtaggcgagagtcaaggttattcttattttatgagcttctaccattgtttcatacttcgtaaatttatctctaagtagtcaccgtaggggagagtctaatagagacgaaaacttacaaaatacttatcataagagatcgttacggtgttaaatgcttcaacgaataaccatccattagggggacgaagtctagcgtctcgaggttatattgaaaacatttaaccatgtaggaccaacaatggagatcgaatatccttataactaaagctcattattttaaagagttgtattttcatttgatacttattttaatatatatttatttaattaaaattactaatttagataactctaaatataaattttaatttaatattt

SEQ ID NO: 282835 - DNA, 537 bp, Cannabis indica
gatttatagcatcttcctgatttttgcatcgtttacacgatcccatgttccaacgttctcatccagtaacgtatttcttcccgttactactatcagcgcattgcctatataatgcgctgaacagtgggagaaaaacacatcttttcattctgaaaaattatacgatatatacacactactattttatatttatattttcgcttcgagcagtagtcagttttgggtgtttaatttcgacggttctctatcgtgcaatagagttccgatacagtgtgttcgactgggctgttttatcctggggacgacgaggctgatagtctgcttgcacaaatctgggcagtgccgcgaacgtcttaaagagagcgacctagtccgcgactcaacccagattctatttcggtaacttcgttccttttattttctgcagcaactagtttataacaatctttctcctctctctacctctcacgtctcattactgaattttctatttaataaagttaggtgatgtttggttcattgtaatggtaatcgtaa

SEQ ID NO: 282836 - DNA, 563 bp, Cannabis indica
acaacatgaaactaaatcccttaaaatgctcctttggagtcacctcgggaaagtttctaggcttcatcgtcaatgcccgaggaattgaagccaatccagaaaaaatccaagccctcctagatatgaactcgccaacaaaaaaaggggtgcaaagcctaactggtcgaatcgccgcacttagcagattcgtgtcaaaatcaacggacaaatgtgttccattcttcaacatcctgcgaggaaacaaaaagttcgagtggacagaagaatgtgaaagagcttttcaagatctaaaggcacagctcacaaaacctcccgtactttccaaacctctggacggtgaggagttggggatatacctagcagtcacagagcatgtcgtaaatgtcgtgctgttcagagaagagaacagcatacaacaccagtctattacattagtaaaagactcatcgaagctgaaggccgatatccgttgatagaaaagctcacctactgcctcattctagcaacaaggaagctgaggccttactttcaagctcatcctgttcgggtgtataccgaccaac

SEQ ID NO: 282837 - DNA, 660 bp, Cannabis indica
attaaattagtttgacctaataaaattgattagcaacataattaatttcattcttccttgaaattaatttaagaaaaacatagtttgaagaataatattctagaaaaactatttgtatttttcttgtatttaattaaataaagaattttaactaactagattctttctgaaacttattttttaatatttcattaaatattcctatttaagttataaattagttgtaacgccctaatgctatggcacgctacagtgctttttcaattacagtgcaatctttgctaatcaaagaatttttctcgaaaatcgtgttaaattaaaacttttgcataaattaataaactttataattttaataaaatatttacaagtgccgggatcccgttttcaaactttgtaaaattagtattccaaaatacacatttagtacaggtcaccgggatcccgctgcaagcttggccagacggtcaaactttgtcgtatactcagtaaccgacattccctcagtttgaaccagttcagtgaactctttccgctttgcactgcggactgcttcattgtaatatttggagttaaacaactccttgaattcttcccaggtcatcactgagacgtcccgagtgagggttatcaactcccaccacacgagagcgtcttcct

SEQ ID NO: 282838 - DNA, 595 bp, Cannabis indica
gacagttttgcccaaggaaagtcaacctggaggtcaacgccttgactaacatcaagcaactgcctacgaagacactaaagaattacataaagaggttccaggaggaagcctcaaaaaccaagaaagttgatgacggacaacagcttgcccttctccaggcaggcatccgtacagggactccattctggaacgaactacaacaagaaggagctgcaaaccttcaggacttccagaagagagtccaaaaatacattaaccttgaagaggcccaaatagtggcctatggaggatattatcccaccggaatagcaggatatgtgcccggagcccagccctcgggcactgtgccagcagcagctccagcgatgagcggcatacagttctctgctactcccgaatatagccagggccaggccctggcccccgcatcgtcccattttggaaatccctcagggataattggacaagtcccctcgcactccgctccgacagccagtctagccggtccttcccatggctcgaagagtaaaaggtcctccaaaggcagtacccggacagaggaaaagcgactgaaaagggggtacacaccccaata

SEQ ID NO: 282839 - DNA, 599 bp, Cannabis indica
ttgatagatactttattttttttacaataatttagtcgttaagttgctttaatgttcttgatgtttcatttgtgactctaacaaaggtaatatatcaaacttactacagtgcgataaggaaagaaattccaccgaagctaaaagttcgacgcccaactgtacgtattctttattttaaatttcaattatattttattaagatctttattaatttaaagaaaaatctttactgtccacatcaactggaagacaccgaatgtggatattatgtaatgaagatgatgaaagatttaattcaagcttcgaatcggaaacactttttggccgaggtacatgacatacaaactatataaacatgtcatacattattaatattattattattaagaatgcatatgatgataactttaattaatatattatttatctttaaattttgtagttaagtgatgcaaagtacacagaagaagaaattgatgaagtgaaagagcattgagcaagtgagatgttatcggttattcaaacttaccgacgttagttgttttttgttttaatagggcaagtgagatgttatcggttattcaaacttaccgatgtta

SEQ ID NO: 282840 - DNA, 694 bp, Cannabis indica
aggacgatgaagaatccatggccgcgcctacgaatagtaccgagcatctgaaggagaatctgaatgaagttggagtcgatggccgtgaggtgagcctggcgctggtggagagtgagagatgaaaaccatttgaggatggaggacctgggattagagattgaattggaattggaatctgaaaggcgagagtgagagtggtagagagagatgtgggatgttagtttgtcaacaagttggttgtgagttgcgagcgagttcggaagggaattcagctctggtttcgacattttcgatgctcgacgttcgcctcgtgcatacagacagaggaaggaacagaaagagacccggagcactaaatcataaatttataaaatcagccccatttaattatacttttattttttaattttaaaaacagaaaaataggaatagattttttgttttcaaaattttatttttaaaaaataaaatatgttcaataactatttttgtttttaattttaaaaacataaaaaaaaagtattttttgtaaccgttttttttttttttatgaatgaaaacaacttcattaagcaagaacaaacttacaactggtcaggcttttctgcttttaaaatagcagcagcacaagagggtaaatcctctgaccaaaaagaattacaattgtgtgaaatagcccatttggctaaagaat

SEQ ID NO: 282841 - DNA, 733 bp, Cannabis indica
ttatatatttataaaataatccctaaattttactactattcctactgttaccattacaattacataatccattaaaccacaaaagatttcattccattccatccgtgtaaaagagttcctttctccacttctctgcttctccacaccacttctcttcagctctctcctccgtcttcacgtccaccacgactcattcccctcggcagcactcaccatttgcttacctctcaatcttctccatcaaaatccaaaacttcaggtcagtatgaaatggatagcaatcaatgcctttactactatttaaaacccttttacgaatggctacttaccatctacttttacacactaatttcaaatttgaaattatactcgtatctgcttcattcttgtcacttctttttctcatttttgttttagtttgaatcagtaggcacccaatttttgtttagattctgggctgtaggcttagtttgcttatgggtctgcttttgatttcaaattcctgaattagttgaatgctcatgttcgccatagcagtaggggattcaatttgtttttaggttttaccatctgtgaactatgtggatttattaaagtacctgtaagtttaggttacaacaaataactgatataaaaatagaacttttaagctcttatatactgaaagttttgctgctatgtaaacactaaactgttcttttattattgttattttctttttccttttagaagg

SEQ ID NO: 282842 - DNA, 788 bp, Cannabis indica
agctataataattccataattaatcataacaactgctaatttccaaattactaagcgggctttacagtacttacactttgcatagtgttatgttctcagaacattggcaaagtatgatacttttgaatgtatgaagtatacattggactgggaccgatattgatcttcgtaaagatattataatcttactgttgtatctttctaagtcaatatcactggttgatcttatatcaaaagatcttaatcctgacatgcttaggttcaatcttaggagtgttattcatgttctttgatctgttagttaagcctactttctggttagggtgatacgtacattttgggaacatgatagtatgattgagtgggagcgctcaacatagatatggaatttatagcttctatcaggacatagaagtgaaacgatgatttcctttgagcatggctaaatagaggtaaatggaagagctcttatttcagtgattatattttagtccactgaaacatcatttacaggaagttaagtgttttaaggataaaatacattgacgagttaaacggtaaatttattcctactcaatgtaaatcatctatagaggatctttgattattgagattagaaagatggttaaatgcttatagcgtatctatatcgtgaaacatatagagcgttctatatgacttagagtgcaaatcaaagttctatgagtggatacaataaggaattaataagttagggaatttactcggtaaattctagttcggcttattggaagctccgttgtataggc

SEQ ID NO: 282843 - DNA, 562 bp, Cannabis indica
atgtgtttattttcattgttttagaattcatattaggttgttaatccaacatacttgttagtaaatctagatcctggtaaaataatttccaacagtagtttctggagggacttgtccagaaggacttggcttcagtggaagcgtgtttgtaggtgccgttgggagcagttggtttgcgaacctcaccccaaggggtgcaccatacttagtccgtgtcaaaaggagtatgcattggacgattggcgagtgagctgcaatcagaggatgtggtagcttcagggcagtgttgcaagggctacttggttgactggagggacgtcgtgatggactcagaggagttcatgttgggggaagagatattctagtgcagaggcattactccatgggtggatctgaatagcgacagtggcacatcaagtccaagagtgggcgtgcgagatcatcactaagagggtcgttctacggaggtagagggacaagtgcagacttaggattcgggagaagcttggggtaagcttaggagtcgagaacgggaagagttgcctgtggtccgtcgatgagg

SEQ ID NO: 282844 - DNA, 434 bp, Cannabis indica
caaaaaaaaaaagattaacttatgataatacataacataattgttgggtttttatgccttaaataaaactccaattcaatgtaatccgtattattcaatatcaataaagaaacagaagtatttttcattcatttgtgtaatttttggttcacattatcaattacttgtcaatttgatttataaattcatccaaacccttattacatttatattcttgtttattgtgtcgtcatcacagtggaaagtaatcaagattgtgtgaataaaaattcctagatttatcaatacattgggttttactgatatgacaatctacaacatactttacttgcataaatgctatgttctttctagaacataggtcagagtaaagcttgggtttgatgcatggagtatgcatcggtagggaccaatattgaactttgatatagatt

SEQ ID NO: 282845 - DNA, 535 bp, Cannabis indica
tcatatgtcattgacgcccgtacctatgcccgatacgtcgccaggaaaatcgcatcacctaatcaaatgagctcgtacctacgctcggtactcatcatatatcactgacgcccgtacttacgcccagtacgtcgctaggaaaatcgcatcacctaatcaggtgagctcgtacctacgctcggtactcatcatatatcactgacgcccgtacttacgcccagtacgtcgctaggaaaatcgcatcacctaatcaggtgagcccatatatcacatgcataataacatcacattatcaatattcaaccaattagtcttttcattatataacaatattaactatacctcaatattaatcaattcataacaatactaattgtattacatacaacatactatgcagtacaatatatctttcttacctttaatccaggttcatatatttaggccaacccaagtggagaactatccccgatgatatcgaccctatgtcacaacaacgataaaccaataagtgtttatcccaaaacactgctta

SEQ ID NO: 282846 - DNA, 710 bp, Cannabis indica
actcaaccaaatcaaatccaatcacacaaaaccttccagacctgttctatatatcccctagaacatttctaaagcaacaaaaccgagcttcacacacagaaactcatttcaccattaaaggtcaaagattgagttctaaactcaaaacttgactaaacaacataacaagcatcaaacctagattaaaactacctaaacatgcatactaaagctgcagaaaaccaaaacaaactcatgcaataatcacagccaccaaaatctcaatttcactttgaaaaaccaaacttttgcatagaaaaaccataactataatcaatctaactatcaagcaccacaagtagcttaattaacctcaaattatcatgctttaacttcagaaataatcatcaaaatccagcagcaagaacaacttaaaactaagcatgcaacctaccatttctcttcaaaaattcaagaaaacataaaagaaagatgtagaaaacataccaacaacttatgaacacttaatcttgctaaggagggcttgaaatccaagaggaaaatcctcttttcttgctgctcaaagggggccgaatagagagaggaaaagagagagagttttccttgaaaattttgtaattttctaagttttgaaaaatgaaagaaatgccacttaatccctttacttcagccaacaaaagcattaaataaacatatattttccaatttat

SEQ ID NO: 282847 - DNA, 664 bp, Cannabis indica
tctctattgttgaaactttagccttatccacctcaattcctgcttttgaaattttgtgtcccagaacaattccttctgttaccataaagtggcacttctcccagtttagcaccaagttagacttctcgcatctaattagcaccttttctaaattttctaagcaatgatcgaaggaggagccaaagaccgaaaaatcatccataaagatctcaatacaggattcaattaagtctgaaaagatagccatcatacacctttgaaaagtagcaggggcgttgcacaatccgaatggcattcttctgaaagcaaaggtaccgtagggacatgtgaaagtagtcttttcctgatcttcaggtgctatggctatttggtggtatccagagtagccatcaagaaaacagtaatattcttgccccgccaatctgtctagcatttgatcaatgaagggcaagggaaagtgatcttttcgggttgctttgttgagtttcctataatcgatacaaatcctccaaccagtgactgttcttgtgggaatcaactcattcttttcattcttgatcacggtcattccacctttctttggaaccacttgcaccgggctaacccacttactatctgagatgggataggccactccagcatccaaccacttgactacttcttt

SEQ ID NO: 282848 - DNA, 826 bp, Cannabis indica
atggcggcaaaacccccaatactttcgttttagtttcattaaacccccacaacccaaatttctgcgagtaaacccccaaaaccactattctgttagcaatttacccttcccgtccaaatttagctgttaaatgccaagttggcttgtccacatggacacaatatacacgtggcataattttattggtccacgtaaataattatattaaaaaaattaaaaaataaaataaaattaatttaaaattaaaaaaatttaaataattctttttctttcttctttttttttcttttcttttcttgtctctctctctctgtaactccttcatctctttctctatctcaccaccaccattactcctcttcaaaaatatcatcaccaccaccaccatcatccaccacagatgcccaccaccaccactaccattcacagccaccgaaaccaccacccaccatctctaaaatcaccacaacctactggtgccaaaaccaccaccaccaccgcctattttcaaatccaaatcacaaaaaaaaatcaaaacaaaacaccaccccgatatacacatatatacacaaaacaaaccaatttaaataaatccaaatccaacaaataaacaaacacacatatatacacaaaatttcagtccaaaaacacaaaccttaaaaccctaaatttatttctccacaaccattatctttctacagatctgaaaaataaaaatcacaataatacccaaaacatttatacacagatctattgcaaagaaaaattatgaaaaaccctaaataagagagagagaggtatcggtgatcgatacctaggttggggt

SEQ ID NO: 282849 - DNA, 393 bp, Cannabis indica
aatctctattattgcggatcaggtaagatagtagttagcacgtatagttatgtgcagtggtgcttatattggaaatgagtgatatatgttgtgtaaatgctatgccatgttgaatatatgaatatattgagatttaggattatgtgttcaaggcatagccaggttgggctcggtaactagaaccgagatgaaacattctaaggcctttattgtaaatagacatgtgagcgcaacacgtaggtctacgcgacatagacataaataggcatgtgagcgtaacatgcaggtctgtgtcatacaggcatatgtgaatggcattactatttatatagtttgataaacatgttattgataattgatactgtcttgctgggcttggctcacgggtgctct

SEQ ID NO: 282850 - DNA, 542 bp, Cannabis indica
aggttgctagaatggtgtccattctaaatgagctaactactctattcaatgaatgatatctttgactctcgcctaccaggacacagtatagtttttttggaaaccttggaaattatttcagatgtatttgttttgtattttcacatgtctttattagttgttatatgtatgataatttctgaatgtgtatgaatttatgttgaaccatgtttttttttgctgttcattgttgtataatctcgaatcttcattgttggtctaacttaccttgttgttttaatgggacaaatcccaaaggattgtcatccattagacaaacataatagtgttagatctcgatagataagtatttgtaaatgcgacatctagttgtacatccaaagatgacaacttagactagtatttacaatatgaaacaatgaagaagtttatagaataagaatgactttgactctcgcctaccaggacatcgttggattcttattttaattgaaattatcctttatttttcctcttagccttttcatttcgaatttgcttaa

SEQ ID NO: 282851 - DNA, 540 bp, Cannabis indica
gacttcttggagaaaacgtggtaaataatattgggagtgtttacaagcatttttggcaatggcttcagcatataaaaattccgatggaaaaattaggtgtccgtgtgttagatgcttaaatactcgatttgagcctttaaacttctccgggtcaatttttcggtccacaaaatccatatttttttcctggtcagtttcagcaacaacccccgaacttctcgccacaacaatctccaaatgtttcgcaacaacaacaatctccgaatttagcacaacaacgacagactcgacaatttccggagattttatctgctcagcaaccatattacccatcaccgccagtatcgcaagctcaggacaatgcaccaaatcctgatattaacttaaatgctactggctcaaattttgaagatgatttgtttaatcaagacaatattaattagtgtatcttaatttttattatgtttggatttctttaagtttaaattaatgtatggataataatcttttaattttaaattttaaataatgtatggatga

SEQ ID NO: 282852 - DNA, 548 bp, Cannabis indica
attggctcaattgtcattaagagctttgatggaacttttaaaacactgaataaagtcagacacatcccagaactcaaaagaaatctaatctccttaggtacattagatgatgaaggatgtgattataagacaagcaaaggggttattaggatcactagaggttcattgctggttttaaagggaattaaaagacatggtctctattatcttgatggtgaatctgttacaccagcattgtctgcaacagttgacaaatgcaattcagaatccaagttatggcatgctagattgggacacattggtgaacaaggtttagttgaattatctaaacaagggttattacataactatactcatgctaacctacctttttgtgagatatgtgtacagggaaagcaacatagaatcaaattctcaactagcaactacagagcaaagtctgtccttgaatacattcatgctgatctgtggggagcaagcaaggttaaaactcaaggaggtaaacaatattttctgtccattgtagatgactttagtaggaaagtttg

SEQ ID NO: 282853 - DNA, 533 bp, Cannabis indica
ccccccgttaaaaggatttcgcccccgaaatctacctgaacaactcaggatgctgagccctcatatcagattccaattcccaagtggcttcttccactttactgtttctccagagtaccttgaccaatgatatggttttggttcggagaaccttttcctttttatccagaatttgcactggttgttcgtcatatgataagtcaggttgcaattccaatgcttcgtaactcagaacatgcattggatcagacacgtacttcctcagcatggaaacatgaaatacattatgcactgctgataatgctggaggtaaggctaacctataagcaacttgcccaactttttccagaatttcaaaaggtccaataaacctagggctcaatttacctttctttccaaaacgtctgattcccttcatcggggatactcgtaaaaagacatgatcaccaggttggaatgtaacatcccgtcgcttgggatctgcataacttttctgcctgctttgagaagcaagcattcgagctttgatcttg

SEQ ID NO: 282854 - DNA, 981 bp, Cannabis indica
tgcgactacatactacatgaggtacatgggggaatttgtggcaatcatacagggggtaatcccttgtattaaaaatcatgcgacaagggtattactggccaaccttgcgacaggatgctttcgcttttgcgaagaaatgcgacaagtgtcagcgaatagccacatatacccaccaaccttcgagtaacctacattctatcacaagtccatggcccttcgcagtatgggggatcgacttaataggcgagctacccaaggaaaaggtagagtcaaatatgcagtagtcgcagtagactacttcacgaaatgggccgaagccaaagcactcgcaaccattacagcaactaagttgcgcgagtttgtctacaactccataatttgtcgatttggtatcccttacaaactcatctcagacaatggaaagcagttcaattgtaaagagatgcgacaattatgtgacgatctgggcattaagaaagcattctccgcagttgcttacccacaaagcaacggacagactgaagctgttaataaaataataaagcacaccattaaagggaaactagaagaacgcaaggggacttggccagacgagctctcgcaagttctttggtcttacaatacaactcctcgatccacgactggcgaaacacccttctcgctttcctatgggtgcgaggccatggtaccagtcaagattggggcaggttccctacgaagagatgttttcaacatctcgcaaaatgaagaaaaacagtcactcaaccttgatcttctggaagaaaaatgcgatcaggcgtacttaaaaaatgcggcttaccagcggcgaaccgcaagatacttcaattccaaggtcaaggcaaaagtcctgcgaacaggagacttggtccttcgaagagtaatgccaaataccaagaacccagcgcatggggtcttcggggataattgggaaggaccatatctcatcgcggaaaagattgg

SEQ ID NO: 282855 - DNA, 644 bp, Cannabis indica
gtccactcaaattgcttatttcatcgcaggatgctgaagaatggaacacacttgtctgttgattttgaaacaaatctgttgagtgcggcgatccgaccagttaagctttgcacttccttcattcttgttggcgatttcatatccaggagggcttgaatcttctctggattggcttcaattcctcgggcgttgacaataaagcctagaaacttaccagagctgactccaaaggagcactttaagggattgagtttcatgttgtatttcttgaggactttgaagcattcgtccaggtcatctatgtgccccccaaccttcctggattcgacgagcatgtcatccacatatacttccatgtttcgtctgatctggtctttaaacatcttgtttaccaatctttggtatgtcgccccagcatttttgagaccaaatcgcatgactttatagcaatatagacccaaatctgttcggaaacttgtatgatcttggtctggtggatgcattttgatttggttgtaccctgaataggcgtccatgaagctcaatatttcgtgccctgctgttgcgtccacaagctgatcgattcttggaagtggaaaacagtctttggggcaccccttcttgaggtctgtgaaatcaataca

SEQ ID NO: 282856 - DNA, 616 bp, Cannabis indica
aaaagactcatcaaagctgaaggtcgttttgatgaaaagctcgcctactgcctcattctagcaacaaggaagctgaggccttactttcaagctcatcctgttcgggtgtataccgaccaaccactacgacaaatactgcaaaagccagatgcctcttgacggttactcaagtgggcgatagaattgggtcagtatgaaatcaacttccaaccccgaacagctatcaaaggtcaagccttggccgactttgtggtaggatgcacatgcaaaaaagaaagcatacccgaaagcgatcccgagccaataccacagccaagtaatattgaaaacaaaccgacctggaagctacatgtggataggtcggcaacagatcaactgtctggtgcaggaattggccttgtcacacctggggggcaacacctgcacgctgcagtcaagttcggattcaaggcctctaacaacgaagccgaatacgaggccctaatcgctggacttaagctagcaaaggaaatgaaggccgaagacattgaaatcgacaatgattcatagctggtggtaaatgatgtatccggcgaatacaaggctcggggagaaaaaatgatagcatatctgagca

SEQ ID NO: 282857 - DNA, 706 bp, Cannabis indica
ctatttttgtaattagtcgctaggcaacaagtattttgtatagacagtaaacttttgtaatttgttttgtaatcgggatcccgagtattttgtataaatattttgcaagtttaattaaaaagcaaaaattttaattaatcacgttttccataaacctcgttgattagcaacgagctgcacagtatgtttaagagtcacgtaatacgcctatgctagttagggtgttacatgtattttaagctcttttaactcattaggtgtcattctgtatggagcctttgaaattggattagtccctggggctaattcgatgatgaactccacctctctgtctggaggtagtcccagtaaatcttctggaaagagctctggaaattcacagactatgtgcacattctccacatttagttgcgtctctattgctcgatccactacgctgaccaagaatgccagacaccccaccttcattagctgactagcttttagggaagagattaatggagtcctcaaggccagcttgtaaaacttgaaaataaaccgatccccagcctttgtttcaaaaacgactagtttcttttggcaattgattgtcacaccgtgactagatagccaatccatcccaagtataacatcatattccttcatttccagctctattaggtggcccatgagttctttgctttcgattatgataggtacatctcgc

SEQ ID NO: 282858 - DNA, 607 bp, Cannabis indica
caataaacgagtttgattcatattcagttcctctatcactacgaagcatttttattttcttattatattgattctcaatttcagctacgaataatttaaacatgtcaagtgcatcatttttatttttcatcaagtacacataagtaaagtcagaacaatcatctatgaaagtaataaaataacgtttaccatttctggttagcgttccatcaagttcacatatatcagaatgtatcaaatctaaaggttcagtttctttagtaactgatttatgtggtgtcttagttatttttgcttgactacaaaagatacatttttcaaaatccttttctgacattttcgggattaagccaatattactcatattcttaatgatacgtttattaacatgacaaagtctagaatgccaaacattaaaatcacacagcatgtaagcagaagaagatactttattaaattcaacattccataacccttccccacaaaagtaccattcttagtgatggtgtacaaatcagcccaattgtttgagtaaacccaacattattaagcagaaaatcagaaaccaaattctttctcatctcaggagtgtgcattacatctttca

SEQ ID NO: 282859 - DNA, 504 bp, Cannabis indica
aattttaattttgtactttaaaagaacatggaatcatattaggtaatttgctagtaattgaattgttttatgtatgctgattgtggaatgtggaaagttgtttgaaataaattctagaacttgcttgcttgctatttgaggcgaaataataaattatgcatgactaggaaagtgatttaggcaattttttggatcgattgtgcctttcaagccatccttgtaatttttatcctagttacccttttttgagccttaacctattctttgttctacacatattgagcctaaaaagataaaccccatgaatatccaaaatttcaaacctaatcataccataagtagatctttagtttgggggaatttggatgggaagttgttgtatgtgtgggaataagtgaaaattgagagaatgtgaaaaacatttagattgacagcaactttagaaaaaaaaaaaagatagaaaaatctgacaaccagtgtcaaattcagaaaagatatacaaag

SEQ ID NO: 282860 - DNA, 817 bp, Cannabis indica
cgtgctaaagaactaatagtttttaatgtaaatggatgtgagttactctattaataatagtatattataatataagctgaaaataattagaaaattaaatagatagcaaaaatttagaaaataaagaataaaaaagaaaactcaaatagattgtgactgaaatttttaatatttttctatattttgattgataagtatatagattattattaataaagttataattatgtataattgatatatatacatcaatattatttataatagatatataactaaataattataaataaaattttatttatgttgttgaccgaaattttcggcaaccaattaaattagataatgatgagagctttagggataattaatgtagatgatttttacgtggctcgggcattaatgagttgtagtccacacgagtctttgttattaatgagagtttttatacggagaattttcttggtgagtttttttctttctctctcgatcgatcccccttttcctattcttctcaggggtatttatagagattagtagggatagttccaaagggataacttgtctttgagtgtcagtagtatatgaccacaagttcccaagagatacaaaatagggcatgcataacttatgccgtaggtctcatagggattaggtgagattaatctttatccttccttgattaatgttattcttcataatggagccatcactagcccctttgattatcatgtaatcactgaacacgaggcttacgttgtctgacatgtcctcttatgggcattccgagacgttttccccatgctgcattaaatgc

SEQ ID NO: 282861 - DNA, 564 bp, Cannabis indica
gaacacaacaagaaaagtttcaaaaaccataccttagcttgagatcactaccaactagttgaaataacaagaattacagagaaaaataccaagccctagcagccccaagcaaaacagaaagagagagagagagagagagagctcttgaatgagaaactttcttatttttccaaatttccaatttttgaataaatgatgaaaatgcataatctattctttatttcagccaaaataacattatataaatcaaattatcaccaaatattaagtccacaaaaggacaaaggcttatggggcaaaatgactattttgcccctcccacactaaaagagttaaaaagcacttaagggtattttgggaaaactctaaattcccgactaatcccgacattcccaatgtctaaataaaccatcccactatgctaaaatattagattgtgatcctactgaaccatacaccgcgttccatgttgtcgggcaccgaaaatgcaaaaattatgaaatctcactatatgacataaaaaatacattcagaattcaaaatataacaacataaataattatt

SEQ ID NO: 282862 - DNA, 576 bp, Cannabis indica
ccttcttagcgggatgggttagggtcatagcttctccactcagacctcctcgtcggtgaaacctttatattgcacttttaatttgtcggtagcctgtaatatgaggcaaacttacatcaactacagagtacatggaaagaatcgtaaagtacgtcaaacaactacggtcaattacagacaattgatataaaaaaattaagtaacagtcgacatcaaacctctttctcagttaatcccttctcagctgctcgaagggctttgtagttcgcattgctacatatggacataatttcaatcaaatatataataaaataaatgttaaccatcaatcacacgagtaaacaactatccatcattcaaaacttacaagaaatttctccaaccaaccgcattatcgttcggctcgggggtgacatccttctttacgggttcatttccccctttccttttgcgtttcccagccatgtatgatgaacctaaccaaattaaagataaacaaatttaaacaataaggactacatatttcaacaaatacactatataaaaaaaaaaattgaccaaaacacaatgaaaatc

SEQ ID NO: 282863 - DNA, 324 bp, Cannabis indica
aaagccatgaaagaatttcttatatcaacagtgagaggtctcaaatatgctttagtatgccttagaccaaacacctgctgttgactgggagtaatgagtaggtatcagattaatccaggtatatgttagtcaataagggtgcatctaatactcttagactacatgataacatggtgattactctgggggtggagtagtgattttggagagtctaaggaaagttctatacatgtttggcattttgttccaacatttattaactactagtgttacttcctgattaatgcaaaagtagttgccataaagtaaagaatccagtatccc

SEQ ID NO: 282864 - DNA, 486 bp, Cannabis indica
gccacgtcactaaaactcctcggttttcgtgtaggcgtggccatggttggccgttggattgggcgaccttaggcattccagttgccacgtgtcgtgatcccaattaatgagggatatgggtatttaaaccctttgatacgaatcaaattccctatttttccctcttgtttcttaacttcctctctcccttacagaaacttcaaaaccattctcaccttttgctcagatttctaccgttcatctaaagcatccttcaatctcagaagcaatcaagagtaaccgcaggaacaacttgccaaactaaaggttagtttcgagttccattgtatttcttgctttctgtatttgagaaaggatgttctttctgggttttggtattttggggcttttagaaaatgcatgtttgtaagggatatgtatgaggttatattttttgggtaaaaaactgggtaattttatgaaaaatgacctgtaatttggaataac

SEQ ID NO: 282865 - DNA, 512 bp, Cannabis indica
aagctaaaagttgacggtctttttttaatctggttcgccattgccaaatctagattgcgcagctgcaaaattgtttacaatacataaattaagcaataaaattataaatctctcattttccatacaatgaattcaatacttactatttctttaatcttattagattgtcgaactggagatttttcatcagcaagtgagtcccacacttctaccgtctttagagatataataactcgagcaaggcaatagtggctggacgataaaatcggaatgtatatctacaagaacgtttagacttacaacaaataaaatatatgcaataggaataggattaggatgtaaaaagaaaagactcagagcaataaaaccttacttctttgcagaaatcaagatttcccatgaatatgttgtagtaatccatttccctccaaacttcatgtaatggtaagtcacgatacggtaaagattctttctatttgaaaattagaaatatgttgagatcaacattatgt

SEQ ID NO: 282866 - DNA, 395 bp, Cannabis indica
tttatgaggaaatttggaagtgttttcagaaaaaggcggcaagttatttttcccagctctcatcactcagatttgcctagcgggtaatgccgctattggggacgatgaagaacttctaagagagcggatcagcattgatttggtctcgattcagcgtgttgccactcattgcacaccctcgactgctcctcccaaacgtcaccagccatctagcagtcagacgacttccgccaatcttcctcgcactcagcacgaacaaatcatggatcgcctagcacaccttgaggagaagcaacttacctactttcgctatgttcaggcgcgcgacactgcattagcaaaatctctaaagcgaatggcgccaaggccgatagttgacttcccagtgttcccac

SEQ ID NO: 282867 - DNA, 536 bp, Cannabis indica
gtcctctactaaggaaaagaggccttccggggaggtcattgatctttctgaggagctgactgctgcaaacccctctacccccaaacctgccaagtccaaggagtctggaccttcaacggttgggtgtgaactggtcaggagtgatcttgaacgggtgcgggcacctactccacctttgccagtgcttccagaagccaaaatgggcaaggagatgctggcccattacatgaactggctggttcctgagatcagtgagcaactagctggtgctgaaaatgactcttctttggaattgttagtgggcggagtcttgaaagagttcaccagggtaaatcttttttgatacttccctttaattttccatacttagctcaatatgctaaagtttttttttcttttgtgcaagtcggtctgaagttggcctacacttactcccaggctaagtttgctgcttccaagaacgcggctctgtccgacaccctgaaggcggaggcggacttggccaagaaggatgctgaagaagccagggtggaagt

SEQ ID NO: 282868 - DNA, 576 bp, Cannabis indica
acagtggactaagcagatcatagtctgacggaaccactataattctctgttttattgttattttccagctttcgttgattgttttcccattcccagtcgagtactcgccattttaggttgaatactcgcacttgtctttacacataaaattctctttgatatttacaaaataatataatctggtgttgtgaaattcactcgacaacatttcctacttgggaatgttttttcccttgtctgggatctggctggaggatatttccttcttagccttggccactgcaaggttgtaacattcccgagcagattgctggttccctcttagacaccctaccccattctttgttgggaacttcaggcacgagtgaaatattgatgtgacagcttttaagtcatccaaggctggtcggccaagcattacgttaaaggctgaaggaacatccaatgttaggaactttgccatgatagttatgctcgttggagcttgtccaacagtgaggggtagccagatttgtcctagacgtgcaactccttaatcggagaaaccatagacaggctggaggcatggagttagat

SEQ ID NO: 282869 - DNA, 614 bp, Cannabis indica
gagcatacaaattaggtaagtatgacgaaaaatgcaactcattctagtaccacgatattggaatggagaacatttaaggaaatactaccaataaagtaccaggtcgggtagaccactttaagtatacaaggtcggcatgaccacttaaaagtactcaggtcgggttgaccattttaaagtactaacgaacattcgcttttaagtgaatggccttctgggcggactacgcgcaaaggtttcagaaacaaagtactcaggtcgggcagaccactttaaagtacagttttttatgtctgcaatttttttttatttcatgttaagctaaaagatcagactggatcaaatagctctgatgcaagttactacggtaacaaatacatttttgatcaataaatgaataaagatagtatttccaattcaattgagtcaaaagaaatcagcatgattataatttacctaaagtgtgtacaaaaggtttagtcaaacccaaaacactgaacagataagcaataaatttacgaaaaataagtgagcaagagtaatacgtctgctcggtaacttggggggcacctatacatgtataaagcattcggtaaaagtaaaacaatcacaat

SEQ ID NO: 282870 - DNA, 617 bp, Cannabis indica
tgttattttttaggtttcaaaacgatttcaggtctttgctgtttatttttgtgtagttgtatctgattggtagtttgtttgtagtttgtttatagttttattacagttttcatactgttttattcacgattaataatttattgtggccattttcgttatgttgcaggtttgggactacaaatttagtccttctgatttttatagatctaagtgtgtatgcactagtgttttttccgtgatagataatattaagaacactttatctgttaatttgctttctatgtttcgtgaaactcagtttggccattttctagatatgcctgagtttgtttttcatccgcaagttgtacatagtttttactaagggaagttttccagcccaatcctaaagagttttgggctaaggttgctggccgttgcatacggtttagtgccgaggaattttacttgatttttggaattgattgtttcggtgattgcaacaagttgttgttttcacaggaaacaaatcagttggtagaaacctgtttccgtggtgtaaaaactattgaccacaaaaccatcgaggatgcttttttgggtagtcggtggggtttggatgagtctcttggtttgaa

SEQ ID NO: 282871 - DNA, 530 bp, Cannabis indica
atgggtatttaaaccctttgataggaattaaattccctatttttccctcttgtttcttaacttccttcttccctcccttacagaaacttcaaaactattttcaccttttgcccagatttctaccgttcttccaaagcatccttcaatctcaaaagtaatcgagagtaaccgcaggaacaacttgccaaaactaaaggttagtttagagttccattgtatttcttgctttctgtatttgagaaagggtgttctttctgggttttagcattttggagcttttagaaatgcatgtttgtaagggatatgtatgagattacattttttgggtaaaaaattgggtaatcttatgaaaaatgacctgtaatttggaataacagcatactgtgtaagaaacatttaaatagacgttgtttcatactttgaatactcgcgggtaatcggatgaacagtttgaatactcgcacactgacagaacttatttacctctgactattagctagatttttttaggattttatatgctgtgggtt

SEQ ID NO: 282872 - DNA, 1023 bp, Cannabis indica
tgtttgggtctgagttcaggttcgggttcgggtcccgagtccaggtttgggtggggatccgggtccggctcccaattcgggtctaggtcggatttggagttcgggtccttgtcctgttacggctctagatctaggtccaatttcagttttgattccaagtccaagtgctagttccagtcccggtcaacttccagttttggttccaattttcggtcacagggtacgggttcttgtccacttttgggtttgggatattgtttaggtccgggtcctcgtcagggttcgtgtccagggctgggtcctaaatccagaaactaactacgggttttgtccaagccctgggtccagatccggatcccaatctcgggtcctagtgtggttccatttctggtgccgggtcacgagctgggtcctaggttcaagttcgagtccctgtcatgtactaggtctctttcctagttcgagtcctcgtctgagttttggttcgggtctggatttcagtctaggtccagatcaggctctgggtgtgggttcccgtcctgggtcttggtctatgttgggtccgagtcccaagttccaatccaaatctgagtctggattcagttctgggtctaagtccttagttctgatcctggtctgggttcgagtttgggttcgggtccgggtctagctttgggtctgattcaaggtgtgggtttgagttcaggtccgagtctgtgtccaggtttgtgtctaggtctagaccccgatctgggtctaggttcgggtccaggtccaagttggggtccctagtgcgggtccaagtttgggtctgggtcaggatctcggtccagatgtaggtccaacatttcgatcccggtctgggtcttggtccgagtctaggtaagtatctggatccctatctaggtgcaagtctgtgtttgggatcgggtcccagatttaggtgcaggtccgggtctcaattccggtctgggtacacgatcgtgtccgcgcccgagttcaagtctccgtttttgggtttga

SEQ ID NO: 282873 - DNA, 672 bp, Cannabis indica
aaatctcactataacacatgcccctagtttcgcgatgtgatagatgcggtcacgagggaaactatacgcgagagacaggtgaaaggttgtcacgaggaggtgacctttggttgtcccttcgagggcttcaaaaaatgacggctgtaattattgctttttattgcatttatggtgccacgtcacgaaactcttcggttttcgtgcaggcgtggccatggctggccgttagattgggcgaccttaggcattcttgttgccacgtgtcgtaatcccaattaataagagatatgggtatttaaaccctttgatacgaactaaatccttcatttttccctctcgttcttaacttcccttttccctcctttacagagatttcaaagaaacctccatactcagcccagattcctgcctctccttctaaaatctcttcaatctcagaagtgatcgagagcaatcgcaggaacaacttaccaaaactaaaggttagtttcgaattccattgcattttcaatttctgtttgaaatgcaaagttgttgttttttctggatcttggtattttgagggattttagaaatgcatgcttgtaggaaatacacatagggttatgttttttcagtatagaactggataatctcagaaaaattgacctgaaatttgcataaccgtgaact

SEQ ID NO: 282874 - DNA, 706 bp, Cannabis indica
acttgaaaattaccacatcacatgaaactctgtataagagagtggtagacttggccttaattgctgaggaggctgagcagcaagtaatgaaagagcaggctgcaaaggatgtcgtcacggcatcaaaccctcatgctagttgtaatatcagtaaggggaccgatagtggcaaccctgagcacaagcggaaggctgaggcttccggagcattaggggaaatagaaactttcggggaaacagaggtggtcgtcagggtcacgggtcctcattccgatcatatctcgagtgtcctaaatgcaagaagcatcatccgggtgagtgtcgagccaagccatgtttccagtgtggcatggtgggccactttattagagattgtccccaggtcaagaaagaggagcctaagaagaatattgctcagaacccggggcgacttttcactatgactcaggttgacgctgatgctagtctgtcagttgtgacaggtcagttgtctattaatggttgtttatatactgtgttatttgattcgggagctagtcatttttatgtatcgactagagtgatagaaagttttcataagccatgtgataattatgcttcggggtttggaaccctgttaccctcgggagacctgatagtatccacaaggtggatttggtccttgtatttttggattgacggttgtgagttgaccgccaatctaatt

SEQ ID NO: 282875 - DNA, 503 bp, Cannabis indica
gttgatggtgcgaagaaattttctccaaggtttagattaggtgttgattatgttgaagataaaacctggtttaatcatttggctacctgtgacatgtttatcaatgactcggtaaagtttctattttccattataatttatgatagttggttttcagttgttttatgaatgtttttaagtttagctactgtattcaagttttcaaatagttgtttaaccttttgattttgtgtttctgttttgttttgtttcagcatatgaacactatattctattaccttacgaaaaaaggtaaatattcttctgctgttacattgaattttgcgacaactgattgtcttttcgatgattccattaaagcgttgtaccacaagttcaacaaagccaaggcaatgaaaactaagatgttgcacatacatgctgcccacccaatagcgcattacatccaaggtttgcgaattccgtgttctaagccttggtatgaagtcgatcatgtgttattc

SEQ ID NO: 282876 - DNA, 124 bp, Cannabis indica
gtttcctaaagacatcactttctatgtatagaaagccatctaggtttagtgaaaatataaatggtaattacttgcatagtggccggccatgacaaggataattgggccctactttgctaatttt

SEQ ID NO: 282877 - DNA, 795 bp, Cannabis indica
taaggaattggaatgcttgattgttgtaatccttaggtagatttcatctgttatttcctttaacagattgttgttacaggttgctctttttggttgcaacgtgacactgtgtaattggcacttgtgcctttgtttctgtaattatttttctatatatgaaaatcagtagcactcatgctctttgagctgagtcttcattttctacatttctctcgaatttgaactttggtgtcagagccattcaaaggccaacactcatgacaactgaaagcactcaaatgtctcaggtcacaccaacaaaaacaagttcagaaaactcctccacaagctccagtgctcaatgaagctcttttatggcagcacctccactggtccgtccaggaacactttgagtcaaccattttcaatgaagctagatagaaacaactatctgttgggaatattttacgaggatctagacttttaaacaagtatgtttcattaacatcctaaatatgaattctctaaaacaataaaataaacacataagagtttaagaaaaccttatattggttgcagcggaataatatgactcattccgttcagatctctagcccttgattcctttctgtagcagagcattatcaaaatctgaacctgaatctctttctctccttcgggtttggtcatcaccgtcttactcactatgattgagtacttgacttgctatgtgtgggcatggcactcatcactcaaggttcgaatagtgaagaacaatgaaggaggtgaaaaaaaaactaaggaaggaactctctc

SEQ ID NO: 282878 - DNA, 681 bp, Cannabis indica
ttgtttctgtccccaagaaggggcacaaacttaaggatggtttttacggcttctgggcccacccttcgaatgagggtgcggtcccttataaccagcaaaaacacgtcaaggagtaccgccatcagtttttcttctcctccgggttccgagcagtggagcacccggagctccttacggagtgggttaggatcccttcgtacgagcggaccgcgcctactcagatctttctcagcgggccaagaccttcgcgacttatgatagggcggatctcgacgtcgggggattggtcacgacggagaattgctggaaggccaagctaatcctggcacaccagtcggtggaggactccaacctttccaaggtcctctgcccgaacgtgagggttccggccgcggagaagaccttccgggatgagatcattgccaccgcggagaagaagtaccaagattatctctaccggaaggctcaggagaaggcttatactaaggcccaagcggcttcccagaggccccttcgcgttgggagccaagtcgagaggagaagccaaacggctgccgggagatcccttcgcattgggagcccggttgagaagagggcatcccaggcaaaggcctaccgtccaggtgccgaatacaggggctcctgacgccagcacttccgggtccggtaagtcctctttag

SEQ ID NO: 282879 - DNA, 689 bp, Cannabis indica
ggttcagatttagaatactgcatttacaaatcaaataaataataattaatagtccaaaatctattagtcatcacaactatatatatatatatattcaaatcaatcaaacaatatagttaaaaggaggatatagatgaatagaacacaccccaagttagaacattattcatatatgacaattaattgacaccttctcttcaaacaagattaatttatttgacagaaaaggataataatttttgtggggtgactgattcgtgacacttgtgttgactgatgatgtgagtagtcttgagttagtgattttcagttagactctttcactaattgttagttatttctgttaaaatttggttatatgggagcattacaaattaaggctttttgatagagaattctgcggagagagttcatttgtaattggagcaagactcctttggtgattgagctgtattgttctctttattatccttgtatttaatttggagtttattatgttcttgattgatgttctttcttaattaagttgttgttcattagtttgttacatactgtgtcttgtaataataagttaataacccttttatgtgagctggaataatacaacaatgaacccttttaccattttgtgtcatgagcgtgtgtgtatgtgagagtttgattgagaaaaaagataatctgaaatagaa

SEQ ID NO: 282880 - DNA, 626 bp, Cannabis indica
aatcttaaaactttaggggttttgtttatcattaaattctcgttctattgatatattatatgcatgaaatcattatgtatattaagagaattttaaatttaaagttttagggtttatataattatattatgaaattataatttgtgtgttttgattttattgttttttaatctaaaattgattatagataactcattatcaattgtttaagaatgttcctacatgattaatttcggatttaaaccgagattggcattacaatttttttttcttttgtgttcttcaattttcggattgattttagcaaaagatttgcacatttaatctttaatactcgaaattagtagcgtagatccattagaaattccatcccgaccgaaacccatgcaaaatccggtgttttcgtcgattttttggccggaaaacacaagcagacccgactggacgaaccgggtcgcgtgacccgtatgcagacccagctgaaggttgaaggtgactcccagccgcgaagcccactcgcgcaggcggcgcgtgggggcgcgtggggccacctgggatatcgtttttcgacgttcttttttacagcgtgcttaaaattcaatttctgatttttctatgatttttaa

SEQ ID NO: 282881 - DNA, 711 bp, Cannabis indica
ttgatattaattattttgggtttgaaaaattaaatttgtttaatttgttatgtttaacagataacgctcacttcgaatcccgtaatactgcccaactactactccgactcggaaggaagaaagagcagtgaccactttgtcagctctatcaacgagttgaaggagtacatctcgaatgagttaaagtctcagttgagatcattttctttgaaatttatggacaaaggagaaggtgtaggtggtattgaccgagagttggaggaggatgctgctgcggaaacggggaagaaggcggagtgcagccaggccgtggaggagtccccgttgaagtcccctgtccgttcgaagactaatgttgttggtctatccgacgaaaatgtggtggattctgtaagtacgccttcactatctgttacaaaatctgttgaagatgaaggtgctgcacataagaccttcgacgatgaggactttgatatagtcgaagtggcatctttctggaataaaggcaaagccctcgtcaaatcaaagaagacacagtcggagaatgtgcctttaattgaggatgacttcaacgataaggcgtacgagcaattcattgagtcgggcagaactgttgtcgggccattcaagacgaaggaagcgatcccccgtaaccaatatgggttttacaagtttatttttagcaacacgttagatccggggtaagtaaat

SEQ ID NO: 282882 - DNA, 528 bp, Cannabis indica
ccatcgtcgtgctgcttcttgaatcgttgaggaaatggtggaggtggcttttgcaaagacttttctgcagcagaatgctgactggatgctgtaactactgggggaatttcagcagctgaaattgctggttttttcttcatttccccctctttttggattgaagagggctccttactgcctgttgcagccacatttgactcaagaatttttccacttctcaaggttaccactttgcaatgttctttgccatctcttcttgggttttcggtgtcactaggcaaagtgccttgtggtctattcttcaaatcattggccaattgccccaattgaatttcaagattccgaagagatgctgcctggctttgaattacagcgtcattcttggccatataatctctcattaagctctccaaagaactagtttgagagccttgaggttggtgaggttgttgaggtcttggttgttgagaaaaacccggtggaaatgattgctttccttgtccttgtgctccacttgaacttgcccct

SEQ ID NO: 282883 - DNA, 592 bp, Cannabis indica
gtttttttttttttatttatgtatatatatatatatatatatatatatataaaaagtagtttcagataacactacaaatgagcaaagaactcaaagggatgaaagctaaaagactacattaatttatggcatcagtcaatatatgaagtttctgatacataaaagatttattaatacagtttcccctaacaaataccaatcttaccgacatacgatcactcaaatggctgtttaacaaacagtgggaaaaaaaaaagtataagaaaacgacttatgccctatttattattattctaattactctattaatgctcgaccaaaaccccccacacagtgacatagacacaaacagagaaaaaagtgtgatctatttaatggaaatgattctacaagtacacaaatatacattagctatgcctatatggtgtaatctaactagtatatataagtataacgacaaataatatatgaaaattctacaacgtaccccttaaaagtaatatactgatacatctatttctgttttagtattcgaaataatttttagttcaattttttttttcatggtcatgtaaattatagttatttaaaa

SEQ ID NO: 282884 - DNA, 677 bp, Cannabis indica
ctcctaaatcgtcttcttccactcgttctcattcaccaccatcacccatacttcctgcactgccaatgatggctcaacaacaggaaatccaaccaagaacgctacaggattatctacatcctacgcgtacggccacaccttcatgcataatgtatcccatgaatatgcccaacttcgatttcaaacctggcatgattcaacttttaccaacctttcatggtatggaaaatgagagtccatatgtgcatattcaggccttcgaagaggtggtggccacattcaacaaccatgctgacatcataaacttggtgagattgaagttctttcctttctcactcaaggaaaaagccaaaagctggttgtattctttaaggccaaggtctattgggacatgggaagaaatgacaaaagtatttttctctaaatttttcccaccccataagaccagcaaccttaagaggcaaatctctaccttcacccaaaaggaccacgaaacatttcatcaggtctgggagaggtttaaagatttgatgggccagtgcccacatcatggatacgaaagttggcgtcttgtcagctatttctacgacggtctcacagccgacaaaagacaattcgtacaaatgatgtgcaatggcgacttccttcagaaagatcccgaagaagctttggaatat

SEQ ID NO: 282885 - DNA, 799 bp, Cannabis indica
taatattttagtataaattaaaggtgtacatagtattacataaaaatatgatatataattcaatttaatataaaacaatacaatacaatatgatctaatacaacgtaccaaacaaacactttaagtcttagatgcaacttaaagtagctcaattgaagttacaaacacatatcaacataattatgtcatcacatatatgctctatttaatgcctcatcgcaaggtccaaaaaatttatagcttaaaatagattatgtcatatcgttgcctaagaatgctctcttccaagatgtgtcgcttgggttgatgactttaatggcatcctctatttgatattattgttcgcgtttttaactaaagacaagtgtcaccactagtttaggcctaaagtgaagctaggttaagatcagcatgattttggagaatagtcctattctatgtggactccatgtccaaatgctttaattgtctggatgtagttgtccaagtagtttatcacacctccttcaaggcattgatccggatccaggagaaagtgttttggatgaaaaatttcttacagaggcggcaacaaacgtctgacacaatgtataacgtcttctcccctttacacatttgtcgatctttctatgaaaagaagaataaatgtgggatcatggttttattactctaacattctccttcccactgttaggctatttttagcctatgttttggatccaatttatgtgcatttctagctgtgttgggacggaattacgcttgttttctatgttttcaggttctttggaataaaaga

SEQ ID NO: 282886 - DNA, 704 bp, Cannabis indica
caaaatatgccttttggtgtccgaaaagcagtgagctcttcgtcctcgtgtgccattttgatttggttgtacccagaaaatccatccatgaatgataaggcatcaaaaccagtggtagcgtctatcaataactcagtgatggggagtgggaattcatcttttgggcaagcccgattaagatctcgataatccacgcatatgcggagttgcccatttttcttcatcactatgacgatgtttgcaagccaagtaggatactgaacttcccgaataaaccgacagtctcttaacttgtcaatttctgcctcgactttgggaagtaattctggtcgaatccttctttgagattgtttaacaggggtagcatcttttgatactgccaacctgtgcacagcaacctttcggttcaaccccggcatgtctcggtataaccaagcaaatacatctttgttctcgcgaaggacttgtatgtactgtggtaactcttcttcagataataaagcactgacaaacacgggctttggatcatcctcggtcccgagattgatctctactaagtcatccacagttgcttgtcctccatcttcgaattcctgaggtgctggttgaaagatgtctataaaatcttccgaagggtttgagcttgagccttcatcttctacggtcaagctttcttcgaaagagaggtaattgacttgagcaaa

SEQ ID NO: 282887 - DNA, 546 bp, Cannabis indica
ggatacaagggttagagatctgagtggaaggagacattaattccgctgcatcaatgtaaggttttcttaactttatatgtgtttaatttatcgttttagaaagttcatatttagggtgtttaaacaacatacttgttagtagatctaagatcctggtaaaataaattccaacattttaagaattcataaaacaagtatatgccttcgactaagttttcatacaacaacagttatcaaagtatgataagaatagttccctataagatgttgaatagtatgaagtatcatttttgaaacccataacagaaagtatatagattcaaagtcagtttagcaaacctgatagattttaaagaaaattatggccaaggttctgcttctcaaaataggcagtaaaaggtgtgctaacatgaagctcagaagtagagaaattcccaactagaggaaaacatgttagtccatgtatgatgttatcagtaaagggataaatggttgacttattttaccaggatctagatttactaacaagtatgtttcattaacatc

SEQ ID NO: 282888 - DNA, 964 bp, Cannabis indica
ctctaagattgacttgaggtctggatatcatcaattgagaattcgagaagaggatatcccgaagacagctttccgaaccaggtatggtcattatgaattcctggttatgtcttttgggttaacaaatgcaccggcagcttttatggatctcatgaatagggtattcaaggatttcctcgataattttgtaattgtatttatcgatgatattcttgtgtactctcggtcagaagcagaacatgagcaacatcttcgaatggttctgcagcgacttagagatcataaactctatgcaaagttcaaaaagtgtgagttctggctgtcacaagtgtcttttctggggcatattgttggaaaagacggaattatggttgatccagggaagattgaagcggtgaagaattggcctagacctaaaacagtcactgaaattcgaagttttctcggtttagcgggttattatcggcgttttgtggaaggattttccaaaattgcgatgccgttatccgagttaactaggaaaaatcagcgatttatatggtcagataagtgtgaaaagagttttcaagagctgaagcaacgattgattacagctcctgttctagccttgccatctgatcaagaaaagtttgtggtgtattgtgacgcttcaaggcagggtttaggctgtgtgttaatgcaagcagataaagtcatagcttatgcttctcggcaattgaaagattatgagcagcgttacccaactcacgacctagaacttgcagcagtggtgttcgccttgaaaatttggcgacattacttgtatggtgaaaaggtgtgagatctatactgaccacaagagtctcaagtatttcttcactcagaaggatttgaacatgagacagagaaggtggttagaattggtaaaagactatgactgtgaaatcctgtatcatcctggaaaggcaaatgttgtggctgatgc

SEQ ID NO: 282889 - DNA, 525 bp, Cannabis indica
cttattcctcaagcttaccgcttgctttcaggcttgttcattttttacgctgcccggagctggggctcgcccagtccagctgaaattttgtatttttacgaacttgtttccatccctaaaaagggagataaacttaaggtcggtttttacggtctccgggcccatcctttgaatgagggcccggtcccttataattatcagaagcacgtgaaggaatatcgtcaccgcttcttcttctcctccggtttccgggccatggataactcagagcttctcacggagtgggttaggatcctcccttacatgcggaccgaacctactcaaatatttcttcaacgggccaagaccttcgccacatacgacaagaaggcccttcacgacagagcattgtcggaaggccaagctgatcccggggcaccagtcggtggatgactacaatctttccaaagtcatctgcccgaatgtgagagctccggccgcagagaaagtgctccggggtgaaatcatcgccatggcggaggacaa

SEQ ID NO: 282890 - DNA, 566 bp, Cannabis indica
aaaattcatttcaatataattagatttactaattaataaaagattagaaatcattttatgttgcacggttcacatgatcactttcatgattagaagtttaatgtataaattctattaaatctagaacatatagttattcatgattataattttgtcaacacagttgaatataatcatgattatatatttcaaagtttaagtcctataatttatcagtacattggatttacactaacatgataatcaacgataaagtttactttgtaaagaccgcatgtgattaatattttggattattaaatatttagggtttatgtatgagattaatttataattaggaaatgtatattttggaaatatatttattattatatatgttattatgctattttatgtaaattacccaatttctgtgattgtgttcggaggctgtggaaagcgacgttgggcctttagagagtcatattttatatgcttagaatgttaaattttggggtattattgtaggtttaatagtattggttattagttggattactttgctaatttaaaataccttaggagcc

SEQ ID NO: 282891 - DNA, 938 bp, Cannabis indica
tcatttgaaacttcaagtagcggctgacagcgtatttctttgttcccgcctcctcggtgtcatattttttctgtaatgcttcccatatctccttggcagatttgtcagaattataataatcatacaaatcatcagacaaaccattcaaaataaaattcttacacagaaaatcattctctacccaggagtccctttccttaacctgcgattcgtacttctcgacttcatccttcttctcggcaggaggtggagtctcagaaacaactggtttcaaaacagtaagcacatacgcaacttttttcatggtcagaaaaaacaacatcttctgtctccaacgtttaaagtgcaaaccctcaaaacgaaaaggcttgttaatatcagcagtagaaccagaacattcatcggtagtagtcatagcagaaagaacgtcttaaaattgttgagtaaactgctagcaaaataaaagaggaacgatattaccgaatgaagaattctgggttgagtcgcggactaagtcgctctctttaagacgttcgcggcactgcccaggagtgtgcaagcagtcggaaattgccggtcgtccccaggataaaacagcccagtcgttgcactgtatcggaaccccactgcactgtagagcaccgtcgaatacacccaaaaaatttgatatcgcagatggaattttaattttatgaaaactgtatttttctgatacgaaaagagatgttttcttcccatcagttcaatcgcattatataggcgaatggattgaataaacataacgggaagaataacgttttctgaagtggggtgagttggtcctttgaacgtgtcccgtaactgatacgactaagtaatcagtttaattaaacacgtttcttaattaaattaataaataaaaaataattattttattaaataatttttctgtaaaaaat

SEQ ID NO: 282892 - DNA, 726 bp, Cannabis indica
tgaccgaggcaggccagtgcaggaaggcgtgaccgaggcaggccagtgcaggaaggctgaccgtaggcagaccagttgtaggagactgaccgtaggcaggtcggaggcacatgttggcgttagacctccaagttgtcccatctatttgcatatcagcatattcagattgttgaggttgagaacctctacgacagaatgacttcctaacgttggagtcgatgttcctccaagtgttgttgatcagagacttgggtctctgttcttataggagttgagtctagtgatgccattggtgcaattggaactcggaaccgactttgagcaacactgggagtcgtcatggtagccttcagtgactccatttgtgattttattgtggcattttcactcctaaatgctgcgttctcctccttaaaggttgcattttctcgctccagaactccagttcgctcagccatctcgcgcatctgggccattatcgtggcaagctgttcattgacattgggttgttcttgggcaacaaactctccttcttctgccatttgaagtgtggtaatgatagatcgccttgctcacagtcagtttgtcagggccccacggtgggcgccaaattgtagatgctaaaatctacaatgattggaatgagcgtttgtgggcaccgacaacctgcggaaaaagacaaaggatgaccgtaaaaccttgggacaccggggtggtgccggccga

SEQ ID NO: 282893 - DNA, 772 bp, Cannabis indica
tttgcaactgtttaatttcagtcttttttgttttttaggtcccccaacccaatccagatgttgttggtcaaaagtcagctgcccttcatactgatgaagaaactgaggacactgtctctgatacacctctgttggataagaggaagcgtgctccggccttgaaatctccttttgttgatttcgggtcggctgatgtggggagcactccaatggaggtaatgtcctcaggttctcaatcagctggggatgatagggattttaaaatggttacttatgtgaagggcctttatgctcttaatgattcatttgctgatcccgtatctcctgagattgaggcaaagtttgacgcgtggattggtcaaggcttgcttaaacatcctaggtgactatttttattaaatctgtatttgtattctgttttatttttcagttttattctggttttaatattgtttttttgttgtttgtttgttcttttaggcattacaattgttatgttgatggtgcgaagaaattttccccgggttttaggttaggtgttgattatgtggaggataaaacatggttttatcatttggctacctgcgacatgtttataaatgactcggtaaagtttccattttccattatagtttatgatagttggttttcagttgctttttaaatgtttttaagtttagatactgtattaaagtttttaaacagttgttcaaccttttgatttgtgtttctgtcatgtttttgtttcagcatatgaacaccatattctatt

SEQ ID NO: 282894 - DNA, 494 bp, Cannabis indica
accagtcatcaggagcggggatcaccctaacaacattagagggacaacgaattcacacggccattcgctttggtttccctgcctcaaacaatgaagcagagtatgaagcattaattgccggtctgaaactagcaaaagaggtgaaggccagacacttagacatttacagcgactcccaactggttgtaaaccaagttttgggagagtacatggctagaggagaaaagatgatggcctaccttagcaaaatacaagacttgcttgcccaactggaagggtacaccattcaacaaataccacgagaagagaatgctaccgctgatgccttggcaaggttggcaacaagtgaaaagatagataaagccagccttgtgccaatagaatacttacccgagccaagcatccgcaccaaagaagaagtactcctactcgatacgactcaatcgtggatgacccccatagccgcttacttagaacaagggacactgcccacc

SEQ ID NO: 282895 - DNA, 879 bp, Cannabis indica
aaaacccttcagtttacttttctttgcaaatttaaagttttagttaaatattaccgttaaatactaactggattactactgtatcgacttcgaggttttaccgttacatatacaaaggtgtatacagtggtcatccagttgatatttaacggtaatatttaactggcgtgtcaaatttgcaaagaaaaataaacataagggggttttgccaccaaaaaaaagataagggggttaagtgtataaaaattaaaacataagggggttttgccacaaaaaaaaagataagggggttaagtgtataaaaattaaaacataagggggttttgccaccaaaaataaagataagggggttaagtgtataaaaatcaaaacataagggggtttcgccgcaaattgctcaaaaaattaatagaggtgacacgggatacagcagacaaaaacattcaattgaacacaaggatcgacttcatatatttatatatatattataattatatgatatgatattctattgtaagtaataagatgatatattattgtactgtaatgtgcagtctgcgatcaatatagatgcatggcacttacgaagcccggtcgtcatattatatatttaatatatatatagcgacacattttttttggtggaaaaaacttattattattattattatttaaacaaatagacatttgtttacaaataacaaagtatataagtgaagagatagtctctaaccaactacaagtctcatccacctctaatgcgtattttctaattattattctaacacacaaccttgatttaaaaatatatacatcattatcatatatatttagttaaatgggatatagagtgaaaagccacacaaaagttactattga

SEQ ID NO: 282896 - DNA, 694 bp, Cannabis indica
agcatcataggcttaaatttaaaattgggacacataattctaaagaaattttagaatatatacatgctgatttatggggtccagaaaatacagctactcatggggggagtagttattttctatccattgtggatgactactctaggaaagtatgggtttttcttttgaaaaataaaaatgatgcctttgcaaaatttcaagaatggaaaatttcaatagaaaatttaactaacaaaagagttaagactcttaggaccgataacggtctagagttctgcagcgatttgtttaacatgtattgcaggaataatggcattcaaaggcataagactgtaagattaaacccgccacaaaacggagtagctgagaggatgaacaagactattttaaataaagccaagtgcatgctattccaagcagggttagctacgggattttggggagaagcagtactcacagcagcttatttgataaaccgaagtccatcaagtgctgtggagttaaagacccctgaagagagatggtccggcaaaccaccagatttatcccacttaaaagtttttgggtgtgcagcatatgcacaccaaggagatggaaagttagagcctagagttctaaagtgtgtatttttgggatattcagaaggaacaaaagggtatagactttgggtaagagaaaaaggttttaaaactat

SEQ ID NO: 282897 - DNA, 748 bp, Cannabis indica
ccgggagacttatctggatgcatttgaaagactgcctctttaacttcttgatccaatataggccgtagtaaagcctcattatgctcatctcggacagtaggcacaacacaatccaacacctcctcccagctagtaggttcagcagtaaaaatatccttgtagtactcaatcaagcccattatcccattgtctcaaggtccccttagagtttttcaatctagtaatgtcaatgcttaaaattaatttaataggaaagaaaataatatttactatactaatcccatacttcattaattagtattatattaatttgttttttttaatggagagattgaaattattatattttcttttgatatttataaatatatttatttttctttcataactatctattttaataaaaacaaaataagatatggcgcgtgctactgctgctacaggtgaaatatgagccttttatatagtgcatgagtgtgactgccaccctatctaattatatataataatctaaatttatctttgttaatatatttcaatttggacatgtatgtctataacattttcttatgtggaattaattatgttaaatatatattgtacaaagtcttatatgaagtagagttattcaaaaaaattgttacttttagttaaaacaaaatagttactcgtgactaaaatataataattagttacaagttgtcactaatttagtttttagtcgcaacaagtattgtgactaaaaata

SEQ ID NO: 282898 - DNA, 761 bp, Cannabis indica
acaccatggccggccacttgttgtagtttttcaaattgatattttcattattttaatgccaaataattcctaacctaaacctagtagttgcctataaatagaaagtgatggctcagtcaaaatcataactttcaataacattttctgacagaaatttctctcttcagaaaaactgagccttcccttttctcttctcttggccgaacccctctcttctcttttcctcttctaaatttcgaccctagtgaaagagtgagtgcccacacacagcaagtagtaactcaatcatagattggaagactgtgaaggatcaaactcaaagagaaggacattcgggctcagatcttgataatactctgcgacagaaaggatacaagggttagagatctgagtggaaggagacattaattccgctgcatcaatgtaaggttttcttaactttatatgtgtttattttatcgttttagaaagttcatatttagggtgttaaacaacatacttgtgagtagatctaagatcctggtaaaataatttccaacagttaatcaggaaaaaaaaaacttgttgcctgattttttttttttaaattaaaagcgtctttaaattatatgagatacattgttgggattcgataacatgactcctcttgcacatacctcctaatactctttatgaatcaatatctcttcttaaaaagtagtcacttataatgtgttaaatcaattaaagtttagcacatcaactaatctaatttatattaa

SEQ ID NO: 282899 - DNA, 990 bp, Cannabis indica
tatacatgttcctgatctagctattaacctaccaaatcaaatcatcaacacgcatgccatgataactagatcaaaggtaggtatacacaaacctatatcggtattcaccatgagcccaaaatagtgaaagaagcacttgaagatcccatatggaataaaattataactaaagactttttgctttggtaaaaaaaaacatggaccttagtttgttttagccctaacatgactattattactaacaagtggatctttggaataaagttcaatgcatatggcttagttgaaaggtataaggttaggcttgtggcaagaggcttctaacaaactcctgggcttgactattttgagacatttagcccagtagtaaaaccatcaacaattcgagtaatcttcaccatggcagcatgttatgagtgggaaatacatcaagttgacatcaataatgtcttcttgaatggagaccttcaagaaagagtgtacatggcccaaccagaagggttcaaagaccccaatttccccacccactatttgcctacctaacaaagccattggccttaacaggaccaagaacttgataaacaagctgcaacagttgttggtgcagtgggggttccgaaactccaaagcaaactcctctattttttaataagaagaaggcaaattagtcctttacttgtctacgtggacaatattctcatcactggtgtagactcctcataaattcaaaaggtaatcacagatctgaatcttcagtttgcacttaaaaatattgatggcagagaaattatatgtctccttccactgagatctctaacccttgattcctgtctgtcgcagagtataatcaagatctaagctcaaatgtccttcagatggatgtgatccttcaaagtcttccaatctatgattgaggtactgtttggtgtgtgtgggcacttctctctcacaaggaatttcgagatttctctctcttttctctcttgattt

SEQ ID NO: 282900 - DNA, 505 bp, Cannabis indica
aagttatcctagccttagaagaaggaagcccaaatttccacgagcaggagggcctaccataaccttcaacgatgaagacgctgtcaaaatcagatttccgcacaacgacccgctggtcgtggaagtccaaatagctaataaaatggtggccataaccatgattgataacggagcctcttccaatatcttgttcaaaactgcttatgaaaagatgggactttagcgcaaggatctaaccccatgtctcctgcctatctatggtttcttcggccaaggagtggctcctccatgacaaattcgcctacccctcactgttggacaagctccgacgagcatgactatcatggcacaattcctggtgttagatgttccttcaactttaaatgtaatgctaggccgaccagccttgtatgacttaaaggctgtcacatcgatattccattcgtgcctgaagtttccaacaaagaatggggtagggtgtctgagaggaaaccaacagactgct

SEQ ID NO: 282901 - DNA, 292 bp, Cannabis indica
aagtgatggctcagtcaaattaattctttttctcaaaaaaattctttcttcaaaaagctgagccttccctctcccttttatagccgaacctaccctccctcttttcctcttcatattttcgaaacccttggtgatagagtagtgcccacacacaacaagtggtacctcaatcatagattggaagactgtgatggatcacacacaaagagaaggacattctggctcagatcttgataatactctgcgtcagaaaggatacaagggttagacatttgagtggaaggagacatta

SEQ ID NO: 282902 - DNA, 501 bp, Cannabis indica
gtaggtatagaatatatatatatctatgccgtcggttggaattggggaaaatcagggttttttcaataatcctatggcgtcggttattgggtattaaccgacacagtaggtgctgcctttattcgacacgtggcacctatggcatcggttaatacaaaagaaccgacaccatagggttatatattagacccttgggtatcgttttcctcacttcacacaccttgcggaacatgaagaacagccacccatagcagccccaaacccacaaaaaaaccctcgccaaccacaactaaaacaacctcattctccctcatttcttaaccattttaccccatttttgtcttaaaatattctattttatatacctaaacctacactgtaaaaaagtttagtttttctcccctctatataccaaaccgaacctattataaaaaaaaggtggtggtataactccagccaccgattttagtagagaaaacgttgagtctcaacgtccattaa

SEQ ID NO: 282903 - DNA, 647 bp, Cannabis indica
agtctaacttggtgttaaactgggaaaagtgccacgttatggtgacagaaggaattgttcttgggcacaaaatttccgaacgcaggaattgaggtggataaggctaaagtgtcaacaatagaaaacttaccacctccagtttctgtaaaaggagtgaggagttttctaggacatgctggtttctatcgacgattcattaaagacttctcaaagatctctaagccattgtccaacttacttgttaatggtgtacccttcgaatttggtgatgactgtttaaaagcgttcaaagttcttaaagagaaactgatttcagcaccaatagttacttcaccgaattgggagttaccttttgaattaatgtgcgatgcaagtgactatgcaattggagcggtcttgggtcaaagggttgacagggtgtttcacacaatctactatgctagtagaaccctgaatgatgctcaactaaattatgccacaacagagaaagagatgctggcaatagtgtttgcttgtgataagttccgaccctacctgattgggaataaggttattgtctacacagatcattcagcgatcaagtaccttatgaccaagaaggatgcaaaaccgagactgattcgatgggtacttttacttcaagaatt

SEQ ID NO: 282904 - DNA, 849 bp, Cannabis indica
tcgtggaatcgcagttccatcgagtgttgcgagtcgatacgttgcatcaccaattttatctgcgatgaggtatggtccttcccaattatccccgaagaccccatgcgacgggtttttggtgtttggcattactcttctaaggaccaagtctcctgctcgcagggcttttactttcactttggagttaaagtatcttgcagttcgctgttggtaagccgcattttttaggtgcgctttgtcacgcttttcctccaaaagatcaaggcagaatagctgattctcgttgttctgcgagatgttgaaaatatccctgcgtagggaacctgccccaacttcaactggcaacatggcctcgcacccgtaagaaagtgagaagggtgtttcgccagttgtagatcgaggggtcgtattataagaccataggacttgcgataactcgtctggccaagcccctttgcgatcttctagtttcccttttatggtgtgtttgattattttattaatggcttcagtttgtccgttactctgcgggtaagcaactgcggaaaaagcctttttaatccccaaatcgtcgcatagctgtcgcatctctttacagtcaaactgttttccattgtctgaaatgagtttatgcggaatgccaaaacgacaaatgatggaggtatagacaaactcgcgcaatttcgttgctgtgatggttgcgagtgctttggcttcggcccactttgtgaagtaatcaactgcgactacagcatatttgactccgccttttcctttgggtaactcgccgattaaatcgattccccatattgcaaagggccatggacttgtgatagaatggaggttact

SEQ ID NO: 282905 - DNA, 566 bp, Cannabis indica
tttgttcctttatttagatctcttaatcttaggtgctttttttttattgtagatttctcaattttaatcttttcttccctataaagttttaacactatctcttattaatcttgcttctatggatatgatattgcagtgtttaatttttttgttttaacttttaatcttttcatctctactagcactttattatattatttatttgtaatattatgtatcgagtaaacttattgggaataacaacggcaacgactgtaggtgggatacggtgatggcaatgggtgagatacaatgattgacaacaactttgaataattgagatataaattattgattacgggaaagagttttacttaaataataataatactctaatttttctctatactactttatttattttattttacattaataatttttaatagagaaatttaaaattttatatatatattatttatataaattttaaacttcttaataaataaaataaaatttttcaagttgttaattccatttttggcatattcaattaacaaaaatattttattatttaatgtatattt

SEQ ID NO: 282906 - DNA, 655 bp, Cannabis indica
tgcaattctctctaggattttactttgttttccatcttattagagagagtttgctttgtatttcaaaattacatattcattgtattgagaggtgaggttggcaccggtagaaaaacaactcggttgtaggtgaggttgacaccgattttgtaaacaacccgagaaaagtgagattggcacttcaacaatccggcgaggttgatagtccttggaagaaaactattgtgagaggtttgggaaaaaccttggtgaaaaattccccggttgtaagggttagtcaagcccgttaacttggctcgatattggaactcaaagctaggtccatagctttgaagaccaaggacgtaggtggcatagttctaccgaaccttgtaaaaatcgagagtttgcattttctaatccttaaactctttactttacaagtttgattatttgtcataatatattgcttgccatattacttgcttttatttgattaagtggctaattgcttaattttgtgttaaaagttttgatttaccgaaattagtataaatttccaattcccccccctcttggaaacatatcttgggctaacaatattgacttgaatgatattcggtaagttataaatctaagtcaaagttcaatatcggtcccttccgatgcatacccc

SEQ ID NO: 282907 - DNA, 692 bp, Cannabis indica
aaaaaaaatgatgatgatttttgttttaaaatttgatttttgccaaggaaaacgtacgcgcccaaattgaatatttgctaccacataatacggcacactaaacgaaacaaaccaacgtcatcaggcaatgagtgtagtaaagaaaccagaaatgtgacaaatataccaacaatatttgcattcagcccacacttagacaaaacagagaataataaaaaacttagagatactcaaatttttaggaaaaaaaatggaatcaactgattaatgaatacagtttctgagtacacccgtaatgcacaccttgagcaacaaatcattaccccttccccagccacaatgatactcatgagagcactaaaccttgaatctccatacgtgtgtgagcagtgatctcatgtggtccaagaagagtgaatatcagctggaccactctctcaactaagcaacaactgatactagaaaaatcctgtgttttttttttttttaatatgaagccttcttttttttttttttatatatcactctggctcttgctttagtaccctagacatggctttcactctcttccagagatgtagccgtcctctttcagtccaagaactatagagaagagcatactacttattagaaaaaaggtgtaagagagctcttcccattgcatctggaagaggtagcctttttgactgggg

SEQ ID NO: 282908 - DNA, 933 bp, Cannabis indica
accaccagcgaccatttttccccccgtcaccccggcggtagtatccgagggaatggtccagctcaccaccgatcaatatgctgcaattcaggatcaactgcgggcactacaagccgaggtagacggacagagtcgagctcgacgccctcctcgagttcctgccattcgcaacgaaaaccctcaggtaacagtttccagacgtcatactaaccgtgtacgcagggaacgaagaactgaccctgaagctctggacttgaatcacccgatgtcaagagatcaatctgcaaggtttcctaaccagagcgcacaaatcgacgaggatcctgagcgccgcaatcctcgcagtcgtccatcgcgagacaacgacgcagagtcagcctcttcgtcatcgcatggccgcactccgagcaggtatacaaggtccggctctgtacagacacaacagggaggacgttatcaagtacaccgaggtgatctgcgtgatcatctcaacgcagttttcagggcacgctcccgcggcccacataacactgagacgctccgtgatccccatgcgggcgatcagggtgtcaacgcaggtaataacccgcctatcgcgccgatcgcgactactgggattaatatcccagcaaaccttgccgcagtggttgcgagccccgcagtcgcagcgactccagcccctgcgacaggaggaattgaccaaagcatgcttctgcaagctttgaagatgctcgagcagcagcgcaagcctatatacaagctgcatggcacttcgccttttactgcagaggtgcgacaggcccaacttccaaaagggtttcgtttatccgaatccctcaaatataaaggtacttctaacccgttagattacttagaaaagttcaatactataatggaagtggaccaggtaccgcaacttgcgaagtgtcgcat

SEQ ID NO: 282909 - DNA, 566 bp, Cannabis indica
tggaaatttataccgcggggacccgcccctaatggggtgggaattccccgtcttggtggttaatggggcggtggtgggggacaatttcaatacccgaagcggggatggggcgggggcggggataatactatccgcaccatatccgaccccgatatagatatatataatttcctttttattcttaacatatatatagtatatatatgattgataattaaaattatatatcatatgcttaaattatgaaaatctaatgacgatagtgaactgatgatcattgtggattacatgtgtaaagatattttcttctcgaatcttaatttcatctttgtttactttttaatttgttgggaggcttgagaggtatgagactatgatcttataatttcctttgagacttatttggtttttattttctactaggttatgctttttttagataggtttatcttttatcttctatgaattatgaatgcataattaatatttgtgagaatattggtttaatttattttttccaataatttaaaattaatttttttttcattttaccttaatggataccc

SEQ ID NO: 282910 - DNA, 653 bp, Cannabis indica
tcaagttcaaatattaaacaatgacagtgtactcttctatgttcatattgtgatgagaagagacatcaggaagaaagatgtcctagacttctagacaattggaatgaaggtcactcttttgtttttgaatcatgtgttttagagaatgacaaatccatttggattgttgattcctgatctactaaccatgtttgttcttcattatagctgcttgaacttgggattatctaaatccaggggagttaaagctcagagttggaaatggtaaattagtatcggtccaagctaagggaaaagctcgcctcaagttttagaataaatttttagttttagacaatcatcatttaattgaacttagaattgaatcgcagtatactgcccttagcactccacaacaaaatggagttgcagaaagaagatttcacacacttttagaaatagttaggtctatgcagagctattcaaccctatcaacgtccttttggggatatgcaattcagatggctaatgatattttaaatgttgttcctactaaatcagtccctaagacacccttaaaactatgaaatggtcgtatacctagtttacgctattatagaatctgggggtgccctgctcatgtcttaagaaagaaagaaggcaaactagaagtg

SEQ ID NO: 282911 - DNA, 521 bp, Cannabis indica
agaaaggtttgattaaaaacttcaaaaagaaaattttaaagttatgggtttgcattatatcatgtatttctagattaatcccagttaattatacacaaatgccccttaagtaatttgaaagagtaaagctttgcaattacttaaataacagaaatgattctctttattcataactgaagttaaaatattacatcatcaatgtgagttacatcatttatttattggtaatagggtcgcaaatgttccgcgttccaatagttctttattggcgagccatttggccgagccaatttgtaaactccaattctaactactacttcgattacatatggaacctcccagttcgggttgaacactcctgcagatgcatttctcatgtttgcaaatactcgccttagcaccaagtctccaacattgaatagtcttttcttgactctttcattgaagtatcttgtaactcagtgttgatacactgcattagtgatttgcgactcaattcattttttatcaagtagatccaa

SEQ ID NO: 282912 - DNA, 553 bp, Cannabis indica
attctagaaggatgcaaaaatccatctataataatttaagctccatcagtgaagatacataactaagttgctttcataggcactgaaagttattcaactgaagaaagttcttactgcgatatctctattccattttggataaaattagagacaagtcttctgtctattcagatgcactttaagaacagtaatgaattcagcatccctagatgagtaatacatatagaatatgatgtttcataatgttttatgaacacaaaggaagtaattgtggagaaagcagtagcttaccacggacttacagttccagtaatttgggtttagtcaaatatactacacttgatctagatatcaagacaatagattgattgaaatgcactacttgttttatgttagtgcaagtgggagtttgttgggattttatgccctaaataaaacccatttcaatacaatctgatttgctatcaatagaagattagaagtcatttatgtttacatgtagttttcatgtgttatggtttaatgtgtacaaaatctgttaagtccagaacat

SEQ ID NO: 282913 - DNA, 533 bp, Cannabis indica
tcttcttcttctccttctgccgagccctaggagcagctgggaaccaggtgaaactcattttatttcatccactcttgagctaatctaagccctagaagctagctaagtgaaggtatgattttctactcttctcttgattggtttttttgagtttagtttaggttttggtgaaggttttcaatgaattctgagctggggtgtaaactgagggtaaggtaggttcttagggttgaattggaacttgtttgaatgaaaattaagtgaggttaagggctgttcaattgaattggtgttgaaagtgatgtttagtgcaaattgtcaagtgagatggtgattttgagttaaatggtgaattgtgattaaatgatgtgttgaatatgttatacttggtatattgaactgttctggaaatgcaatttaggtctgaaatggttttggttcgagctggggaagaaaacccagaatttttctggtctgacagcaaccggtcgaccggattggttctggtgtatcagaaccggtcgaccggttac

SEQ ID NO: 282914 - DNA, 697 bp, Cannabis indica
tgggaagtattcatcatttggtcctcttccgtttctcccaggggaatgacgttcggcgattattgacctacagtatggtaggctcttcgtatcagcatggtggcttaccgactacgatcttcaatctctgcatggtgagcccttaatgtctccatctctttatctctccattcagcgaacatacacctttgttcgtcaaatgcgagatttactacagcacgcagttcgtcctaatcatgatgcagagtgttgttatgaccctgcataagtccgagtgcgtcacggagattttgcaattcgattgcgtctccaatggtcgtatgggcgttggttccaggcagaacagtcgtattatggatgccctagttgggtccggaactgttattcccagtctcttgcacaccaggcgcaattccagtaataggagttgttccaccattcacaatgcttctagtctgtctgggattaacagcaggcagaacccttgaactccctgggtcctgtaatgccggatccagcgtctgtgaatttgctgggtcagacaggcctctacgagtttgcaccatcgtgttagcggttgagtgtcgaataaagagcgatttatgatccctctctcaatgaaagcatcaaaatattgacttcgcttttagccaacgacaatgagtctattttatagcgataaacgatatgtagtaac

SEQ ID NO: 282915 - DNA, 510 bp, Cannabis indica
aaaccaaacaaaaccaaacgaaatgctaaattaaaaaacctagaatagtacaagcgaaaaacacaagacacacaaatggcaaatacaaacaaatttcaaataggggcgaaaccaaaaagaaactaaaatcaaaccttataccgaagaccaactccatcttgattatttttttgagcatcatcttgaggaattttttcatgggcagccacctttgatttcttctttggaggagctcgcccatgtttcgacaatggaggagcgaaatcagagtcatcctcctcaacaacaggtcgtttacccttgttcctattagctaaagatttcaactccattttagaattttttgtttgaataggggaaggagttgatgaagaacaagttacagccatatctatatatggattaagagaaaaattaaaagatgaaaaatgattatgagattcagttaatgggagttgaaaaaaaattgaagaacaaaaaaaagagggaaaatagagttgggattgtgga

SEQ ID NO: 282916 - DNA, 618 bp, Cannabis indica
gttatggcaaaaacaaaactcataaaaattaataaactgccattaccatggtcgcaaccagacctatgatagtcgcgaccactaggtttaaaaacccagaaaactcagttctcagcaacaaaaattatgcccaaaacacatccaaacccaaactaaaacttagaaccatcacataggctttcaatcattaaacagagagtctaaaacaccatttcatgcattaaacatcaacaaaaactctcaaaattcagattgcacaaaatcaaaatcatgctcaacacacaactcttcaagctcaaagacttgagctttaaatcctttaatccctaacattttcccagcagcataaaaccaataaaacatgaattttaacctagaaaattccctgaaatctcagccaagaactcaacaatataatccacaactaaatcaagcaattcatactcaaactctattaaaattaacactcactcctcttacatgcaaatcaagagaaaaacaacccaaaacatgtttttttccataatgaactcagcaagaatttcagcagaatttcaaataaaaacaatagaaaaactaccttaattccaagctcaaagattcacaatctcaaagctt

SEQ ID NO: 282917 - DNA, 788 bp, Cannabis indica
gtttgtctatccgctcttgttgtctcttagatggttccttgtatactggctctctttgaagacttgcgttctctggaatcagctggtgttctcgcagcttggcagtcgtacacaataatcgccagtcacgatcttgtacaggaaggctcccgagaatttcagctgtctctctgcgagttgcgtcaagtgcaggtcgagctggtctatctgcgagaacaaaaagagcgagttagcataagatctcaaaataattcaaaaaaatgtctaagttagaagacatgcgacgtactaggtctacgattaaaatcagttctaatccctgagactttgaagatgtagaaccattttgatttccggtctcccatattcgacaccattccttctaccccgttaatttcagaagtcgcccatttgctaaagcagtagaaaccattatgaaggcctacgctttttatgtcgtaaaagtagctgaactcttctaccgagggagccctatgaacgtactccatatacatcgcgtaaaaggtcagggcagtgcgataactattgggagttagttggaaaggtgatacatcacatcgtttaaggatggtcgcgatgaagggatggaaagggactgatactccacatcggagaatgggtattgagattaccacatcctctgtgagtataatcgcaggattggtaaaaggaaggtgcgccctctgggtcggtttaggtcgcaaaaaagcaagtcgcagcaggtttagcctcgtaaaggtagtgaagtctgatttggtaactctcga

SEQ ID NO: 282918 - DNA, 255 bp, Cannabis indica
cataagaactagaaaggaaaaccaccaagaatattctctgtaataaatactctcataaatacacagactcgtggactaaggctcattaatgccccaaccacgtaaaaatctctctcattaattccttatagctttcttaaatattattattatattggttgccgaaaacctcggtcaacattttggtgctttcattgagagctgaaggaagcgtctgaaagtagacagtaacattacaaaacaacaatggtggag

SEQ ID NO: 282919 - DNA, 507 bp, Cannabis indica
ttcttttcttcttcttcttctcatgccagaaacccaactccaaaccagcaccagcaccaccaacccccttcgaccaccgtccacgatcccctgccattcaacctagcccttcgactagttcccaatcgacccagagcccttcttcttcttcgtcttcctcgtcttttttttttcttcttcttcacacgaaaccccaccccaccatcactgtcatgcacatctgagagagagaaaaggagaaagacgaagaggcaagggctcgagggtggaaggtcagagtttgggtttcaatttttttgggttcatttcgagcttggaggaccgaaaatggccagcgtcgagcttgggcgtggctgttcgacgagaagagacaaagacaagagagatagagagagatagagggtgagctcgattttctaggttcatttagatgatgaatgaatcttggtaaaagttaagattttttttttaatttaagtttttatttcatttttaaaaaattatttt

SEQ ID NO: 282920 - DNA, 612 bp, Cannabis indica
gggggagaagcgccagaaaagggggtacaccccccagtatactcaatacacggagctgtcggactcccaagagcgtgtgtactttgctactaggaaaaatacacactaccggaggccacaaccgttgtacaaagatagttcccggagagatccgagcaaaagatgcgagtaccacaacgacatcggtcatagcaccaatgaatgtaagaatctcaaggacgagattgaaaatctaatccggttaggccacctctacgagtggatcaaaaataggttgccccaccttaatccgggccaggcgactgtgggtatgcctcagggaacaccgcggggtacagcaggggcattagctccagctgctcccacgggcgacgccccgcacatccccggtctgccgcctaggcctaatgggagggtagccatgatctccggaggtccccatatcgaaggaactactcgcaaggagcttaagcgatacgcaggggccgcgaaacacaatgaggtttggaaagttactcaactcccagctcaaaggccccggttgatggaccaacccatcacgttcacggaagaagacgccaagacagtgcgcttccctcatcatgacccatt

SEQ ID NO: 282921 - DNA, 569 bp, Cannabis indica
gtgattggggaagatttgagtagattttggaggtttaaaagttatgttttttcgtgttttttctgcccaggcaaccggaatttcagttggttcagggctgttccaaccggaattctggttagactgtatcgggaaaaatgctgaattttgttttggctataacttttgactcaagactccgttttggaagttctttatattgttggaaagctcgttctgagctctatgtaattttttgaattttaaatgccatgtaaatattttatgaatgtgaaatcagaggttaaccctatttgtaaaaatctcagattgtgtgactaggattaccggtacctagtcaggagcacccagggatttgaaatctcttcttttgcgggacaacaggtaagacagtagtatgcacgtagagttaagcgcagtggcgctcatattgaatattgtgattgtgatcaattaagaatcgggattagggttattaccctaaaatgagcggttgtttggtctagggttattaccctagtagttaaaagatgttgaatgttataccataataaatatgttggaataaa

SEQ ID NO: 282922 - DNA, 526 bp, Cannabis indica
tttctaactttatatgtgtttattttcattgttttagaattcatattaggttattaatccaacatacttgttagtaaatctagatcctggtaaaataatttccaacacaattgaggattatggaagaagatatccctaagactgctttcaggacacggtatggacactttgagtttttggtaatgccatttgggttaacgaatgcacctgctgcatttatggatcttatgaatagagtctttagacctttcttggataagtttgtggtggtatttattgatgatatcttggtgtattctaagacacgtgaggatcatgctgaacacttgacaacagtattacagacattgagagatcatcaattatacgctaagaaagagaagtgtgaattttggatgactgaagtcaagttcttgggccatgtaatttctcaagatggtatcaccgttgatcctgcaaagatagactctattctacagtgggaaagaccaaagaatgtcactgaagttcgaagttttcttgggtt

SEQ ID NO: 282923 - DNA, 540 bp, Cannabis indica
agtcaacacatgtgcgccatgagccattaggcttaggcacgagtacggggttcgctaaccagttggggtaaaacgactcccgtataaagccgcaggcaaggaggcggtcgacttcttcttttagcgcttggtacctcgcggggtccattttgcggcgcttttgtcggacacctcgcacctcggggtcaatgttcaagcgatgacacatgacttgcggagatatcccgaccatatctgagtgtttccaagcaaaaacatcaagattttgctttaaaaaggtcgttaattgttctcgcagctgaaaatttaatttagaaccaatttttaaaactttattattatctacaggatctataggtacctcaattgtgtcttccgcggcttgggctgcggcggtgtgatcgaggattcttggatccaagtctggttcatctatgtgtggcacctcctcgattctgaggatctcctggcgaggaggtggtgcctccaaaaggtagataacatttaccgtcctttttctgcgagtttaactgctgtgtt

SEQ ID NO: 282924 - DNA, 944 bp, Cannabis indica
ctacaaagtaatgccttttggtttgataaacgcaggtgcgacttatcagagacttgtaaacatgatgttcgcagatctcattggaaacaccatggaagtatatgttgatgatatgctcgtaaaatctcaacatgcgaaggatcatattgcccatttacaggcaatgttcgatatattgcgtcgatataagatgcggctaaaccctctaaaatgcgtctttggagttggctccgggaaattccttgggttcatggttaaccagcgaggaatagaagccaatcccgcgaagatcagggcattggtggaaatgccatcaccaactaagccaaaagaggtccaaagcctcacaggtaaagtcgctgccttaaatcgctttatatcgcgatcttctgataagtgcaaagagttttttcagattttaaaaggcaataagaagttccaatggaccgaaaaatgcgaggaggcttttcaagccttaaaaacgcatttggggcaacctccgatcttatcaaagcccatgaccggcgaagtcctgtccatctacttagcagtgtcagaatacgcgattagttcggtactaatacgcgaagatcaagggcgacaatacccggtgtattatgtcagtaaacgattactggatgctgagacacgctatccccaaatggaaaagttggcgttcgccttggtaatatcgtcgagaaaattgcgaccttatttccaggctcacagtgtcgaagtcttgacaaactaccctttgagtcttagcaaaaccagagacatcagggaggttgttgaaatgggcaatggagttaagccaattcgacatcaagtataaaccaagaactgcgatcaaggggcaagccttggcagattttatccttgaattccccagcaccgaagtggcactcatagaagacaaaatcgacattgctataaccaataga

SEQ ID NO: 282925 - DNA, 673 bp, Cannabis indica
agaagacaaaatcgacattgctataaccaatagagagatatggacgttgtatgtcgacagagcctcaaatagcgaaggctcaggtggcgggatcttgttaatcagtcctagcaatttcaaggtgcacgctgctttacgttttgaattttctacatctaacaatgaagccgagtatgaggctttaatcgcaggattgaagctcgctctcgagatgaaaatcgagtatctacaagcttttagcgattcccaaatcgtggtgtgccaggtaaatggagaatatctggccagaggcgggagattggttaagtacttagccattgtatgcgagctcatgcagaaattcaagaaagtaatcgtgtctcgagtaccgcgtgctcgaaattcacacgcagacgcactggcccgtttggcctcaactagagaagccgaattgctcgatgtaattccggtagatgtattggctcacccaactataaatcaagaagtgatcatggaaatagataccactcaagaagtcacctggatgactccaatagtcgcatacctggaaaaggacgttttacccgatgacaagatagaagcaagaaagctgcgacagcgagccgcccaatatgtcatgtacgataaaaggttggatcgcagaagttttagtcaactgctactcaaatgcatc

SEQ ID NO: 282926 - DNA, 563 bp, Cannabis indica
ctttatgcttctgaggtagtggacagagcttttgcaaaattcattatctgttcgtgggcaatatgaaatgaaaggaataagattactcatggtcaacaaataagacaaccacagtttgtggttgagtggataagtagttattacgagtcgatactttcaatgaaggagggccccaaaaaaagttcccaagctaatggaagaaatagggaagcgtcagctggaagttctacaagtgctcaagaacagagattatactctaaacttatggtggatgcagctgtattgagcaccacgagtatagttggattaggtgcgatggtattctcagaagataatagagttcacgctgcgttaagtaaaccactcaaaggttagtcatattaggtattttaaatattattttgttacgaattttattagtgttataattccaaaagaaatgttgatcgttcaggcatgggtaaattataaagatcttgtaatttctagatatcaaataagaataattaggtctaggaaggaataacaaagctaaggtgattacgaagtaaaatacataagtt

SEQ ID NO: 282927 - DNA, 479 bp, Cannabis indica
gcaggtatggaacaaatcatgtgtgtcatcaaatatgggggtcgaatggagggaaaagtaacaaattaatgatgactacacaatgacgtgaattctaattccaaccaattcatcactagcaaacttgatggagctgatagaaacagagatcaactgcagcagaagcaatatagacatatcctaccagatatcaccggggacgaacaccgatgaagctactgagtgacaattctcttaagttctacattgagctgagaaaatacacaagttggagtaacttattctccactatgcatcacaactacagaagaaatggcttacaaagagtgaaaaattaatcttcagaccaaccaatacaagagcaaatgaagacagttgaggaattggttctacaaatacatgacgaaccattcaaccaacctgatattgaaggacaatattcaaatcatgattactgtcagtatacaattgcccccaac

SEQ ID NO: 282928 - DNA, 675 bp, Cannabis indica
agtctggtgtgggtatgatagtagcatatatgtctcctgtcccgatatatacatatattaaatatttttttaagtatatatttaatttattctatttttatgttatcatattatattttcgatttacttccaaatttatgattaatattgtgattttttttcttaatgttttgatgtgtttacttaatattttttaacaataaataaatatgtaggttggaaagcatttagaatgttgtttaattagattttatcaaaatttaattaaattattataatgaattattttttttaaaaaaaattactactattaactattacgagtaactatgatttttctccaatgatcattattggtaattacccataccattaccaatggttattcagacagatatgattatataattaacttaaggggatggggatggtaatttaaaaatcgtccccatctgaaccataaccatttgtaagggatgaggatcattttttgtccctgaaatattaaacagagcgaaaaaggaggtgatacttcctgccctgatggagaccagtttaatattttatttaacttctaataatatttcgtaatttataatttatgctttgtatttttttttatataaactcgtaaacatcatggacacaacagaaaaaaaaaaaaaacaaacaaaa

SEQ ID NO: 282929 - DNA, 516 bp, Cannabis indica
aggctagttcaagtggtcataagagagtgtgtgttagaaattctgagttcgagtcccaaattatatcttgtgtaatatataaacgcttaaataaaaacaatcaaaaaaaatattagattatattatgtgtgatgatgaggatggttcagctgaagtggaaatgttgctttgaataatgtggtgaagttcttcttcccttgatccaaccatcttgtccactatatttccttctttcaaaaataagaatgtgggcattgcttccactgtccaatcctcagcaaccgactaccatacataccaacaaaaccactcattcattcattaaaaaactaaattataatttattacaaaactaacataaataaattaaatggagacaaaataaaatttaaaaaaaaacagtttttttttttttttaggcttacactaaaaaaaatggtgcggattccactcctacattcttaacctgggataagttgaaaaatatttcttttttgtattcattaatcaaaaata

SEQ ID NO: 282930 - DNA, 655 bp, Cannabis indica
attatatcttcctttgtccacatgggagctttgaacttggtacaaacttcaaaagaggagaacgttgagaaggttgcatgacgagcatgttcttcagttctgccttgtcgactactgctagttccaggtgtagtgcgattttcactacgaggttgtcgttctcgctgtgtaccttggttactcggtacacactctaacctcaacgaaggtcccgctacggcttcatcgactgccaaatcatgttcatcgtccatattcaaatctacaataggatcgttattgtagaaggttgtatcgaactcttcaaactgatgaaatcctgtcgcttcttgttcttgctctacattggtcggaacctcctcattcacaccaatcccaacatctgtttcgggaacgcaagaccctaccacactccgagggagaggattagtaggcggcgtaggctccgaattcccaacttttctcaccttggtcacgaataatggcataaactctgtatttgacattgttgccctcatctctaagaacgttctcagttggcgttctctcttaataacctctggcgcaaccatttgtcccttcatgtacaaggaacaaatctccaactttaaatcatacgctacaggatcaacttccaactcttcatataaaattt

SEQ ID NO: 282931 - DNA, 763 bp, Cannabis indica
aattctcgtgctagatggatgccctaatcacattttgaaaccgggtaagtcacatgattaaaaccctaatcccgggaaacccaaaaccaaaaccctaggttctgctatactctaaaggggttattctaactctggaaatggggaaacacccaaccgaggcactgaaatggacaaaaattgagaaaacgaagtgctcgggattcctgccaaaaccggctagccggtttttgtggcattgcaaaccggctagccggtttgcaccagtaatcccaaaacacctcctccattgctcaattttccaccaaatgttaccaaactttccagagctcctaaacaatgcatacacaataaaacccagccagtatttcacagaaaaacacaccaaatcaatttatgccattaaagctcaaagctttgaattcaaagctcaaaattgcatagaaccattaacaccaattaaaaccagctgcaaggagttaaaatcaacctaaaaggaccctaaaattcgaaccctaaacctaactaaacctaacagcccatcaatttcaaaatcaccattgaacctaactaaaaagcttgaaactaagaagggtttcattgaaacttaccttagtttgatttctccctttggattccttgctgaaactcaaaaatcaacagcaaacccccttggtttgtcccagccgaaagcaagagagagagaggttcaagagaaaactaaaattccaattttttctttttcttgatttttcttcaaatgaga

SEQ ID NO: 282932 - DNA, 771 bp, Cannabis indica
aaattctaagtgtcaaagaagcacttagttggaaaaagaggaataacaagtcaaatgtcattttagagacagattgcattttagttgttcaagctattattagttcggtatctgtgccttctatttttggtctatttattcaagattgtcaatcttttttatcttctttaagtagtatttctattggtcatgttaaacggtctgctaacaaagccgcgcactgtatggcacgtggtgcttgttattggtcaggtcgttgttttactgaaagcgatgttccccttgctcttcagtccattgttttagcggatatttcagtctaataaaattcattttcattcaaaaaaaaaatatatattttctttattaaaaaaataataaattagaaatatagaaaatctgtaattatatatataaatatatatatatatatatatatatatttctttagctaaattatctataataaacaattaatgtaataattttagttttcattgttaattttagctaaaaaataacaaaattcgtcaaaacaaaaaatttcacttcccacacttttatatgtaaagatagtttctcatatgattttaaaataatatttcttaccacacccctcttttaacatattattatgggacaccatatttttatccactcatggctaaaatatagctgaatgctagcagaattgataataaacgtgacaaaatgattaattaaaaagagtaaatacatgttaaacaaaaaacagtagtcgtcgtgatccat

SEQ ID NO: 282933 - DNA, 652 bp, Cannabis indica
caatcataaagaatatggtcatacggagaagccatatttttgaactttttgcaaatcattaatgacccttaaacaatccgactcaacaacaacatgtgaccatccatttactttactccaagagagagcttccttgacaccaatggcctcaacaatatgaggttgcaaagagccttctctagataaacttctggcccccaagaccaaccacgcaacagaccttgcaatcaagcccagtccataccgcccttgggcaggaaaaagtgcaccatccacattaattttgacaaaaagaaaatcgagtgctgtccattgctccacgggtagcgcagtcggccagtttaagcttacatctgtgaaattaagtttttgagcagtaaaccagtcaacataatttaactttgccattgccactacctcactcgcatcagggtgcttgaagttccaaaccaaatcgttacgatgagtccaaactgacccacagaccataccagcatcaagagcctcggtcgtgttccacgataccaaacccgcttcaaaccaactcgagaacaacattgcatcaggcgccacaacagtaattggaaccttgctccagcaactttgagcaaaagagcaccgcaccagcacatgcaaagtcatctcaggagca

SEQ ID NO: 282934 - DNA, 718 bp, Cannabis indica
gaatctagtaatggtttatactaagtacacaaccattccatcattctgaaattttcctttcactagggtatttccttagaaggacttaggcaacgactagtaactaatcatcaatatgcaaatcggatttctagtgagctaagttttgatataattcaaaaaatcaacttaatgatctttaaactgcatatcaaccaaatatttctccacccctatcatttcgcaagatctttatccacttaccttaatggttttccccatgctagaaattcatgaaatttttcatacatttcaaattcatgaaattcatgatcgtcttaagaatacaacgaaaaattcatatccacccctgaatgtaaatccatctgcgaatgagatgattatactttcagtggatataggcatattgactctttgcagagaatgatcttgacaaaaccactatgaacaagatacaaatgccatagatttataaaatatgtggttgtggtttcttgatgacttaggtttagttacattaaagaattcttagaatagtgtaagtggatcctggtcacagaatattccatactttaacatacagtgtgaatccattgatagaaaatggttattaaacatttgtgaaagtgtaactgtactgtattctggaaatagaaatataaaatttctatttgaaaatagaaatattaaatttctatttggaatctaaaatttaaag

SEQ ID NO: 282935 - DNA, 638 bp, Cannabis indica
atgactttttgtcttttagtgaattgattatttgaatttaaatggttattttattatatttagtggctgaaataaaatggtttaagtggcattattcttttatttttctcatttcaacacttagcaaaaattagaaaaaactttgaaaaagaaaacactctcatttctctctctatttcggccaagctttgggcagcaaggagctgatttctccattgttatttgcttgtgaattcatccctctttaaggttcatttcaagctaggttagctcttgtaacttctctttaatttcttgagattttgatgaaaaagttgagtaaatgcatgattatttgagtatgttgttgctgtgtttaattgttgtttacagaagcttgattaagttctaattgaatggattatataggttttaatgcatgctagttgtgttgttcaaagtttggaatttttaagcttaaaaatgtgattttgaagaaaatgaggaaattggttgctgtgtttgtggtggttgttttctattgtttgcagaggcttatttatgcttgtttaagtagattctagcttgtttgaatgcatgtttgtgggatttgctcaagtttgagtttagaactcaaagcttgagctttaatggcaatt

SEQ ID NO: 282936 - DNA, 869 bp, Cannabis indica
tggggtcaaatcaggaaagttcctaggcttcatcgtcagccagagagggattgaggcaaacccagagaaaattcaagctctcctgagcatgccatcccccaagaagcacaaagacgtgcagagcctaaccggaaaggttgctgccctgagccgttttatctcccggtctacagacaagtgcattcccttcttcaacattttgaagaagtgccaaaagtttgaatggtcggacgagtgcgaggaggcattcaaaaaattgaaagagcacatggccaagcctccaatcctgtcaaaacccgttctcggagaggacctgttcctgtacttggctgtctccgagcacgcggtaagcgcggccttagtccgggaagaagagaaaactcaacatcccgtgtactacgtcagcaagcgcatgataggggcggagacgcggtaccccgtcatcgaaaaactagttttctgcctcctaatggcctcaaggaaattgaggccttatttccaagcgcacccgatcaaggtgttgaccaatcacccactccggcaagtcttgcaaaagccagaggcgtccggaaggctcctcaaatgggcgatggagttaagtcaattcgacttgcactacataccccgtatctccataaagggacaagcgttggcggacttcatcaccgaatgtaatgaagccgaggcaaccgcgaacgcgccggtaccttcggcccccacatggaaagtatttgtggacggagcctccaacgaaaatggatccggagcaggggttgcaatgatatccccgagcggacttcgactccaggcagccctacggttcgacttctcagcttcaaacaacgaagccgagtatgaagccttgatag

SEQ ID NO: 282937 - DNA, 762 bp, Cannabis indica
aaatataacttaggttattaccaaaaaaaattaaacttaggtatttatttacaactgaaagttaaacgtaagtatttatgccgcaaattactcttttatttttgttaattgcgacaaacgtaaaaactctcaaaagttttacctcattgggttgattactttgaaattcgaaaacaattttatcttttcgaaaacttaaaatgtataagaatatttgattggttgagtatttttaaaaattaagttttaagctaaaaagtaaaaacaataattttagaataattagaggatttatctctttatttttgtcactaatattagtttatcctctcacttttgatatggtattattttacccccatataataaagttagtattattttacctcctgcctataatttttattaatttgaataatatttttaaattaataaataaatttaaataccattaatatttaatttattataaaaaatattacgatatatatgtagtctgtatgatccattttttatttttaattgagttatatatacgttattagcaataatatatatatgcaatatacataaattttacgcaaatagtgtatataaatgacatagtgaacaaaataaataacatagcgataaaatatatagaaatattcattttaattaataaaaaacacaataaaatttaatatttactaactaataaatatatttttaatgaataattattttatttctatgtataattaacattaatagatataataa

SEQ ID NO: 282938 - DNA, 665 bp, Cannabis indica
atagagcttcagaagtcttagaattgattcacacagatatttgtaggccattccctacggcatcttggaatggtcaacaatattttatatcattcttagacgattactcacgttaagggtacctatatctcattcatgaaaaatctcagtctgtggatgtgttcaaagcattaaagacagcagcttacattctgaatagagtaccaactaaagcagttgcaaatacaccttatgagctttggacaagtcgaaagcctagtctaaagcatttccacatttggggttgtccagctgagccaaggccttataggccacatgaaaataaattggactccaaaacagttagcagctactttattggttattttgagctatctaggggctataagttttatgatcccactgtcagaaatatttttgagacgggaactgcaacatttgttcaggatgttgaatttggggggagaaataaggttagagacattgcttttgaggaggaattgaattcaaactcagttcctactatcattttagacaatgttcaggcttccacacctgtcattgatcgagaaatgaatctggaacctcaacaagacaatgttgaacaactcccaaatcaagatgaggttattgttcctgaagaacaaattcaacaccctcaagaa

SEQ ID NO: 282939 - DNA, 538 bp, Cannabis indica
atgtttttctctcattttattcagaattttaaaacttagaaaattagaaaaatctcaaagctcttttcctctctctctctctctctctcgtggttctctgtttggtgtacgaaatatagctcaaaacctaatttctatcgtgtttaaacccaagcaaaagatcgctttgaaccgtgttgaacgattcccattccacaaaaatcttggtttgttacgggacacggttatacataattttctatatgcatatatgcacaccaaacataataataataataataataataataataataataataataataataataataataataataacgttaataataataataataataatatttataataatataatgatatacccatataacaatatccagacatatatatctattaggcattatgcatatgccaataaaattaaatattagatcatcataaaaataatctcatacatatttaaatccataaatatgtaacataataaaaatactctcagctaaataaaattacagaaataccct

SEQ ID NO: 282940 - DNA, 643 bp, Cannabis indica
gttatgcacaaatttagatgggatctaaattatacttccactagtaaattaatggtactaaaagataaataagtaattcgaaaggtaaaatagtaatttaatcaaaattaattacgaactaacacatggaagcataatcactggaactgattatatcaatggacactgtagtaaaactcaattactatatttctatatttactaagagttaaattccatatttatagtggagtaatcatgaaattaatatacaaagattgttcaattgataagactcgagaaataatctagtttgatagagcttagaatttatatgtccatagtccccaaatagctaccttgaaacactgtttaagggaagggataaagagtagtataatgtcgttcgaaaaaatatattttaaattggctaaaatagtaattatttatttttgtaataaacaaataattttttaaattaattaaatagggaaaagacaaaaattgttaaagacataatttgtcaagacaaaatttgttagaagacaagaattttcaggacaaaaattgttgagacaataattaatttgggttaattaattatttaattaactcaattagataaatatttgaatttaaaaagtggttatagatatttcaaagt

SEQ ID NO: 282941 - DNA, 791 bp, Cannabis indica
gacgttctttataccgttggaaagctcgtttcgagctttatgtgattatttgaatttaatgccatgaatatattttatgagtgtggaatcaggggttaacccttgttgtgtaaaatcccgatattgtgactaggattaccggcgcctggtcaggagcacctgggaatttggaatctccactttgcgggacatcaggtaagacagtaggtagcacgtagagttatgtgcggtggcacttatattgaaaatgggatatgtgagtaattaataaccgggattagggttattaccctaatgtgagcggtttgatagcctagggttattaccctagtgatatatgttgtgtaaatgctatgccatattatatatatgaatatgttgagatttagagttatgtgttcaaggcataaccaggttggactcggtaactagaatcgagaggaaccattctaaggccttattgtaattagacgtgtgagcgcaacacgtaggtctacgctacatagatataaataggcatgtgagtgtaacatgcaggtctgtgtcatacaggcatatgtgaatggcattactgattatatagtgtgataaatatgttatcattattttatactgtcttgctgggcttggctcacgggtgctctactgtgcaggaaagggtaaagttgtttctgatcagccatgagtatgggagctgaacgaagaatgtacatgttcgggccacactagaccaagcgggttggggtctaccagtgatatattttgaaactctgttttgccgcttaggtcag

SEQ ID NO: 282942 - DNA, 651 bp, Cannabis indica
actaccacacatcaatcttttccaacgacgctgaatcgttcgaagtcgctctttaggctttgctttcttcttatcagctttaacaaaagaacccttcaccatctcaatcttgcaacaggtaggaatgtcggttggggcaaaaacattaaaattgacctcttcatcttgcactcgcaactttaactcccccttttgaacatctattaatgctcggcccgtggctaagaatggtcttcccaaaataatgggaatagttgaatcttcctccatatcaagaattaggaaatcagcagggaagataaacttaccaaccttcaccagtacatcttcaattatcccacgaggatgagtcaaagaacgatctgccagttgtaaagtcactgttgtgggctttgcttttcccaatcctagccttttgaagacagacaatggcattagattaatgcttgctcccagatcacatagagctttagtttccaccgaaccccctatagagcatggaatattgaaactacccggatctttaagcttgggcggtagtttcttttgcaaaatggcgctacactcctcagttaatgccactgtttcatagtcctccaattttctcttcttagacaatatctccttcatgaacttcacataacggggcat

SEQ ID NO: 282943 - DNA, 480 bp, Cannabis indica
aggtgagctcgtacctacgctcggtactcatcatatatcattgacgcccttacttacgtcccatacgttgccaggaaaatcacatcacctaatcaggtgaacttgtacctacgctcggtactcatcatattatcactgacgcccgtacttacgtccaatacgtcgccaggaaaatcgcatcacctaatcaggtgagctcgtacctacgctcggtactcatgacatatcacatgcataatatcatcacattatcaatactcaatcaatcaatctttttattatataacaatattaactgtaaagcccgcttagttaatttggaaattatcagttggttatgtttaattaagaaattatttatagctatttaaataatttattactgttatttatggaattcagaaatgcatgattatatcatcagtagcttgcatattttgcatttccggtgtccagtcttttggaactcggcgtttggct

SEQ ID NO: 282944 - DNA, 841 bp, Cannabis indica
ctcatctatattgacgatatttctctttttcctgatgcaaaagcccatcaagcgttattggcccagtttgcttctatcactagagcccatggtatcatgttgtctgaaaagaaaatgattattggacagacgcaaatagaattccttgggatgaaattatccaaaggacaatatgaagcccaaccacatatagcccatgaactactcaaattcccagatgaaaatctcacaaaagttcaggtgcaacaattcttgggcatcatcaattacttacgagactttgttccccgactatctgtactgacaaggccactcagcgatatgctcaaaaagaatagtccagaatggtcacatgaccaaacggtggcagtcaaaaaactgaaagaaatcatgcaaaatttaccacctctacagattccttctgacggaaaacgtgttcttcaaacagacgctagtgaccaacattggggtgctgtccttctagagcaagatgaacaaggaaaaagacgaatatgtggatacaagagtggacacttcaaagattcccaactccattatcattcaacactcaaagaactgattgcaatcaagatgggaataacaaaatttgagttccacctcatcggccatcattttttagtggaaaccgattttgctgcatcaaagggaatgatagacctaaaaaagaataagacaaccaatactcaacttttgagattggcaacatggtttgatcattactcttttgaaataaaacaccttcccggaaaagaaaatatcttggccgacctcctatctagacctaagtctataaatatggtctcctcacacccactcaaaa

SEQ ID NO: 282945 - DNA, 634 bp, Cannabis indica
taaaagagcacatggccaagccaccaatcctatcaaagctcgttctcgaagaagacttgttcctatacttggccatctccgagaatgcggttagcgcggccttagttcgggaagaggagaaaactcagcatcccgtgtactatgtcagcaagcgcatgataggagcggagacgcgatacaaagtaattgaaaaactaattttttgcctcctgatggcctcaagaaagttgagaccttactttcaagctcacccaatcaaggtattgaccaaccatccgctccggcaagtcctacaaaagccagaagcatccggaagactcctcaaatgggcaatggagttaagacaattttacctgcactacattccccgcatttccataaaggggcaggcattagcaaatttcatcacagaatgcaatgaagccgaagctaccgcaaacatacccacaccatcagtcccaacgtggaaagtatttgtagacggagcctccaacgagaatggatccagagcgggggtcgctatgatatctccaagcggacttcgactccaagcagccctacggtttgacttctcagcttctaacaatgaggccgaatacgaagccttgatagcagggctgagattagcaaaaac

SEQ ID NO: 282946 - DNA, 880 bp, Cannabis indica
tgggatgatagattttaaaatggttacttatgtgaagggcctttatgctcttaatgattcatttgctgatcccgtatctcctgagattgaggcaaagtttgacgcgtggattggtcaaggcttgcttaaacatcctaggtgacttgtttttattaaatctgtatttgtattctgttttatttttcagttttattctggttttaatattgtttttttgttgtttctttgttcttttaggcattacaattgttatgttgatggtgcaaagaaatttaccccgggttttaggctaggtgttgattatgtggaggataaaacttggttttatcatttggctacatgcgacatgtttataaatgactcggtaaagtttccattttccattgtagtttatgatagttggttttcagttgctttttaaatgtttttaagttttgatactgtattacagtttttaaacagttgttcaaccttttcatttgtgtttctgtgatgtttttgtttcagcatatgaacaccatattctattaccttaggaaaaaaggtaaatattcttccgctgtgacgttgaattttgcgacaactgattgtctctttgatgattccatccaagctttgtaccacaaatataacaaagccaagtcaatgaagactaagatgtcgcacattcacgctgcccacccaatagcgcattacattcgaggtttgcgcattccgtgttctaagccttggtatgaagccgatcatgtgttattcatcatcaatctaaggagggaaagtcattgggtgtttggtcgtcttgacttgaatgaagggattctgtttctgtataattctttgaggactgcgaaaatgaatgctgcagctaggaatgccatga

SEQ ID NO: 282947 - DNA, 527 bp, Cannabis indica
gagccacagttatatgggtccagaacgttctcacgagttacacacattggctaaaatgtctccgcttgctaccatgtaagtctcatattatatgtttgcattattatttgtacttgtataattttaaaatttgcattttctacagagaccttagtactaataaccaagtttaggtactacccatgtatatgaaatcaaataattttttttaatatatatgtataaatatatttctagatattttatttttgttttttgtttttttttttttttagaaagcctagaaattttcttttctttaagtaaaaatattaaaagaaaaaaaaaatagttttattattttatttatgtatttatttatttttacttagttatttagttatttatcttagaataaatagaaattattttgtgaactgttatgctaatagggagaattttttttttttcctattatagggaatagttatgctagtttcatagaaatttaatctactaaatatatatattatagagaaatagttagg

SEQ ID NO: 282948 - DNA, 510 bp, Cannabis indica
gatccccacccaaacctggactcgggatccgaacccgaacctaaaattacacccaatcatggaaccagactagggaaacagaaccagggtcatgacctagaatcgcaccacattcttgataccgaacccaaactcagaaatgggacctggacgtgaaccagaaccagaccgagacccgtgacaatgatccagatattggtattcgggtaaaggggcctggaacagactagtagtcggtgtctagatttgggacttagattaggaccaaaaccaagaataagaaccaaacccgaacccagacgtagacctgggacctaaaattagaacctgaataagaatcgcccaacaaatacacttgaacaagactaggaccttgaccaagacccggaccccgacgtagaaccgaacagagacctaacctcagacccaaactgagactggaactcgggccaagacaaggtcgtgtacgtaaagcggaactgagacccgatcccaaacacagacttggac

SEQ ID NO: 282949 - DNA, 501 bp, Cannabis indica
atatgatatatatgtattttttttaagggcaatatccacaatatatatatatatatatatctttttttttttttttttttttttttttacaagaggcaacatgtgataagaaaatataaagataataaatttacaattaggctcaattctaaaaaaaaaaaaatatccctctagtaattgtcatattttcaaatttcaaaaaatttcgattttaccaattcagaagatcaatatatgttcaaaaagtcgttttctcaattctcacttctcacaaaaaatgaaagcttttaacttaagatttttctcaattaaatgtgttaaaaacaatcaaatcatatgtttggtttgtgcaatttttactggaattactatctaagtaactaaatatagtataaactagtctaacacaatatttatttattcacataattagcagcagaatttgactcaaaattttcaaaaaggtaagaaatttatcgaacttaacgcaagaatatactc

SEQ ID NO: 282950 - DNA, 582 bp, Cannabis indica
tttctaactttttttttcaaaattaatattatatttttattgtaatttaattatttctctttatttttataatataagtttataaatataatgttatatatttgttatttgacaaatatataataaagattaaaatgtgggatattgtatattaatatgagattaatatatattatgtattggaggttatattatatcatatatagtataataatacacataaaattgtaacatatgaggagttacaaatgtgaaagtagattgtaacttaaggatcacaattgataaatatgtaattatgtgagttgttacatatgggagttatggaattaatgagataagtttctagctgttagaaattgttacaatactcaattatatcatttaaataggtattaggacgttgggaaatgatttaactcggagaggagttacattttgagttctctggaaacagttgtttaatagttgtttgtatgttgttttatggttgttttcgaacatctggaaccagatttttaaaaacgttcataaacgtatataaattaattgagcatgtttccagctctcttgtccaacgtt

SEQ ID NO: 282951 - DNA, 504 bp, Cannabis indica
cctgcctcttcacttgaaacaacttccaccacatcctggcctgaatgaggtctgtgtcgcttcaacatttccctctgttcattccccaccgtggccaactgccttttgaagccacttgagggagtggattggttcttcttctagggtgggcgacgaggtggcacatcattgcttccaataacaaaggctagagatgagggaatgtaacgtcccacaggtcccaggatcgaaacctggctctgataccatttgtaacgtccccgcttcaagcctccattgggtccttacacccacggaatgaatggctcttatacacgagtacgccactctagctgcttcctggattgatgactggccctacagaccaacacgagtgtttccagcgtgctttgtcctcactcgcacgcttcctgggaaaacttcccaggaggtcacccatccttaaaattactccaggccaagcacgcttaactatggagttctttcgagatgggctaccgaaaa

SEQ ID NO: 282952 - DNA, 698 bp, Cannabis indica
tttatttttaccaaatgctttgtacaggtataggtgccccccaagtgaccgagcagacgtatgactcttggtcacttgtcttttacaaatatattgcttatctgttcggtgttttgggtttgaccaaaccttttgtacgcattgtatggtaaattataaacatgctgattttttcgactcaattgaattttgaaatactatctttattcatttattgatcgaaaagtgtatttgttaccgtagtaacttacatcagagctatttgatctaatctgatcttttagcttaacatgaaataaaacaaattgcagacataagaaactgtactttaacgtggtcacccgacctgagtactttgtttcttttatcgaaacctttgggcgtagtccgcccagaaggccattcacttaaaagcaaatgttcatttagtacttaaagtggtcacccgacctggtactttattggtagtattttcttaaatgttctccattccagtaccgtggtactagaatgagttgcattttttcgtcatacttacctaatttgtatgctccggagtcgagaacttcgaccacttgatatggtccttcccagttaggtcctagtacacctgtcgtgctgtctttggtgtttaggaatacccttcttaggaccatatctcccacgaagaatttttgagctttcacttgtttgttgaa

SEQ ID NO: 282953 - DNA, 598 bp, Cannabis indica
acccccattcccttttttgatttagggtttggtatggggcctaattgctggaattttaactctttttttagaatctgaaatgtctgcatctggctcaaaatcttccaagaaggggtgcaagcgtctggctaccctagaggacgtcatgctggatcccgttgcccaggaggggtacaaacctcgtgctacgggatgggaggcggctgagcttcactccaccctaacttgccctcaccagttggagaacattgtggaggtggctggaatcaagcccgcgacatcgggacgtaccaccggccgccccgagatgtggagacgcccaacaataactacggcggcttcggggcttggagccagatgcacctgatgtctggggccatggttccccttcaagattattttattaactttcttgtatttgtcggccttgcaccataccaactgattccccaagcttaccgcctgttttcaggcttatttattttttacctccgcccggggatggggctctcccagtccggcggagattttgtatttttacgaacttgtttcagtccccaaaaaggggcaaacttaaagacggtttttatggtttccg

SEQ ID NO: 282954 - DNA, 1228 bp, Cannabis indica
cgttcttaagggaagtacgactactataccaaatgcactaaagtaccaaaatctgtacttgtgttggtagagccctaactgtactcccgggaattactaagtgttgtaccacgaacacgacgtacccttggtactcgtgttggtaacaccgtaaccacaattataaacaacactatactaacactctataaatcacatttaaactagtgctagtagtgcaatatgtaaacaagcatatagtcttatatatattctcacgctatcttacctcgttccgtgctcaagtgtgccggtcagcctgagtggaagtgcagctcgacgttttacagggccctaaaccataatgttcaaaatccgatgagagactcgctaaaacacttatcggggatttaaaatagaaactaagcttaaccctatcgataaataggatgccaataccctaaattacttaaaaacgggaaaaactagggctcgggaaaaattcccaaccggcaggccggttcccaaccggaaccccagttcctgggtaccaaccggtcgaccggttgctagaggcttcccagaaccggtcgaccggttcatagctgggaacctcaaaaccgacccccacttcacaattcaatcccaaactttgtaataacttccagaatacctgtacacattattctaaaccaatcccaagcagcaaatcacaacaattcactcaaaatccaaaaacaccattaaagacctaacttaggttttctaagctctaacttgagtaattcacaacctaaggcttaaatctaacttaaaacagtaggaataactattattcaacttcagcaaatgaatccaaactgaacatacatatacagcccccaattcaaacctaaattcacttagttcaactcaaaattcaactaaaactcaaataaaaagttatgaggatataccttgattcaaagtgttcaatatctggtagagattagagaatttcagcaaagaaacaatcttctccttgctgggatgatggttcgaaagaaagagaaaggaagaatgaggagttgctttgaaatttctaacttatttcacaataaatcctttccttcaagctttatctattaattcaacataaacctaatgtatggctgcttctagtgcacactacaagccaaaataaaaagaagaaaggacctaaatgcccctttacctaaataaaaatagttataaccccccaagggcaaaa

SEQ ID NO: 282955 - DNA, 585 bp, Cannabis indica
ttatgtttcaagatcatgcccgcgtctggtgggacatagtgaatcaaactcgagatgtcagtgtgatgacatgggaagagttcaagaaactttttgaagaaaagttttataacgttgcagtaaggacttcacaccaagaagattttgtgaagttgactcaggggaaaatgtctgtggccgagtatactctggaattcgatcggttatctaaatttgctggtgatctggtgcctacagatttcaccagaaagcagaaatatgttcgaggactaaatgctacaattagtcgggacttgaagattaccacatcacatgacactctgtataagagagtggtagacttggccttaattgctgaggaggccgagcagcaagtaatgaaggagcaggctgcaaaggatgccgccatggcatcaaaccctcctgctggtggtaatgtcagtaaggggaccgacagtggcaaccctgagcacaaacggaaggctgaggcttccggagcttcagggggaaatagaaagtttcggggaaacagaggtggccgtcagggtcgcgggtcctcattccgatcatatccagaatgtccta

SEQ ID NO: 282956 - DNA, 540 bp, Cannabis indica
gtgggattttcaagttcttgaattgcatgtatgtattaattgagttgttcttgatgttatgaacttgtggtgtcttaaactcttgatctttgctttgggtgtgattaattgagttatattttgtgtttatattacgatttatagctctgaatttattttgcttgaagcttgagattttgacttggatgagcaagtctttattgttggagttttatggatttaggctcttggtttggagcttagtttagatattgttaaatctgaactttgaggggtatatggttggattttgatgcatgttttatgtattttaatgccccattttagaacttgctagttagtggtgtatgactatgaattatatgaaaatttgtgttgaattggtttaattttggggctgaaatttgttgctggtttttggtgttgttggagagtgaattatgtgtattttctctctaatcacttggtttatgctaggtgaaagtttggtatgattgtgggttgatatagcatgaaaattggtatttttggatgcatttt

SEQ ID NO: 282957 - DNA, 836 bp, Cannabis indica
gttctggtcctagtctgagtcccagatctagacatcgactactggtctgttccagctcccgttacccgaatcctaagtcaagatctggatcactgtcactggtctcggtctggttctggttcaggtcccaggtcgcatttctgagtttgggttagggatcgagactggggtgcagttctaggtcctgaccctagttctgtgtccctagtctggttccttgtttggttccatttgcgattcttagttcgagtttaagtttcagttcggatcggagttcgagttctggtctgactttggattctgtatggatttcactgtaggtccagatcacgctccaggtgtgggttcgcgttctgggtcttggtctaggttgggctaaagtcccaatttccaatcctgatctgagtctggattcagttctgggtctgagtcctttgttctgatcttggtcttgtttgggtctgattctaggtgtgggtttcagttcgggtccgagtctgtgtgcgggtttgtgtccatgtgtggaccccgatttggttctaggttcgggtccaggtccaagttggggtcctgagtgcgggtccaagtttgggtcagggccaggatatcggtcgagatctaggtccagcatttcgatcctagtctgggtcttcgtccaagtccaggttcttatccggatccctatctaggtccagcatttcgatccaagtctgggtcttcgagtgcaagatttaggtccaggtttgggtctcagttccgatctgggtacacgaccgtgtccgggcccaagttccagtctcaattggggtctgaggctaggtctgtgttcggttcta

SEQ ID NO: 282958 - DNA, 565 bp, Cannabis indica
ccaatatttcacagaacaaatcactaaatctcaatttgccattaaagctcaaagctttgaactcaatgttcaaagttgcataaaacttacaatcaacctcaaaaccagctgcaaaatgctaaaattaactcaaagaaaccctaaaattcgaaccctaaacctaactaaacctaacagcccctcaatttcaaaatcaccatttcaacctaacttaaaagcttgaaaactaagaagggttccattgaaacttaccttaggttgatttccccctttggattccttgctgaaactcaataatcaacagcaaacccccttggtttgtcccagccgaaagcaagagagagaggttcaagagaaaactctaattccaattttttctttttcttgatttttcttcaaatgagataaaaggattttaattaatcctttgctgaaaactaacttgcaaggtgtcattcactaagggcagccacctattctttaccaaataaaaatgactaaaaggccctttaggttataacttgggtatttgtaaagctaggggtaaaatggtcaaaatccataa

SEQ ID NO: 282959 - DNA, 771 bp, Cannabis indica
aggaggagcaagaaacgccgccacgccgcggagttgccggccaatggtatggccgatcaccgataactcacccgttaaaggattctcctccgatggagatgacgtggcatcttgtggatcgtctgatcggagagttttgatgagccaagacatttggataatctctcggctcccttttcctttctaatttatttttatttctgggtttgtaaatcatagaagtttatggaggataggatatcatgaaatcatatttagcgatttgggtttttttgggatgaagaattaattcactaagaacatgagaaagagtaagaaaaacttctgtgttctgttgtgtctaatctgcctcaatgaatttgtttataaatttaattattaaaaaatatatacagtttaattttttggaaggggtgtaatgttcctaataattccaattaagtgtgtatgcttttggaattgggtaatttttcttttaattccttccgttgcttttcgactatggtagtagtgtttttgttgggaatgttttcattttgattaagattttctcttttacattttttctctctttttttaagtaagattttttctttagccctttgattatattgagaaaaatgtgataataatagtgaaacctacctagtaggggtgtacgtcggttttagtcgggttatagcatatttttatcaacccaatataaatatcgggttgtaaatatttaatcgtaacccatccaatcaaaaattagagaaagttcaacccgcc

SEQ ID NO: 282960 - DNA, 486 bp, Cannabis indica
gcatctccgatagtcctctgggccttggttccaggcaaaacagctgtgttatgaatgccatagttgggtgcggaactattattcccagtctcttgcacaccaggcccaatttcatctatacgaactctttcaccattccccacatttgccggctgtcaaggactaacaggaggtgaaaccctcgtgtttcctgggttctgtgatgtaagatccagcgtctgtgaatttgctggatcagtcaggcctctacgagtttgcaccatcgtattggcgattggatgttgaataaagagcgattcgtgatgcttctctcaatgaaagcacataaatgttgacctcgcttttagccaatgacaacgagtctattttataagcgataaatgatttataataacaaatatatgataaagcaataaaaagacataggaattttatagaggttcagccccgagcacttcggtaatagcctaatcctcgttacttgta

SEQ ID NO: 282961 - DNA, 587 bp, Cannabis indica
ggcagcgctgaccgcgtgctcggagacggccaaatataggaacaggtcctctccaagaacgggttttgacaggattggaggcttggccatgtgttctttcaactttttgaatgcctcctcgcactcgtccgaccattcaaacttttggcacttcttcaatatgttgaagaagggaatgcacttgtctgtagatcgggagataaaacggctcagggcagcaacctttccggttaggctctgcacgtctttatgcttcttgggggatggcatgctcaggagagcttgaattttttctgggtttgcctcaatccccctctggctgacgatgaagcccaggaactttcctgatttgaccccaaaggtgcatttctttggcttgagcttcattcaatatctccggactacctcgaaacactcttccaagtcgtccgcagggctactgcatgctttagacttgacgagcatgtcgtctacgtacacctccatgtttcaccctaagaggcctttgaacatccggttgaccattctttggtaaatcgcaccagcgttcttcagtctgaaagccatgaccaggtagcagtataccc

SEQ ID NO: 282962 - DNA, 472 bp, Cannabis indica
aagatcaccatcttcctcttgcagtcaatactggctgagtatttagataggaaatccattcctagaataatatcgaaatctactaggctcatttctatcaagtcagcacttaactctctaccgtctattctgatcggcatagacctaatccaccttttggagataactaactctccgccaggtaatagggttccaaaccctgattcataactatcacacggtctatccaatttactaaagattctggctgccacataagaatgtgtggccccagaatcaaacaatactgagtaaaatgagttgttaactgagagctgacctgtcaccactgaagggctggcttctgcatcagcctgcgtaatggcgaacaccctagctggagtgggttcgccggagcccttggtgcctctgttctgagctggggacaatccctcttatagtgtccgggcatgccacactaaaagcatccctg

SEQ ID NO: 282963 - DNA, 172 bp, Cannabis indica
agaaattcatattaggatgttagacaacatacatggtagtaaatctagatcctggtaaaataattccaacatttccaacaaacatgcaaactttaattctcttttcaagtttgccatctttctctcttaagacatgatcagggcacccccagattctgtaatggcgtaaact

SEQ ID NO: 282964 - DNA, 654 bp, Cannabis indica
aaagtcaaataatacattagaatgggagttgctgataagaagctaacctttcaccatagaaggactggatgcaacatcagcctgagtaataacaaatgtctgagcaagtacaggttttacttccagcttctgcttatctttctttgcctgagggcaatttctcttaaagtgcccaaccatgccacacaggaagcatgcttttcggttgcactctccgggatgatgtttcttgcatcgcgggcactcagggtaagaataatccttgcgtacacccttgccttgatttcctcggaaccgcttgttccgttttaaacccaccactgacgacgtaggtttactcttctgctcaaccatggagcccctaccacctctgccataactagaaatatggcaagcggtatcccaatttcgcggcataatctcttgaggtcttaaaatacattctttagggcttccagtccagagggcattcttcatatctgaatctccctgaaggactgtaggttcgtctatccaaattttctcatgcaatgatcccacttgattatcagccatactatgctctgctggtaataccgaattgagaatgcctggcatatgaggtaaagatagtacaggaaacctttgttgtttcaacctctaaatctcctcgtc

SEQ ID NO: 282965 - DNA, 613 bp, Cannabis indica
aaattataaactaaaaaagatttcaaatacccatatccactaggggtgtacgtcggtcggtttagtcgggttatagcatatttttatcaacccaatataaatatcgggttgcaaatatttaaccataacccgcccaatcaaaaattagagaaagttcaacccgcccaatgatttcgtcggtttggtcgggttaacccgtccaaaccgttcttcactttttttttataattattattgttagtttctactattcaaataattagattttttaaaaaataaaaatatattatttatatttcaagttaaaaaatactatagtttaaattaattttaagaaccttaatataagataaatataattgagtaaacataaaataattgaataaaaaaagtaaataaaataatggtagagattttaaactttaacttcaatatccaaatacaataaaaactattaactataaaatctaaagttttaagttaaactactaaaataatctaaactttaaatacaaaacaagtttaactaataaatgtaatttatgtgatataatatatacacttctataaaaataatataaatcggtttaaattcggtttattcgggttaatt

SEQ ID NO: 282966 - DNA, 560 bp, Cannabis indica
cccgacaacatggaacgcagtgtatggctcagtagaatcacatgtaagtatttttgatggcggggcagtttagttagacattggaaatgtcgggaatggtcgggaatttagaatttcccaaaataccctttagtgctttttaatccttagtgtgggaggggcaaaatggtcattttgccccataagcttttgtcctttagtggacttagtattatgtgattatttgatttattttgaattaagttggctgaaataagtggattagtatgataattgttcattttattgaaaaatcaaaagaaaggcaaaaatctcattttctctctagctctctctctttcggacacccctagaaccagctagggtcgttgatttttcttcctcaattcagtgttttgcatcaatttttagtacaatccaagctaaggtaacccttgtgtaactttcttgctagtttccttgagttttaagaaagaaaatttatgcatgcttatggttttgttgctgcaactactgtatgtgtttgttgttgtttttttaggcttaattatgttcagatg

SEQ ID NO: 282967 - DNA, 543 bp, Cannabis indica
gacaaaagtccttaaatttaacaatctcaatagtccagggggaatttttaacggcaaaaaaagttcaggaggcataatttagtatatgttaaagttcggtgggggggattgctaattagcctatactaaaatcaattagggtatatagccaattagaaagtctctctaactggtttctctctagaaacgacccgagaagaaatagttccttcctgggaaggatgtattcgtgtgaaccaatctaattgtgagtgatttgtttttgtaacgccctaatctatagggacgtcgtgtgtgtaattttataaactagtttaatactcatagaataattaattattaaaaaccgtgataatattaaaaacttgactaaaataaaacactaaaaacggacattataacggtataaaaagtgtgttccgggaatccctgttataaaaattgttgctaaagaaatatatacgacaactatttaaatataaaattaaaatatacagcagatacaaccagtccaaaacaactcctggcaactcggcacgcagg

SEQ ID NO: 282968 - DNA, 502 bp, Cannabis indica
agttgtttttatgtttttaagtttagatactgtattaaagtttttaaacagttgttcaacctttggatttgtgtttctatcgtgtttttatttcagcatatgaacactatattctattaccttagggaaaaggtaagtattcttccgctgttacattgaattttacgacaactgattgtctctttgatgattccatctaagcgttgtaccacaagttcaacaaagccaaggcaatgaagactaagatgtcgcacattcatgctgcctacccaatagcgcattacatccgaggtttgcgaatttcgtgttctaagccttggtatgaagtcgatcatgtgttattcgtcataaatctaaggacggaaagtcattgggtgtttgttcgtcttgacttgaatgatgggatttgtttctttataattctttgagtactgccaaaatgaatgctgcagctaggaatggaatgaaggcttatctgtgttgctccctttgttttttgatc

SEQ ID NO: 282969 - DNA, 377 bp, Cannabis indica
tccttctctttgaattggattcttcacgatctttcaaactatgattgaggtaccacttgctgtgtgtgggcattactctatcactagggtatttcgaaattgtgaagaggaaaagagagagagggggtgggctatagagagaaaatggatggctcggtttttctgaaaggcagtctcttgaattactgaataactcttattttagtgtgagccatcactttctattgataggcaactactaggtttaggtttgtaattattaggcattaaattaatgaaaagattagtgggaaaaagctattcaagtggtcggccatggtgttaatgggccccacttggaattttgtagttttcgcaattttcatttctattttctc

SEQ ID NO: 282970 - DNA, 529 bp, Cannabis indica
cagccagagcatacacagagaggaaatttgaataccatatgagcgagttggacagcttggacatccgtgtcagaccatatttacaacaagttggataccacaaatggtcaagataccactgcaaaaacaacaggtattcaactatgacttcaaacattgctgaatctctaaatgcagcaaacttagcagctagagagctaccaatcacaacactgatggagtcattgagagctttgatacaacaatggacatacacaaacaggaaaaaggcacagaaaacaacaacatttttaacacctacagcagagaagaaattagtcaacaactttgtggactcattgacagaaaatgtaaaaatctcttaaatatttaagttgcattacagtttcttaatagtttattttccgtttttatacataataacaattttataaatttacttaatccgcaggtaaagccaataaacgagaccatgttcgaagtcgtagaactaaccagatcatgggtcatcaacctcaaggagaaaaca

SEQ ID NO: 282971 - DNA, 747 bp, Cannabis indica
tgagcgttcttttcccgagggattctttctactttgtagtccatgaactcgtggagcagttcccggactatggttacatatgcggccattcgttcaccgcgcgtttaatactctcccgatatctggtttacgaccagttgggagtcgttgtagacttctactcttttggcccccacgacctttgctaatctcagccctgctatcagggctttatactcggcttcgttgtttgaagctgagaagtcaaaccgtagggctgcctggagtcgaagcccggtcagggatatcatcgcaacccccactccggatccattttcgttggaggctccgtccacgaatactctccatgtggggaccgatggtaccggcgcgttcgcagttgcctcggcttcattacattcagtgatgaagtttgccaacgcttgttcctttatagagacgcggggtatgtagtgtaagtcaaactaacttaactccatcgcccatttgaggagccttccgaatgcctctggcttttgcaggacttgccggagtgggtgattggtcaacaccttgattgggtgcgcttgaaagtatgggcttaattttcttgaggctattaggaggcaaaaaactagtttttcgatgacggggtaccgtgtctccgcccctatcattcgcttgctaacgtagtacacgggatgttgggttttctcttcttcccagactaaggccgcgctgaccccgtgctcagagacggccaaatat

SEQ ID NO: 282972 - DNA, 547 bp, Cannabis indica
gaaccaaacccgaacccagacctagacttgggacccaaaattagaacctgaacaagaatcgcccaaccaggaccctagaacaagaccaggacccggacccagacctagtatcgaacacagacctagcctcagacccaaattgagactggaactcgggcccggacacggtcgtgtacccagaccggaactttgatcctgacctggacctaaatctgggaacctatccaaaacacagacttggaactagataaggatccggatacgaacctggacattgaccaagacccagactgggatcgaaatgctggacctagatttggacagagatcttgactcagacccgaacttggacccccactcgggacccgaacttggacctagaccatactcagatgggggtccagacctggacaaaaccccggacacagactaggacccgaacacaaacacccacacctagaatcatacccaaagatagacccagacccggacccaaactcgaacccagaccaagatcagaacacaggacttagacctagaactgaat

SEQ ID NO: 282973 - DNA, 654 bp, Cannabis indica
tgttactctgtcaaaagtaccgtcgtacgaatgttagagactcagtaccgtgtgggacacagggattagggttgtggtcaggggtatgggcgtctgatcataacccgagatatatgtatgttttatgatttatgcttttcttactaagtctgtcgactcacagtgctatgtttatgtgtaggtaagggaaattccaaagctgaggagccgtgaggatgagccgatgaagattgtacatgtcggggcggttaggcctggagcgtacgatcctcgggacatcagggcttctgtagttagtcgctgggcgacaagtattttgtaatgaacagtaaactttttgtaaagtattttgtaaatgggatcccaaagtattttgtatgacatgttataagtatgtaattaaataagcaaaattttaattaatcacgatttctataaacctcattgattagcaacgagctgcacagtacgtttaaaaatcacataaacacgcctatgctagttagggtgttacattaggtgtgccggtcaacctgagtggaacaatctgcctgacgaattacaggctcctaaatcacaataatcacaacactgataagtgatacgctaaattacttctcggggacttaaactcgaaactaaaagtttccctat

SEQ ID NO: 282974 - DNA, 968 bp, Cannabis indica
cagatcataatctgactgaaccactataattctctgtcttattttattttccagctttcgttgattgttttcccattcccagtcgagtactcgccattctaggttgaatactcgcacttgtctttacacataaaattcttcttgttattaataatacaatataatttggtgttgcgaaattcactcgacaacatttggcgccgtctgtgggaatcgactaagatttcattcatttcaaagaaaaatatcatcatggctggaaatcacaccaacggaggagctaacaacgggtccatcaacattgggatgatgaacgtaccattatctggaactggagtgccacctgtggacgtcattaacggcggagtagggagaagcaatatcagacctctcaacctattcccagaaacgactgaccctcaagtcggggacacatccacgccaccagcaaccatgcattttccccctgtcactccggcagtggtatccgagggaatgatccagctcaccactgatcaatatgctgcgattcaggatcaactgcgcgcgctacaggccgaagtagatggacaaaaccgagcccgacgccctcctcgagttcctgctattcgcaccgataaccctcaggtaacgacttctagacgtcatactaaccgtgtacgcagggaacggagaaccaaccctgaaggtttggacctgaaccatccaacgtcgagggatcaatccgcaaggtatccaaaccaaagcacacaagttgatgaagaccctgaacggcgtaatcctcgcagtcgaccatcaagagacaacgacgcagaatcagcctcttcgtcatcgcatggtcgcactccaagcaggtacacaaggtccggctctgtacagacgcaacagggaggacattaccaggtacatcgaggtgatctgcgtgatcacctcaacgcagttttcagggcacgctctcgcgtcccaca

SEQ ID NO: 282975 - DNA, 513 bp, Cannabis indica
ttctttttaataatgctattttttaattcaaacaacaaacaaaattaaatccaaacaaaatattttcaacataaaatatatcacaataatcttagagaaaatatttatttaaaacctaattaatttgtatttctttaaatgaaaacaatgcattttcttaattttttatttctttttttttttctctctattatgccataaatactattattatttataaacaaagataaaattaatcttaaataaaatattttcaatataataatatattgcattaatttcttgaaaatattataaagaattaattttattttgtatttttacactataaaatatgtaatattttggcgtttaacaaatgataataataaaagtaattttcaaatcaattaaaagtaataaaactaaattatcatctcacctagatactattgacgcaaaattacactgagagaagtccatcatggaatttgagtggagtggaaaaaatagacactcacgtacagagaagtc

SEQ ID NO: 282976 - DNA, 677 bp, Cannabis indica
ttttattttattttaagaatcattttttatatacaatttcgaaatacatttctttaaatatagatattttaaaattttttaattttgaaaattagattaagttgaaaattaatttaaataaatttaaaaaaagttaaatcaagtaattttcattaatgatttaactaaaataaatagactaaaatatattatatttcaattagaaaataagtaattagtttatgaattatctacatagatatttcctaggtagactttttggtatttttctaaatatatttaattaaatagaaaattaatatttaagttgatttgttctagacacttaaatatttgatatttttttaagatatttaattaaataggaaaattatatttatgttcaaaattaatttatttaattatagaccaacataaattagaaaaaatttccaatttattttattttattttaagtgaatttcgaaaatgcattgcttctcaatacattagatttcgaattcaattagttatatatttatagaaaaattaaatttgagttgaaaattaattttaattaattttggtccaacataaattaagtaatttttcataatatttattggaaaataattttttttatttttcagatcttcttagggtataattttataaatattaaattaaaatttatattt

SEQ ID NO: 282977 - DNA, 524 bp, Cannabis indica
catccgatcaaaattctgaccaatcacccgctccggcaagtcctccaaaaacctgaagcgtccggaaggctcctcaagtgggcaatggaactaagtcaattcgacttgcactacgtaccccggatttctataaaaggccaagccttggcagacttcattactgaatgcaacgaagccgaggcaacagcgaatacgccggtaccgccaatccccacgtggagggtatttgtggacggagcttctaatgagaacggttctggagccggagtggctatgatatcaccaactggactgcgactccaggcggccctccgattcgacttcgcagcttcaaacaatgaggccgaatatgaagccctgatagcagggctgaaattagcaaaagctgtaggagccaaaagagtggaagtctacagtgactcccaactggtcgtaaaccaggtatccggagaataccaaacccgcggcgagcggatggccgcgtacgtaacaatagtccgagagctgctccacgagttcgcgga

SEQ ID NO: 282978 - DNA, 411 bp, Cannabis indica
gaggagacttgaacaacagaagacatgcaaacaaggagataaaaatcagtcccagaactgtttcgaagctaagtttaaaatgggaattttatgcaggaaaagatgtgacagtaactcctgccattttcaatggtaccctttattttacaagctggaatggttacatatatgctgccaaagcaagtgatgggtctcttatttgggagaaaaacttgggccacttgacaggccttaacgctactgggctcatcacaaatgccaattggactgtgtctagatcgaccccaccactagctggcgagtcttcttgtgtatatatgtgatagtaaattcttaaagctaatatagtagtaatactgttatttaacagttatatctatctatctgtcacttcaaatttacaaaaaaaaa

SEQ ID NO: 282979 - DNA, 764 bp, Cannabis indica
atcgacgacatccttgtgtactctcgatcgaaagaggagcatgaggtacatcttcgaatggttctgcaacggcttcgggaacacaagctttatgccaagttcaagaaatgtgagttttggctatctcaggtgtccttcttagggcacattgttggtaaggatgggatcaaggtggatccaggaaagatagaatccgtcagggattggcctagaccgaaaacagtgacagaaattagaagtttcttgggtctagctagttattatcatcggtttgtagaagggttttctaaaatctcaacacccttaaccgaggttaccaagaagaatcagcggtttgtatggtcagacaaatgtgaggctagctttcaagagttgaaacagaggttgattagagctcctgtgctagctttgccttctaacaaggaaaagttcgtggtgtattgtgattcctccaggcagggtctatggcgtgtattgatgcaagccaaccgggttatcgcttatgcctcccgtcagttaaagaattatgaacagcgatacgcgacccatgacctagaattggccgcagtagtatttgctttgaaaatctggcggcattacctttatggagaaaggtgtgaaatttatatcgaccataaaagtctcaaatacttctttacccagaaagatttgaatatgagacagaggcattagttggagttagtaaaggattacgattgtgagattctttatcaccccgggaaggccaatgtagtggccgatgc

SEQ ID NO: 282980 - DNA, 556 bp, Cannabis indica
ttttcttttttaaaatataattattttaaaattcaaaaaagtaaatataatactcaaaattaaaaattcacttagggctaaaaaaaaatgacgtcgcaccttcatttccatattatgtgaaatagaattttctaaattttaaagtgtggttctcctaactaacgtatatatcatcataaaaatatagactaaaaaataattctcttcaatgccgaaacaataagatctgtatttgaaagaataaattagtgatgtattgctaattataagggcaactccaatgggaaagctaaatttaacactaaaatgatactatttcaacactaaattttttttcaattccaaccacaacactaaaaattacactaaaatatatattatctattattatattactttattaaattatctgttgagaatcatggggttccatctcaaaaccaattgacaatgaatggagtagcccatgttcttatatatggctcaatactttcacatttaatccatgtgccaatattccctctcaagatggtggttatttttgctcaccaatctt

SEQ ID NO: 282981 - DNA, 553 bp, Cannabis indica
gtggtgccagcacttccggctccggtggtaagtctcctttagcagttcattatgtcccttctgttggcgagtatgccagtcttaggcccgtagggttcgacgagcgtctttataggtttaggatgccctcgacccggtggggagaccatttgaaggagttttatttttccaacttaggagatttcctaggtcggtcccggatgggttctggtcctccggagcccgttcccttaggcccttcagcttatattacatccagctggttccggccttcggacagctatctcggagatgatgctgccagcatcaaaattcggaactttgctagggccgaattagagagtcagggtaggactagcttgcttgtcatatcttgtgttggtggtttcccacggatgttctaacacttgctttcttttgttgtagcaggtgcttctatggacgccattttggccgaacttgccggggttcacactcctgaggctcctccctttacttcttccccgatggccccccctttaaagatttcttccagtgctcctccagacactat

SEQ ID NO: 282982 - DNA, 651 bp, Cannabis indica
attttaattaaataataaatacataaaatagggaaaaaaacaggaatattctaaaaagggtaaaatattacaacaatactgtgggccggcccaatcaacatttgtacagcccaaaatgaaaatattacaaaaataccacttgcccttaccttcagccgcacgtcacaaacggagaggatgaatgaagctccatcgatgcagtcggccacgcaaccagaatgaaaccagatcgaacgtaaaacaactgtaaatcccgtcgaatttcaataggaaacgaacaaatccaacgatctaaacagaaattttttaaaaaaaagagcaggacaaccgtggagaaactgaaattcaacatttgatttcggtttttatagtgcaatatcactcaaacgagcgtcgaaaattcagattgaagcaatgtaaatctgtattgaacagatctggagctccccctcaaatccaaaaaaaaaggtatgaactgaatttttttttcaacaatgatacacgtcatttttagttgcattctggttgattcactggtgtgcaacaggaaattcatatggtaaaaacaataaacaagaactgattctgattaaggaaccaagggatactaataaggtatttttatttttttgcgttggcttacagttgcat

SEQ ID NO: 282983 - DNA, 924 bp, Cannabis indica
ctccaaatcagacctagacccgaattgggagccggacccggatcccaacccaaacctggactcgggacccgaacccgaacctgaactcagacccaaacatggaaccagactagggacatagaaccagggttgggacatagaaccgcaccccagtctcgatcccgaacccaaactaagaaattggacctgggacctgaaccggaatagaaccgagactcgtgaaagtgatccatatcttgactcgggattcgagtaatggggcctggaacagaccagtagtcggtgtttagatcttggactcaaactaggaccagaacccagacgaagcaccaaacccgaacccagacctagacctgggagccaaaattggaacctgaataagaatcgcccaaccaggaccgtagaacaagactaggaccgtgaccaggacccggacctagacctagaactgaaaacagacctagcctcagaccaaaactgagactggaactcaggcccggacacagtcgtgtacccagacaagaattgagacgcggacctggacctaaatcttggacctggacccgaacctagacccagatcggggtctagacctaaacacaaacctggacacaaactcggacccgaactcaaacacccacacctagaatcagaccaaaagctagactcgaacccggacccaaactcgaacccagaccaggatcagaaccaaggacttagacaaagaacttaatccagacttagatcgggattggaactttggactcggacccaacctagaccaagacccggacgcgaacccacacccggagcatgatctagacctagactgaaatacggacgcgaacccaaactcagaccaggactcgaactccgaccccaactcaaacccaaagtcgaactcaaaatcgcaaatggaactag

SEQ ID NO: 282984 - DNA, 556 bp, Cannabis indica
gccaccaatctggccttgtttctcacaattgtaccgaactcatcacttttatttttaaagatccactttgttccaattatattgataccttttggtcttcggaccaaaatccaaaccttgttgcgaacaaattggttgagttcctcttgcattgcattgagccattcttcaaaagtcatggcttccttcacatttttcggttcatattgagaaacaaaacaaagaaagctaatcaaattaacataccttcttcgggttaccatgctttcttcaggatttccaagaatgagatcttttggatgattcagtttaactctggtgcttggttccttctggatagaatcagtgatgatgtttggatgagtcaagatagacggttctggttctccagtctcagttgcagcagcagattcgtcatttgcatcatcagaattgggttctgctacatcaggatctacttttgctgcttctggaggagtatccataaaactatctatcttggcttctgtggaaaactctgaaaaatctttaaaatcatcaacaaccacattagctg

SEQ ID NO: 282985 - DNA, 722 bp, Cannabis indica
attactatggaattcttttccaaaattattattttccaaccaaacaaaagaatcaggcccattagtattccattccattcctttctggcccattaccaccaaccaaaacgggccccttaatgctagttgtttccatttttcatttgagttattttccatttttaatgtgagatatttccattttgatatttatattttctatgtgatttgttttcaattttttataatttttgtttctattttacatatatatatatatatgggtatgctcttaatgtgtattacccatctatggtattttattcttgaccattagatcaaatatctaacggttgatatttatagtcattaattaaatattaaaaaattaatatttcctattttgttattctctatattcctaaaatacataaaactattaatagaaataaaaaatttatacatagaattattatttaaaaataaacacactaaaaaactaacaaactatttttttaataaaaaacattttaaagattaaaaaaaaagtagtatatttatattttataaaatttcttaaaactaaaatctaaattgcattattgagaacaaaaaaaaaataaattttaagactttaagctttaatacatataaaatgtataagattttttctaaacctaaaatactttaatttctataataattaacaatcatttatatgtttttattttttttaaaattac

SEQ ID NO: 282986 - DNA, 520 bp, Cannabis indica
ctcatgtttgttaatttttcaaatttaaacaaattttgtcaagtcttgtaagcctttctacttattacaccaagctgtaattaaagtcgcatatatatattaaaaaacgcgagtacccgtgtactgcaaaaatgttaaaggataattatctccgcgaggatataaatttgtccaaagtaaattgccaatatgtctgagtacagagtgcgagtacccttgtaccgcataaaaactaaactagcaaattcaagaaaaacagtttaaacatagaagagaaaagtcaagcatttggagcagcaggagcagtttcatccgcgactttgttaacgacctcgttctcgacttcctcagcatccgcaacctcggcctcctcaagaagattccctccaccaccttgagtttgagtaggcgacatgccgcgaaaagcctcggccatctcagcggcttctgctccgaggatagagaagtcaaagtctgggattttggaaagagtagtgtaaatataatcagaaactgcctg

SEQ ID NO: 282987 - DNA, 679 bp, Cannabis indica
tctcgttacaatgcgtataaacagaaagatcgtgggatcaatgctgaatgcaaggatcgtgggattgagactgaagacactgatattgggatcgtgtgtatgtcgtatccatgtaaattgatccctgagttatagggattgagctgatgactcatgatgcgaaagctgaattcgctaattgttgattgctctgcgcggatcgttgaatatcttactctagacatgccagggaggcatcttgctcggcctatcttcccgagcagatgttccaagtggactccacgtgtcaccatttccgtgatgccacgtcagagtgcaaaatttgggataacaatcttatttgttatttataaaagattagaaattatttatgtttacatgtatcattcatgtttaatgtttaatatacaatttctgttaaatctagaatatatagttattcacaattacaatgatgtcaacacaatggaaggtaattgtgattatatgcttcaaaagtttatgtcccatgattcatcagtgcatcagatttacactgatgtgatagtcagcgataaagtttacttacaccttggataagtgttatgttctttccaagatattgggaaagtatgctagtattggatgtatggagtatacattaaactgggaccgatattgatcttggtaaagatattat

SEQ ID NO: 282988 - DNA, 503 bp, Cannabis indica
ataccgccgcggcgaggttgaacttacagaaacaggaggatttccacgaattctcgccgcggcgaggctacaggtcgccgcggcgagataagacttccagaaccaccctaaaatccacgaattctcgccgcggcgaggctatatggtcgccgcggcgagatgccagtttttccctttttaaatcccaaaaaccctaacatttcaaaatcacacctcattcaaacaccttcttctcccagccgaaaaacacctcttttcaccctaatttcttcatctaatcccattcaaaccaattttcctcaaaattacccataaactttcatcccaaatcatcataaacccttctttctcacattaaacactatttcccacttaaaaatccattccaaaatccctaaacctcacccaaatttcagaaaaatcactattcatcttcttcttccctaaagcttcaaggttctcatcaatggaggttgactaaagagtgattttcattgaggtat

SEQ ID NO: 282989 - DNA, 728 bp, Cannabis indica
atgattaaaaccctaatcctcgcgatacccaaaaccttaaccctacgttctgctatgctttccataggttattctaactctggaaatgggaaaaacacccaaccaaggcactgcaaagacgaaaattgagaaaatgaaaggcccggggaaccctgccaaaaccggctagccggtttttgtggctctgcaaaccggctagccggtttgcaccagagttcccaaaacccttcatttgttgctcaattctccaccaaatgcaatgaaaccttccagagtacctaataagggtatacacaatacattccagccagaaaatcacagaacaaaccattgaaactcaagttgccattaatgatcaaagctttgaactcaaagcttaaacttgcacaaaacttacaataaacctcaaaaccagctgctaggaactaaaatcaatccaaactaaccctagaattcgaactgaacaaacatcaaaccctaacagccactaactagcaaaatcataacttgaaatcaatgaaaacctagagaaaacacaactagagaagaactagggttacctttgctttaacctccttgaatcccttgctaaaatcccagaaattcagcaacaaaacccccttgcttctgctggattcaaagagagagagaaggaaggagagagcttcttgattttttgggtattttctcttttttttttaaatgttacaaaatgaaataaaacaatt

SEQ ID NO: 282990 - DNA, 526 bp, Cannabis indica
ggggaattctttgtgtgttttctagctgaatttacaaggttctgtggtctcaactcttggtaagtctcttgcttttgttcttgaagatttttttaaggaaaattgttggttgcatgcttagtttgtgttgttgttgttgctgtgattttatgttgtttcagaggtttaaagcatgcttgattgagtggaatgaaactgtttatgatgcatgtttggttggttttaaactagtttagagttttggttcaaaagctatagttttttcaaagtgaaaatatgaaattagttgctgtagagattgtttgtgcttgagttcattttctgcagtttttatatgcatgattgagtagatttaagctagttttgatacttgtaggtgagctttaaccaagtttgagttttgaactcaaagcttggagctcacatgggatttttcatatttgtggtttctggatggttttgatgctttagaaatgttccttggggtattcagaacaggtctggaaggtttggtatgaattggatt

SEQ ID NO: 282991 - DNA, 444 bp, Cannabis indica
acccttctcatgtcctctatcttttgaggatcagtgggacactgctccttagatagacggataccaaatctagaaggcatttgcgccccttttggtgtttgtcattgagaatctctcaaaaaccttatctatgtaagttgtttgagagagagcaaaggatctgtttttccggtttctgataatcttaataccaagaacgtaagcagcttcacccaaatcattcatttcaaattgagtgtcaagccattccttgatgtcagacattttcttgatattgttaccaatgatcaaaatgtcatcaacataaaggacctagaatactaccacttgattatcactgagttggtaaacacaaggttcatcttcattttggttaaagttgtaggtcttgatgatttcatcgaacctcttattccaggagcaagaagcttgcttaagtccata

SEQ ID NO: 282992 - DNA, 730 bp, Cannabis indica
taaagtttatgttgtaaaatactttgaaaccagtttgtgaatattttgaaaacaggggaaccccgtagtccatattacttatcttttgttaaacagtttaaaagttgaattttaattatcaaaatttaattacccacacttttagtataattacatattatataaatatcagtattttattaaattgcacacacgtggcgtccctgttggacagggcattacaatgactgacatcaaggaatggctggatactcaattcgaaatgaaggatttgggtggagctgtgttctcggtattcaaattatcagaaatcgaaagaacagatgccttgatctctctcaaacaacttacatagataaagttttagagagattctcaatgacaaacaccaaaggggcacaaatgccttctaaatttggtatccgtctatctaaggaacagtgtcccactgatcctcaagagatagaggacatgagaagggttccttatgcttcagcaattgggagtctaatgtatgcaatattatgcactagaccttacatctgttatgcagtgggaattgtgagcaggtatcagacgaatccaggacaagaacattggaatgttgttaagcatatctttaagtacttgaaaagtacaaggcaattcgtgttagtctacaaagggtggtgctttgaatcccgtaggctataccgactcagatttccaggcatgtcttgatgacaagaaa

SEQ ID NO: 282993 - DNA, 475 bp, Cannabis indica
aaggttattcgagtctcactgtattttttgttttatgtgtttgagaaagaacgtttttctaggttttagtattttaaggttttttaggaatgtatgtttgtaagggatatgtatgaggttacattttttgggtaaaaaactgggtaatcttatgaaaaatgacctgtaaattggaataaccgcatactgtgtaagaaatatttaaataggccctgtttcatactttgaatactcgcgggtattcggatgaacagtttgaatactcacacactgacagaacttacttctgattattggctagatcttttaggactttatatgttgtgagttgaattgcgagagtattaattgcttttccaaatggtgggtgtgtcacagtattctaatggtcatatacgcggttatatgccccttgagatactgtgatacacccagccatttgcgatatgcgttaatattcaaatgagcgtactcc

SEQ ID NO: 282994 - DNA, 494 bp, Cannabis indica
atcagacacaaagctagacccggacccggacccaaactcgaacccagaccaggatcaaaaccaaggacctagacccagaactgaatccatactcagatcgggattggaacttggaactcagacgcaacctagacaaagacccaggatgcgaacccacagccggagcctgatctagacctagactgaaatctggacccgaaaccaaactcaaaccaggacttgaactctgacccgaactaaaacccaaactcgaactcataatcgcaaatggaactagaaccgaactagatctacgaccaggaacaggacctaaacccaaacccaaacccaaatcaaaacccagacagagacctaaacccgaaccgaggctaggaattgaacccgaacctagaccgggacccaaacccacctaataaccaggacctgaacccagaatcatgatagggacctggaaaacagaactaggaccgggacctagtgttggaaattatttt

SEQ ID NO: 282995 - DNA, 442 bp, Cannabis indica
tattgatgtgacagctcttaagtcatacaaggctggtcggcctagcattatgttaaatgctgaaggaacatccaatatcaggaattgtgccatgatagttatgctcatcggagcttgtccaactgtgaggggtagcaggatttgtcctagaggcgcaactccttggccggagaaaccatagacgggctgaaggcatggagtcaaatccttgagctggagccccatcttctcgtaagcagtcttaaacaaaatgtttgaagaagccccattatcgatcatggttctggccaccattttgtttgctatctggacttccacgaccagcgggtcgttgtgcagaaatcttatctggacagaatcttcgtcgttgaacattatggttggctctactgcgcgtggaacttgggctttctctcttccacgactaggatgacttcttctt

SEQ ID NO: 282996 - DNA, 294 bp, Cannabis indica
tataacaatggataactaatagcatatctatatcatagaacatatagagcgttctacataactgagagtgcaattccaagtttataggcccatggtccctatactagttgagacaaacttcttgtaagactcagttaattaattttgattaattaattttagttctaaaattagactatgtgtagtttatgaattttcactatgttatggcttgattgtgaagaaatggtattttagggttaatttattaattaagagactttgtggagtctaattaataaatattataaatgg

SEQ ID NO: 282997 - DNA, 517 bp, Cannabis indica
caccaatgcacgcacccaatttcttcgcgaagttgacaacattggccctccggcccaaccgcatacccacggcttcatgcaaaggtcccactgacccactgcatactggctcctctgagctcctgcttgtgtcggctcccaaaactgtgtcacaagtttgtatccccaaaatcaaccctgcatcctctgatgactcgctaactttcgacaaacttgctgacacccagtcttactcttaagacttgaagtcatcccaatccgctatctcccatcggcatatgttctctgaaccattcggcttacagtgtcccatacaacaccagtgttcccataaacacaaaacatgcccataacatgccgcaaactagctcagtcttgatctcagtctacgcccttgcatattgtctatctgcagcttgcagcaatcatgcaagtcttcaccctgaacaaccaatctgttgtagtgtttccctctggattcacacaccaaaactgaacaagtaccctgattcttcaa

SEQ ID NO: 282998 - DNA, 581 bp, Cannabis indica
agagcaggcggtatgcttgaggaatcagttggtatggcgcaaggccgacaaaaactaaaaaattaacaaagtagtcttgaagaggaagcatggccccagccatcaggtgcgtctggctccaagccccgaagccgccatagttatggttgggcgtctccgcatcacggggcggccggtgatacgtcccggatgttgagggtttgattccagccacctccacgatgttctccagctggtgggggcaggttagggtggagtgaagctctgccctcccatccggtggcccgagacttatacccctcctgggcaacgggacccagtgagacatcttcaagggtagccagacgcttaccactcttcttggacgactttgaaccagatgcagacatgttttgattctgaaaaaagagttaagattccagcagttaggccccataccaaaccctaaaccaagaaaaagggaatgggggtcccctaaccgctggaaagaggccccctccggacatctgtcaaacagaaaaccctagaaggatttcctggacaaaagtcgggtgcaaaaaattcacagaagacgacattgc

SEQ ID NO: 282999 - DNA, 503 bp, Cannabis indica
tcaattttgatgttgttgctgttgtagttttaggttgttttctgtgattttctatgcttgaattgaatggaattaagtaggtttcatgcatgctagttaccttggttcaagtttgtgaaattttgttcaaaaactatgatttttcaaagaaatgtcttgaatctgtagtatacttgttgttgatgtttgctactattttcagaggttattttatgcttgtttaagtagatttgagctagtttggatgcatgttatctaggtttaaccaagtttgagtttagaactcaaagcttgggctttaatggtgattttgatttctgtactttctgggctgtgttgatgctttagaaatgttctaggggttatatagaacaggtctggaagttttggtttggtttggagttgatttgagcattgtgtgaatttttgaagttctgcctgcgaggaaccagaattccggttgtgcatccggaattccggatggggttctgaaatttcccaga

SEQ ID NO: 283000 - DNA, 718 bp, Cannabis indica
aggagttactatgatcactgtttgtactacaaaggtactgatattaataaagtcatatatctacttctgtatgtagatgatatgcttataatcagtaaagaaagggcaagagtaaacacaatgaagggcctactcaagactgagtttgaaatgaaagacctaggggaagctactaagattttgggaatctctattaagagaaacagagcagaagggacacttattctaaatcaggaagactacatacacaagattattgagaaattctcaatgaagggatctaaaattgctagccaacctataactacacagttcacactatctaagaagcaatgccctgagagcaaagctgagaaggaggaaatgagtaaaattccttatgctaatgctattggatctgttatgtacctaatggtaagcactagacctgatcttgcttatgctattagtgtacttagcagattcatgacaaatcctggtaagacacactggcttgctatgaaatggttactaaggtacctaattgggacaactaaattgggactcaagtacagaaagcaacaaggaagcacagcaatagaatgcttcagtgatgcagactatgctggagatagagacagtaggaaatctacatcagcctatatattactactagggggggaattgtgtaagttggaaagtccaattacaacctgtgtggcattatccacaactgaat

SEQ ID NO: 283001 - DNA, 801 bp, Cannabis indica
aaaaaaaataattacacaaaggctccctaataagatttgtctataaaaaattattccttaaagtagcatctaatcaaaccctagtaccatgtccaaaataacgataaccatttctaagaatcaatgaaaattcaaaggttgtttctcaaatctcaccactcacaaaaatatgaatactcaaacttggtaaattttctaagcaaatatgtgctaacaaccatcttaccacaaagtttggcatgtgcattttataactgttaaaaattctaagtaacaaagatagcaaaaattggcttgaaaataatattttacaagaataattgagtaattttttaaaattttgaccatgaaaatattaatatgacaaaaattaataagcatgcttgaatatgctcaccacacccaactaaaatcagacaatatcctcattggtcaaaaatatatacatgaaaagagagtacttagagagtgagctaatgcaaaatgacatgatattgattcttagaaaaataaaactaaaggaagaaataaacaaacaaaacaaaagttaaaacataccgaaaataaaagaaagcaaggaaagatagaacctgattagtcttggcaaaccggagacaagtctcctcaggtgggcttaccaactcaatattcttgactatccagtatcaaaaatgaattttcttttatcctgtgtctcaaaaatagaagcattagttacattttcaggaaaaagaaaatgatcatggctgaagtcgtggaggaaatagtgtaaatgactaaacgtaaataattttctaattt

SEQ ID NO: 283002 - DNA, 589 bp, Cannabis indica
atttcagcctgagagggtgattccattgcaaggccactaaagatgttctgtgacaattcagctgctgttttcatggctaagaacaacaaaagtggaagtcgaagcaagcacatcgacattaagtacttagctattagagaacgtgttaaagaaaataaagtggtcattcaacacattagcactgaattgatgattgtcgatcctatgacaaaaggcttgccacctcataaattcaaggatcatgtagagaacatgggacttggttcccttatgtaatttgtacaaataaagttattattaatgaaactcttattttgatttttctcatatttatgcgcatcttaattttacatttgagaaaaatttcagaggacctgaataaacataaggtttagggtttattcacttaagtacattgccacataaagtacattgttatataataaatgtattgtaatacatggaagataatactcgattcataatgaggacatgtcgctatgattcgtatgtttattatataatgaggaacgttgggtttgaatattttagtttaaatgctgaccaagtgggagaatattagaatatt

SEQ ID NO: 283003 - DNA, 510 bp, Cannabis indica
ttacacgataaaggaaacaagaaaaaaaaatcctattctatgccctaagcaaccattgtacgaagagcgtatggtcttctacaaagaaaatacacgataacaacagaggcatgacaatggcgatcctaccactagagcagtaaattcaaaacagactgcatgaagaacttaaacacttgcatgcccagaaacctcgaatgcaaacccagaaaaaaaaaacaaacagaatgagtaatagcatgccattcaataatagcaaaggatgcaaaaaacttacaatgaagtgttgaactaggggtcctgatgcaagtcgagtgaagacgaggactggtagcagcgagcaacgaagaactgggaaaatcgcaaagtgtttgaaggcctcgttccaggtctaggaattttctctctaggaaactcgagcaaagttggcaagaaatgggaagtaaccgaaatgaaaggaagatggtggcttttataggcaaaaacgcatgaggaacaggcgtcaccacc

SEQ ID NO: 283004 - DNA, 571 bp, Cannabis indica
tatatgtgatacacagatttttgataaaaatatgcctcctagaataagagcgtcacgtgatgtggtacttagagaaattaagagcatcttatcgcttaagatcgaccatgttttgggcatggaagataaaatacttaaagctttgagggagattattactattaatggagagatcaataaaatagtaagaaaacggggagctttgatctggtcataagagaagtttttagtattaagggtggcattgtctcacgtccccgccgaattgctttattatattgatagcatttggcatagtaccataaagaatgttgatgagagaactaggtacacaatgttgatacaggagttagcaacgaaattccatagtttctcttttgagaagacttatacaacagaagtcaatggtgtggagaaaacatgcatcaagactgtacggtacaaacttagtgataagagtaagaaagatattaccaattccattgaccctacaactaaacgggactgtaaagaaacaaaaaggcctgaatatttcgaggtgacagaaaatatgttagtagtggaattaaag

SEQ ID NO: 283005 - DNA, 486 bp, Cannabis indica
tctgtagggtcagtcatcattccatgaagcagccagagtgacgtactcgtgtataagagccatgattccgtgggtgtaagggcctaatggaggcttgaagcggggacgttacactaactaattataatccaaaagcatatacatgatttgtcaaattagaatgaaggaagaatagatgtaagcaaagaataaatcaagaatattgtacaaaaacaagaacaagaaagactagacaatgcaaactcccaaagattttctgaaggagtcaaagcgacttgaatctagggctttggtgaaaatatcagctaattatttctcagtatcaacatattctaattgcaaagatttattttcaataagttcccagataaagtgatgtcttatatcaatgtggtttgttctagaatgttgaacaagatttttggaaatatttatggcactagtgttatcacaaaaaatagttaaaacacccaattcaaatctata

SEQ ID NO: 283006 - DNA, 597 bp, Cannabis indica
aaagccacaatgtaattggatttgtgtgtaattagaagtaattacacaatttgacatgtttgtttgaccatgtaattacactgaaactgtgtaattagaagtaattgaggggttccaattacactttccaattctcatggccccccatgaaaattggatgtaattacactgtgtaattactaaaaactttccatattaaacattagctactacaaaatattattttcccatgtaattactaactattttgccaaataagatattaggaattcatatgtaattaccacctcatatccaaacacaccttgcattttaaaatatagtgtaattactaaatgtgtaattatcatcatagtaattaccctacctagtaattacacagttacttccaaacacaccctaaatattaattaatggcatatttattaataagtaatgtcaatcaatgataaggtagttattttttatacttatttactttattaaatttagaaattggagaatttattaaatatgagataaaagaaagagaatacttttcccaccatttctttaatgaatgacgttaagcgtaataacttttatttatttttattt

SEQ ID NO: 283007 - DNA, 579 bp, Cannabis indica
aggatgttaataaaacatacttggtagtaaatctagatcctggtataatatttccaacaagatgttactagaatgacctgggaggaattcctggagttatttaatgccaagtattacaatgaggtggtccgcagtgcaaagcggaaagagtttgtggaattggtacaaggcgagaatatgtcagtgactgaatacacaaccaagtttgatcgcttggctaaattggcctatgggattgtaccaacggatttcagtaaaaaggataagtacttggcgggattgaatcccaagattaagcacgatctggttatcactacaaatgacactacaacttatgccgaaatggttgataaggctcttcgagctgaaggagcagttaagttcttgcaagaaacccgagagactcctagtgttggtggtaccactactctccctatttctggccctggaaaagagagtggtgctcccacttttgaacaaaagaagagaactttcccatcattgagaagttcagggcaaggtaaaaggtttcgagaaaaccagggtaaagggggaagttagacttactcctatcctgag

SEQ ID NO: 283008 - DNA, 745 bp, Cannabis indica
cagtactcgaggtacatgccttggcatcatccaagtagtcgaagttggcctggggattagccttccaaaaatcaaagaagagctcgaggccgaaagtctccaaagcatcgactttctcctcaagcagtccgcctcggtcgcctgagcgtccttatcatccttcagccgaagaaggacctgccgcagagaagtcctctcatcctgaagacgctcaacttcagcagataaggtctcgatggtttcctcaaagcgatcagcagcctcgaggtcctttgtcagcacggtgaccttcttctcagcggcgaacaacttcttgttggcctcacccaactcatggcgaacagctacagtctccgccctggcctcctcagcttccttcttggccaagtccgcctccgccctcaaggtgtcggacagagccgtactccttgaagtagcggatttagcccgagagtaggtataagccaacttcaaaccggcctgcataaaggaaaaagtcagcatatggagctaagtataaaagccaaaagggaaatctcgaaaagaaaagactaaccctggtaagttccttcaagactccgcccaccaacacatccagagatgagtcgccagcaccagccagctgctcaccgacctcaggaaccagccggttcatgtagtgagccatcacctccttgcccttcttggcctcaggcagcacgggcatggtggagttggtgccagcacccgctcaggaatcctcctg

SEQ ID NO: 283009 - DNA, 929 bp, Cannabis indica
  modified_base (864)..(864): a, c, t, g, unknown or other
tgaagtttggggtagaattgagttgagaatcaaagttcttttaggatttctgcataaaaacagtctatcgttttactggaaacaatgaactatttccctgggtaggattcttagaaaatagtccatcgttttggaaattcagttcactgatttgggcagttttggaagcctcaattattatattttcgcgatacttaaggaattgccacactatctaacgatagggaaacttttagttttgaatttaagtctccaaaagtgttagagcaacactcaccgatttttacggaaatgtgacataggacctccgattatcagaagcgatttttactcaagttgactgtcacacttgttatcggtatcgaggtaagactatctaacacacatatacgttgacatggttatattttccagtaatatgacatgttagcaagattgttaaagaatatacatgtaaatgcatattacatgttttgattatatgagttgctactaccatcgatagtgcggttatagtacatagtgcgtgtggtataatatattactcgattaaggaagtatgacatggttacattatccacactagtatcgagaaggtacagagtgcatgggtataacaaacatttgtactcatagtacaaacaatccctaccaacaccagacctggaaggatactgtggtatagaggacgtactatcgttgagaacgttcgagactcataatgcacaatgaatgtgaatatactcgtagccaggtgtgtgggcgcttgggttacgagaggagctatacatatacaatgtttttatttcatttgttatgacttgttgataggtgtatgggtgccgtagtcgtaggttgggtatntgtttatattttatgcttttcttactgagtcgagtcgacttatagatgctatcctatgtgcaggt

SEQ ID NO: 283010 - DNA, 606 bp, Cannabis indica
taccttaattctagggatcaccccacaaaaacactataaataccccccaaaactcattaaagaggggtcgagaattctgggtttcataagaactagaagggtagaaaaatccaccaagaacattctctgcaataaatactatcataaatacacacactcgtcgactaaggctcattaacgccccaaccacttaaaaatctctctcttaattccttatagctctctaaattattattattatattggttgtcgaaaacctcggtcaacattttggtgctttcattgagagctgaaggaagcgtctgaaagtcgacagtacattacaacaaaacaacaatgatggagacttgaagcacatgtcaacctcgccctcttcaagatgctcaagatccaaacgatgaggacgtggcctcaagagcgactgtgggtttgaggaagaagaaggaacccctgatgacgactatgaaggaaacttcgatgagtacgcctacgacgaaggcagctactcagagttggtactcttaaggcaaaaggctgtcgatcatgaagctgaaatcacagcccaaaaagagcaaaaccaaaagatgcaagaggtgatgctggcca

SEQ ID NO: 283011 - DNA, 581 bp, Cannabis indica
gggcatgacactctttcactaaggctcgaatatggtgaagaaaaatgaaggaggctgaaatcactatagaaagaactctctcatctactagttgtctgatagagaaaactaggtttgatttcgttgaaggcatcaagtggatgagtgagagcatcatgttccttttatagtgttttaactaggtcttagggctaaattatattaattaaaaaagaatatattattgggcaaaaaatacacttaaaagccggccactaatatgatcattctctagttacaattttgccactttatttcaaccacttattcttctttcaataaaactatttccaattcaatcctataaatgtcaaaactatttatttaataattgtaattaattatcaaatgaaattgccattaatattatttattaataattagaccatacaaattctcttaattaataaattgaccccaaaacctgttttcttcacaattaagcctttgcttagtgaaaattcttaaataaaacatagtctaattttagaattataattgattaataaaaatcaattgactgagtctgcaagcaatattat

SEQ ID NO: 283012 - DNA, 681 bp, Cannabis indica
caccgcaccctcggctctcaaagcctttttcaaccatctctgcatatgtggttgcctcagtggtagtaatcaccaaatcgtgccgaatcttcgcactcaaaccagccaaatatttttctttcttactgaaatcagttggcacaattcccgctgcgagcttggccagacggtcaaactttgtcgtatactcagtaaccgacattccctcagtttgaaccaattcagtgaactctttccgctttgcactgcggactgcttcattgtaatatttggagttaaacaactccttgaattcttcccaggtcatcactgtgacgtcccgagtgagggttatcaactcccaccacacgagagcgtcttcctgaaactggaaagtggcgcatgtcacccgatcattaccaaccactcccataaagttgaggatacgctcgatcactgaaagccactgctcggccttcatcacatcaggacctcccagaaacactggaggtgcctgcttccggaacctttcatacaacggctccatacggttgccaacaacaggttgttctgctggcaccgctggaactgccacggcctgaaccacttgaggaggcacggcaggaggaccctgctgcctcaatctttgaatctcttcatcttgttggcggatccgatcttgcatttccgcaaatctttgct

SEQ ID NO: 283013 - DNA, 534 bp, Cannabis indica
actgagtctgcaagcagtattatctcaactagtgaggggaccatgggcctatataaccgagctttcaatatgtagatctagaactcaccaagtaaattctctaacttattaattccgccttatgccactatagatttggaattgaatagcactctcaattatatagaacgctctatatgtaccacaatatagatacgttatgcttatccattgttataatcctaatagtgaaggatcctctatagatgatctacactaaatagggacaaatttaccgttctacccttcaatgtattttacccttaaaacacttagttatctataaataatttttctagtaaactaatataattactgaaatgagatatcaatcatttatctctattcagccaagctcaaaggaaatcatcgtttcacttttaaatacttatagaagctataaattctatatctatgatcagcgctcccactcaactaaactaccatgttcccaagatgtaaatatctgccagaaccataagttagcttccacga

SEQ ID NO: 283014 - DNA, 726 bp, Cannabis indica
gtcacttagggggcacctatacctgtacaaagcatttagtaaaaataaaacgatcacaattgcacggtaattataaacagggaatgaaattcattaaggataacaaaagcacgtagtaccgggattaaaagctacccggtcagcctgttgtccaaaaattgaaaaataattccaagtttaaagacttggccggtggagatgtcttagaaaaggcccgaaggctgaataagatatatataaaaaaagagataaaggaaatgtttaaacagctggagtcccaagctcttggttcggttcttctgggccaactggagcaggaggatctgttgtttgaacaggagaagcatcagcagcctgaccggaggttgaagtagtttggccagaggttgaagcagccgcctcgttcccactataagcaacttgggccgcgcagtactcaaggtacatatccttagcctcacccaagtagtcaaagttggcccggggattagccttctaaaaatcaaagaagagctcgagaccggctgtctccaaggcattgaccttctccttcaacctgtccacctcggccgtaaactcccccaccttggcgtccttctcctccttcatccgaagaagaactgcttgtagagaagtcctctcatcctgaagactgtttagttcagcagataagatctcgatggtctcctcaaagcgatcagcagcttcgagatcctttttcatcac

SEQ ID NO: 283015 - DNA, 663 bp, Cannabis indica
tgctacaggtaagacacttagcaacaaactcagcgatgtcattcttcatgcttggccaccaaaacatggccttgaggtcttgatacatcttcgttgaccccggatgaactgagtaaggagtcgtatgagactcagtcataatctctcttttaataccgtcatccataggcacacaaacacgattcataaatcgtaacattcctgtttcatccactgtaaagtcactagtcttcccagccaaaaccctatctcgggatttcattaactctggatcttgcaattgtgcttctttgattcgctctaaaagagtagattgcagggtaatattagccaactgccctacaaccaactcgattttagctcgggtcatctcatttgctaactgctgcgagatttgtttcacagtatttatctgactctgcccctttctactcaaggcatcggcaaccacgttggccttaccagggtgataaaggatctcacaatcataatccttcaccagttctagccagcgtctttgtctcatattcaggtctctctgggtaaagaagtatttcagacttttatgatcagtgtatatctcacatttctcgccatataagtaatgccgccaaatctttagcgcaaaatctactgccgcgagttctaagtcatgagtagggt

SEQ ID NO: 283016 - DNA, 1105 bp, Cannabis indica
aacttttattatttttttacaaaaatactgtcaggtggtattttttacttttttactgtgttttttataagtttcatactgcagtatactgtgttaagtttccactggtgttttactagtgttctactgttgttttgagttatactgctttgtgttttactggtgttttataaaaacacagtatttttgaaaaaattcccgtatgacagtatttttgtaaaaattaatctaaattttagtatttttgtaagttttgcaataaaattttgctttatgagtattttttgtttcgtagtaaatccaaataattgatggaattttgttaattttcgtttaatttcattttgtaatacatgtaattgatggtctgatggtgatgttgctgtgtagtaaaggcttttgtgaaaaaatcccacatcggaaacagataaattaaccaagaaacacacctactataaggctacaagacttacgccttatcagaccacgcagtcacgcggtgaacacaaagcgaactattctttcgccttttactaaagaataccgtgtgttcgccgcaattagtggcatacgcctatttttggagaggtttctcgaaagggaaacttctataataaagtctaatattttttcaaatgaaagttatttaattctggatattaatgttttgatttattaattttagggtgtttttacacttttagaatttatgtattatttattgtttttgtattctataatgtacacctataatacactttttttgttttagtattcaaaataaatttttagtcaattattttttcattataattatttaagatatcttgcgaaatttagaaaaatttaatacgccgaaaactgtgttcaaacagtgtgttgcacgagagactattttattttatacgcgtgtaaaatagactatttgaatattattttctatattataaattattccgaatttttcaaaattttgtaggatatcttaaatagttataacatacatgaatataaaaagaaattagactaaaaaattcttcaggatgacaaaacaagtaaatggtgcattagtacatcccttctaagagggtgcattgtagaatca

SEQ ID NO: 283017 - DNA, 715 bp, Cannabis indica
agttaaggggtcagaaaaagagaggtgaaaaactcttagtaaaaaactactgcattaataacaatatcttgtggactaaggatcaataatgccctaaccacgtaaaaattatttgtattaaacatcttctaatcatcaaaacaactaattaacagttgccaaaaatctcggtcaaaattttggtgcttttattgagagctgaaggaaacattcaatagaagaaaaatcataaatcgattcttggtacgatggtgttgactagaaaaaactcacattgaccacatccgcctggagatcctgtagggccggatggagtagaagtggctttaagggtagatgttgaagaacaatacaaaattgaagatcccaagtacaaggaacactaagaaatataggaggagtacgatgatggtagctatgtcgaactgatcgcattgagaaaataagctgctgaccatgaggctgagttagcataataacagtgactcgtggactaaggctcgttaattctccaactacgtaaaacttcttcgtattaaatttcttctaattattaaaacaactctaattaatcgttgctgaaaatctcgttcaatagatgtatgtttgttttaagttttttttttgtttgaatagattttaatcacctatatattttttttaagttttttattgagttatgggtttatattttttcaaattgaaagtttattta

SEQ ID NO: 283018 - DNA, 549 bp, Cannabis indica
agaaaatagtgtattcttggaagatcaaaaccttctctgcaatctccaacaatggcttcaggttagtgcttccgctcatattttatcatcttcttcttctttaatttagcaaaggctttatagatttaagatttagggttttctatattaaagcacttttaggaatatgtttggatctgtgatttataaatttcttaagtgttttataaaccctaacaagtggtaccagagccacatttgtttaattaattgaagatctggtgattttatttatgaaatttgaggattttaaaaattaaaattttgatttatatatatatatatatttgtatatgatgtgattcttggttctgtccataaaattattgtattaattcggctgatgagattcgtattattcattaagtttcggtttaagtatatatatatgtcgtgtatatatatatattgtttttcgtttttcttgtttttttttcaaacctctgttaatatatatctatacggtttcaattgtcttgtttaatttttggtttcttttgttttactcgg

SEQ ID NO: 283019 - DNA, 630 bp, Cannabis indica
acgccgatctcgatgtcgggggtttagtcaccacggagaactgcaggaaggccaaacttatccttcctcatcaatccgtggaggactccaacctctcacgggtcatctgtcccaacgtgagggcgccggttgcggagaaggccttccgggatgagctcattgccacggcagagaaaaaataccaagattatctctaccggaaggcccaggagaaagcatactctcaggcccaggctgcctctgggaggggacttcgcgtggggagtccggtggtgcgaaggagccaagcgattgccgggaagtccgaggctaaattttttgacaagattcttcaagaagagattggggatcgtcctgccaggaggccccttcgtattgaagattcttcggagaagcaaactccccggccacagccttcggtcccagagccaaactcgggggctcctggtgctagcacctccggtgccggcggtaagtctcccttgataattcgttatgttccttccgttggtgaatacgccagtcataggcctgtagggttcgacgagcgtcttcataggtttaggatgccatcgacccggtggggggatcgtttgaaggaattttatttttcgaacttaggagattacc

SEQ ID NO: 283020 - DNA, 439 bp, Cannabis indica
gaaactgtttattttcgaaagttgagctccccttttctctatatatagcagccctcttctcttcttcttggatgcatgtaccacacgatcaacacaatacacaagagagagagaatttcgaatttcctagtgagagagtagtgcccacacacagcaaacagtacctcaatcatagatcggaagactgtgaaggatcacatccaacattcgggctcagatcttgattatactctgcaacagaaaggaatcaatggttagagatctgagtggaaggagatacattattccgttgtgcccactgtaacattttcttaactttatatgtgttttctttttatcgttttagaagttcatgtttaggttgttaatcaacatacttgtgagtagatctaagatccaggtaaaattaattccagcagtatctatatcgtggaacata

SEQ ID NO: 283021 - DNA, 648 bp, Cannabis indica
tttcacatttcctctgtccactcgaactgcttgtttcctcgcaggatgttgaagaatgggacacacttgtctgttgattttgaaacgaatctgctgagcgcggttatcagaccagttaaactttgcacttctttggttttgttggcgagttcatatccaggagggcttgaaacttttctggattatcttcaattcctcgggcattgacgatgaaggaaactttcccgagctgactccgaaggaacactttaagggatttagtttgcacgttgtattttctaaggactttgaagcattcgtccaaggtcgtctatgtgccccccaacctttctggattcgacgagcatatcatccacgtatacttccatatttcgcccgatctaatctttaaacattttgtttaccaatctttggtacgtagccccaacaattttttagaccaaacgacatgactttgtagcaatagagacccaaatctgttcggaaacttgtatgttcttggtctagtggatgcattttgatttgattgtagcctgagtaagcgtccatgaagcttaatatttcgtgccctgctgttgcatctacaagctgatcgattcttggaagtggaaaacagtctttacggcacgccttgttgaggtctgtgaa

SEQ ID NO: 283022 - DNA, 374 bp, Cannabis indica
ctatgattgaggtactgagtgatgtgtgtgggcacttctctctcactaggattttcgaaattctctcttattttctctcttgaattcgtgtgacacaatgtatgttttagaagagagcaaagggctactatatataggaaaagggaagagcacaactttcctaataagcagtttcctcttttactatgtaattgattaactgccttatttagtgtgatccaccactttcctatttttgctaggctttgattagcaattacatggcaattaaaattgaaaataataattgggaaacatgcaagcatgtggccggccatggtgtgtatgggcctcacatggattttgcagtttcctcaattttatttctatttctc

SEQ ID NO: 283023 - DNA, 642 bp, Cannabis indica
gccgccactttcaccctcttcttcttccttaaataatttcgaacctcttagtgatagagtagtgcacacacagagcaagtgatacctcaatcatagtgaggaagatcgtgaagaaagacattcaacaacaaggagattcaacactaaagaaaggagagaaagagatccaggttcagatcttcataatactctacgacataaaggatacaagggttagagatctcaacagaaggagacattttattccgcttcacccaatgtaaggtttctcatactttaaatgtgtttaattttataatcgttttagaagttcatatttacggtgttaatcaacatacttgtgagtagatctaagatcctggtaaaataatttccaacaattgtgaactgttgaaagtgctggaagcaaagctagacgatatgccaccagtgcaatcttcttgagaatctcgaaaggccttgtaaacctagggcataacttgcctctttttctgaaacatataattcccttcatcggagacactcgtaggaatacatgatctcctacctaagattctacatttctgcacttcagatctgcataactctattgcctattctgagaggcaagcatctagctttaatcttttctatggcttcatt

SEQ ID NO: 283024 - DNA, 441 bp, Cannabis indica
gagataccctaccctacatttattcgatttgtgtatgacattattatggtaaggtatgatacagcgacaatgctgttgaatatagagataccttattccatagcaacggtagggctaaatgtgcacatgttattgtagggccagttaagcccaggttgtgtatggagtggctatgatacgccacattatggtaaagacatgatatgattgaaataattactatatgttattgctatgagtatgatgtcagggttgtgatccctacatatatgtaatggtttcgtttagtacaaatatatggtattaatgggttttatgccctaaataaaactcatttcaatataatctgatttacttattaatatagatcagaaataatgtacataatgtacataatgtatttatgtgcaagtgggagtttgttcacatgatttatttcat

SEQ ID NO: 283025 - DNA, 881 bp, Cannabis indica
atggcaatcacatgtttttttttctgacagaccattcactttatttttttcaaaccccagttcatttgatcagcctagtaccaaaacacttcttgctaagcttttgctatagcaactgaacagcaacctgccaccccaaacttaatgcttttgcccaattcaaaatttcttcacttccacagcctttttcacttgattctctgcacaaagaaaagaacacaatctcaatttcaccatgacaattatttatagctaattataatatatatatataaattctttttctcttttttttttttcaaggggtgccttcattgagaaatttttttttctttcattcttttttcaatttttttttcaatttcgatttttctttttttttttgttttttttttttgttaggcgaccccaaattacaatgatcaagcatctttcaaagaaatcgaggtcttctctcggttgacctcgcctctccaatagtgtttcagccgctgcccgttcactttaaattccctcccggattgttgatctttcactgtaatcgcaccaaaaggagtcacttcttgcacagtaaacgggccagaccaacgggactttaattttccaggaaagagtttgagccttgaattaaagagtaaaacttcttgcccttttgcaaaaactctttccttgattctatcatcatgccatctctttgtcttttccttatacaatttagcattctcatatgaaaacaaacgcaattcatccaactcgttcagctgtaactttcttgcttctccagctgctgaaatatccatattgagattttttagtgcccaaaacgccttgtgttctaactccacgggaagatggcatgctttcccgataaactaggcgat

SEQ ID NO: 283026 - DNA, 706 bp, Cannabis indica
tcaaacttgagcaaacctagctagcatgcaatcaaactagcttagatccacttaatcaagcataaataattctctgaaaatgaaatctaccaactacagcaaacaaattacagattcacatatttcttcaaaaatcatagttttatacaaaatttcacaaacttaaaccaagcaactagcatgcatgaaacctacttaaattccttcaattcaagcatagaaaatcaaagaaaataacctaaaactacagcagcaacaactcaaaatcatcatgcatttactcatcttttcaccgtttttattcaagaaaataaagggagaaagttagaaatcacataccacaatcaagagttcacaaatataggttgaatctagctttgaaaattgatgaaaaccagccctagaattccaagtcttggccgaaaatagagagagaatgagagcttttgaaaattttcttcttttctttaactttgaaattttttgataaaatgaaataaaggttttacataaatcattcagccaacaaataaaggaaaataaccacatataattcattaaaagtcactagaagacaaaatactaatggggcaaaaagaccattttccccgccacactaaaccacataattcacactaaaggggtatttttgggaaattctaaattcccggccattcccgacattcccaatgtctaataaaccgtc

SEQ ID NO: 283027 - DNA, 660 bp, Cannabis indica
ggtttaggcggtgcatccattcttaaggccaaatccactctcataagagtcaaattcaacatgagagattctacccactgtttatggttggttccattcagcgtcaacatggcagaggttcttggaatgcttaaagctgaatgagaaacaagagcaataaccattaaatgcatgttataacaaaatcatgtcatttgtgctctttatcttaaaaaataaatgatcgcaaaataacaaatgatcatcatatatgctagagttcttagacaaattaataaaatagaactcatacacaggtaaaaataatctattaaatattataatcgaatacattaatttactatcgaaaggatagataaatcgtgattcataatatctaatagattttctttaccatattaagcatccttaacaagtaattattatcaataggataattaattacttataaagatcttaatgttattttggaggaagatacaatatttaaataaattaatatttaaatgttcctcattaccaaacaatttccatgcttaatcttatgataggtaagaaaaataaacactaattgttagaaaaataaaatttatgtcacaatactaaaattaataaccaaatatatataaaaaaaaaatcatgaattagtattgtgcatac

SEQ ID NO: 283028 - DNA, 587 bp, Cannabis indica
ataattatatgcttcattgattttgttgcctagattagtctatctccataaaactcaatgctttatctaagttaaataaattgcatgcttcatggatttactatttaggtaaaagagttaattattgattacatataatagggagattgggataattgactgcttcagctttatttacgggattaatagtttgattggaaactgaaaattacattctttaatagaaattaggaatgactgttaagggtggcaaataacctttaactagtttctcatatcgtagtgtcactttaaatttagtgttttctttaatttttattctaatcatcaaaacctccatttttctaattcttattactaaattgtgaataattaaataaatatagtcctcgtgggatcgatccttacttacgattatactaaaataattggaagtattggaattaaaaaatagtaaatttatgccctaaataaaactcatttcaatataatcagatttacttattaatatagatcagaaataatatttaatgttgcatggttaacatgatttatttcatgattatatgtagataatgtatgaattc

SEQ ID NO: 283029 - DNA, 416 bp, Cannabis indica
cagaggacatggttagatccagcattgagtttgtggtaggtcagcttcacaacttaacgctgcaatctgatctgttggaaagaattaaagccgctcagatgctgatccagagttagtaaaaatcagagatgaggttttggctggtcaagccagggatttctcagtgtcagacaacgggatgcttctgtataaagctagggtttgtgttccgagtagtgtggaactcaggaatgagatctttgaagaggctcattctaccccttattctctgcatcccggcaccactaagatgtaccaggaccttaaaccgtacttctagtggagcggtaagaatcagaatttggtagaattcgtgtcgagatgcctcacctgttagcagattaaggctgaacatcagagaccagcagggttgttgc

SEQ ID NO: 283030 - DNA, 519 bp, Cannabis indica
gagtcctagtctcggttcaggtttaggtctctctctgggttttgatctggttcgggtttgggtttaggtccttgtactggtcctggtcctagacctagttcggttctagttccatttgcgattctgagttcgagtttgggtttgagttcgggtcgaagttcgagtcctgttttgagtttgggttcgggtccggattttagtctaggtccagatcaggctccaggtgtgggttcgcgtcctgggtcttggtctaggttgggtgcgagtcccaagttccaatctcaatttgagtctggattcagttatgggtctacgtccttggttctgattctggtctgggttcgagtttgggtccgggtccgggtctagctttgggtctgataataggtgtgggtttgagttcaggtccgagtctgtgtccgtgttttgtgtccaggtccatgttcgggtgccgagtacaggtccaagtttgggtctgggtgaagatctaggtcgagcgtttcgatcccagtcttggtc

SEQ ID NO: 283031 - DNA, 807 bp, Cannabis indica
gagagaaagaaggaaaggaaaatcaagtgatcgtttttattatatcaaaggagtttacaagcagcatatatatatactgaagagagagcccataagagagctgaaacacctaacagaaaagcctaacaaccttaactaactctgacagttagttgcttaatcacagctatcactaacttcctcaacagtaccaagtggggtccaatatcactatgaaatgacattgaaaataattgaaaaatatttaattggtggtgcttatttagtaattctttacaataaagtagagcattactagttaagtagtatggtatttagtattagtgacggacttaagatttaaagtgaagtgaacgttaattttattttttaaaaaataagaagcaaaactaaacttaaaaataaaaaaatgaacttgtgatttaaacccaacataattttatctatatctaatctaacttaactattacactaaaactaatatatcgtaatcagggtcggccctgaaaatttatgggcctaagacaaatcaaaatgttatgggattcgaactcataacattgtataatatgccatatactttaactaactaaactatgaatgtttattgtttacatgaatacacttaattttccttaaataaaagcctaattaagttttttttttttttatttttgagaagtccgcctatgactagggccggccctgatcctatctaacaaaaatatatatatatatatatatatattttcatttttttttcagtgattaccttctatgggtgcgataagaatagtaagattctct

SEQ ID NO: 283032 - DNA, 863 bp, Cannabis indica
gttggacttggaaaggaaccagaggaatcctcgccaagtacccaaaggcagaggtctagggaacctagccctataaggtatccctccgaagggaaccaaaagaaaaaccccatatccactcctgggaagaagaaaaaggtgcaggatctgcgaaaggtccgctcagatttcccaaaagggaaaggtccacagaggggcaaactccaaaaagggagtcttggccctcaggatcgagaggaccgaaagagccatttcgtgcaccaagagcccgggaggagaggaagaaagggccagaaatgccctcccattgatttgagaaatcagattaatgagaaccatggtgatcttcgggatcacctggaccaaaagaagtacggacccgcagtctctacgggaacgtcaaacgaagggatcatgacagaacttgccatactccgaaaagacatcgcccgagtctcccggagacagaaaggcgaagactccgactttgactgtgaagatcgggagccgtgtgccaagcacatcgtggaagcagagctccccaaaaaatttaagatgcccaaaatggaagcttacaccgggaactcaaatccaagtgatcacctgtcacggttcaaccgagtcatgacagtcatgagggtcagtaatgacgccaagtgtttctgcttcccgcttactctaagcggatccgcggaagagtggttcaagaaactggaaccaggatccgtggattgctggaatagttgcaaactagctttgggagcaatttgtcgccgcagatggtcaatctggaagtaagtgccttgactaaaatccagcagctgcctacggaaacattgaagaatttcataaagaggttcagg

SEQ ID NO: 283033 - DNA, 789 bp, Cannabis indica
tgataaatttattgtgcatggaatcaatccttttaaagataaaattggttataatattggtcctgagcagttagttaaattttccaatttcattgttgagaacatcgtcatgaatagggggttagtatattgtgtatatatatttatattttttaaatttctttttatgtttttttatgtgattgactttattttgtgtttgttgttgtttgttttgagcagtgtgaagaagtactccgatgcggacaacttgttatcgccacctatgaatttttctttcattgaaatttttgagaagatgtgattctaccagcttcatgcttgtggtgaatttctgtgtgacagtgtaagaaactagtttttttttatacttttgttttctgttaattatttttaatgtgtatggtgtttgtttagtttttaattttgttctctatgttttgcaaaaccggtttctcatacatgtttttttttgctgtttgttttatgttttgtagcatttagatgtggtattctattacctaaggaagaacataaagcaagatgatactttaaaccaaaggattactactaattgtttgtttgatcaagtcatatggaattcatacaatcagttcttgaaatagggttctgacccttctaagattgattttgataatgtcattcctagatacattgttggtgagttatttgttttgccaatactcattaggtgcttactgaccatgttcttatatatgtcaatattcaaaagcaaaaacattggatattggtcaattttgatatcaa

SEQ ID NO: 283034 - DNA, 882 bp, Cannabis indica
aatctatagcccttacacctcggggtaacccagaaacacacattttagagccctaggctctaacttgcctacactttgatgtgcataagccgcacatccaaaaactttcaaattagacaagtcaggtggtttaccagtccacctttcttcaggggttttaccttcaattgcactagagggacttctgttgattaggtatgttgcagttacaactgcttctccccaaaatccatttgcgagcccggcattgaaaagcatgcaccttgctttgttcaatatggttctattcatcctttcagcaacaccattttgttgaggagtttttctcacggtcctatgcctttggattccattgtcttgacagtaacctgtaaactcatcattacaaaattctaggccattatctgttcttagggttttcaatttccggttagttaggttttcaacaagtaatttccaatgtacaaatttttgaaaagcctcatttttatgctttaacagataaacccaaaccttcctagaataatcatcaacaatagacaagaaataggcactacccccaaaagttagggttttctcaggaccccacaaatccgaatgaacataatctaagataccttgtgatttgtgtgtgctagtttgaaatttaagtctatgatgctttcctagtacacaaaattcacaaaaatctaccttggttaccttgtccttaccaagtagcttttgttcactcataagttgtagccctctttcactaatgtgtcccaacctcctatgccataggatagccttagtgtcttccgtcacatgctccttggtgttgtggcagcaagctacggggcttccttgcaagtagtatagaccaccatttttgtgtccttt

SEQ ID NO: 283035 - DNA, 1081 bp, Cannabis indica
aacctcctgctcacacgtggacttatccaaccactaagttggttggatgggtgacacgtgtttggtcttctcaccatgccttaatccgatatgatttgataaagggggagatacgattgtctctttagtatctcaacatttaatgcattttcttgtaaaatggactacgattggcacaatgacggttattcactactacaggttgacctttaattccagtttttaaggccttttatcttgatttttgctaaaataaaaatcgggatatatgccagtgggataaaaagtccttaaaaaatcgggataaaagatctcgttttatccctactttttttttttttttaaaaaaaggataaaaagtcttaaaacgtgaccttttatccaatataggtgtttcacattttttttttctttttaaatttatgacatttcattaatttttttttgcaatgattaataaatccaatttttatttttataattatattgaatatgcataaaaaacttaactaaaatataaataattaaaataatttttaaaaacaacaataataattagtaacttcaattaataaataatattttacattatatacaaatctctaaaatactacatataataaattactagtgtatacaaaaatacaataaaatactactgatcaatatttataaataaggaagcaattgacttaaccactgttgtcgaagcgctacgagatgttcttcctcacaatattgggataggtcgccaaactgtcaaattaaaaatttaaaactaattaaaagaaagtatttttatatgtttgtatttataataaagatgagtatatacttatttttattcttttatgacttcaatagaattaaaatattgaaacatattacgaatgtaagtttgtacatagtaacctaaagctctaaacataccctttcaatattgataaatgggggtggcttcttaagcgggtttaagaaaatgattattctcaatattatacctatgaccaacatccaatggcggctaaaaaataaccatgttaattaatatgaaagtaaaatattatagtgaatgttaaat

SEQ ID NO: 283036 - DNA, 820 bp, Cannabis indica
gtatgtatgtgttatgtgatgccatgctataaatgctaattgtttatgtaaatatgtatgaggtaaatagatgagttagggtttaaggcattaagtgcgtaagtgtggtattggtgcttaattcgctggggttgttgattacacgggtactagtagtggactttaatcatctagaccacagggcgagttagtagagcttggtgtagaccaaaccaattcaccgcactgcccccacctccgcggaatccggggaaataatgcggaggttggcaatgctaatcctcctgctgaatggcagcagatgtttcaagaaatgcgaagtgtcatacttcgtcaagaagaagagttgcgacgattaaggtaaccggctgcccctgttgatcaagtgttaccaccagcacctgtgccagtggtgggtaaccaggggtttgttatgccgcattgagactcggtgtttgagcggttcgtgaagctgcaacctccgacttttctaggaggtattgacataattaaggccaagcagtggatgaagagaggactgaatgccacaatcagtcgggacttgaaggttaccacttcatatgacactttgtacaagaaagtgatagagctagccttaattgttgaggaggctgaataatctgtaataaatgagcagaccgcaaaggatgccgtcatgacatcgaatccgcctgctagtggtaacgtcagtaaggggaccgacagtggcaaccctgattacaaacggaaggctgaggctttcgaagtatcagggagtaatagaaagtatcggggaaattgaggtgaccgtcaaggtcac

SEQ ID NO: 283037 - DNA, 647 bp, Cannabis indica
ggttgcatgcttagttttgttggattattgttgctgggatgttgttgatattttctgagatgtaagcatgataatttgaagttacttaagctgttagtaatgcatgatatttgctttgtttcaagcttggaatttttagctcaaaactatgatttttcaaagaaatgtcttgaatctgttgtgtgcttgctgttgatgtttgctgttaatttcagaggctatttgatgcatgtttaagtaggtttggactggtttgattgcatgttggtagtatttaaccaagtttgagttttaaactcaaagcttgagctttaatggtgatttttgtttatgtgcattctgggtgagtttgattcttttgatttgttctataggatgtttagagcaggtctggaagttttggtgtggtttgggttggatttgaatgagttatgaaattttgaaatctgcctgcgaggaaccggaattccggttgtgcatccggaattccggatgggctttgaaaattcccagaaccgaaattccggttgggcaaccggtctaccggttggggaaatttcagaaaccctagttttcctcaattttatgttatttggggtattgccatgctttttatcgataggaaaacttttagttcctagtttaag

SEQ ID NO: 283038 - DNA, 727 bp, Cannabis indica
ggggcggcttcttgaagactccgtttctttcttcgattgcgtagatatggtctcgggggactgcgagttcagtatagttgacgaaacgaggtccacctttccttttcggcgaggattccttctttggaggagacttggccaacttcggacttcgctgtctccgcgggctacgtctccttgggcttcggcccctggagttcttccctcggggactgcgagatcgtgaacgcggtattggtgattggcgtttgtcttttcccttctctaactctgccagagaattctcgattctcttgtggggttcggccatggcgaagaattcgactaaggattcgggccttcgagcttgtaactccttccaaaagtcggtcctcggcaagatacctgttatcagcatgcaaacaagcgaagactcgggagccttctcgacttttgttacttctgcattaaaccgtttaaaatagtcttgtaaagactcaccaggttcttgtttgatgttggccaaagtcgtataaggtggcctataggtcattgtggcctggaaatgtgtgaggaataagtcgacgaaggtttcccatgtcgatatcgacgcctcaggcaattgggtaaaccaatcgtgggcgttctcctcgagtgttgccgcaagaatgcggcattttgcaagctgtggtacctgatccacctccattatagtattaaatttttcaagataatctattgggttaga

SEQ ID NO: 283039 - DNA, 788 bp, Cannabis indica
tttttaaaaaatataaataaaataaaataagtgagatatttaaatgtcatgtcttaaaaaaaaaaatgaagttgtcagatgtttgatgtttgaaagaaaaaagttcagaaataaaataataaaaaaaaactaaaaaaaaaaaaaagaagaaagactgtactttttatttaggtacacagtacctaattttgttaaaatggtttcggtaatgacaacatttaattattggacggcatttagataaatattttaaaaattacgtattgtaatgtaaataactctatttttaaagcccaaaactcgtataatccaaacccatgcatacacctaaaaatcgatcaatttgcctaattttcaatcctaatataccgtccctaatgagattccataattataattaaatctaaattataattgagattccataattaaagtataaggagtgtgaggatgatttttttcgatagtaaaactaatcaacatgagtgggaagttatttccgcttcagatgattcatttaatcatttttaatatttaattgtaataatgtttttagtttgagcttgagactataattttttttgtctaatctcttgaactttgacatgtatcaaatcatgtttttgaactttttaggtcgttaaaaacagggttgttcatccgattcaatccgcacttttttggtcaaacaacatcaaatccgcactaagtgcggatttcatttttagatcgaatccaatccgcacaatagctcaaatccaatccaatccaatccgcaaaagtgcgga

SEQ ID NO: 283040 - DNA, 831 bp, Cannabis indica
agtgcaaatgcaagatccagaattggtaaaaacccgagatagggttttggctggaaagactagtgatttttcagtggatgaaataagaatgttgcgattcggaaatcgtgtttgtgtgcctatggatgattgtatcaaaagagagataatggatgagtctcatacgactccttattcagttcatccagggtcaacaaaaatgtatcaagacctaaaggccatgttctggtgaccaggcatgaagaatgacattgctaagtatgttgctaaatgtcttacctgtcagcaagtaaaggctgaacatcagaggcctgctgggttgctgcagccattgaacataccagactggaaatgggaagatattgctatggactttgtggtaggtatgcctaaaaccaggggacattttgactccgtgtgggtcatagtggacaggtttacaaagtcagcgcattttctacctgttcggacgaatttctccattgaccagtatgctgagttatatgtcagagaaattgttagtcttcatggtgtcccaaagtccattgtttcggatagagatctgaagtttacatcgagattctaggagagtctgcatcgagctatgggtactcattaaagttcagcactgcatttcatcctcagacagatgggcgatccgagagaactattcagatcttagaagacatgctacgagcatgtgtgcttgactttgaaggatcatgggtaaagtacttacccctgatcgagttctcttataacaacagctatcaggcgacaattgggatggtcccttatgagctttggtatggaagaaaatgtaggtcacct

SEQ ID NO: 283041 - DNA, 525 bp, Cannabis indica
ttaactacctgtaaatgatgttttagtgaactaaaatataatcactgaaacaagagctcttccatttacctctatttagctatgctcgaaggaaatcatcacttaacttctaaatacctatagaagctatcaattctatatttatgtatagcgctcccactcaaccatactatcatgttcccaaaatgtacgtatcaccctgacccaaaagtaggcttaactaacaaatcaaagaacatgaataacacttctgagattgagcctaagcatatcaggattaagatctttttgatctaagatcaactagtgatattggcttggaaagatacaacgataagtattataatatcttaaccaagaatcaatatcggtccagtgcaatgtatactccatacatttgtaaactagtatactttgtccaactgttctggaagaacataacacttatgcaagtagtagtacacttctatcgctgattatcacatcagtgtaaataccaaaaacaactgatgaaacagggacgtt

SEQ ID NO: 283042 - DNA, 528 bp, Cannabis indica
ccgactacgggttttgtccaagccctgggtcaagatctagatcccaatctcgggtcctagtctggttccatttcttgtggggtactagttcccgctcctagttttatttcctaggtccctatcttgattttgggtctaggtcccagttacagtgtgggtttgggtccagatctaggtgagtcctagtctcggttcgagtttatgtctctgtcttggttttgatctgggttcgggtttgggtttaggtcctggtcctggtcgtcctagttcagctctagttccatttaagattctgagttcgagtttgggttagagttctggttggagttcgagtccttgtctgagtttgggttcaggtccggatttcagtctaggtccacattaggctccgggtgtaggttcgcgtcgtgggtctttgtctaggttgggtccgagtctagggttccaatctcgatctgagtatggattcagtttagatcgaggtccaccatttcgatcccaatcaggttcttggtccgagtccaggtt

SEQ ID NO: 283043 - DNA, 724 bp, Cannabis indica
gattatttattttatctttgaataaatagaattatttgtgaactagttatgtaagtatagggcatttttttttagtgatatcttatttaagtttatcttcttttagagattcttagaaacaaacaaggaacattaggaaataatgtttccaagaagatcagttcgaatcaacggcaatagaaacatccacgtggatgcagctccagcacccgcaaggggtggaggccaaggtgatggtagacgcgaaggctgacgtggagccaaagcagtaggggaggtagacaaggagcatcggtagcaccggtagatgaagtagcactcgaacaacaacaagcacctctaatgctcaagctgagatactccgagaaaacactcgtatacgtgaggagctaactcaagaaattacaaggctacgagctcagaatgaggagttacgccggaatcaaaatccacccgttagaaacctagctcttcaaccaactgcattaaatccagaaccaatacaacgttttgaacctatgtacgagcgattcaggaaacaacaaccaccaatattcaatgggagcttggactcacttgaagctgaggaatggttgcgcttagtggagtccatattggaatacatggacctcagtgatagggaaagagtatcctgtgctgccagcctagttaaaaaggatgcacggatctggtgggaagtagtaagacacagtcgcaacataac

SEQ ID NO: 283044 - DNA, 688 bp, Cannabis indica
cagggtgcagtgtcagatgagttgtatgctatcgctaacccagcgaatacagcaatttatttttatccagggtgcatagtgaacggtattaaatttttggtcaaggaaagggatgataaccgcaaaacacaaaatagcggtgttatggtccccggtgaagatggacaaaatttttacggcacacttgaaaaaattatggagttcacttatttaaaagactgcagtgttctcttatttttttgtaagtggtttgacactaacgggagtagaatggatagtgacggtgttattactagcatctgcgtcaaccgacagtggtaccaaaatgaaccgttcatacttgcatctcaagcaaaattgatctactacattcctgatttaaagaacggtaaagactggctgattgtaaatgagtacataccgcgaaatgtttgggacttcccggacacggatggggagacaccctttgtacaggaaaacaattcagctgaaaccgagttcgttgttcaacttccacagttggatgatgttgactatgttcgccatgatgtcgacccaactgaagttgcaaacatccatcgtgtgaattcacagcctcaacaattagatgatttcattgtcgatgatgacaacgagggtctaaataccgaagaagacaactccttagaattagagagtgacagtgatg

SEQ ID NO: 283045 - DNA, 582 bp, Cannabis indica
tatgattttggactagcaaaatgcctccatatctaattacacacctaaatttaaatattaatttaaaaatacgaagaaaaatttgtaaaaactaattagattggatccgttttttaattggatatccaattacacacctaaattttaatattaatttaaaaatatgaaggaaaatatgtaaaaattaagtatcagcctttatttaagtttaatactccataaatataccatcgttacaagtataatataactaaaagtttcaaataattaaaatacataaaatatcacttttgccagcacatttttatgttggcaaaaatttgtattgcactagtaaaataaaatttacttctgatgtgttggcaaatcaacgttggtactagaacttttgccagcacaaaatgaaaagtgttggtaaaaatgatttgggaaatttgattttttatgcttacatttggttaaaaaaaattcctaaacaaataataactaatatttgtaggatatgacacttttatgatattccctaaaatatcccccatttacatcacccctatttacacaatcagaccccacatcggacac

SEQ ID NO: 283046 - DNA, 462 bp, Cannabis indica
tttttttaaaaaaaataaaggtgcaaaatcgggttggttgggttggtcggtttaattgggtgggttggacctattttcaacccgcccaattaacagattggacggtttgtaattttttcgggttatttcggtttgtaatttttatcggttttttcggttcggtttgggcaggtattcggtttaggcggtttgcaaatttttttgtacagccctaacagaaaggatacaagggtttttaatatcgttttagaagttcatattaggatgttaaacaacatacttgtaagtaaatctaagatcctggtaaaataaattccaacaactggcctcagagccatggtaattgatttactttcaagaaatttggacttaaaacgatttgtgtgtgatttggatggtttcatgttgatatgtgtgttatatgatgactgattgatgtttgtaaaattttatgaaaaataa

SEQ ID NO: 283047 - DNA, 417 bp, Cannabis indica
acatacttgtgagtagatttaaaatcctggtaaaataatttccaatatccaagaatgatgaatcttcatatcaacttcacagaggaggatgccaagtacctccacattccccgtaatgacctgttcgttatcgaagcccatatcgcgaacaaaagagtctctagagttctagtagacaatggcagctctgtcaacatcctattcaagtttgccttccaaataattgggctaattgaagttgatctgttaccatgtttgatacaactacaaggctctaaaggagattccctaatgatgttgggaaaaatccagctgataactctaggaattagagttattttcacatttttttaaagtaaaattggtttagttcttaagtttttaattaatttagtaagtttttaattatttttgaat

SEQ ID NO: 283048 - DNA, 569 bp, Cannabis indica
caacaggcattcacttaaaagtaaatgttctttcagtacttaatatggtcgtccaacctggtactttattggtagtattttcttaaatgttccccattccaataccgtggtactggagcaagttgcattttttcatcatacttacccaatttgtatgctcctgattcaagaactttgaccacctgatatggtcattcccagttcggtctcagtacagctgccgtactgtctttggtgtttggaaatactcttcttaggaccatatctcccacaaagattttccgagccttcacttatttattgaaataccgagctactttttgttgatgggctatcaactttaactttgttgtggttcgcttctcttcgatttcatcaagcgattcggctaggagtacgtggtttccttcttggttgtacgttaatcttctgtgggatggcgactcaagttctgtgtgtagcatagcttcatatccatatgccatggcaaatggagtttgtccggttgctgttcttcagttgtttgatacgaccatagaacatcagggagctcctccggccagtttcct

SEQ ID NO: 283049 - DNA, 462 bp, Cannabis indica
accggaattccggttctgggaaaattcagaaccccatccggaattccggatgcacaaccggaattccggttcctcgcaggcagcaaacataaaaatccatatcttgctcaaatcaactccaaatcaaatgaaaccttccagacctgttctatatatcccctagaacatttctaaagcttcaaaaccacccagattgcacagaaatgaaaaacaccattaaagctcaagctttgagttctaaactcaaacttgagcaaacctagctaacatgcaatcaaaccagcttgaatctacttaaacatgcttaaaatagcttctgaaaacaataacaaacatcaacaacatcacagcaacagattcaaatcatttctctttgaaaaccatatttttgagctaaaaattccaaacttgagcaaagcaattaacattcattactaacaacctaaataacttcaaattaac

SEQ ID NO: 283050 - DNA, 877 bp, Cannabis indica
actttatacttagaaaagattttgagacggttttatatggataaatcacacccattgagtagcccaatggtagttaggtcacttgatgtagaaaaagatccttttcgacctagagaagaacatgaagagctccttggtccagaagtaccatatcttagtgcaataggagcattgatgtatcttgctaattgtacaagacctgatatagctttctctgtcaatttattagcaagatttagttctgctccaacatatagacattggaaagggattaagcacatactccgctatctccagggtactattgataaaggattattctattctaataattgtgggtcacaacttattggctacgcagatgcaggatatttatctgatccacataaagccagatctcaaactggctatttgttcacttgcggtgacactgctatatcctggcgatcaacaaagcaaactctggtggctacttcctcaaatcatgctgagatacttgcaattcacgaggcaagtcgagaatgtgtttggttaagatcaatgacacaacatattcgaggaacatgtggattaacatctaataaagaagtaccaacaattctctatgaagataatgctgcttgcatcgctcaacttaaaggagggtacattaaaggagacagaactaaacatatttcaccaaaattcttctttacacacaatcttcaagaaaatggtgatatcgatgttcaacaaattcgatcaagcgataatcttgcagacttattcacgaagtcattaccaacatcaacttttgagaagatggttcacaagattggaatgcgtcgattaaaggatctccacgaatgccaaaatgagggggagtaatttcatactg

SEQ ID NO: 283051 - DNA, 610 bp, Cannabis indica
tatggaattttaactcaaagctatggtttttaaggaaataatggaatctgttgctgcacttgttgttgatgcttgctgttgttttcagaagttattttatgcatatctaggtagatttgagctggtttggatgcatgtttgttagatttaaccaagtttgagttttgaactcaaagcttggagctttaatggtggattttgattttatgcatgaagctttgttttgttgcttgaaatatgtttattggggtctaattagcaggtctggaaaatttggtttagtttggaaacgttttggttggggatttgatctttgttggttttctgggtaaaaccgactaaccggttttacactgcctgtaaaaccggttacccggattttgcagtagggtgtgaaaccggtttttctcaacttgtcgtttcgtgctagtttcgggttttcgcgcagtttgttccctgctagtttggggtatttttgtattaagttacagtaggttaagtttggtttaaaacctttgtcccggttgtgatttagcgtgtcacttaccggtgttgtgattgttacggtttaggagcctgtaatccgccgagctgatcgttccactcaggt

SEQ ID NO: 283052 - DNA, 405 bp, Cannabis indica
gtagtagtggggtttgttaacgagtgaggaggaaggaggaagatagagggagtgtcagctaagaaagctttggacttcgtcgtcaaaaaaattatgtatcgatatgggttgcctcataaaatagtctcgggcaatggtaagaaattcgattgtgatgagttcatagatttctgcaacaaacacgacgtcatcaaaagtttttccgctgtggcgcggccacatgcaaatggacaggagaaagccgttaacaagatattaacagtcacccttaagaaaaaacttcaggcctacaaaaaaaaattgttctaaagagctaccacgcatatcatgggcatacaaggccactgcaagaactaccatcagacgttgcccattctcaatggtcattgtaaagcccgcttagtt

SEQ ID NO: 283053 - DNA, 687 bp, Cannabis indica
accaactattggtctgttccaggctcggttacccgaatcccgagttaagatctggatcattgtaacgggactcggtctggttctggttcaggtcccaggtcccatttctgagtttgagtttgggatcaagactggggtgcagttctaggttccgaccctggttctttctccctagtctggttccatgtttgggtctgagttcaagttccggttcgggtcccgagtcaagttttgggttgggatccgggtccggctcccaattcgggtgtaggtctaatttggagtctaggttttggtccggttacggttctggatctaggtccaatttcagttatcattccaagtccaagtcctagttccagtcccggtcaacttctggttttggttccaatttcgggtcacagggtacaggatccggtccacttttgggtttgggactaggttcaggtccgggtgtgggtttgggtccttgtcagggttcgggcccagggctgggtcctaaattcagacaccgactacgggttttgtccaagccgtgggtccagatccagatcccaaactcgggtcgcagtttggttcgatttctggtgccgggtcacgagctgggtcctaggttcaagttcaggtctgggttgagtactaggtcccggtcctaggggtgttcgcggttcaggtggtgcggctttt

SEQ ID NO: 283054 - DNA, 568 bp, Cannabis indica
ttacatatctcatatatatataacatatatactataatatacatatatatcatatacacataatatatacattaattacacaactatatatattacataactcacacatatataacatatatatacacattaatatatatgatatatatgatatatattatatacacatatatacatatattatgtatgcatgtctcatataaatacataaaataattatttctacatatttaatcacactaatatatattatatcacatgctctacatatatataatatatattactcatatatacatgttatatattatatatctcacatatatacataaaataacatgatataaatttcaaatatcatatatataatatgatataaacacatgatcacatatatataactcatatatatataatatatattactattatataaaatatagtaaattacataataaacaccaccatgcttacccatgaatggttttgacataaaatctcttatccttgtattctcacaatcttgatttatcacctcttccattgaaaagaaataagcttttgattg

SEQ ID NO: 283055 - DNA, 571 bp, Cannabis indica
ttcatagtcagccaaagggggattgaagcaaatccggaaaaaatccaggctctcctgaatatgccatcccccaagaaacataaagatgtgcagagcctgaccggaaaggtagctgcattgagccgttttatctcacggtccacggacaagtgcatacctttcttcaacgtgctaaagaaatgccaaaagttcgaatggtcggacgagtgcgaggaggcattcagaaagctaaaagaccacatggccaagcctcctatcctatcaaaacccgtcctcggagaagacttgtttctctatttggccgtctccgaacacgcggtcagcgctgccctggtccgggaagaagaaaaaactcagcatcccgtgtactatgtcagtaagcgcatgataggggccgaaacgagatacccggtcattgaaaaactggtgttttgcctcctgatggcgtcaaggaagttaaggccatacttccaagcccatccgatcaaaattctgaccaatcacccgctccggcaagtcctccaaaaacctgaagcgtccggaaggctcctcaagtgggcaatggagctaa

SEQ ID NO: 283056 - DNA, 751 bp, Cannabis indica
aaaaagatgtgttatgaaagaggattcctgtacattgtggcaccggagattgggacatatctccattgatagaattaaaaggttggtaaaagatggggtactcaataccttagattttactgactttgatacttgtgtggattgcattaagggaaagcaaacctccaagtctgtcaaaactggtgtccataggagttctgaaatattagaaatcatacatactgatatatgtagtccagatatggagtcacatggtcagaaatacttcatctcattcatagatgattactcacgctacatgtatatctacttacttcataataaaagtgaagcattagatgtctttaagatatttaaagctgaagtagagaaacaatgcaacaagcaaattaagatagtgagatcagatagaggaggtgagtattatggtagatacacagaagatggacaagcacctggtgcatttgcgaagtttcttgaagaaaatgggattgttgcccattacaccttgcccggtacacccgagcaaaatggtgttgcagaaagaagaaaccgaacattaatggacatggtgcggagtatgcttagtagcaactctaaccttcctaaatccttgtggactgaagcattaaagacatccgtgtacatattaaaccgagttccaacaaaggcagtctcaaaaactccttttgaattatggaaaggttggaaaccaagtttgaatcatgtacgcatttggggatgtccatct

SEQ ID NO: 283057 - DNA, 287 bp, Cannabis indica
ttacacagtaaaagaggaaactgcttatttggaaagttgtgctctcccttttccctatatatagcagcccttgttctcttctcttgcatgcttgagagaaaatttcgaattccttgtgagagagaagtgcccacacacagcatacagtacctcaatcatatttggaagactgtgaaggatcacatccaactgaaggacaagaaatttggacttaaacgatttgtttgtgatttggatggtttcatgatgtgtcatattgatgtttgattgatgtttgtgaattctgg

SEQ ID NO: 283058 - DNA, 708 bp, Cannabis indica
tcttaccttgattccgaattcaagtgtgctggtcaacctgagtggaacgaactgcacggtggtttacaggctcctaaaccataacaatcacaacactattaagtgatacactaaatcacttcccggggacttaaactagaaactaaaagtttccctatcgataaaaagcatggcaataccccaaataacataaaaataagaaaaactagggttcctgaaaatcccccaaccggtagaccagttctgcaaccggaattccggttgcacaaccggaattccggttcctcgttagaaacatacaaaaattccataactcaatcaaatccaacccaaaacataccaaaccttccagacctgttctaaataccccaaagaacataaccaaagcatcaatacaacccagaacgcacagatactaaaaatgccatgtgagctccaagctttgagttcaaaactcaaacttggctaaagctcacccacaagcatcaaaaccagtttaaatctactcaatcatgcatataaaaacttctgaaaacacaggaaatcgaccccaacaaacacagcaataaaactcatcaatttaccttgaaaattatagttttgagttaaaaattcacaaacttgagcaaggataactagcatgcatcaaaacctatctcaactcacttaattaaacatttttaatccacagaaaacaacaacaacaac

SEQ ID NO: 283059 - DNA, 641 bp, Cannabis indica
gtagtagtttttggctgaaatgtgtcatctggtagatctgattttttgttgaaatttgggttgtccagatttatcgacaatttttcgatagaatatcgatgcaatatcgataacatgcgaaggaaggtcagcgatgaccattgtcgatatgatatcaacagtttgtcgatgatatgttgatgaataaagtaatttaaataaaatgtacatatttggaattttatcaatagtttgtcgatatgacaccgaccttttgtcgataatacacctatttaatttaaattgttgtcgatatttagaaatatttgctggtgtttatgtttgtcgacaatttatcgatagaatgtcgataaattatcgacattaagacaaagaagattaaaaacttttaaacagtcgactcgaaataagtgaaaatttttagatagtaaataagtaaagacaaacattaaaacaatcataacataactgttttggtcgaaaacagtcaagatttcttttggggggcctttctttttccaattcctaatagcttttcttttacgtgatcttttcctatatatcccgtacgtcctttttttgattgcatgggttatctatcatctacctatcattttgttgacacgtgttctcgttctttt

SEQ ID NO: 283060 - DNA, 697 bp, Cannabis indica
cacaatcttctccaataccaactatcattacttttggatttgtattcccaccaagattgatcttttatatgcacacaatgtacccatttcacccacatattatcttccttttttgcaattgtccaaacatatttaaacatagcagcaatattccattcagttacctgtttaagacccaaacctccaactgattttcctttgcaaacattcctccaagctactgcagcaactcccttgagttggtggctgccactccaaagaaagctcctgcaaatagcctcaatctcaaagataacttttcttggcaacaccattatttggctccaataagagtgaatagccatcaacactgagttgataagaaccacccttcctgcaaaagtcaagtgtctagtactccaggttcttattctggctaccattttctccaccagcagtgagcactctgaggaggaaatcctctttgcacaaattggcactcccaagtacctaaaaggaacttcatgccgtttgaatccagaagcatcaaggattctttgaatattagtgtcacacatgttattacaatacacaaatgtctttgaagggttaggaaataaacctgatgtttgagagaacaacttcagcccctgaagcatgagataaatgctcttgtaatccccattacagaaaagtaggacatcctcagcaaaactta

SEQ ID NO: 283061 - DNA, 750 bp, Cannabis indica
ctgttagcttatttaactcccgaaagtcgatgcacattctcagagacccatccttcttcttgacaaataataccggagctccccagggtgacacactaggccggataaaccctatgtcaagtaacccttggagctgaatttttaattctttaagctcagctggagccattctataaggagccttggagactggttccactccgagtgccaaatcaataataaaatcaatttcccgttgaggtggtaaacccagaagttcctcgggaaaacatctataaattcccgaaccaccttgatgtcttctggccgaacagagtctggccgagtggtgtctaataccacgaccagaaaccctagacatccatcacacaacaattctttagctgacaaagccaaaaccactaggatccgagattcctgaaccgaaccgacaaaaacaaacggttcctcaccttctggttggaagattaccatcttcctcttatagtcaatactggctgaatatttggataggaaatccattctcagaataatatcaaaatctgctaaactcatctctattaggtcagcacttaactccctatcgtcaatcctgatcggcatagaccttaatcaccttttggagataactaactctctgccgggtaatagggttccaaaccctgattcataactatcacgtggtctatccaatttactaaaaattcttgctgccacataagaatgagtggccccagaatcatacaacac

SEQ ID NO: 283062 - DNA, 631 bp, Cannabis indica
aataacaaaaaaaaaatcataaaattatcctttacaaaaatatacactgatattttttaaaattttttttgatgatcttaaaaaatattataaaaataatatcaaaacaaaaaaattacttaccctaatttcgttttatcttaagaaaaaagaaaattaattttctaattattttttttttcacaggaaaaaatattttcgtgtactggtgtccaattaatggattatactgcagaggtgtagttttaaagaaataaaataactttacttgtctttcataagtaaatttttttaattaaattaattatgcacaccatgtctaatcatcttaaatgaaaataaataactatttgcaggaacaccgccgctttgtcgacactaccatattcgatttatacacaaaaaaatggacaatccagttatatgcagactcggttagaatgaaaagtgcaaaataaaaaattatactattgtctctgtcgaagcaaatgttatcttcaattatcaacaatttagagattaatttttaattttctttttatcttacacacattgtgtttcctttttaatttttaattttcttttaattcatgggtcacttttcatttatatataataaaataaatctaca

SEQ ID NO: 283063 - DNA, 570 bp, Cannabis indica
aaacaaaaataaatttataagacaaaaatctcaaaaaatacaatactaaaataacttaatagcaacaaataaacaacacgataacaattctattttaatataataattaattgagcatcaacacttacgtcaacttaaaaaataaaattaaaacaacacacaaataaaaaaacatatatatacatttatttctcttagttaaacaactaaataacaacaaaaaataactgcataaactccactacaatatgcaaattatataggcataaaaataactttaaaaaagtaaaaaataccactaatgtatagaataaaataaacatgtatatatatacatttttatttgattgaataactaaataacaacaaataaacaactgtatactataatatgcaagttaaataggcatgaaaacaactccatgaattgcatcagatccaagaaaaaaaacacacaaataatctataaaataaatttaaaaacaagtacataatacttgtacaccaactctaaaatatatctacacattaaaaaaataaatatatactcatttttctctttgttaaaca

SEQ ID NO: 283064 - DNA, 644 bp, Cannabis indica
tatgccggttataaccaaataaaaatgcacgtagcagatcaagagtgcactagcttcaggaccgataagggggtatactgctacctagtcatgcctttcggactgaaaaacgctggcgcaacgtatcaaagaatggttaaccggatgttcaaaggcctcttggggcgaaacatggaggtatacgtggacgatatgctggtcaagtcaaaggcgtgcaatagccacgcagacgacttagaggaatgttttgaagtggtccggagatacggaatgaagctcaacccaaagaaatgcactttcggggttaagttagggaagtttttgggcttcattgtcagtcagagagggattgaggcaaatccagaaaaaattcaggccctcctgaacatgccatccccaaagaaacacaaagacgtgcagagcctaaccggaaaggttgctgctctgagccgatttatctcccggtccacagataagtgcattcccttcttcaacatcttgaagaagtgtcagaagtttgaatggtctgacgagtgcgaggaggcattcaaaaaactaaaggagcacatggccaagcctccaatcctgtcaaagcccgttctcggagaggacttgtttctgtacttggccgtctccgagcacgc

SEQ ID NO: 283065 - DNA, 965 bp, Cannabis indica
attctagatgcgaaaattacatgggaagtgatcgtatgagaaatgcaaagcatggtggaaaaataaaagtataaactagtaaggagagactaaagagaaacatccatgaaatccaacaattcaacatgcaaaggcaacaagtaatattaggcagcaacaataatggaatgagcggaaaatatcatcatggagcagaacactaggccactgaaaaaactcataaatctctcaacgtcaaactaacaactacataaacaacatacaatgaaagttccaagcacaaaagacaacacacaactagcacaatacaaactaaaaaaaacaacacataacagaaaaatataaaatatcttaggtattagaaaactccctctactcggagtcctcgttgggctcctctgtgttcgaagctgatggtccaccccacgcgtctagaacgtgctgagggaagtccgggaacttgggatcaaatcggcgcgtagtcctattgaacgcacgctcaatgactgcgtcgcgcttctgctcataatcccacattgcgtgcaattggccacacatttgttgttgcacttgctcaaagcgagcaaagcgatctacgggaggctccgtggatgaggacgtcgctggggtagcgttgtttttggagctcgagtggaccaaaactgataggcccccgaggattaagggcgccttcttccttccacattggtacacctgcctcgcggcaaagagcagtgatagtagcagggaggaatattccccttcccccggtgtgcacaatcagcaatttcttgggcaaggacagcccctacgtcaacatcccaacccattctaatgcaatatagcatccaggcgcggtctctgctgaccatcgaatcatgtgagatggggcatagggcagtttgcacgaatgtatacaaacatttcaaatcgtgctccaagtcagtgcgccgaaatcgaagatt

SEQ ID NO: 283066 - DNA, 999 bp, Cannabis indica
tcatctttaaaagatgatcctgcaacataaacttccccattttcataacaatcactgaaattagcattttggtgatctgttttgcccttaggatttctggattctgaattgtaatcagttctttgtccattaaacttgttctttctgtttttgttcaagaaatagcaatctttcttgaaatgtccaggtttcccacagttgtaacatccatctgtgtcttgtggccctttagaattagatctgcccttgttctgtcctctgtttggacccctgctatggctttgactcctcccttttccatgccaaggcttcttctgagtagatctgcctctactcagatttagttcaccattagagccaccattcctttctgatttcatctctaagtccttagattttaaggcagagatgacctcatcaagagtgattgaggtccttccatacttaattgctgttttaacttctctgtaagtttctggcaatgaattaagtatgatgatggcttggttttcatcactaagagcctcattctcccctgagtttgcaagctcaatgtgcatcctcaagaactcatcaagattttgatctaaggacttggattggttcattttgaacccaaaaatcctttccttgagataaatcttgtttgtcaaagatttctgttgaaattgctcttctagctttttccagatctttgatggagtctcttctttatctaccaatcttattattgcatctgatagattgaagattagaattccagtagcagtttctaggtattcttcttgttgtattttagaagttccttctggccattcaataggttcatctagcacccttagtaatttctgttgagctaggagagacctaattttccttctccaaattctgtaatcccctgtaccatcaaatttatcaatgtcaacttttatgttactcattttaataaaattgaaaagaaacagatagagttttagaatttctcagtttgtgtttctg

SEQ ID NO: 283067 - DNA, 837 bp, Cannabis indica
gaaggaaaacaatttcaagcctccaaaaccttctatccaagaaccacctaaactagagctaaagcccttgctaagtcacctaaaatatgcctatttgggggagaatgaaacgctgccagtaattatttcagcatggttggaagctaaaactgaaggtttgttgctagaagtgttgaagaaacataaaagagcaattgagtggactatggcagacataaaaggaattagtccaacgatttgcacgtcaacaagatactcctagaaactggctgtagtaactccattgagcatcaacgaaggttgaatcctgttacgaaaattctgtttattacgcaagtgtacgtatcaagtagtatctcacgcaagtgaggtcgaaccacagggaattggattaagtactactaaattataattatgattctatttggtaaaataataagttgcaattttaaaagtaaataactcagaaattaaagagaaaataaacgaagattaatcaagatgagagattagggaggtgaatcctgttgataagttacctatgttaatgcctaattgctatccttatctcaatgtgaaagacagattataaattaacctaactcttttcagatcttttaggttctaaataatatgttctctaattaacttcttaattagatcaacacaaaatcagcattaagcaataatctattagtcactaggctatgtaaatactttcgttttacatcaaaacctagactatccaaattttagcattcctaattctcacttttcagatttcgaattaggatcatagagcatgtaaaaggtgatcaagcttgcacatgaaattaa

SEQ ID NO: 283068 - DNA, 520 bp, Cannabis indica
gttcaaaaatgatatataccaactgcaaatcaatattattcaaagttgagatagaatgagttgaaaacgcctgaagcgtaaatgaacaatgtagaaattattaataaatgttcatttgatttgccctgaagttgttaaatctagaggtactcatggagataccttaatgttataaagtattaaaatgataaccgtgatgaaaacggtactcgaaaagactcccaagagaagttagacataacacatttgatcataattgaatccctgaagtgattctatataggtacctataaatgataaacatatttgaaaaatatgtaatttaaagagatctctataagttatgtcaatatgggaggaaattatcatatattgaaatttttgtcgacaataaatattgaatgtttgcatatgcaataaactaacatgagatagcaaggatcatggtattagatttgtcgagaattatcgacatacattttgatttttggccaaaatattatgacgcagtccaggcaag

SEQ ID NO: 283069 - DNA, 172 bp, Cannabis indica
aagcagtatggtctcgactagtatggggaccatgggcctatatttccgagcttccataagagtacgtcattagttatccattgttataatcctaatttgatcaatgaccctctaatagatgatctacattgaataggcactaaattaccgttacaccttcaatgtattttat

SEQ ID NO: 283070 - DNA, 623 bp, Cannabis indica
acgccaaatttttagtgcaaaaaccactgcggctaactctaggtcatgtgtcgggtatctctgttcgtattcttttaattgccttgaagcgtaagcaattaccttcccttcttgcattagaacacaacccaacccttgtttagatgcatcacaatataccgcaaattgtccctcttctgttggtaaactgaggattggtgctgagataagtctattcttcaactcttggaagctttgctcacacttgtctgaccaggaaaattttagattcttcctagttaattctgttaagggtgtggctatctttgagaacccctcaacaaaccttctataatagcctgctaaacccaaaaagcttcgaacctctgaggcggtctttggtctaggccattctttcactgcagcaaccttggcaggatctacttttattcccccgttagtgacaatgtggcccaaaaatgcaacctcggacaaccagaactcacattttttgtacttggcatacaattgatgttctctcagtcgctgcaaggtcaagcgtaagtgctcctcatgttcctcctctgtcttagaataaatcaatatatcatctatgaatacaatgacaaactgatccagatatt

SEQ ID NO: 283071 - DNA, 740 bp, Cannabis indica
ctgagggagccctatgaacatactccatatacatcgcatagaaggctagggcagtgcgataactgttcggagttagttgaaaaggtgatacatcgtatcgcctgagaatagctgcgatgaaaggatggaaggggaccgataccccacatcggagaatgggtattgagactaccacatcctctgtgggaataatcgcaggattggtaaacgagagatgtgccctctgggacggtttcggtcgctgaaacgcaagtcgcagtagatttaacctcacaaaggtagtgaaatctgatttggtaaccctcgagatcagatcttcacacgcgaagggctcgttcagctgagtgtcgtcaaccgagtccgtcccgctcccttccgcctcttcttcatcttcgcctgactcgcgagctggggccgtccattcatcgtccatctcctcgacctcgacgtcaggagcatgcctcgagtgaataaggtagtcgcgggccgacaccgtggactcactatctcgaatgtcgatggtcccaggctcggcaagttcctgcaccattctttcgatgtctgcagaagacatcgggcctagctctattggtgcggcctcctcttctgaaatcgaggttgggagaaagctgtcttcctcctggtcaacttcgccatcgaatgcacggcctccagagccgagctggtggctatccgacaagtcgctcatctgaaagatagaagatcttttcagcgtgatg

SEQ ID NO: 283072 - DNA, 625 bp, Cannabis indica
ccctttagtgccctttatgttattttagtgtggaggggcaaattggtcattttaccccatggttattttgtcctttagtaatcttattaattgggatttatgtgttttattttatatatgttggctgaagtaataagggaagtaatgttcatttcataattattcaaaagtttcaaaattgaggaaaaatcaagaaaaagcaaaaacctctttttctctccttctttctctctttcggttttgagcagctgggattggggggaattctttgtgtgttttcttgctggatttatcaaagtcttgtggtctcaattcttggtaagtctcttgctctttagttttcttggtttttaaggaaaaagaattggttgcatgtttaattttgaagttgttgttgctgctgtagttctaggttgtttctgtgatttttatgcttgaattgattggatttaagtaggtttcatgcatgctagttacccttgttcaagtttgagaaattttggttcaaaagctatgtctttcaaagagaaaatgtgaaaatagttgctgtaaagtttgattgtgcttgagttcagtttctgcagtttttatatgcatgaatatgtagttttattcaggttttgat

SEQ ID NO: 283073 - DNA, 778 bp, Cannabis indica
tgaattttgaaatactatctttattcatttattgatcgaaaaatgtatttgttaccgtagtaacttacatcagagctatttgatctaatctaatcttttagcttaacacgaaataaaacaaattgcagaaattgaaattttactttaaatggtggtcacctgacctgagtacttttctccttttgtcgaaacctttgagcgtagtccgcccagcaggccattcacttaagagtaaatgttcattcagtacttagcatggtcatccgacctggtactttattggtagtattttcttaaatgttccccattccaatacccatgtactagaacgagttgcattttttcattatacttacctaatttgtatgctccggattcgagaacttcgaccacttgatatggtccttcccagttaggtccaactacacctctcgtattgtcttcggtgtttaaaaatacccttcttaggaccacatctcccatgaagaatttccgagccttcacttgtttgttgaaatatcgagctactttttgttgatgggccatcaacttcaagtttgcagtggctcgtctctcttcgatttcagcaagtgattcggccaggagtatgtgattggtatcttggttgtacatcaatcttctgtgggatggtggctcgagttctacgggtagcatagcttcatatccgtacgccatagcgaatggtgtctgtccggttgtcattttctcagttgttcgatatgaccatagaactccaggaagctcttctggccaattt

SEQ ID NO: 283074 - DNA, 651 bp, Cannabis indica
ttgtgatgtggtcttcaatccgtgtatttgcatttcgtattttttttttttgttccatttttggtttattgagtagttttaatccgttttacaggccttaaatctgcttattcaacaagttttgattcacgggttgcagaaaattgaaggtacattttatgttccccaatttgacatagtactacgaagtagttttgattcgattcatatgtttagcctttttgtttgttgatttattgtgaaactgtgttggattaatttatacccttgcagtgaaacaattttaacaaaagaatgtaatgaaagaaagaaaagcaatgtaaacattggtatgtacagtgttgctgaaaaataattgttttcgaaaatcaattttatttggtaatttggtaattttattgtgaaagtgttttggattcatgtgtttggtcattttggtgtgtattttttttacccaaatgttttaccctcggctgccctatattgacccaaaaaaaattttgaaagaaaggaaaacaatggaatggtgatggctgtcatgtgttgagttaggtaaagaaactatggtcttaaattttttagttcagaatgttactttaaatgtgatgttttttgtttttgttatctgttgggtagtgagtgattgttgta

SEQ ID NO: 283075 - DNA, 1137 bp, Cannabis indica
tcccaagagcgtgtatactttgctaactcggacaaatacgcactaccggaggccgcctccctgtacaggaatagctccgaacggacccaacaaaagatgcgagaccacaacgacattgggcacaacaccaatgaatgacaaaaatctcaaggatgagattgaaaacctaatccgattgggccaccgtctatgagtggatcaagaatcggctgcctcaccttaaatccgggtcaggcgacgaggggttgtgctgcagggtgcaccgagggggtgcagcaggagtattggctccagttgctcctaccggagatgcccagcatattcctggtctgccacccagacccaacgggagagtggccatgatctcaggaggaccccacattggaggaactacccgcaaagaattgaagcggtatgcgggggccgtaaagcacaatgaggtttgggaggttactcaactcccagctcaaaggccccggctgatggatcaacccatcacgttcacggaagaagacgccaagacggtgcgctttccccaccatgatctgttggttatcgagacccctatcgccaataaaatagtggccagagtcttgattgacaacggaagttccgtgaatctactctttaaagaggccttcactgcaataggcctgacggaccgagacctctcacccagcggttcccaactcacagggtttaacggaacgacgcttatcccaatgggaaaagtgagacttcccgtcaccttgtgcccggacaccccccaaagcacgttcaaatactgcaccttcgtggtggtagactgcccgactgcatacaacacgatcctcggccgaccggccctagtagatttcggcgcagtcacgtccatacgacacctgtgcttaaaagttccctacccaggaagctggaaaaggaacggtgagaggaaatcagggggaggcaaggcaatgttacaatgttgcaacccacctgcccgtactgatggtccgggaaaccattgagccggaaatggctgaagaagatgagttggatccccgagtggggtccgaaaaaaaattagtagaaccaaatggaggatgtcgaggagatatcagtgtgcgactcgactccaccaaagtaactccggctggg

SEQ ID NO: 283076 - DNA, 997 bp, Cannabis indica
ttatacccgacggtttaaaaatgtcgggtataagggtctaccaaaaaatcatcacctatttctcgccacatttctcacgtgcccacttacttttttctatttcccacatgcccacctatttcttctcacctattttttctccatttcccacaccctaaaataaaaatcttaactctccaaaaccccaaccacgcctcagcaccatcgccctcctctcttgccgtcttcctccctctcttgatctccctttcttctcgtctctctcgtccatcgatctccgcccacccctcctcccgtcagtctccctctcttctctgtcgcatactttagaccaccaccacctcccgtcgatgtccctctcatctccgtctcatacgtcagaccaccaccacctctcgtccgtctccctctctctctttctcactctccgagctcggtataaatatatttatttatttatatacttttttatttattatatatatttattttattattgtataaatttaatgtgttttaaagttagttgttactgtaataaaattaattagttgtcttattttaatttatgtaaaattataaaactaatgcaggaaaaaaatgagggaaaatacagattttctgccattattggcagaaaaatttgcatttttttttctctttttttttttacattcccgacaatttaaaactgtcgcctataccctgttataggcgacgattttaaaccgtcgggaagtccacattagcgacagtttttaaccgttgcctattttgcctgttttgcgatggtcgtataggcgacggttatagaaaccgacgggaatactttaaatgactgtttaaaaacatcaggaaaaactatttttgtagtagtgattctagatagtcatggagttatgcttgcttcaatcatttggcatatatagctgactattttcttcttaaagtagttgaagctcttgccctttgtaatgtgggtgtttgatgctagtag

SEQ ID NO: 283077 - DNA, 897 bp, Cannabis indica
aaaataatatatgaacacaaggttttttatgtggttttgcagttaaaattctgcatagtccacgtgtcaatcttattcatatttctgagtatttttttcaaggtctctttcagaagagttttttttcgtccctccttcttgtgatcttgtctgctactatttataattgcatagtggcagttaattacaaagctggctgaaatatgtttacaaccattatccctaaaatcgtgggatctgattacaaatcaagtcaaataaatgaggtttttacacaactatgagtatgccgcttttattggaccgagatgaaagcgtaatcaaaaatatacggtaagccttatctcatagggatgcctcgctgagaatggtgccaacataactttgatagcgagcagttgcttgtcattttggcttctcgagactaatattattttaactctgataactataccttctggagtcgagatgatcttcctcgcatgcataccatcttctagtgagataaacgcctcactgtctgttatcttgactcgtcccactatctatactcagtttgtatatcgtataatatacagtaagttttttagtgttgtcgttttctctttcacgcagcgaggttgagacctcgtcatgaatgcgtgcacccacatggtttctcgtcaatacataagttagcagttcgtacgtttttatctcgcagaagcctattcagccagccgagttataaatataccctgcgaattatatttccaacgagttgttccatgctaagtatacttttttgtttgcgtgtttgagttcttcgttctttccagctcgacacgtgtcttcctctgatgtgcttaccgaatttcgggtataacagtttacaataaaaaataatattcaaatatt

SEQ ID NO: 283078 - DNA, 608 bp, Cannabis indica
gggaattcctgaaccccatccggaatttcggttgcacatccgaaattccggttcctcgtaggaatcattcaaaaattcacaactccctcaaatcaaaaccaatccaaaccaaaccttccagacctgttctaaataccccaaagaacatttctaaagcatcaacacagcccagaaagcacagaatcgaaaatcaccattaaagctccaagctttgagttcaaaactcaaacttggttaaatctaactaacatgcatccaaatcagttcaaatctacttaaacatgcatattataacctctgaaaactacaacaagcatcaacaacaagtgcagcaacatattcccccatttctctttgaaaaacatagcttttgaaccaaaactctaaactaagcaacaaccaaacatgcatcaaaacagtttcattccactcaatccaacatgcttaaacctctgaaaacaacataaaaacacagcagcaacaatcaactcaaaactaagcatgcaacctatcaacatttctcaaaatttcataaaacttaaaggaaagctaagggaaacataccaacaacttggatcactaaaatttgctaaaaagagcttgaatca

SEQ ID NO: 283079 - DNA, 565 bp, Cannabis indica
ggtgcagcagaataatatgtctccttccactcagatctctaacccttgtatcatttttgtcgtagagtatcaacaagatctgagcccgaatgtccttctcttcaatttggattctttacaatcttccaaactatgattgagataccacttgatgtgtgtgggcactcactctatcactcaaggtttcgaaaattgaagaagaaaagagggagagagaggttcagttatatacaataggataggaggctcaatttttctgaagaacaaaatttctgattttttaaatctctcttgtcaagtgtgagccatcactatctatttatgggtaaccactaggtttaggttaggaattacttggcattaaaataatgaaaataataattggaaaaagcctaagtggtcggccatagtgttaataggccccacttggtattttgcaattttgacaattttcatttctattttctcaaaaacgccaattttccaattttaacaatttaaatgtcaaaactaatatttaataactaaataaattattaaataatattgtcatttaatataacta

SEQ ID NO: 283080 - DNA, 803 bp, Cannabis indica
gaacctggactcgtaccaagacctagactgggatcgaaatgttggacttggatctggaccgagatcttggcccagacccaaacttggacccgcactcgggaccccaagctggacctggacccaaacctagacctagatcggggtccagacctggacacaaacccggacacagacttggacccgaattaagacccaaagctagacccggacccggacgcaaactcgaacccagaccaagatcagaaccaaagacttagacccagaactgaatccagactcagatctggattggaacttgggactcggacccgacctagaccaagacccaggacgcgaacccacacccggagcctgatctggacctagactgaaatccagacacgaaccaaaactcagaccaggactcgaactccgatccgaactcaaacccgaacgcgaactaagaattgcaaatggaactagaatcgaactaggactagaaccaggaccaggacctaaacccaaacccgatcccagatcaaaacccagacagagacctaaacccgaaccgagactgggacatgaacctgaacctagaccgtgacccaaacccacacaataaccaggacctggaccaagaatcaggatagggacctgagaaacagaactaggaccaagacctagtacctgacccagacccaaacttcaacctaggacccagctcgtgacccagcaccagaaatggaaccacactagtacccgagattgggtttcggatcttgatcccgggcttggacaaaaccggtagtcagtgtctggattta

SEQ ID NO: 283081 - DNA, 626 bp, Cannabis indica
taaactaagcggtctttacaacgctctagttcagcgtttcgccgctgtgcttcctccaggcggcgtctaaggcagtggttctttgtttcataagtatcctctcctgtgggctgagtacccccatgattaggctcctcatccctcattctaggattctggccattgccacgctgagttctcctcgagcgtgttattcacgtgctaggaccaacgtcgagttgggtcctccaggaacgtgtggtccgagtgctggggccaccctcaagttgagtcctcctggagcgggtggtccgtctggattgtaggttggaagaccttctagagcccatgggctccccagaacggtgatgagtttcctcgtgtggtgtattaacattttctgggttttcagccatgaaggagatggattttcttcaagagataggagggttttttctgagctgtttcacaaaggctctcaatgaaagcaccaaactgttaacgcagatttttgttaaccaaaaatcgagcctaacagtgataatctcacacagaatattaaaaatagtaaaggaaaaagtactgacaaagaattttgtacgtggtttttcagttaaaattctgcatagtccacgagtcaatcttat

SEQ ID NO: 283082 - DNA, 718 bp, Cannabis indica
caattgcctaaatcaaagaatcatttatcctttgcctaatgatgacctctatcctagcattggtatcttctaaagctttggtggcctcttctctccttttttaagtgttagagcgttcctccttcaataactcaagttcataggcttacttggtaaccatagaacaactcctttcctccatcagactagcctattgaaggaatatcgtaaataaatttgacaaataagataggcatatcttttcccttaaataagttaagtaaaagtcaacttaaaacatttgcttgggtcctcataacatccaccatgttaacaggatccccactcgttatcattgcaaaacttgtcagctctaaagtttacagttggtggtagcgctctagtctaaatagatcaaacataaatggagtcacatcaatcccaacccaaggatgaagtatctctatcatctatgatctatttatgaggtcaggaaagggactcatcccacttatcataactaacaaacttagcattatgcctggtagaaatactactaagaaattttcttatctcatcatactaatttccacgccttttttgttaaagtttctcaacatcatccatgtgagctttaacttcctccgacactgatataggtttaacaggaagattttgttggaattattttaccgtagcagagcattatcaatatctgaacctcgatctctttctctga

SEQ ID NO: 283083 - DNA, 836 bp, Cannabis indica
acatacctcaagtatattctttattttattgacaacctttggtacaaactaccataccaatttatagtgagtctcccattgatgatgctgattcatcgatatctgagactcttaatgttcttttccatcattaccactaaagtttcactccctagttcatacgataccactgcttccttgcaatcatcactatcttcatacttggttaaccactttaaaacttattgtacactcaattatatagctttttgtttaataaacaacatactttgtgatccaatattcaccaatcactcaaatacatgtccattaaattacatctcaattcataagtttttccccattctgggtgagtatgtctttcaataattgcttaataaagtaatcctttcctagaatttcaatggtctccttataaatcacattgactatccagtcaattataaagtactctccatcattatcgtgtcaccttaagtaatttaggtaatcttctttactttagtgataccactattcttcctgacgttcttttatacattaccctagtaacatccccgcttcaagtctccattgggcccttacgctcacagaatgatggctcttatacatgagtgcatcactctagctgtttcctggactgacgattggtcccacggaccaatccaagtgtttccaacatgctttgctccaactcgcacgcttcatggggaaatttcctaaatgaaatcaccccaagtcaaagacactcaaccatggagttccctcatggtgagctaccaaaacaagatgcttcttgctaacatagatagtcccacgcctacataatctcaaaa

SEQ ID NO: 283084 - DNA, 421 bp, Cannabis indica
gtgcatgttaggaagcctgtttgattacattagatatgtatgttggcttcgtaccatctgaccatatcacatcggttaggctagagtatgactagcaactggagtatgattagtataccgagtataggctgattctagggttggtggtactgtgctatttgactgtatcacatcggttaggctagagtatgactagcaactggagtatgaccagtataccgagtataggttgatactgtaacacatcggttacgctaaagtatgactagcagctggagtatgaccagtgtaccgagtataggttgttacttgtcaacagtatcgtcttatgaacgtttgggactcagtatcctgtgggacacggcagtttgggttatggtcaggggtatgggcgtctgatcataacccgggattatgtatg

SEQ ID NO: 283085 - DNA, 811 bp, Cannabis indica
ggtggcaaaccctcaccgagatttgaaaataaaaagccattcaagaagggagaatcgatggcaacttttatcaataccggacacaaagataaagggaaggcacgggagccacaaaagaaattaactctcaaagaaaggaaggaagttaagtattcattcgacgatgatgacatcaaccaaattttcgatgagttgttaaaagctaaggcaatacgactccccgagccgaaacgacccaacgaggttggtatgacaaatgatccaaattattgtcggtaccaccaaattgtgagtcgcccactgtcggattgctacatccttaaaaacattatcgaaggcatgatcaagagaaaagagattgagattgactcttctctcgggaaagcgacaacaaatacaacttccttaactaagaatgaccaaataccaaatgatcccacacaaagggacgtaatttctgtggcatttgaggtcgacaaggaagttacaatagttcaagcccactcagatatgacaaggccaggaaacccaaatattcctacattatatgagctcatgacagagcctaatctagaaatttcggaggactggtatgatagtgaagaggatttagaaagtacatggcaaacatgtactcgaaaaaaatcggcaaaaattccatctcggaaaccatctggaaactctggagtcaaatttcagagtagagcagatataaaggatcaaaagagtaagaaaaggagcggcaagcaaaaggccaattccaaaagaaacgaactcgaacaaccaaaacgaaatctagtaactctggagg

SEQ ID NO: 283086 - DNA, 605 bp, Cannabis indica
atacatgatttaccaccagttgtgaatcactgcagatttcgatgtgttcgaccttcatctccctggctagtcttagcccagcgattagagcttcgtactcggcttcgttgttagatgctttgaattcgaacttaactgcagcatgcaggtgttgcccccaggcgtgatgagggcaattcctgcaccagatagttgatgtgtagccgacccatccacatgtagtttccaagtcggtttgtcctcattgtgacttggctgaggtattggtgccagctcggggttactttctggtatgctttctttattgcttgtgcattctaccacaaagtcttccaaggcttggcctttgattgctattcggggttggaaattgattttgtactggcccaaccctatcgcccacttgagtaactgtccagaagcatttagcttttgcagtatttgtcgtagtggctggtcggtatatacccgaacaggatgagcttggaaataaggcttgaacttcgttgttgctaaaatgaggctgtaggcgagtttttctatcaacggatatcggccctcggcctcaatgagtcttttactaatgtaatagactgggtgttgta

SEQ ID NO: 283087 - DNA, 559 bp, Cannabis indica
aagttaacaaaattctcatcaattttgttcacaactttgattatttaagatattcaaaattgattctccaattttgttatctttttcacaatttttgaatccactatgattcacaatttttgagtctaaaattgctcttccaatttatggctcatttcacaagtttggatccacttttgatccatttgttcttgctatgagaagacaattctcataagtgtaactctcatagttcacttttccttatctcataacatgagataattatcactttaatttctcaaagaatgtaacttctcacaagttacaatttcttttctcaaaatcactattgaaaaaagaattccaaattctctttattcacaatatatatgataataatctccacatcaatagtaataaacactattatattactatcaacattattatcatatacattatataatttatatattaatgtacaaaattaatatataactcccatgcatgaattatagctctcaaataataattctatgccaactaatataatatatatgtaacatacataatatta

SEQ ID NO: 283088 - DNA, 573 bp, Cannabis indica
ctctcaatacttactgcaccatgagtcgagcttgtctttgacgatgaatgtacatgtttgaccggtctacaggaagtttaagaaccttggcactctgataccaaattgtaacgccctaaataattaggcaagctacctaaattacttacgaaaccctaatcccctaaacaggattactaatcaaaattagcgcagaatttaaactttaataacaataggaataaaaataaacttgtaatactttaaactttataaactaaaagttacagaagttcggatcccaaaaaaatttacaaaatattattacaagtcattttctttcagccgacctaagcggccaaacagaatctcaaaaacacaacactggtagaccccaacccacttggttttatatggccctgacatgtacattcttcgcccagctcctgcactcatggttgatcagttaaagtcttaccctttcctgcacagtagagcacccatgagccaagtccaacaaaacagtataaatcataacaataatatgctcatcatgctatttaaaaagtattgccattcacatatatgtctgtg

SEQ ID NO: 283089 - DNA, 759 bp, Cannabis indica
catacatccaactgcgccctcagcccgcagtgctttctccaccatctcagcataggcggtcttgtcgtcctattgatcataaggtcatgcttgatcttcacattaagtccatcaagatatttttctttcttactgaagtcggttggcacaattcccaaggccaacctcgccaaccgatcaaactgggtggtgtactctgtcacactcatattttccttctgggtcaggtgtgcgaactttttcctcttggcacttctaacggcctcattgtagtattttgcgttgaagagctcctggaacctttcccaggtcatagtggtgacatcatgaatctgagacaccatgtcccaccagacttaggcgtcctattgaaactgaaaggtggcacacaccaccctgtcattcccggtgacacccataaagttcaaaattcttgtgatcaccgttagccactgctcggctttcatgacatccggacctcccagaaaaactggaggtgcctgcttccggaacctttcatacaagggttccattctatttcccgctaccactatctcggcctgagcaacaggggcaggtgccacaggaacttctggcaccggcactgcaggagcaccctgctgcctcaatctctgaatctcatgatcttgctcctctattctagcttgcatttcagcaaacctagtttcccaattctgggcttcctgattggcttgagcagcctgggcagcctgtggcgggttatcatcaccccgacca

SEQ ID NO: 283090 - DNA, 893 bp, Cannabis indica
gacatccttgtgtactctcaatcaaaagaggagcatgagctacatctccgaatgtttctgcaacgggttcgagaacacaagctttatgccaaattcaagaaatgtgaattttggttatctcaggtgtcctttctagggcacattgttagtaaggatgggatcaaggaggatccaagaacgatagaatccgtcagggattggccaagaccgaaaacagtgatagaagtcagaagtttcttgggtttagccagttattatcgtcggtttgtagaagggttttctaaaatctcaacacccttaaccgagcttactaaaaagaatcagcgttttgtatggtcagacaaatgtgaggctagttttcaggagctgaaacagaggttaattacagcttcagtgctagctttgccttctgacaaagaaaagttcgtagtttattgtgatgcatccagacagggtttgggatgagtgctgatgcaagccgatcgggttatcgcttatgcctcccgtcagttaaaagattatgagcagcaatatccaacacatgacctagaattggccgtagtagtgtttgctttaaaaatttggcggcattatctttatggggaaaaatgtgaaatttataccgaccataaaagtctcaaataattatttactcagaaagatttgaatatgagatagaggcgatggttggagtttgtaaaggattatgattgtgagatcctatatcatcctgggaaggccaatgtactggctgatgccctgagctaaaagggtcccgggcaggtagctagtataattcagatctcacctcagttagcagaggacatggtcaggtctagcatcgagtttgttgtaggcaagcttcataacttgacgctgcaatttgatctgtt

SEQ ID NO: 283091 - DNA, 426 bp, Cannabis indica
agtagtcgactgctaccactgcgtactgccctccgcctttacctttaggtaactgtctgattaggtcaattccccaaatggcaaaaggccacggactttgcatctgtctcagcttgttgggcggagctcttggtatctttgaaaatctctggcatttgtcgtacttcttgacataggcccttgaatcatcaatcatcgttggccagaagtagccttgccttagaattttctttgataagctctgtccgactgcatgatttcaatagaatctgtcgtgaacttaatatagaagccgtgcagcttcatctagtgtgacacatctgagtaattgttggaaatattttccaggatctacatttactaccatgtatgtttcattaacaccctaatatgaattcttaaacaatgtaataaacacatataaag

SEQ ID NO: 283092 - DNA, 908 bp, Cannabis indica
gatgagttcttgagctttttagctttactccaagattttttactaccattattaacaccaccattggtgaagtcactaagctctgtggagtaacacttgttcatcatcatgtactcctcctctgtcgagtcattgatcatgcgaaaagattctgaaggtgagatattgcaggactcgaatggagtacttgttgctgttggtgttggtgctgttgtcattaaaggggtgctgtagaattcatcaccacaaccaaataagctttcttcttgactcatcatatgatcaaatgatgagatgaagttgggtttggagttttgaaggagtagtttttcgaccatttgtaaacgaggtggaagatgaagaggaagaagttttcctttgtaaaaaagttcatctgcaggggatgttgtcatggttgagtaatctctttcttttggtgtggaagacatttggaattcaaactctcttggagaaggtactattgagttacagaagaagttggagtaggaaccaacttccatgtcgatgtaatcatcttctgctgttatggggtcgaaagccattaatggtttttctttgcttttggtgtggtggaagtggaagtttacaagaagtagctgctttgagaggttttgtcggaatgagattgaagacaactgcaagcttttaaaagaaagaaaaagatgggctagttggcaggcattgatgtaaaagttttatgcaattttattctcatttgtttatgagtttgtgtgtagataatgagataattaaatagaaaagtggtatgatgtgatgattaattccaacttaaaattttacaaaaagttaataatatactagaaaaaatgcatatgtaaaaacactatcaaaataataatattattttggaccctgtgttttgcaaa

SEQ ID NO: 283093 - DNA, 649 bp, Cannabis indica
taaataggaaaaaaaacctaccctttccgaaaggaagaacgtgaaagttcttttcctttccgcagggaccaagagattggatctagccgtaagaagaatgcttggctgataaataactcacttcttggtcttcgaccccctcagtcactacgagcggccccgatcagtgcaatgggatgtgtctatttatctatctcttgactcgaaatgggagcaggtttgaaaaaggatcttagagtgtctatggttgggccaggagggtcccttaacgccatcttttttcttctcatcagagttatttcacaaaaacttgccatggtagggaagaagggaggaacaagcacacttggatagcacagtacaacggagagttgtatgctgcgttcgggaaggatgaattgctccagaaaaggaatctattgattctctcccaattggttggaccgtaggtgcgataatttacttcacgagcgaggtctctggttcaaggatggcccagctgcgccaaggaaaagaatagaagaagcatttgactccttcatgcatgctccacttggctcggggggatataactcacttggtagagctcccctcttgcaattgagttgttgcgattacgagttgggtgtctaattgtccaggcggtaat

SEQ ID NO: 283094 - DNA, 513 bp, Cannabis indica
cttaggtgaggcttcgaaaccccaaattttaaatatagtcatattatatgtcgttggactcaattttgaatgtagaatgcgatggtgataattatttaaccatttgatggtataggtgagagtaatatctaagattggactaaacaataggagctcgagacttgagagcttaagatcgtcttttggacaaaatttaatgacttgggagaggtagagactcaatttaatttttatatgtgttgtataacattagacatatatattctaaaattttatgatttgctaattgtttgaaaaattgaaaacataacctacacatttttctggattgttctggggcactgagtgccaaacatatttttgtgtacaaatatttatgcaagttataattttgggtttatccaaaatatagctgttatgctgtcgaattttgtagaaaataaaaaggaatatgttcttttgttattcttattaattgtatgctttggttatactgatgagagccatgttgat

SEQ ID NO: 283095 - DNA, 722 bp, Cannabis indica
gtggagcgttcaatgtttcgacgaaaaagaaagaagaacaataatggatctaagaatggaaaatgtgcggattgaccttcgaaaaagataaaacaagtggtggaagaagatgaaattgtgtatgatattgatgatttagagattgaagttctaagtagtattatggtatctataatttttttagtttatttttgtttatctggttatttagatggttcgatagtttacagtttgctatgaatttaaatttttgttcatagtttatttaggatttagtatggattataaagtttttatcggatttttaattaatgatattatatatatgttgcaagtattttttggtttatgatttttcagtttaagtttggtttgtattatgtacttgattcgtattttgtgtgtatatagtatacggtagggtgtattatttatactgatttattttctgtatactgtataaattgaggtatattgtctatatttaattatgatgtatacttagattaggtgtagtaattaatgtaattttgttaaatgtgtatacgtaatagtttataatatatgtatattgcaagtatttgtaatttttcaattttaggttttttagttttggtttgcattatgtatttaattcgtattttgagtgtatatagtacacaataaggtgtattatttatactgatttattttttgtgaatattgtataagttaaggtatat

SEQ ID NO: 283096 - DNA, 146 bp, Cannabis indica
atgaaaatcaagcgtaaaactgctccaaaagacaccaatagacgagatattgctaactttaaagacccgaaacataggctaattataacctaacaataatactcttgagatcgaacctaaccatatcaggaataagatcatttgat

SEQ ID NO: 283097 - DNA, 582 bp, Cannabis indica
atacgtatattttgggaacatgatatagtatgattgagtgggagcgctaaacataaatatggaatctatagcttctacatgtgtatagaagtcaagtgatgattcccttcgaccttagctaaatagaagtaaatggatgagctcttgtttcagtgattatatcttagttcactaaaacatcatttacaggtagctaagtgttttaaggggctaaatacattgaggggtgaaacggtaaatttatcccttatcagtgtaaatcatctatatagactagctttgatcaaattaagattataacgatgattaaatgtgatagcgtatctatatcgtggaacatatagagcgctctatataaatttgagagtgcaattccaagttttaagagtggattcaacaaggaattaataagttagggaatttacttggtaaattcggtttagcttattggaagctccataatataggtccatggtccccattctagttgagaccatactgcttgtaagactcaataattgatttatgattaatcaattataattctagaattagactatgtctagtttgtgaattttcact

SEQ ID NO: 283098 - DNA, 760 bp, Cannabis indica
taatggcaatcgatagaagctttccgacttctagacatagactttatttatctaaggaaaagtttcaactattccagaaaagatagagaccaatgaaagaattccttaggatcatcagtaagaggtctcagatatgcttttgtataccttagaccagacacctgctgttgaatgggagaaatgagtaggtccagctgcttgaactcggatgctatcttagcgagttgaatcggatggttggacagatgggtgaagataatccaagatgaagatgaagctcgaaatcttcttttatctttgaattaattgttttagtttcagaaaaatttggatttcaattattagtttgggatttttattccctatttttcatattgttgcagacaattccttctattttggagaatttttaaagaaagttttctattttgaaattgaattgcatttatgaattgagctttatttactttatcttgtgtatgctagtaccaattatatttatatgtttattgattgtatgtgtatgtgtttttaatattgatacaaattctatagtatcttcaactctgcaaagagttaatgctacataaacacttagaatttcatttctatgtttatgagtaattgtaagatctaaaacaattattaagaatttgcttaatagaaagatcttttgatcttaggggtggaaaaagttaagaataatatgcagttcaatgatcttttatatctatcgaactctggattatattcataactc

SEQ ID NO: 283099 - DNA, 580 bp, Cannabis indica
tatctaagttatttaaatatttaaaatataatttataaatttccaataagtaaaatcatataaaatagtaaaaatcatttttaaacttataatttataaacaattaaatatttatcaaaataacaaacttttgaatttgagaatattatggttagaatatctataaaaatatctaggttaatttcaaatttattaattatttaatttgtcatataaaataattttaatataatatttaaaataaagaagataattatcttttaatctaaaatatgttatatatcaaaatatctgatcttataaataaataatatataaatattaaagaaattaacaaatttttaaatctgaccataatttaaaaaataaaataatcaatttttaaatttaaacctcaaaatatcaaaattaataataatctattaaaaaataaatattatcaattaaaaaaatgatatttaagtttaaatatattaaaaataatattttatttagatattgggtttgaaaattggtaaaaatcggaatttgggaaaaaatcccatgaaaatcgaattttgggtgaaggatgcacgctgcc

SEQ ID NO: 283100 - DNA, 1049 bp, Cannabis indica
ccaaagggcaggtcaaaaaagagtatgcacaaaaaaaaaaataaaaagcatatgtgtaaacatcctgacccaaagggcaggtccaaaagaaagatatgtgcatcagaaaagatcatatataaatatataaaaatcctagccctaagggcaggtcaaaatatatacaaatggcccggggacaggccttaaatattgtctcccctttaaataaaaaagaaacagctatgtaaatattgtcttaagtacaagataattagctgtaaataaaaaaaaagagtgaaatcctggttgtaatgggttgaactcaaagcggcctaatcaatgcgaggaggaaggcgaggaccgatgcgcgcctccatcatggcatcgagctttttcttcttctcccagaactttgcaatcatctcctcgggtttggggtagaaggtaagcttgatattctggtcatttgtagaccaggccatgaagacgccatcatcgaaacgcttggcgcaccggctgcaggagacgggagaaaggagctcatctctttttgccttcttcaaggcttggtctttgaagtccttgagctccttcagctccacggccaggttggccctggactccaggtttgcctggtgagtttcctctaaggacttcactttggcaaccatttcatccaaggcttccctagcctcccgaagctcacgcctggccttagcagcagcttcgacctccgccctcagctcctcttggtgcctggcctccagcctatctctccgaagggcctcctcccggatcattgcctccgcttgcgcctccctccgcttggcctcttcctcactggccttggcaagggcctcccggcgctcagcatcctcctgataaagccgcctttcagcagtcaggtcctgaaggatcttcttaacttcgtccatgcccccaaagtcggacaggacgaagccatgattaattatgttcttggaaaggcggccggcctcagcagcaagctgggaaaggatacaagtataagtaagaatctccaagaaaaaaaaataataaggagaaaa

SEQ ID NO: 283101 - DNA, 644 bp, Cannabis indica
ttctggacatcaattagtgctttccctgttgccaagaagggtctccccaggatgataggaacattgttgtcttcttccatgtcaagaactataaaatcagcgggaaatataaatttgtccaccttgacaagaacatcttcgattactcctcttggatgggctaaagaacgatcagctagctgtagtgtaacagttgtaggttttgcttctcctagttgaagtctcttaaataccgacaaaggcataaggttgatactagcccccaaatcacataatgcatgaatattctcaatctttccaatagtgcatggtatggtaaaactcccaggatctttcagtttaggagggagtttcttttgaagaatagcactacactcctctgttagggccactgtctcaaagtcttccatctttcttttctttgacaaaatctccttcatgaatttgacgtagcttggcatttgttcaagagcttctgcaaaaggaatgttgatgtgcagctttctgaatacttcaaggaacttactaaactgcttgtctgtattagtcttgcgcaacctctgaggatagggaatctttatatgatggtcaatactaatagggggagaagtttctttttgctgaagaccatcagtagtcttctg

SEQ ID NO: 283102 - DNA, 718 bp, Cannabis indica
gccaatcatgttctcgtcccgaaacctaacgaaacttggagaacttgtattgatttctccgatctgaataagtcatgcctgaaagactgttttccacttcccaggatcgaccagttagtggatgcaactgctgggcacgagcttatgtcttttatggacgcatattctggatataaccagataaaaatgtatgtcccagatcaagaacatacaagcttcgtaaccaacatggggctctattgttataaagtcatgtcgttcgggctgaataatgttggggcaacgtatcagcgactagtaaatgaaatgttaacaaatcaaatagggtggaacatggaggtttatgtcgacgatatgttggttaaatcaacaaagagtaaggatcatacctcagacctcacaaaatgctttaaaatattaaaaaagtataacatgaagataaacccgaaaaaatgttcctttggagtctcctcaggaaaatttttgggattcatagttaatgcgaggggcattgaggaaaatcctaaaaaatcaaggcattaatagatataccatccccgacaaggcctaaggaagtacaggccctgacagcaagaatggcgccacttaacagattcattttgaagtcaactgataagtgtgtaccattcttcaacatattacgaggcaacaaaaaggtcgagtggacaaaagaatgcgaggaggcctttcagaacat

SEQ ID NO: 283103 - DNA, 626 bp, Cannabis indica
ttagcgtcttcttccgtgaatgtgatgggttgatccatcagccggggcctctgagctgggagttgagtaacttcccaaacctcattgtgtttcacggcccctgcataccgcttcagttctttgcgggtagttcctccgatatggggtcctcccgagatcatggccactctcccattaggtctgggtggcagaccggggatatgctgggcatctctggggggaacaactggagccaatactcctgtcgcaccccctggtgttccctgtggcgcagctccagccgctgacccgggttgagatggggcaaccgatttttgatccactcgtagaggtgtcccaatcggattaagtttttgatctcgtcgttgagatttttgcattcattggtgttgtgcccaatgtcattatggtactcgcatctcttgttggggtccctccgggagctatccttgtacagaggaggtggtctccggtagtgtgtattttgcctagtagcaaagaacacacgttcttgggagtctgtcaactccgtgtactgggtatactggggagtgtacccccttttttgtcgtttttcctccgtccgggtgctgcccttggaggaccttttactcctcgagccttgg

SEQ ID NO: 283104 - DNA, 557 bp, Cannabis indica
tgtaaaataaaccttcatgaagtcctgtcttgagttccttgagtcttggaatccacttcgggtcactttcaagaattttgataaaattaccatttttgcccttggagttaattttgccttaaaaaaaagcttaattgtctttaattatactagaaaaattaacaaatcattagtgacaaataataattaaatatttgttaatcatcaaaacaatgaagcttaagagtgtgggtcaacaatctccccatttttatgatatcaaatatttaattattttgaaagggaaaaggaataaaattgaaacactatattagattagctcccccttatgtgcaagggttaaaaaaattaaaaagtttacctttagttttcccttgtatgattttaaactccctctcaatttattacttatattcaaatagcattagaagtctaaaaattgagttgttagcaaaaaaaaaaaaaaaaataatcactatggaatttctccccttttaattcatgaaaaaaaaggtggcaaaagaattcataacataaatggcaaacaacaatgaata

SEQ ID NO: 283105 - DNA, 657 bp, Cannabis indica
cctattagctatgttttggtttacatttttttttaggaattttcaacataaaatgaaaatgtttggaattttagtattcagattctaatattataattaattaagaaaattgaagaataagaatcttgaggatcttgtaataaagggaggtggaaacactaatggtctaatgagaatatattggttcagatatatttggaaagtcaaattattatgaaaatttggtttgttctcaatattatgggaatgcaccaaaattattatattattttatttttaaagaatttctggatgagtggtattagttttttgatggaataaatggaagtacaaatttgatggatgagctgagccattgtttttgcctttagtgccttataaggttttcgcgcatgatttatggctggcccctaattatttagggtaattggttaaaattacaagatatcatgaatggtaaaaatattataaaatttaatagctaacaattatggtatataattatgaaattattgtcttattagtttattatagataacataatattaattttgttatataaattataaatgtgggattttgtaataaattggaggtagggacattaattgtaaattgagaatattttgttttattttattttttatttttgggaag

SEQ ID NO: 283106 - DNA, 794 bp, Cannabis indica
tcaagttcttgttactggttttctgcaactggttttactgttcttgttcactgttgcattgattaattttagttgcttagttctggtcttaatcaagttctttgcattgtgttgtttgcgaggtgtttgatcatgcattgatcacatcaaatggtatcagagctcagtcgaaagggatcatcaaagaactgaaacaaggacatcaagaacttcaagaacagaaccaagaactgatctgctatggcttctactaggtttgaagttgacaaattcaatgggacaaacgactttggtctatggagaattaaaatgaaggcatttctggtacatcaaggaatctcagaggcaattgatagagatgagcttgctgctctaggagatgacaagaagaaactcaaggaaattcagaacaaggcacacagtgccattctgttgagtctgggagatgaagttctcagagaagtgtcaaatgaggacactgcagtggggttatgggaaaggttggcatcgatttatttgaagaaatcactggccaacaagctctacctgaagaagaaactgtacacgatgagaatggatgaatcaaaggatttaaggaagcatcttgatgagttcaatcgaataatcttggacctaagtaacattggtgtcaagatagaagatgaagatcaaggaatattattgctcagcacactaccaaagagttatgaacactttgtggacacaattctttatggaaaagaatctctgtccatgatagaagtaaaaatctgcactaaactccaaggaaattc

SEQ ID NO: 283107 - DNA, 661 bp, Cannabis indica
ttattattttgatcgaataaaaggttactagattggttttcattttagatgagctaacaactctattaaatgaatgatatctttgactcttgcctaccgggacactgtatgtaacaccctaactagcataggcgttttagcgtgattttaaacgtattgtgcagctcgttgctaatgaacgaggttaataaaaaacgtgattaattaaaaatttgcttatttaattaaaaacttaaagtaatacatatataaaattccgggatcccgtttacaaaatactttttaaaagtttgctatacacatatacaaaagtttgtcgcccagcgactatgcagcaaaagcctcgatgtcccaaagatcgtacgctccaggcctaaccgccctaatccccatatcccacacggtactgagtctagaacgttcataagacaatactatcgaccataatgtcagcctatactcaatatgttagttgtactctagccatattgatgtgacaacatcgatcagtattttagccaacatacatttatcagtaatcagcacaactctatgtatactattactgctatcaatgtaatctaacaggtaataacaacatgtacactaacacatgtaataatatatgcatgatattatactaatcttacctcaattccga

SEQ ID NO: 283108 - DNA, 472 bp, Cannabis indica
gagtctgtgtccaggtttgtgtcaaggtctgaaccccaatcttggtctaggttcgggtccatgtccaagttggggtcctgagtgcgtttgaagtttgggtctgggtgaggatctcggtccaaatctaggtccatcatttccatccctgtctgggtcatggtccgagtccaagttcgtatctggatccctatctaggtccaagtctgtgtttgggatcgtgtcctaaatttaggtccatgttctaatctcagttacaggaccattttcgggccggagtttcagtcccagtttgggtcttaggctagctcagtgttatgttctaggtctgggtccaggtcttgttaacagtccttgtcttgttctagggtcctggttcggtgattcttgttcaggttctaattttaggtcctagctctaagtttgggttcgagtttcgttcttcgtctgggttctggtcctagtctgagtccca

SEQ ID NO: 283109 - DNA, 500 bp, Cannabis indica
tcttcttcttcttttccttttttataattaaacacatattatatattttaaagtccacaagtcgttcaaaaagtacttatatcgctacagtatttaataatataattcaatataggcagatatacatattaggagatacttgaaagtgtcatttcacgattcgatatataccaaatgttttacaaggtataatagaaagaaagttgagagagcatccacataagtaaaatattagttgtgaatttagatatattccgaatagccatagagattgaaaaacaaaaataatacataattatatattttgattctcaaaccacataatatatgttgaatgaaggatatattcttgtgatcatgtgttgtgttgatcagtataaattaattgggctagaaaaatggtcagaaaagaaaagaattaataatagtagtgtacatattatataatatagtgtagttatatatggagtgaattaagtaacaccatgtgagagaggttt

SEQ ID NO: 283110 - DNA, 707 bp, Cannabis indica
tttttttttaattttttattatgacagctctcactcatattggttccatagggttctttcacatggccagttttttagccgaaattctaaaacaaataatatttattattataagatgatgatgatttttgttctgttcccactatatatctattttaattgttaaattataatatggatattttgttttgactttagaaaattgaatcaaaagctaagaaatctttgtaattggattcatgtgagtaatgaatatgtatccaatttttacatcaaaatattcttttaactaatcatatctattttagacaagatttttacaaatttaagaaataatattatgtgtaatgttttaatacaatttttaattaattgatagcgataaatgaatataatattgtgtatgtaactattgttttaatttagatttttcatccttctgtgattttatagatatttgagttggatcttctttagtattgaattataatttcttatatttgagttggaatggaaactctatttacagaattttaattttttatatatatttttacgaattcttttcttacatagcgttattttcatgttacataaatatagtataatgttgcaacaatatgaaaataatgttgttttttttctctaaaaaatcataaatttgtaaaattgtaaagaaaaaaaattcgtaaaaaatgtaaaaaaaa

SEQ ID NO: 283111 - DNA, 528 bp, Cannabis indica
taagaaagaaaagtatttggccggttttagtgctaagattaggcatgatctggtgatcactaccactgaagcgacttcgtatgctgaaatggttgaaaaggctttgagagccgagggtgttgtgaaattccttcaggaaccctgaaggactccgagtgttggtggaacccccacttttcctacccctgtctatggtagggatggtggtgattccaccattgagcagaaaaggaaagtcacctcagcatctgatggttcagggcaaagcaagcggttttgtcgaaatcaaggcagaggtggacgccagggttactcttaccctgtgtgtcctcgttgtaagaaacatcacccgggagagtgcaaccggaagacatgctttctgtgtggcatggtggggcatttcaagaaagactggcctcaggcagagaaagaggacccgaaagttgaggtaaaaccggttcctgcttgagtgttcgctattacccaagctgatgctgcagcaagtccttctgttgtgacaggtcagct

SEQ ID NO: 283112 - DNA, 562 bp, Cannabis indica
tcttgctgcttctcggatggttctttgtatactggctcccgttgaagacttgcgttctcgggaatcagctgatgttctcgcaacttcgcagttgtacacaataatcgccagtcgcgatcttgtaccggaaggctcccgagaatttcagctgtctccttgctagtcgcgtcaagagtcggtcgagctggtctatctgcgatgacaacaaaaagcgagtaagcaaaagatttcaaaagcaaaggaaaaaaatgtctaagtcaaaaaatacgcgacatactgggtctgcgattaaagtcggtcctaatcccaggaaccttaaagacgtaaaaccacttcgacttccaatcacccatgttcgacaccattccctcaacaccgtttatttcagaagtcgcccatttgctaaagcagtagaagccgttatggagacctacgctctttatgtcgtagaagtaactgaactcttctactgagggagccctatgaacgtactccatgtacatcgcatagaaagccaggacagtgcgataactgttgggagttaactgaaagggcgatacgt

SEQ ID NO: 283113 - DNA, 447 bp, Cannabis indica
atttttcttaattttttgtcatattaatattttcatggtcaatttttttaaaaaattacttatttattcttgtaaaatgttatttttaagccaatttttgctatctttgttacttagaatttttctagagttataaaattcacatgccaaactttgtggtaagatggttgtagcacatatttgcttaaaaatttgccaagtttaagtgttcgcatatttttttttttttgaatggcgagatttgagaaaataacttttgaattttcattgattcttagaaatgattataattattttggacatggtactatggtttgattggatgttcctttaagggataatttttatagacaatcttattagggagcttttttgtaattattatcttgttgtaaaaaaaaagaagaaaaaaaaagaaaatacaagagcaacatttccatcattata

SEQ ID NO: 283114 - DNA, 510 bp, Cannabis indica
ccctactaatctacactcaaggttgtgagtgagtgtattacatatatattcgatcttctcttgttatatatatgtattatattacatgtgttgtattcatcttcttctacttatatatatgcaatatatatagtgtatatatgtgtattgtaacatatatttaatcaatctcttattttaattttgtattatttttacatttgagttgtatatatcttgatttatcttccattgtaataaaatctctaacaatcaaaagcttattccttttcaatggaagaggagataaatcaagattttgtgaatacaaggataagagattttgtgtaaaagccattcatgggtgagcatggtggtatattttatgttttactattcaaaaaatagtaacacatgtattaactatattttcttatgttgagctaaaaaaaaacttatatgttaatatatagagaattatatatatgtgacatatatgtgattatgtgtttatatcatattaatatatat

SEQ ID NO: 283115 - DNA, 563 bp, Cannabis indica
gggcaaatgagaacttaaagaaacgtagaaattacactatatatcgtaaaaaatttaagaatttacgtttttattaacataaataaataaagttaatgggttatggttttttttggttttttttttactattatatgtatatggttttttttatatcatatttttgtaaaaaaagatgaaaatctcatatttgtaaacaataataagttttgccaaaaaaggcaccgacactggaaaagttatcggcgccagaaaagttgtcagaaaaattatcgccgctggaaaagtcactgtcatcggaaaagtcaccgtcgccaaaaaaaaattactgaaaaaagtcaccaggagtaggtgtctcaaatataaacaaaaatataactatttataattgaaaatattaccgattctgtaacacaaagaataaaaaataaaataaaacaaaataactcaaactaattataattaaattataatcggttataactaaaatagaaccagttatataacataatgaatacaaacaagtaacacacaataattcaaaccgattacaattaaaaaat

SEQ ID NO: 283116 - DNA, 508 bp, Cannabis indica
tcctcaaaagagggatcggaagaaaggagctgttttgaaatctccattcattgagcttgcttctggtgcatctaaatcaggttcatcctcagtttctcctgatgattctgtttataaggtcgttaaatatgtgcgtggtttgtgcccgttggacaacaagattggtgaacctgtcgatccgcaattggaagctgagtttgtcacgtgggttgatacaggtcttagaaagcataaatctaagtaagtatttttgtaggtgttttcagttatatatctcttattgttttccatttatttttaattttttatttgtgttttgatatttttttatttgtttttttagcacaacaactaatgtgtattgtaagggtaaggacacaatatttccgccatttcgttttggtgttgaggacattagcaacaagatgtggtttcacaaccttgcctaccctaattgtttccttaccaattctgtaagttttttttttatttatttatatatttttgt

SEQ ID NO: 283117 - DNA, 516 bp, Cannabis indica
atattcatttaatcatataaataatatacatgttacctcataaagcaacaatcttcataacatcacattgcctaatcaggcaagtggatgctttaatttgataatcttatattgtatcctaatcaggcaagcccatgccatagcccggcaccatatgtcgcataactgcatcacctaatcaggtgagcctgtgccaaaacacctgcacccatatatcatataattgcatcacctaatcaggtgagcccgtgccacaatctggcaccgatatattgcatcgtctaattagacgagctcgtacctacatccggtacttatcatatgtcactgacgctggtacttacgccaaatacgtcgcgaggaaaatcgcatcacctaatcaactgagcccgtacctacacttggtactcatcatatatcactgacgcccgtacttacgcccagtacgtcgttaggaaaattgcatcacctaattaggtgagcccgtacctacactcggtactcatcatatatcac

SEQ ID NO: 283118 - DNA, 636 bp, Cannabis indica
gttggcgcctgagatgaggaatctgttggatttattctaccaggatctagatttccgaacaagtatgttattaacatccttaatatgaacttctaaaacgatatgaaataaatacatataaagtatcgggaaccttacagagtatcaccaagaatctgagtctgaatctccttctcttgaaactggattcttcacagtcctacatactatgattgagtaccacttgatgtgtgtgggcactcactctttcactataggctttggttttgaagagagagacagagagagaggtttcggctaggtataggaagagaggctcaaaaattttactgaaggaatgagctgcatcatctttttcccttagccacccctacctatttataggaaaccacttagggttaggttagatttaattagcattaaaataatagaaaaataaagtggcaaaacccttgtgaagtggccggccatggattgtgggccccactttgcaattttgccatttttctcatttttcatcttattttctcaaaaatgtcatttttccaatttaaccacttaaatgtcaattctaattatttaataactaaaaattaactattaaataatattgtcaattaaacttaacaaagtctc

SEQ ID NO: 283119 - DNA, 732 bp, Cannabis indica
cttccgggttctgacagtttgtgaacctatcttggagtgcttctgtcttcacactatcagaccggttgaaatatttgttgatcaatcggtctgaccctgagcgagcaacctgcgcagccttctcctcttctgttggccccgaggagaagtccaggcctgtaatgagtgcaaactccagcactccgaatctgacctccttccgaccaacgtaaaaccgcatcctcaactcctcctgggcatctaccttcattttgtggagcataagctggtgaaataacaccgaggagaatgtcaacggtacggcattccaaaagctgccgaaacggctttccttcgccgtgttattcaagttgtactcctcaaaccgagactttatttttgcaaaagttccggtgcctctgtaagtaacgcgtccggtaaaatgctcaggtgctggaattatgagtctgggagccatctgaaaaaacaaaaaacaaataaataaagctgccaaaaaatttaaaaacatatcgacattatatcgacatgccgtcgacattatgtcgacattatcaaaagcaaacacaattcaattatgtcgacaaaatatcgacatcctgtcgacattcagtcgacaattttaattggacaacaatttaacagcatgtcgacaaaatatcgacatcctgtcgatattcagtcgacaatacaaacttaaattcaacatgtcaatataatcgacaacatatcgac

SEQ ID NO: 283120 - DNA, 314 bp, Cannabis indica
agaaaaatgaaaaaattgtgggctgtacggatgatatgtagttgcatacccatccgcgcacgccacagggtgtcacagccgagaaaactcggcgctgggtgtgtccaacaacatttccgcacgcagaatggggtttcagacaccccatgcgcatgttgctcagacaaaacttgtcctaacacgcgtctggccgagggaatgggccatccgcgcgcgagtgggataggtgatcaccctatctttttttaaatcttcaaaaaatcattaggtttagaaagatgtctcaggttttctctgaaaggaataagatgcat

SEQ ID NO: 283121 - DNA, 754 bp, Cannabis indica
tccaatttgcatcaaaacctttctctgtaaactttttctcttggtgatggggatacaagagtgaaaagatacgatgcaaatggggaccattacccgttatattaccaacagacaaacctgttggtaatatttattgactatttctatttggcccctcatcaatatagaaattgtctaattggtatccacatattaaaatcatgacaatcatgcccttaagtcataaactttattccaaaatagaccacataaatttgacttatttatttgatgacccaacacacattttatatatacaattgtgaccccaataaattctaacaatctcccactgggtcacatatgtatacatataaatgtgttaaccttattgagctcataactttgtcatcataaccataggcatgtgcaatctcgtccattaactatatcaacataggatcaaagcgattttcgttgtatcaatcacaactaaacccatcaatggtcacatatatcaacatagccaaatgacatagatcaatcatgataatgtggtatgaaaattacatgcatggtgatctattcatgtcaattttcaattggtcctactttactttatggagatcaaaactttagcttaaatgtacaaagtgaaataaactgaataacataatttctgatcagaaaaatatccaaatacacatgtttcatgaaacaaataaaacacactaaagacaaactcccactgaatctagatatcctcataatctaa

SEQ ID NO: 283122 - DNA, 764 bp, Cannabis indica
agggcggtgatatgtaggaatctactagaaccaagtacgggtgatgcccacgccatccaccatgaagtactcatcaacaaaacgacccaattttgtctaatggccttatccccggtgcctgtcaaccacttgaagtctggttgagagaaatagaagtaccccgacctgccttgcttaggggtggacttcaaatcaaagaaccagctaacctcgtggggagaaggcatatcccacttctgggaggcataaaggacgaagagggcagacagatacttaatacccttgggagtgaactgggccgggtagaggccgaagaagtctgccagattcttaaagtactggtgcaaaggcaaaattgccccttgctgggcatgagcacccgaccaagtgcacatccctctttcaaggtttgcggcacgattattgtgggcgggaattagcagaccaattcgcccaatagccaccctggtcgagagaccgcaggtgcgccttagtaaccctggacggaggactcacccacctggcacccaaggcaccttgtcttctgtgaggaaccacagcagtaagttcctcactgacgtagtccatgccctcaccaggttgtctccatcagcatcgactggctccccagcctcattgtatcccccgtagtttgggggttcaacctcctcctcttcctctgcctcggagggactgctaggacgtacgtcgtcctgctcctcaatctcctgaacctcagcatccccttcatgatcccccctcct

SEQ ID NO: 283123 - DNA, 1252 bp, Cannabis indica
aggagacatattattctgctgcacccagtgtaaggtttctcatactttatatgtgtttacttgttatcgttttagaagttcatatttatgtttttaatcaacatacttgtgagtagatctaagatcctgttaaaataaatttcaacaagatgagcactacaatctgattagcgcgctgcacaagtctatgagagggaacgatgccaatgcggctgtgtattggcttgccagaatgttggaaggaggggagcaaccactttacattgctcgtagactggtgaggttcgccagtgaagacgttgtgtaacaccctaactagcataggcgtgttaacgtgattttaaacatactgtgcagctcgttgctaatcaatgaggttaatgaaaatcgtaattaattaaaatttgctatttaattaaaaacttatagtattacatacaaaatacttcgggataccgtttacaaaatactttacaaaagttttctattcatttacaaaatatttgtcgcccagcgactaacaacaaaatccctaatgtcccgaggatcgtacgctccaggcctaaccgccccgacatgtacaatcttcatctgctcgtcctcacggttcctcaactttagccttgcccttacctacacatgaacatagcactgtgagtcgacagactcagtaagaaaatcataacataataaacatactatatcccgagttataatcaagcgcccatacacctgaccttaaccctaactgaattaggaacgtccttgacaaagtatgattaaccgcgaatccaacctatactcagtactctaatcgtactgatgtggtagaatttaatccatactatctaatagcctagcatatatctcatggcatttcggtgcaactctatgtacacctcactgttgccctgatatgctaatctgacggctatataaaatttgcctaacatatatctaatatgttaatcggatggcaactaacatgtacactaaacatgtataagaatatgcatgacattataccaatcttacatcaattccaaattcagatgtgccagtcaacctgagtggaacaatctactcggcgaattataggctcctaaatcacatcaatcacaacatgataagcgacttaaacttgaaaactaaaagttttcctatcgataaataacatggcaataccctaaaataaacacaaaaaaatgggaaaaaactaagggttcccaaaaattaaccctaaccgaactag

SEQ ID NO: 283124 - DNA, 681 bp, Cannabis indica
atgattatatttaatgtataaattctattaagtccagaacatatatatttattcatgattacagtgtcgttagcatagtggaatataatcatgattatatgttcaaaaatttaatttccatgatttgtcagttcactggatttagactggcatgataatcggcgataaggtatacttacaccttgaataagtgttatgtcctttccagagcactggcaaagttcaccagtatcggatgtatggagtatacatgggaagggaccgatattgattgtggataagatatcataaacttaccgtcatatctttctaagtcaatataattggttgatctcaggtctatggatcttaatctttatatggttaagtttagcttagttgtattatttatgttcttcaagttgtttgtggaagctaaccaatagttcttgtagatatttatatcttgggaagatggttgtgcaactgagtgggagcgctaattatagttatggaatctatagcttctataagtatttagaagtgaaatgatgatttccttcgagtttggctgaatagagataaatgattgagatcccattttactaattatattagttaactcaaatatcatttataggtagctaagtgttttaaggataagatacattgaagggtagaacgataaatttgtcccttttc

SEQ ID NO: 283125 - DNA, 552 bp, Cannabis indica
taagaagaaaaccaaagggaagtgccttgatcatattaggcttgtccacatcaatgatgaattttaaaataagatagcctaggttgattggtgtagttttggctaggatgagatgcatgagtaattgatcaatgcaatttatctcatcttggtgtccactcctaggtgcaaggttagctacaatgaatttgtggagaattttagcctctaaagtaagttggtatctttttggtttcataataagagggccatcaccacaaagatttctagaacactcatcaaagttaaagatggcattatttttaagagagagtttgggttcaagcaatatgccactattgggtgctcctaacatttcattgagagattctacatttagttcaaaagccattcctctaagggttcctttaactcctaaaggttctaagcaaggtttaatgcaagcataaaaaccttgtactagtctagaatatattggagtattgatttgaatgaaagatgtccaacctagagtatcaaaatgatgactaaaatctacataatcaaggctag

SEQ ID NO: 283126 - DNA, 685 bp, Cannabis indica
gtctttttcggttatcacaacgtggcttgggtacatgggtaggtgacaagtcatttaagctacattataccataagcactattaaccaagtaagcacccacatttattctttttttctttcatatatcccaaagacaatagtaagagattacatattttttcctatgtgcctacctcatatttttcatattttttcaagaagacattatcacatattttctcttttttttttcttcttctatttttttcactagaggcacaacacacaatactttatcatatattttttcaatctcttactaatacactttatttccccacttacaacaatttatccccccaaacttgcttaaaggctcatggcataataaggtatgtttagagtgaaaagagttaaggataatgagtttagcttaggtaagtggtgagaaatttttagaataggttaaggctcaactttgggtatactagggtaaaatgttcgggtaggctcgaaaggctcaatcgatccaaagaaaacttgcctaaatcattttccaaacaaaaatcatcaaggatttcgcttcaagagagtatgtcaaacaaattctatttcatgtcaagtcaatcattccacaatccaaatagaacacaagtgatatgcgtcaaaaacaaatgttttatatctacatgaacaaccttctaa

SEQ ID NO: 283127 - DNA, 568 bp, Cannabis indica
ggggatcacggagtgtctcggtattatgtgggccgcgagagcgtgccctgaaaactgcgttgagatgatcacgtagatcacctcggtgtacctgataacgtcctccctgttgtgtctgtacagagccggaccttgtgtacctgctcggagtgcgaccatgcgacgacgaagaggctgattctgcgtcgttgtctctcgatggtcggctgcgaggattacggcgctcaggatcttcgtcaatttgtgcgctctggtttggaaaccttgcggattgatcccttgacattggatggttcaggtccagagcttcagggttagttcttcgttccctgcgtacacggttagtatgacgtctagaagttgttacctgagggttatcgttgcgaatggcgggaactcgaggagggcgtcgagctcggctctgtccatctacttcggcttgtagtgcccgcagttgatcctgaatcgcagcatattgatcagtggtgagctggatcattccctcggataccaccgccggagtgacggggggaaaatgcatggttgctggtggcgtggacgtgtcccc

SEQ ID NO: 283128 - DNA, 614 bp, Cannabis indica
tcatccaagtttgttctagagatttagatggactcattttaaaactaaagattctctccttcaagtaaatcttgttgatcaatgatttcttttgaaattgttcttccaacttgttccaaatcttagcaggtgtatcttccttgtcaaccaatcctcttcttgcttgtctttagttgtatcagctgaccattccacgggatctttaagaacctttaacaacttgtgttgagccaatagagccctaatcttcttcctccaaatacgataatcacctgaaccatcaaacttatctatatcaaccttcatcgaactcataattatgtatgtataaagttatttcaaagaaattatatcgataatgagtttagaaaaatcctgttgttgttctttgtaatcttagttttgtgtatttgaattcttgctggtatgaatgtgtttctttatgctttcttgatgatttctttatgctttcttcatgctttcttgattaatctttgttgcagattgtgccttgtttggctctgataccactgtaggaatttttattcctgcttgtccctacacacatcaaaacaaaaatcaaaaaagccaaggtcaaatatgacctttcaccc

SEQ ID NO: 283129 - DNA, 873 bp, Cannabis indica
tgaggatacttcatatacatctcagattctaactcccaagtagcctcctcttctctgtggttcttccataagaccttgactactggaatctctctattccttaacacttttagctctctcgccaagattttgatgggttgttcttcataagtcacatcttcctgaagagggatagcctcatactcaataacatgtgacggatctggagtatacttcctcaacatagacacatggaacacattatgaacatgtcccaactgtcctggtaagtttaatcgataagcgacctccccaatcctctccataacctcaaaaggtccaatatacctcggcgctagcttacccttcactccaaatctcgttacgccacgcataggagtaactttcaagaagacataatcaccaacatcaaactcaacttcctgtcgatggagatcggcatagcttttctaacgactctgaacaaccttaagtctttcttggattcccttaatcttttcagtggtactagtgataatttggggtccgatagtgacatgctcatctggttctgcccaacacaatggtgatctgcatggtctcccatataaggcctcataaggagccatacctatactgacttggtagatgttgttgtatgtgaattccactagtgacaaatgttctccccaactacctccaaaatccaaaacacaagagcaaagcatgtcttcaaaagtctgtatggtcctctcagactgtccatctgtctgtggatgatgggcagtactcaagtgaagttcagtccctaaggcttgttgcaaggccttccaaaaccttgatgtaaatcaaggatctctatcagaaacaatgcttgaaggcactccatgtagt

SEQ ID NO: 283130 - DNA, 1066 bp, Cannabis indica
caatgggatcatcatatgtagaataagatggtagaacactagtcattttcttagaaaaatggtatttgtttaaacaaacacatatagacacgtcattagttatccattgttataaccctaatgtgatcaatgatcctctatatagatgatttacactgtacagggattaaattaccgtaacaccctacaatgtattttatccttaaaacacttaaccctgtataaatgatatttcacctaagtgaaatgagatctccaccatttatcttcgtttggttaagctcgaaggaaatcatcctttacttctatttgccaaatagaagctatagattccatatttatgttagcgctcccactcaattgcactaccgtgttcccaaaatgtacgtatcaccctgacacaaaataggcttaactaacaaatcaaagaacacgaataacactcttgagattgagcctaaccatatcaggatttagatcatttgatctaggatcaacaggtgatattgaattgaatagatattacggtaagttttaatatatctaatcaaagttcaatatcggtcccttccgatgtatactccatacatccgatactggtaaactttgccaatgtcctggaaaggacataacacttttccaaggtgtaagaatacctatcgctgattataccatgtcagtctaaatccagtgttctgacaaatcagggaataaacttttgaacatataataaagattatattccactgtgctgacaacactataatctttaaccaactcatatgttctggacttaaaaagaattcatacattatatacatataatcatgaaataaatcatgtgaaccatgcaacataaaatgttatttctgatctttattaataagtaaatctgattatatgaaatgagttttatttagggcataaaacccaacaaactcccacttgcactaatataaaacaaaaagtgcatttcaaataatcattaacaccttgatataccaatcaagtgtaatagtagtaaactcctcgtaataggatctgacaggttgaattaaacacaacc

SEQ ID NO: 283131 - DNA, 704 bp, Cannabis indica
gacatcctccatttgttccacaattctttcggaccccacacggggatcaaactcatcctcttcagccacttctagcccaactgactcccggaccattagcacgggcaggtgggttgcgacattgtaacattgtcttgcttccccctggtttcccctcaccgttccgatcccggcctcccgggttgggaacttcaggcacaggtgccgaatcgatgtgactgcgccaaagtctaccaaggccggtcggccgaggatcgcgttgtaggctgtcggacagtccaccactacgaaagtgcagtatttaaatgtgctctggggggtgtccgggcacaaggtgactgggagccttacttttcccattgggataagtgtcgtcccgttaaaccctgtgagctgggacccactaggtgagaggtcccggtccgtcaagcctatcgcggtgaaggcttccttgaagagtaggttcacggaacttccattgtcaattaagactctggccaccactttattcgcgatgggggtctctatgaccaatgggtcatgatgagggaagcgcactgtcttggcgtcttcttccgtgaacgtgatgggttggtccatcaaccggggcctttgagctgggagttgagtaacttcccaaacctcactgtgtttcgcggcccctgcgtatcgcttaagctctttgcgagtagtttctccgatat

SEQ ID NO: 283132 - DNA, 522 bp, Cannabis indica
gcaaggatttcgatccaatgataattgttataccctaactcctgtgtttacttgtcattcagccatcaacaacaccacggatttgtggcatgccaagcttggacatattaattataaaaatctaaaaaaaattgtcaaatgcaggtattgttcgaggactacccaagcttggtaaagaaagtgctggtaagtgtgaaccatgtcaacttggtaagcaattaaaaatcactcacaaacctgtgtctgatatcaatacctcaaaagtattggaattgcttcacatggatcttatgggtccaattcaagttgaaagtttaaatggtaaacgatatatttttgtttgtgttgatgatttctctcgtttcacttgggtagattttttaagagaaaagtctgacacttttgatgcctttaaaactctttgtttgagattaagagttgaaaaaggttgtaatattggaaaaattgttcgaattcggagtgatcatggtaaggagtttgaaaattctgtgtatgatgatt

SEQ ID NO: 283133 - DNA, 590 bp, Cannabis indica
gatgagtcgcaatccaactcaaactttctttgatgcctatgatcttagcaatttcaggttggacatacccaacctttcccttcttgaaagcttctaccatggttctatgatgatctcgagctacacacagcccactccaaaccgcccttcttgttcaaataaagccccatcaacattaactttaatcttgtttaacacaggtacaatccaacactcacagttccgccccccatcattcaaaggagacaacgaaaggccattcctttcctgagcaaatttgtattgatcaagcatggttctatctgatgttacaatatttgaagcaagccaactcttcttctgccaaataaagtcattctgcacacgccaaatagcccaactcaccatcgccgcttcctccatttcaacttgtgccccctggtgaaaattcccaacaaccagctgctgaacgttgcagccccaacccgacgtccactatgctgcgatccaagtagcctttgaaaacgagcattccaccaacgcatgatgaatagtttcagtactagagttgcaaaaaagggcagtcgacattgacaagaacatgacgcttt

SEQ ID NO: 283134 - DNA, 583 bp, Cannabis indica
ttctcacattccacttttttttttgttattcttttatgatttttattgcatttttgtttctttaattttctttgttttttttttctctttgattttaatttctttttctctttgttatatttgctacataatgtatgtttaaatcaattctattttttgagcaagcaaattaaatgccaaaataaaaaatgaagttagaattattaggtattgatataaaatttatatgttcaaaactggtttttaaatttagtatcgtttgtaaaaatttcgttattaggcattatgtatttttcattatgttattgatgaaatttttttttgcctcttttaatgaaataattagtttcttttaatattgatgaaactggtttttaaagttagtatcgtttttagattgtaatttttttcattatcttgttgatgaaactattttttttattcttttaatgaaattattagtttctttcaatgttgatgaaactagtttttaaaatttgtattctttttagattatgattttttatattgttttttttttcatgatgatgttgatgaaactggtttttttttctgctgtttt

SEQ ID NO: 283135 - DNA, 448 bp, Cannabis indica
taaataacaaaaattagtgctaattgccttttctaatccaatttactaaagaggtcattacaggctgcttcatggaataattactaaccttatagaccaacacgagtgtttccagcgtgctttgtcctcacttgcacactttttgggaaaacttcccaggaggtcacccatcctgaaattaccccagatcaagcacgtgttggggattatttaccaagatctagatttactaccttgtatgttatttaacatcctaaatatgaatttctaaaacaatataatttaaacacatataaagtttaagaaaccttacattggctgcaacagaattaaatgactccttccactcagatgtctaacccttgtatcctttcactagcagagtatcacaaagatttgagcccaattctccttcacttgaatggattcttcacagtcttacacacta

SEQ ID NO: 283136 - DNA, 1079 bp, Cannabis indica
ggtttttccttgattctacagtgttgtcaaggaagaatcgtgggaacagatttccagaagtaaaggttagtttcgaaacttcactgcattccgtccggttgaaggggaacactgttttctgagtttctaatatgcatgaggggtttaagaatgaaggtttgtagggggtatgtatgaggctacgttttttaggtaaaaaccttggtaatttcataaaaaatgacctgtaaattggcataaccgcatacggtataatcaatacttgaataggcactgtttcatgctttgaatactcgcatatttgcgagacttacttgcttctgatcgtcgcctagatctttaggattttgtatactgtgaatttagtcgcgagaacattaactgagtctcccaaatggtggatgtgtcacagtattctaatggtcatatatgcggttatatgtcccttgagatactgtgatacacccagccatttgcgacatgcgttaatgttctaatgagcgtactctttggctggtagatattctcgaaacggtgggagtacctcagtaacttcagggtcatgcttgagaacgcatgccccttgagtcactgagtttctcccagccgtttctggaggtatatcgattagcccaggatgcgtgacttattcgcaggttgcgactttatagtttatgcgggtgagatcacttactttgttttcacacattcaccacgctgaaaagatcttctatctttcagatgagcgatctgtcggatagtcagctgctcggctcgggaggccacgcattcgatggcgacgaggaccaggaggaagactactttatcccaacttcgatctcagaagaggagatcgcacctactgtgggtatagagctaggtccgatgtcttctgcagacatcgagaaaatggtgcaggagctcgccgaacctggggccattgatattctagacagtgagtctacggtgtcagcccgcgattatcttattcactccaggcatgcccctgacgtcgaggtcgaggagacggatgaagactggacggccccagctcgcaaatcaggcgaggaggaagaaga

SEQ ID NO: 283137 - DNA, 640 bp, Cannabis indica
aaaaaaaaaaaacaatacacaaatcaattgaattataatttgcaaaagcatttcgttactctaagcaaaaagggggaaattccgaaatgtaagcaattagtacattgaaaaagaaactgagaaagaaggaggacaaagagaaaagggaaatgagatttgagaacgaaccattgatagagaatttaggggttatctgatcagaggagttggatttgggatcgtcaatttccataatcgacgaatgagtgaagcgcagcgcaggtggtaatgataacccaatgacctacgctcaccaaccggaatgctcttctccgatcagttagtgacggagaaacccaaaagagccggtggagagatttgagtgagtaacggaatcggagaaggagagaaaggttgtggtatgagagagaaacaaagaaagaaatgagatttagaagctttgctatcataattgggcttttcatgttgggctaagtcaaacaatatgattgtttgggctaagtcaaactgcagtgtatactgttttgggcctacctggaaaatttacatcaagatacaggaataactacctaaggcaccatttttttttgtaaaatatttacatttttacgttcaaagaatatttttttatatttttacg

SEQ ID NO: 283138 - DNA, 996 bp, Cannabis indica
ttgttgggaataaggacaatattccaattccccttcaggatcaatatttgcgggaaaatacaatggggactccaaaattcctttctgatgtgaaagatcagtcaaagctgcaatcacagagcatattcagaattttggatatcttccaatgtaaatagtactttatgaataataatcaaaggactaaatgcacgccaagaaattatctcgtggctaataaaaaccacggtaaaccttccactataacaataataatgggtacacaatattacactctcaagttttgacaaatacttgaggaatacactcaaatctctcacactcactagtgtggcaatctcaccatctctctacaaaatatttctcataattttgtaggaactctctttttctcactctcttagatttctcttactaagaggtattctcactatttttctctcaagagcctcactcttcactcttggaatagcttgtgatggttgtgatgggatgaacaaatgaaagggatggagctctatttataggcctccttggatgtatgaacaagacacaaaaaatcaatcttgcattaaatgcatagttgaaaatgtgcatatgcctcaagtcaaaaattaccattgtaactttttcacatggttgaaaaatacaaccatattttcacatggttgaaaaacaaccattacccatcaattctccccctttttcaatccatgaggaagaattgaatttgtgtcttcatcatcgagaactcatcccagcaagcttggaacacaactcaagcttatgccgaggaatcacctttgttagcatatctgctgcattcttgtctgtatgaattttctgcacttggaatagcttcttttcaagtgcatcacgagtccaatgatatctaacatcaatgtgcttcgttctatagtggtaagtagcattcttgctcaggtcaatcgcactttgactatcgcaatgaattacgtacctttcttgcttcaaacc

SEQ ID NO: 283139 - DNA, 556 bp, Cannabis indica
ttgaagatgtaatctcgggtgacttacaatataattcttcgcttgatgataatgttgtccagcacactcgaggctttggtcccaatttccaagctaaagttcttggggatattgacaataaacaggatgctgatatggattaccaagtcactgtggacttttatccaagccttcatcgtgttttagcagagaaaaaggccaataacaattttttctttcatggacatgctgtatttgcgacatatcttattgaatggacagaccttattttgcgcacaaatcgagatactttgaatcatgctggaatttatggagctgtttatatatcgagatatccattcaactatgagagatctgtatggcgagctttttctgaactctggggtcctctgtctaacacatttcatcatagcagcggtgagatgggaatatctctgtatgatttgaaggttattggagggttacctattttaggaattccttatgaagagttcatacctcttaacaaaaaattggttggtggcactccatatcattctactactgcagagctttt

SEQ ID NO: 283140 - DNA, 992 bp, Cannabis indica
cgaacggcgctcatgtgcgcgcagtcttcatcctcatcatcttccccacatccttgctcctcttgagcaatggatgcctttatggcactcaacttggactggtgggggcaagcagccgccctatgtgggccttggcaaagccaacacttaaggggcttcttccccgttgcagcatcacttttagaggaggaactagattcaggagtcctcttgtctcctcccccacttttactcggccactgctttcctgacttcttgctcgcggcattgttggcgctggtctgaggattcgtcttctttggctgcgaattctcagaggtgtagtcagtcagtcgctcggctgcagcttgagcagtggcgagatctgccacacgctgcctttgcagctcttgtttagcccatggtttgagtccttcaaggaagtagaaaagtctgtcgacttcattcatatctttgatgtcgagcatcaatccagagaacttctttacatagtctcggactgtcccgacttgctttaactctctaagctgacgtcgagcgaggtaggcgacattctctggcagaaattgggcgttcaattccttcttgagatcttcccaagtgtcaatggtgcatttaccattctgaatgtcttcatatttcgtcctccaccacaacttggcgtccccggacaaatacatggtagctgttgctaccttagcttcttcagagtcggtccgcacgaccctaaagtactgctccatgtcaaacagaaagttttggagctccttggcatccctcgcccctccatagcatttgggctcgggtgctctcggtcggccatactccatacctccgtgccccccggtatttgcacgctctgctgctatcatggtaagatttagcttggttgacatccctgctaattcttcccggatggctgtgacagacacattacaatcctcgatcgtatcattgagggagtcttgtaatgcagcctgcccattttgtag

SEQ ID NO: 283141 - DNA, 827 bp, Cannabis indica
tacctttatggtatctattcgtgttagaaatcgtcttaaagttagttatattaaaaaataaaattgttaaaaattgagcttagggtcctatatttttaccattttagaaaatatacggtctattttgtcatttaacaaaatagagggtccaataactaatttttgcaaaacacgaggtcgaaaatagtatttacccgtttttttttattgtctttttattaaataaaataataaataaattatttctaggattgaagtaaatttttaatttttaaaaaaaaagtattttaaaaatataatttaagttacaaagaaaaattagtatagaagattataaaaaaaaaatgaaaggattaataaaaaatgttaatagaagggaaagattaagattcacttaaataattgcatatatttggttgttattagcaaatttatttatttatttattttgtggttatcaaaataatgaattttttttttttcttgtaatttaatatctagtaaaagctaattgtgtaatttacttagtggaaagcccaaaactattatcatttttatagaagttatagattaaattctatgtgttattaggcattgaagggccaaatatcagtgctatttttgaaagaatcaaagtatgtatttttctctccaagtttgagttaaaacagatttctttaaagtatgtttgcagggataatgtaattccaaaagggaaatttgattttttatccttacattaaggggaatttttttccttaaacctaaaatatcttatattggtaagatgggacaacatttactaattcccacattaccccctcatt

SEQ ID NO: 283142 - DNA, 543 bp, Cannabis indica
actgatgaagaaagagcattcatggacaacattacctatgctaatggggttggtagtctaatgtatgccatggtgtgtactaggcctgacttggcctattctctaagtgtagtcagcagattcattgctgatcctggacaagaacattggtcagctttgaaatggattctaaggtatgtcaagggctcacttgacataggacttacttttggaaataaatctaattcacaagaagaattgactgggtttgtggattcagactatgctggtagaattgacaccaaaaagtctctcacaggctatgctttcacagttctgggaggctatgtaagctggaaatccaaccttcaaaaggttgtggctctctcatctactgaaagctgagtatatggcagcaactgaggttgtcaaagaagccatttggctcaaaggactcactaaagaattggggtttaacacaaatgatgtcactgtgtactgtgacaaccaaagtgctctgcacttaatgaaaaaccccatatttcatgagagatccaaacacat

SEQ ID NO: 283143 - DNA, 622 bp, Cannabis indica
gttagtttattttacaaaaaaaaaaatttcaaagtttaaaaaaatagaaaattggaagctttttcctctcaacctctctctcttgttcggcctctttggagcagcaagaacctgggtttttctttcgattttcaagcctttcccctttcaatctaagccttcttcaaactttggtaaggtccctaaccttttttctcttgtattttatgaagaaaatgtataaaaagtgatggttgcatgtgaattgttgtgatacttgctgctgtgttttgttgttgttttctaaggtttaatcttgctattttaagtagtttagagttagtgtatgcatgatggttgcttggattcaagttttgaggttttaagctcatgagcatgaattttgaaaaatatatgttgaatctgtaattacttgctgtagttggttgttttcactttcagagacttagttatgcttgattatgtaggtttgatctagtttgattgcatgttagtggattctaaccaagtttgagtttttgaactcaaagcttggtctttaatggtgttttgtgattctgtgagttctgggtggttttgttgcctttgaatggttatttggggcatatagaacaggtctgga

SEQ ID NO: 283144 - DNA, 721 bp, Cannabis indica
agtgcaagaagagtaaatactcaccaagaacattctctgtattaaatacaaccataaatatacagacttgtggactaaggctcattaacgccccaaccacgtaaaaatctctctcttaatttcttacagctctctaaactcttattattttattggttgccgaaaacctcggtcaacattttggtgctttcattgagagctgaagaaagcttctataaacacacaatacattacaacaatggtggagactcgaagcactcgtcaacctcgccctcttgaagatgctcaagacccaaatgaggaagacgtggcctcaagggcaacagagggttccgaggaagaagaaggaattcctgacgatgattacgagggaaacctcgacgagtacgcctacgatgaaggtagctactcggaattggtgctcttaagacaaaaggctgtcgatcatgaagctgagatcgcagcccaaaaagcacaaaaccaaaagatgcaagaggtaatgctggccatgcaaaaagccatggaggcagctggaatccacgtgcatcctaaagccatgtctgctggacttggaaaggaaccagaggaatcctcgccaagtacccaaaggcaaaaatctagggaaccaagccctataaggtatcccgctgaggagaaccaaaagaaaaaccctacttctacccccgggaaaagaaaaaggtgcaggatccgcgaaaggtcc

SEQ ID NO: 283145 - DNA, 560 bp, Cannabis indica
ccatcatcaacacctcaagtgagcttggttgagccatttgatgaagatcttcttctatgttgaactcttgtaaatcttctaaaatctcatcatttggtccttgagtgtaagtgtcaaaatttggctccaaattgttgtaattgtcctcccaaacatggtcattgtttggacaattacaacaccactcattgtactccgccatgtcttccaacatccaataggcttcatcaattgatagttggtagaaattggtggtaccatttcctctttctacccattttcgtgtgcttggattcaacccatttaggaagatttctagttgacactctttggacaacccatgatatggaaacctcattagaagtgtcttgtatctccaccatgcttcatacaagaactccaagtcatgttgaacaaaattcataaggacttgtcgatgagacatcccaagtaccttgaaaaaggaaccaagacaaacaaacaaagcgtaaaatagaacaaggaaaataaaacgaaacaaatgaaaaactaaaaaaaaccaaattgatagtaattaagtt

SEQ ID NO: 283146 - DNA, 677 bp, Cannabis indica
cttgaaaaacgtgtaaaattaaagcttttatattaattaataaactttataatttacaaaactatttacaagtatcgggatcccgtttaaaaggttttatacacaatattccaaaatacataactggtcgcacaacgactacaaaataatatccccagatgtcccaagactgaacactccaggtcgcactgctttaacatgtacaacctcatcccagctcaagctcactcatgttcagctttctcctttcccttacctacacatggaagcagaactgtgagtcgatagactcagtaagaaaagcatataacatatcacataatttctgacttgtatctaggcggccatacacctatttacaaggcttaagagatgagtaagaacgttccatactatggtacaaccactataacacatacactacgtacctcactatacgagtgttggtagggtttatttcataccctgagcacccgtgagtgagataccacaaaatcctatactttcccatacaggtgttggtatcaccgtaatgtactcttaaacaatattcactataccaatgaactctgtaccataactatacaagtgttggtagcacaactaatattttaagcatgcatatacacataacatatacatacactcagatattaatatcacacattatatacagt

SEQ ID NO: 283147 - DNA, 188 bp, Cannabis indica
ttaatgctggctgcatcatcaccgagatagctgtccgagggccggaaccagctagaagaaagataggccgaagggtccaagagaacgggctccggaggtccagaacccatccaggaccgacctaggaaatctcctaagttagaaaaataataatccttggcatgatctccccaccgggtcgagggcat

SEQ ID NO: 283148 - DNA, 512 bp, Cannabis indica
atcaggttacaagtcattttttatttttttatttaatttccaaattaatcacaaccatttaatagtgatccaatggctaaaaaaaatgtaatcatgatggttacaataaaaatgtaaccattagaacctcctccgtatttttaattacaatgaatattttctttgaatcatatgagattggcaatttgttagtggaattctaaagtcaagtaagattaaagagataaaaaaactttgtaagaaaaaaaacaacatatatagataagtataaaaggttatgaatctaaatggtattgatataagagagaaaaattattcaaatgagtaattgccaaattatgaattttgttggagatgatgttacttaattttagataagtatatttgaagttttttttagtgaagataatgcatgaaactgattcatactcatttatgtatattgtatatgtatattgtattagtatagagaataaaaataccaaaaattagcgcaaatatttacaaaaaaa

SEQ ID NO: 283149 - DNA, 751 bp, Cannabis indica
agggtaattgccttgtagttttctttaggattcacttcagttgtactaggcaagtttccctgaggccgagttgctatctgagtagccagttgccccatctgagtttgtaagtctttaatggaagatctcgtctctgtcatgaactgcaataataaatctgtctgaagaccagaatttccacgagagctttgttcctgattctgttgttggttctgatttctctattgatagaacccactattcctttggtttcctccttgattaaacccatagttattgttgttttgagagtaatttccaatggctttttcttcatccattggcaaattattcacatcttcctgacattcacagaccacttgagcttgttttacttgaacagacatcagttttgttagggcctctacctgagctgtcaacttggtgatagcatccacctcaagcatcccagccaccttctttgtttggctcctttcacttggccactgctgattattcagggccatctcttccaacaaatcataggcctcatttgcacttttcctcataaatgctccacccgctgctgcatctataagggttcttgtgttaccaagaagcccattgtagaagttgtgaaccaacatccacttctcaataccatgatgagggcactttctgatgagatccgtgaacctttcccaagactcatggagagattcattatcctgctgacagaagttgttgatttctcctcgcaacttggtagact

SEQ ID NO: 283150 - DNA, 599 bp, Cannabis indica
aaatttgataatgcaggtggggaaaattgcatgaaaaatttgcaattttcccttacttatatttgtgcttcattttataagtgacgcaataggtaaaaaaaagtattttcgtaatagatatggcatttttaaaccgacgtaataagttttttgtgacagttttaaaatgccatgaaacatttagcgtcattttttaaccgacgcataaaataaaatagaaaagtaagtatttagcgtcggtttataaatgtcgaaaattgttttttgcgtcgttttgaaaatgacgctaataaaaaactatttgcgtctacggtatatacgtcggttttataaaccgacgtaaattctttaagtgacacttaaaaaccgacgtgaattatactttttgtagtagtgcggagccgaggtggcaatgatatcaccaaccggactgcgactccaggcggccctacggttcgacttcgcagcttcaaacaatgaggccgaatatgaagccctaatagcaggactgaaattagcaaaagccgtaggagctaaaagagtggaagtgtaaatcccgcttagttaatttagaaattatcagttaattatgattaatt

SEQ ID NO: 283151 - DNA, 613 bp, Cannabis indica
atataaaagatcgttgaactgcatattattcttaaatttttctccacccctatcagatcaaaagatctttttattaaacaaattcttaataattattttagaattaacaattattcataaacatagaaataatttctagtgtttatgtagtaataactctatgaagagtttaaaatattgtagaatttgtaccaataataaaaacacttacacatacacacaaataaatataattggtaattgttgtttaagataaagtagataaagctcaactcataaattgcaatttatttgtaaaaaataaaattataaaattaaagaaaattgttttgcaacattatagtaaagaacagggaataaaaatcccaaactaataattgaaatctaaattgttctgaaactgaaacaattaattcaaaaaataaataaacgagcttcatctttatattggacgaactcaacccctctgtccagcttttcgattcaactcactaagatagcacctgagttcaagcagcttgggctataataagaagaaaaaacaaataaacaaggttagtagtccagaattaataatccaattggataataattcactaaaactcatcagttt

SEQ ID NO: 283152 - DNA, 523 bp, Cannabis indica
acagtttgggggtaagaagcaatacgatccaaaaactgaattgttaccattacagcgaaagtggatagaacgattgatggcgctgattcacgatgacgattgaggttgaaaggcccaagaatttttcttcattatgtaatttttttagattaacttgtagttagatttattaacttattaatatttttgactaattttacattagtgtttgtgtaatatttaattacttttatgaaatgaaattatgtattttagccaattttaaaattaatttaaataatatttaatttacattttaaaaaataaatatgtaatttaaattaaataaaataatatataaattaataaatatataattaaaataaattatataattaaatttgaaaaaactgaaatctgctcacttttggcgtcggttgctacgccacatatggcgtcaattatttgctaggaaccgacgccataaatacccctatggcgtcggttcctagtaaataaccgacgccatagggatatatatggc

SEQ ID NO: 283153 - DNA, 1382 bp, Cannabis indica
aagagtaggctcatgaatcatgattaagatattgagtgagggtttttgtgaattggactttaataaattgagcaaagtgaattaatatatgtatatatctacatataaaaaatttgatgtatatatttgagtgagggctttagcccacacatgggctaaagtccctccgtccctggcccaatatacaaatcgttaaaaatagaaaattaccataaaaacgtcaactacatatacggaaacctaacataacaaaaataacgtcatttttgaaaataattgccaaaataaggtgggccatgaaaatttcccttcttatttttaaggtgatcgaatttcggattggaccagaccagcccatgacatacattggacctcaaatataataatattaattatttctaaaaaaaaagagttagataatacaatattagggctttacaaaaatttttgtaaactgttcaatccgaataactcgctcaaatcaaattgaaaaaaaccgataaaaatacaaaattgaagtttcccgaccaaattataacccacccaatttgttaattgtacgggatgaaaatagatacaacatgcccaataaacccgaattaactcgatttgtatcatttttatagttttttagtttttgtattttttaatttttaatttttatttataaacataatataatatactatttataaaaaataataaaaaaccaatgacctgacctcttagattctctctctctctctcatattttatgtgttgaaatttcatttattttgaaactaaaaacaaaaaaaaaaccttaagtcggtttggacttaacccgacaaaactgttggtcgggttactattttttgggtgggttgcacttagaatttcgcaacccaatatttacattggcttagaaaatatatactataaactgaccaaatcgactaacgtataaccttacagtatatattatatgactacaaggtcggcacaagacatagacaggctacgtctgtgcctagggcccacacttttttggaggcccaaaataaaaaactaaaggtctcattaggctttatttatgtaaaattgtgtacattgtatacaacaaatattgatagcatgattggttaggtgtatgacacattacacatgggtgtgagtttgagtctcataacatttctttttttaatattttttttttcattatattctcaagaccaattagatgtgactcaaactcttaattatttgattgttatttatgagtaacaaattcttgattttgcaaattaagttagtcatattcaaaggcaaaataaaatcaatggcaaaatgatcatttttccaaacttgtcaaaatttctccaccaaggacttaaagacctaag

SEQ ID NO: 283154 - DNA, 627 bp, Cannabis indica
aaataataagcataacaaaagaacatattcctttttattttctagaaaattcggcagcataacagctgtattttgaataaacccaaaaatcataacctgcataaatatttgcacacaaaaatatatttggcactcagtgccccagaacagtccagaaaaatatgcagattaagttttcaatttttcaaacaattttgtaaatcataaaaattggaatatgtctaatgttatacaacgcatataaaaatcaagtccaaaaatcaagttgagtccctacctctcccgagtcgttaaactttttccaaagacgatcttaagctctcaagtcccgagctccaattgtttagtccaaacttacatattactctcacctataccatcaaatggttaaataattatcatcatcgcattctacattcaaaaccgagtccaacgacatataatatgactatatttaacatttggggttttgaagcctcacctaagcggtacacattaataatcggtggcggtaaaaattggtgtactggaaacatcaccgaaaataggagtattgtatatcaaaacgaccacctggacgagtagatcatacccatgccaaccgtttgtcaaaacggtacacgatgt

SEQ ID NO: 283155 - DNA, 724 bp, Cannabis indica
aaaatatctaatattaatgaaatttcaggggcatgatttagtacatttcaaaatttgagaggtatgattatttgatagatatcaaaatttggagagtataatttaatacataaacaatcagaaatagtaaaattgaatgaaattaaacaaaagtctttaaatctaataatcttaatagttcatgaataatttttaacggcttgaaaagtttagggacataatttaatacatgttaaagtttaggatataataattctaattaacttaaaaattaattaaatcttaaatgattagagtgaccgcaattttgattgcaaatgtgaagaaaggaagtattgttatttgttaaccacgattaaatcattaataacaattcacattgttaatgcataaaatttctaacaataaatttcatcaaattttcctctctacttattactttaactcaattcttgccattgtcggtatttgtaaagccaatatgactaattataattttataaggttggtttaataaaaacacattatatgcatgagtacaaataaatcttaatctttatattaaagaattaatgtgtgataatatttatataaattttctatattttatcaaatatttgatattaatattttttttattttatttttgttaggtgtcctactagtgagatgacaatcacaactctcatttaagattttcttttttaattattaaggtttatta

SEQ ID NO: 283156 - DNA, 782 bp, Cannabis indica
gtgtgcactaccattaccggtcacaaggtacaagatctgatcatgtgttaaaaaaatcataactgtcgctaggcaatctgagtttattctcaaggtagatatctggatctcttttgggaaatcatcgttcgtaataggcctttcgagtaaccttcgaggtatctctttgggaaaactttgatctttggaaacttcgaatcctggatggcatgctcaggctaggtaaatctccatgtgtcctttggccttgatcaattcttggatttgtagagcctctcagtgatctagtgtcatggaggatacttatttaatgattgtctgaagttgtacttctctttttgtgcctcgtgtctcttctccgttaaagagctgcaagtcaaaggcttggtcaccacaaagtttctccgtgagcatgggtagattattggctttcaaagcatttataacatgagtggaaggagccaaagccaagcttcaaaggagccaaaggaaacatagccctagacatctccaaaataatgactgaggttgtcaaggaagacaagctcctggaggcatattggtcactctaccaccccaactccttgaccaaagaggaggagatgtgccccactcactacgtgggcccaactccaactgctgaacccatttgtactcatgaaggcaaattcctctgctacagatagcctgttccacattacccctaaaatgttgcgcactctagcttcattggcatatagctccatcatgtcgtatgtgttagattttatgccctaaataaa

SEQ ID NO: 283157 - DNA, 630 bp, Cannabis indica
cccatggttcgaccatcggacctggtgggtttttttttttcttttcggttttgagagagacgaagagagagccgggggttcgatggtcggacccaatggtccgaccatcggacctggggggtttttttctttttttttttttcgtttttcgtatttcagagagaggaagagagagtggggctgagaggggggtgcagcgttttgggtggttcggggttgagcgtcgacgctagagctgggtacaccgtggacggccgtcggttgagctgggttgagaatgggtggcgtcggctgagagaaatgcatttgggatttcttggttcggctgagagagaggaagagagagggatggtttgaaatgtgaggggtagtttaggaaaattagtaaagtggtcatatatgaccaattttaatgactatacatttagggaaaattatagggtattttaagcatggaatttcaaatttccctattatagcaagtaaaagctatgtttagaactacttgaggctagctcatgtggtcataggacacggtgggtgtatgttggaagttttgagttcgagtctcaagttatgcattgtaatatataaacaacttaaataaaaaaaattaaaaaaaaggctttt

SEQ ID NO: 283158 - DNA, 507 bp, Cannabis indica
cccaaaagcatgcttttaaccttagtcacaaacagtggcagcaagttctctacactcatttttgccttcattcttaagaacaatcttacttgactatctttgactaaaacttctaggggtatcatattgtctttcatgtacatataacacacctctattttcagttcatacacaagagggtctatatccaactcttcatacaaaatatcattcatcttttctaaagtagtgtcaacctcaaacattaacatcttactttttggattattgaatatccagttgaaaccttcaactgcccaagccccatcatatagtacaactacaaacacatttgaatctgcaaaccaaaatgaccacaaattatgaaaaaccaagatgtcgcaagatattgcgaacctatcgctacatatcgtgaaccgattccaaaaaaatgtatgtcgacaaacgtcgcaaacttgtcgagaaaaataaaaatatccacaatataacacaagaattctatgtgtc

SEQ ID NO: 283159 - DNA, 560 bp, Cannabis indica
atgtcgacaaacgtcgcgaacgtgtcgagaaaaataaaaatatccacaatataacacaataattctatgtgtcgcgacatgtcgatacatgtcgttaaatgtcatccctaacctcttgtcagctcttaatcgctaaatgtcgctaaccatgtcgaaaaatatcgctaaaattgcaaaaaaaccagtaaacacgcagacttgctgcatttcgtgtttcattgacaaagggtgtcaaaagggtacataaaaaccacggatatgtgtagatctattactttcaacataaatacatctaaatcaaacaataattactaaagaaattacatacccattattgtttaaaggaatgactttcttagagctttggttgggtttcaagttccctttgagtaaggcggccgaacactagctccggtggtggcaatgtgtgtattctagagagagagagagagagagagagagagagagagagagagagagagagagagagagagagagagagagagagagagagagagagagagagtagtagtagtagtagtagtagtagtagtagtagt

SEQ ID NO: 283160 - DNA, 564 bp, Cannabis indica
ttttcaagctctctctagtcaaattttgtgaactcttgttgtggtatgttctctctagctcttcttttagttttcttgaaaattgatgaaaaagaagtgttgttgcatgcttgttttagtggttcttgttgctgtgatttattgtgatgtttcagagaattaatcttgctgttttaggtagattagagctagtgtaatgcatgttaattgctttgatttcaagcttggaagtttttagctcaaaactatggttttcaaagagaaatggttaaaatctgttgctgtgattttgttgatgtttgtagtagttttcagaagcttttatatgcatgattaagtaggtttgatctgatttggatgcatgttagttggaattaaccaagtttgagttttggaactcaaagcttgggctttaatggcactttttgtatctgtgcattctgggtgattttattgctttagaaatgttatttgggtcatatagaataggtctggaaggtttgaggttgtttggattagatttgagcattgtgtgaatttttgaagttctgcctacgaggaacc

SEQ ID NO: 283161 - DNA, 522 bp, Cannabis indica
tcccaacccaaacctggactcgggacccgaacctgaactcagatcgaaacatggaaccatacaaaggacacagaaccaaggtcgggacctaaaacttcaccccagtctcgatccagaaccaaaactcagaaatgggacctgggacttgaaccagaacccaaccgagacccgtgacagtgatccagatcttgacttgggattcgggtaacggggcctcgaacagagcagtagtcggtgtctagatttgggacccaaaattagagcctgaacaagaattgccgaaccaggaccctagtacaagactaggactgtgaccatgacccggacccagaagtagaaccgaacacatacctagcctcagatccaaactgagactagaactcgggcccgaacacggtcgtgtacccagaccggaactgagacccggacctggacctaaatcttggacctgatcccaaacacagacttggacctaggttaggatccggatacgaacatggactcagaccaaaacccagactg

SEQ ID NO: 283162 - DNA, 1071 bp, Cannabis indica
agttgtgaaacaaaaagaaagaaaaacattgaactcatttacagcaacaaacgatagacaaagaaaattaaaatagaaaactcttaaggtaacttgaacaatgaatctgatcaagaggtattaaactacagaaaagttgcttcagaatcgtgatcactggtccttaatataaccaattctttcacgaatcacacagattatatcaaacagtatatacaccaactaaaacactatcacaattcacataatatcgaaatacggctatataaaatggaatgaattcagtctacaaaaaagaaaaaaagaaaaccagagagagatatttaccgtgatagtttgttggaggattaaaacgatggagaagtaagtactggggatgcaatcacgaacaacgatgatttaatttaaattttaaaatagaacatcatacacaagcttggctctaggcattggcagactaggcctgtgcctaaggcccaccagcccagtggtataattttttttctttttgaaaatacatatttttttactgattgtgaaaatactatattttttttatgacccactaaattttaaggccgaccctgatcatacacctcatcccatcctatttctcaaccactacactttctacattattttaacaagttcaatgtggagcttaaggggttagcctgatggttgacatgggacttgggcagtggggaagctcgacaataggggattttgcttttgtttgtggtcgatggtctttcacgagccccgggaatgttgcttaagttttgcaacgtctacaagagtgaggtagcaagctaagggtagtttaaattcctaaaactgtcaatgaagatgattaatggctataaggtagccaatgaagatggtgatggttcgggtgttaagagtttattgttggttttgttgtagcgaacagacagattcgaaccctaatcatcatatcaattgtttcctgttgaatattgttcgagattatttaatgttttattttaaaaaatagcatttataaatataaataaaattagattttatgattgttaaagattattcaat

SEQ ID NO: 283163 - DNA, 681 bp, Cannabis indica
atttgtgttctatagttaaaatgatgttatttgagttgatttggggttgtttgatggcttagttgtgtgtttgtacaaggtttgagctttagagctcaatcttttgtctttaatggtgatttgagtttctcaggttgtttctagtttttgtggcttggagtatgtttgttgtgatctaattagtaggtttggaaggtttggtggcatttggaatcaatttggggtgttggtggtattttgggtgtttcttgtactaaaccagtcgaccggttcagagagacctataggaactggaattccagttgtgccctaggaaaccccactgaaccagacttcgttggggtaaccgagtctgccgattggggcgagttttggtaaacccgtaacttttagtcgatagtcagtgtattgccatgttattcatcgatagtgaacttttagttttgtattttaagttcccaaaacgtaaagttaagcgtgtcactcatcagtttgtcgaattatgtgatttaggggtccgtataaatacgtcgagcagctgttccactcaggttggctggcacacttgaattcagaaatgaggtaagattagtataatgatatgcatatatgtttactatgtttagcgttacatgttatttaagcctattagattacatcgatagcggtattagtatatgt

SEQ ID NO: 283164 - DNA, 583 bp, Cannabis indica
ttttttttgttttattagagtgattgatttggacgtgagatgtgacaactctcacacacactactcaataaagcaaccctctcatcaactttatttatttatttatttttctaattttaattttctttttcataaaactcccttcatatttcctctttgcttgtaaaaaaaatatgtttctctctctcctttaagccattttggtctaaaccgatctcaactacttctgccaagctttgtcgccatgagagaaggttggaatggtgctcaaaaggtccaacaaaaacaacccatttctcttcattggttagactcttcatcactctttctctaagtatggatggcactgtaacccccataacctcttggagtctctttatggcggcagtggtgcatgaaccacagaacaagagcgcatcctcttctccacctcccaaacatttcttcacgtagttccctgcttcatgaacaagagcgcatcctcttctcaaccttttctccatttgtatataaggggtttaaaagaaaaacttaatttgacattggtttttcttttgatcagtgaagatagacaagcatatat

SEQ ID NO: 283165 - DNA, 509 bp, Cannabis indica
catatcatataatttccgacctgtaaataggcgcccatacacctatttacagagcttaacagatgagtatgaacgttcaatactagggtacaaccactataccacatacacaacgtacctcactgtacgagtgttggtagggtttactccgtaccctgagtaccactgagtgatataccacacaccttagcactttcccgtacccgtgttggtatcactgtatcgtactcacaacaacaatactcactataccaatgcactctgtatcatatccatacaagtgttggtagtgcaaatcacaatttaagcatgcatatacaaacacatatacatacattcagataatcacatcacatattatattcagttcttacctgttttccgaattcaagtgtgctggccgacctgaacggaaatctcgtgctagatggatgccctaatcacattttgaaaccgggtaagtcacatgattaaaaccctaatcccgggaaacccaaaaccaaaaccct

SEQ ID NO: 283166 - DNA, 621 bp, Cannabis indica
aaatgttaaaaaataccacattttttttttaaaagggtcaatgactcactatatttcaagaccagccttgacactaaatacataatatatatattttttgatgattaaatacattattatatgacattatgatgagccctaataacttcgtgcaaatctctaaatatttgattaacacataaaaggaaaaagattacaaatgtagatgcagttagtagacaactttatggtttgagttatacgatatattcctaaacgctttccaaagcaaatattaattaatattaatatatatcattaaattagaacaaatataatacaaataaattttgactagttacttctaattccaattcctacttcaaattaattttggtgggttaacactgcaaattagatcttcaaacattgtgcgaaaaatatggatcaacaatttttataacaatttttttaaaaatgtcatttgtttttatatttttttttttatataaaaaaataaagaaaaaataaaaaattaaaaaaaaattgtttttctaaatctaaaattaactcaacgtcggccttgctaaagaaagaaatgaaattttccaaagtgctttgatttgagcctttcaattttga

SEQ ID NO: 283167 - DNA, 677 bp, Cannabis indica
taggctagcacttcttcccaagctgtgaagctgaatctctgtgtaggtctaggaacccttctagttctgtctctggtcagttggtaatcttgtattgcctcattttcttgtccttcttcagtaataggttccacctgaatgttgtcatcctgaacttggtcatttccttccaagttttcatctccctgagtattttccacctgttctggttccacctgaacagtattaggttgagtgttccttgtttgcatgtccacagatgtgcctgcagggttagtgtctaaagtaggactagatattgcattattattagtaatacaagggaataaatcttccttaaaaacaacatctctactgtttatggttttaaaaccttgtttctctcttacccataatctgtagcctttagtaccttcaggataacctaggaacacacattttagagctctaggctctaacttacctacactttgatgtgcataggctgcacatccaaatactcttaagtttgagagatcagggggcttacctgaccagatctcctctggtgtcttgaattcaatggcactggatgggcttctgttcaccaggtaggctgctgttaacacagcttctccccaaaatcctttagtaagcccagattgcaataataggcatctgaccttgttcatcaaggt

SEQ ID NO: 283168 - DNA, 599 bp, Cannabis indica
gccaatatccctaaaaatatttatatttttacgttcaaagagatgttttttatatttttacggttttccaaaaattaacacgaaaacaacataaaatcaacaagaaaataacataaaagtaacatgaaaataacatcaaaataacaacaaaaaataacatatagataacaaaaaattaacaacaaatgaacaaaatttcaacataaaaagacagtattttatgtaaataaaatcaaaaaaaaatcataaaaatatttaaaattccgtgaaaccgtatttttgttattttttttgtgtttttttgcatttgtgaaattatcccataaacctatgtgtaacttagtttgctggcccaagacacaagtggtgtaggcttacaacacttgggctctttaggagatgggcccaaaccaaaacaaaaaaaaaaaaactattgaagaaattggtgcattttttaaagaaaaatttacatacagatattattttttaaaaaaatttacatttatatttgaaatttttacatgaaaaatccattttacacaatttattactaaaattactcatacacgcctatgtctacatttttacttactaaagtt

SEQ ID NO: 283169 - DNA, 766 bp, Cannabis indica
atttgatgctcaggctcccaagactcaccaaggttcatctccaaaagacaacacacaagatgagtgttggacggagtatcaagcgaaaaaaaaaagcaaatatgccgaccaggagtacccaaaagattaaagagcagccatgttcgaagaaaagtctaaactcaagaagtcagaaagtttttcttgagttagggaaaaaaatttcatgaagcttaaagaaagcagaatgggaaacagacgcaatgcagttctaaaataagccttacggctggaagttaacgcaaggacatggaaaagaagagtcaccgaagtttcaaaccctaaagtttcctacagtgttctttctacagcaaagatacattcgaaagcacaagcatgcaaaggaaaaacataaagggattcagaaacttactcaaagattcaagtgtccggattcaagcaagcctgaaatcgtctgtaaactcttcagcaactttgaagcctgaaaactctctctttttgctctgaagtttgcttaacaacgaagggtgatgaaatgaggaaatgtgccagtactccaagtatttataggcaaaagggtaactgtacgtaaaggaaccttagacgcctcgacttcccgccttgaaagcaaatatgggaaatcaaaataatcgagtgcaaccgtcagccgtggagagagaaattcggattttcaaaatattaattgtcagagcattaattagccgaaaaccaaggacgcccagtcagcttcacatcgagtctcgaa

SEQ ID NO: 283170 - DNA, 693 bp, Cannabis indica
caagcttacagtatgtggcctgtagttttggcaaactataatcttccaccttgattatgtatgaaagataataattttgtattgaccattcttattcctggagataaatcaccgggaatggacatagatgtatttttaagacccttggtggatgagttgaaggagttgtgggttaacggagtagatacgagagattgtcgaaccaacactgtcttcaagttgcgtgcagctcttctgtggacagtgaatgattttcctgctcgtagttatttgtctggttggagtggtcagggatacaaagcttgtcccacttgcaatgaagatacatcttccattcgagtaattggtaagacatcttacgtaggtcatagaagattttttccaaataaccatcgaatgagaagggatactcaatttgacggacaaattgagagaagacctcctccaagacgttttacttgtgaagaagtattagaacaagtaaacaaactcccaccccatctcccgggaaatcatgagctctttggtggtgtgaagcgtaggcgagttgcagaaaatcataattggcggaaaaaaaacatcttctacgagcttgactattggtgttcaaatattcttaaacacaatattgatgtcatgcatgttgagaagaatgtttgtgatagttattgggcacaatcttggacaatgaga

SEQ ID NO: 283171 - DNA, 508 bp, Cannabis indica
cacactgaaagcaccccttccctttacactcccccatatgatgctttttacaactggggcactctgggtaagtgtatcgggtttcggtgcccctctggcgatttcctcgaccctgtttcccttgaaacctcttgtttcgaccccagccactagttgcagtagatgcctttcttttctaattagtggccgagccactacctgccctgctaaagcctaatgtaggaggggtaggagccccaccaacaatcggagtcccacgagactctaaggtgcactccactgcgccctcagctcgcagtgccttatcaaccatttcagcataggtggtactgtcgtcagtagtgatcatcaagtcgtgtctaatctttgcattcaacccatccaggtacttttctttcttactaaaatcggttggtacaactcccgaggccaaccttgccaagcgatcaaattgagtcgtgtattcagtaacactcatgttttctttctgagtcaactgggtgaattc

SEQ ID NO: 283172 - DNA, 546 bp, Cannabis indica
cgacttggggacccaagcagcaatgttggacttatggaagaactagaagagatcgagatcgatcccaatgtttcgcccagaaaaaggtttgttggtcgaagtaaaatttgcattgataaaacttctgagagcaaacctggacgtttttcgcttggtcacatgaggatatggtcagaattgatccttctgtaatttcacacgtcctaaatattgatcccaatatccgaccaattcaacaaaagcgaaggctattggagaaagagcgagcactagccctgaaggaagaggtagagaagctacgcaacaataatttcataattgaagctttctacccaacttgggttgcaaatcccgtactggtacccaagccgaacaagaaattgtgagtgtgtattgatttcacagaccttaacaaagcatgccccaaagactgtttttcacttccaagaatcgatcagcttgtggacgcaacagctgggcacgaaatattaagcttcatggacgcttattcgaggtacaatcaaatcaaaatgcatccaccagacc

SEQ ID NO: 283173 - DNA, 545 bp, Cannabis indica
aaattttgccattccttttttttgtctttcttctttcctccattaaagtttgattcccgccaacacttccttccaatttatccaattcgaccagccttctttccaaagaactttttatcatctgattgttaccgaaagtcgacttactccaggacttgatgttttcttgcctttctcgaattcaacattcatgctttgttaaggtgagcatgaacaccttacgttgcgcttgacaactgtcaacacctaaacaatttttatatccaaaaccagtgggtgttaaggatagattccttccactaggtagtagggccagcgaattcttagagaaccttccatgtccattcagacattaaagcccctacagtgcatacttttgcgtattctgatcaatcctccatacttccatgtccattccattgttccatactaaccaagttgttgcatcaatggatatggtaatctcgtaaccgatcaatctagtacttcgcatattcaatcatccatgctttgttaaggtgagcatgaacaccgtatgtcgcgct

SEQ ID NO: 283174 - DNA, 634 bp, Cannabis indica
aacttccttgtcgacttcaaatgccacagaaattatgtccctttgtgtgggatcatttggtatttggtcattctcggttagggaagttgtatttgttgtcgctttcccgagagaagagtcaatctcaatctcttttctcttgatcatgccttcgataatgtttttgaggatgtagcaatccgacaatgggtgactcacaatttggtggtaccgacaataatttggatcatttgtcataccaacctcgttgggtcgtttcggctcggggagtcgtattgccttagcttttaacaactcatcgaaaatttggtcgacatcatcatcgtcgaatgaatacttaacttctttcctttctttgagagttaatttcttttgcggctcccgtgccttccctttatctttgttgccggtattgacaaaagttgccattgattctcccttcttgaatggctttttattttcgaatctcggtgagggtttgccacccctttgtcgagaaatttgtatttcaacgttgcaggccttcgagacgagctcattaaaagttttgggttctgctgtgcccacaaaagttgccacctcagggttgaggtttttggcgcacattgaaaccgccgcttgttccgatatcctt

SEQ ID NO: 283175 - DNA, 701 bp, Cannabis indica
aatgacggtttataactgtggcaaaaagttactttaaatgacagttaagaaatgttggaaaagactttagtcagactataactaacaaaatacactacttaaaatgacggttataaaccgtcagacaatatgaagtaaagtataaaatagaaatattaattcaattctcctcttgtatttttattatttagatttccaatacacaatgatgaaaaaacataataacaataataatatttttataagaaaattcatacatttaacactcttcaaaagaattaaagcttcatgaaaaccataatatgccatcaaagtttagtaatgcaatacaaaagaaggaaatccaattaagtttttacattttgcaatcttttgtagaatatcttctgaacatctaaaaatatgtatactaagaacaaaataagtctccaggtagtcacttgggactttaatcaaatagctggagatcacttcctaaaaactaaaaaagcaagacaatagtaactaagatcgatgtcaaacctatcaatcattttcttagatcacatggggatcgtccatgagcgatcattggtcatcatactctatgttattagtcatttgcctgctgctatcatctgcatgacatactttgcccattcgtcacgtatttcattgatttctttgttagtgtaagaggatgatatgttccttttaaactg

SEQ ID NO: 283176 - DNA, 396 bp, Cannabis indica
atagattctatatctatgattagagctcccactcaattatactatcatgttcccaagatgtaaatattcccccgaaccattggttagctttcacgaacaactctaagaacacaaatagtataattgagatctaacctaaccatctcaggattaagatccattgacctaagatcaaccagtgatattgacttagaaagatataacgataagtttatgatatcttatccaagcttaatattggtccaatccgatgcatactccatacattcgatactaagtttatgatatcttatccaagtttaatatcggtccaatctgatgcatactccatacatccgatactagcatactttgccaatgtcctgaaaaggatataacacttatcataggtgtaag

SEQ ID NO: 283177 - DNA, 586 bp, Cannabis indica
cacatggtacccatattagttgagacaatactgcttgtaagactcagttaattgattttaattaattaattaattataattttaaaattagactatgtctagtttatgaattttcactaagatatgacttgattgtgaagaaataaaattttagggtttatttgttaattaagagactttattgggtctaattaataaataatataaatgacaattttatttgataattattttaattactaaataaatatttttggcatttataggaatgaaagtgcaaaaagtggtatttgtgaaaaataatagataaataattgggaaaaagtggcaaaaatctaactagtattggatccttatagggccggccactagagtctatttttgctctatttttatcattttttattttaaataaatcaatcctaaccctatgtgaattagtataaaaggaaaagaatggtctcatagtccaattaatgactattgacctagttttcattctatctgacaactagagagtttgagacttcttcttcttcttttctcttctctaattcgaaatcccttagtcttcttcactatcaaa

SEQ ID NO: 283178 - DNA, 508 bp, Cannabis indica
aagcgggaagcacagacacttagcgtcattgctgactctcatgaccgtcatgacccggttgaaccgtgacaggtgatcacttggatcagagttcccggtataagctgccatttcaggcatcttaaagttcttggggagctccgcttccaggatgtgtttggcacatggctcccggtcctcacagtctgagtcggagtcgtcgcctttctgtctccgggagactcgggcgatgtcttttcgaagtatggcgagttctgccatgattccttcgtttaacgttcccgtggagaccgcgggtccgtatttcttttggtcaaggtgatcccggaggtcaccttggtttccgttgatttgattcctcagatcaacgggaggacatttctgtccccttcttcctctccccccgggctcttggtgcacggaaacgctttttcggtcctctcgatcctgagggccaagactccctctttggagtttgcccctctgcggacctttccctttcgggaaa

SEQ ID NO: 283179 - DNA, 501 bp, Cannabis indica
aaaatttctgtgtcttattattgctttactacttattcttattacgacatatcgtttatcgcttatcaaaaagactcattgtcgttggctaaaagcgaagtcaacagtcgtgatcccacagactaaaaatctaccactggaatctgtatcttcttgggagatttccttatttcttcgaggagcaataaagagtttgttgtttctcaatcttctacagaagctgagtatcgtaccatggcgtctactactaaagagattgtttggttgagatggttacttacaaatatgggtgtcattcactcttgtcctactcctatgtattgtgacaaccaaagtgccattcagattgctcacaactcaattttttacgaacacaccaagcatattgagattgtttgccatattactcgtcaccatttaaaagtggacaacattactttgccttttgttccttcatcgttgcagcttgctgactttattactatgtcacacacaatttct

SEQ ID NO: 283180 - DNA, 703 bp, Cannabis indica
cagcttcctttttggccaagtctgcctccgccctcaaggtgtcgggcagagccgcactcttggaagtaacagatttagcctgggagtaagtgtaagccaacttcaaactggcctacacaaaggaaaaaagtcagcatatggagctaagtggggaaagttaaaggaaagggaagtataaaaaaaaagacttaccctggtgagctccttcaggactcggcccaccaacacatccagagatgagtcactatcagcacaagccagttactcactgaccttaggaaccagccggttcatatagtgggctagcatctccttgccctttttggcctctggcagcacgggcaaaagtgtagttggtgcctgtaccccctcaggaacactcctgaccagttcagacccagccgttggtggtccaaactctttggacttggcagatttgggagtagaagggtttgcagcagtcagctcctcgaaaaggtcaatgacctctccagaaggtctcttctccaaggacccctcactgcccttagactttttggccggatgagaggcgctagagcttccgcccatcctcttccttagagcatcgagcatctaccgagacatgtctgcacagaacaaaaatagtgtggttagaaaacaaccatcagaaaatacaaggcatgaaagttaagaagctcaaaaaagaagtaaaatgcaaggt

SEQ ID NO: 283181 - DNA, 557 bp, Cannabis indica
aaatagaagattccgagcttcatcttcaatcgtggactatctccacccatctgtccaactatccgactcaactcgctaggataacaatccaagttcaagcagctggagctgaaataagaagaaaaacaaacatggttagtgggtccagaattaataatccaagtggataataattctctaaaatacatgagtttatagcatagaaagaataccttgtttctttgcaagaaacttagggcattggggtttccagtggcccttttcattgcaataaaagcatttttcttttggcttatcaccgggagtagcagcctttttctttttaactgctttcacagcttgaacaggcttcttgctattcttccacttcttgttgttgttgaatttggaagtagaggcaatgtttgcctcagccttagccgccccattagcatttccagaattaggagctttagatcctcctttttgtggtcctccaatcaaattttcaaatgtctggaggttgtttactaactcatgaaagtcaagttccaacttgctcatgacataatttgaag

SEQ ID NO: 283182 - DNA, 532 bp, Cannabis indica
cctggtaaaatattcccaacacgagccccatcagatctgataaaaaaaatcccaaacccatttttgacccctgatcggacacccattgggccctaatcgggtcccatcgaacccgatcaaaaaaaattgcccgaacccatttttggaccccccatcggacacctattagccctaatcgggccccattgaactcgatcaaaaaattgcatgaacccatttttggacccctgaccggacacccattgggcctaatcggcctttcatccctattatcccacttgttggaatatattttaccaggatagagattttactaacaagtatgtttttaacatcctaaacatgaacttctaaaacgatataaaataaacacataaaaggtatgagaaactttacagtggttgcagcggaattaaatgactccttcctctcaaatctctaacccttgtatcctttctataacagagtatcaccaagatttgagcccgaaactccttccttgtgtttggattcttcacagtcttacacacta

SEQ ID NO: 283183 - DNA, 654 bp, Cannabis indica
tggctggtcggcctagaggcttttcagtctcgaacagtggaatgttgttatataaagctcgagtttgtgttcctagtgttgatgagcttaagaaagaaatactagatgaagctcataccacaccttattcgttgcatccgggaaccaccaaaatgtatcaggatttgaaaccctatttttggtgatatgggatgaaaagagatgtggtggactacgtgtccaagtgtttaacctgccagcagattaaagctgaacatcagaggccggcagggttactgcaacctttagtccttccagaatggaagtgggaggacattgcaatggatttcgtaactggtttgcctagaactacggggatgtatgattcagtatgggtcattgtggacagattcacaaagtcagctcactttctaccagtgaaagttacatattcagtggatcagtacgctgaattgtatgtgaaggagatagttcgtctccatggagcccctaaatctattgtgtcagatagggatccaaagttcacatcgaagttttgggtgagtcttcagaaggctatgggtaccaagttaaagtttagcacagcctttcaccctcagactgatggtcagtcagaaagaactattcagattttagaagacttactgcgagcct

SEQ ID NO: 283184 - DNA, 401 bp, Cannabis indica
gatagggaaacttttaatttctagtttaagtccccgggaagtgatttagcgtatcacttattagtgttgtgattgttatggtttaggaacctgtaaaccgccgcgcagctcgttccagtcaggttgaccaacacacctgaattcggaatccaggtaagattagtataacagtatgcatatatattacatgtttagcgtgcatgtaggaagcctgttagattacattagatatgtatgttggcttcgaaccatccgactgtgtcacatcggtacaggctagagtatgactagcagctggagtatgaccagtgtaccgagtataggctgacactgtatcacatcggtacaggctagagtatgactagcagctggagtatgaccagtgtaccgagtataggctg

SEQ ID NO: 283185 - DNA, 149 bp, Cannabis indica
gagtataggctgttacttgacaatagtaccgtcttatgaacgttctggactcagtatcgtgtgggacacagcagttagggttatggtcaggggtatgggcgtctgatcataactcgggatttatgtatgatatttgattatgcttttct

SEQ ID NO: 283186 - DNA, 575 bp, Cannabis indica
tggtaaaagtccccgctaattattttcaaagtaaaaaaaaaaagcgagaattttcctgcacaaaccacattgcccattaccgacgagacattccgccggtaataattactgtccgccgctattgttcattttaattaaaaaaataataatttgttctactccaccggtaataagcccattaataggggcggacatgctccgccgctaatgtgtccgcctctatttctaataaatgttgtagtgattcatttaaaaactgacgcaaaatatatactcttcttttttatcttctgcgtcaatttgaaaatgacgcaaaatcttttgtggcattttaaaactatcactaaaaatttatagcgtcggttttaaaatgacatataaattgctgaaatacttttatttttaacttattgcgtcagttataaaatgaagcataaatgtatgtaaggaaaaattacaaattttcatgcattttttcctacctgcatttttaaattttagaacaattttatataatagtaaatacatgatacaaaaaaaaaattaaaataactttataaaacttatataaaatt

SEQ ID NO: 283187 - DNA, 510 bp, Cannabis indica
tttgcagattcacaagatgagattaatttaataaaaccttcaccaacaccattaaaaatagcatgtaaagccttattattataaccagacagtttttcatcttcagtggtccaactgagttcagattttacctgagtattacctttttcatcattttcagtaggttgagaccaacctgtaagaatagctctccatgctttctcatcttgcgatttgatgaaagctctcatcctgaccttccaataaggataattcgactcattcaatagaggaggtctagagatagaacttccttctgcaaacaaagacatctcacacaaaacaagttaaacggaataacctcaagatctcactaagaatttagtgacttgctctgataccaattgaaattccgtattttaatattcccagtttgattatttaattaaatgattaattaaatgcggaataataaaactggtactgaaaacagttttctgtagttacagaatgcaactctgtaactccaga

SEQ ID NO: 283188 - DNA, 606 bp, Cannabis indica
ttttagggtctctcccgtatgagtttttttcctctccttttttatccaacctgccactatttataatcacatagtaggcagttaatttacaaagttaactgtaatttttacaacgatcatccgttaaaatcatgggttctgattacatatcatgttaagtaaatacaatttttatttaaatttcacacagctgtgaatatcccgcttttactgggtcaaaatgaatgtgtattaaatatattgtaggcattgggaatagagtagagttaatcttgatagtgagctggagctcgtcatatatcattccaaggtggataatgtttttactttaaatctgacaaccgcagtttctggtggcgagatgatctttttcgcgtgcatgccttcctacgacgaggttgacgcctcgctatctcttgctttggttcacccatttgttatacttagtttgtataccgtacattatacgctaagtgtctccattgtcattatatctcctccacgtaacgaggttaatgcctcgtcttgtactcctaaagttacatggtttctcatcgaggcacaaggcaacaatttgtatatttttatctcgcataagactattca

SEQ ID NO: 283189 - DNA, 823 bp, Cannabis indica
tttaaatattatttattttctgggatattacaaagaagctgaagcaagatgcgtcttctaaagtcaaagaactagaggaacttcgtaaggccaaggagcaggtcgagcttgaagccaaggcgaagatcgaagagatgtctcgcgacttggaaactgagaaggagaacggcaaaaaacagtacgaccaggcggtctcggactacatctataccactctttccaaagttccagacttcgacttctcgatccttggagcagaagccgcagaaatggccgaggcttttcgcgctatgtcacccacaccaactcaaggtggtggagggaaccttctcgaggagaccgaagtcgcggaagtggaggaggttgagaacgaggtggccagtaaagtcgtggatgaatttgttcctgctgctcccaacgcttgattttttcccttctatgtttgctcatgttgaactatatttattttgaatttgctagttttttattttatgcggtacaggggtactcgcactttgtacttggacaaatttgcaatttattttggacaactttatatcctcgcggggatatttaatgtttaacattttcgcagtacacgggtactcgcgttttagtatatattcgactttaattacagcatggtgtaataagtagaaaatctcacaagacttgaaaaaatttgaaacttgaagaattaacaagtatgaggtatttcctttatataatcaatagtacatcacgatatatatatacccccctatacttaggatttttataaaaaaaaatgactaagtataagtacaaagcgaacacaatttaa

SEQ ID NO: 283190 - DNA, 477 bp, Cannabis indica
taaattcctgcaaaaaatgtaatgaaactattattaaatgattatgcaactgtaaatcaacttaaaaaccacaattctttcctcaaaattacatagttcttactcattgtcatttttcatcatgtttattcgaatcagatcaatttccaactattataaaactaatttgctaccatttacataaatcgtaccttgtatatatgctagcttttggtactcgtcaattgacacttcttcatgatttgtaaaccattttaaaacgataatgcaactgtaaggcaacgcaaaaaattaaaaaaagccttattagtatcaagtggttccttaattagaatcagttcttgttttttgtttttagaatctgaatttcctgttgtacaccagtgaatcaaccagaatgcaactgtgtatgacgtgtatcattgttgaaaaaaaatttcatttcatacctttttttggatttgagggggagctcca

SEQ ID NO: 283191 - DNA, 600 bp, Cannabis indica
ttctactctttttggttgtttttatgagtttagtttaggttttggtgagggttttcatttaatccagagctggggtataaactgaagttagggtaggttcttagggtgatttgaaacttgtgtgaatgaagattgagtgagattaagggctgtgcaattatataggtgttgaaagagatgtttttatgcaaattatcaagtgagatgttgattttgagttaaatggtgaattgtgattaaatgatgtgttgaatgtattgtatcgaccggttacagcaggggaaaaattctcgggtttttctctgatccgtgtttagctcggggttgaacctagtacctgcctttgaataattttgagttatttgaattattatatagatggtgaaggctaagtctaatcggttttaaattagggttttaatccggaatattatgttaaggtatttattgtgtttcaattgtcgtgacataggaccgggattgcctagcttgtttttccacccaggtcggccatattcttgacttctgaattaaggtaagaaaagtggtaagcaccgtatgtggttaaaaatcaatgaatgaatggaggtgaccttaatt

SEQ ID NO: 283192 - DNA, 707 bp, Cannabis indica
ttgaataccaagcaaatacaccaattttctaaccaaatacaaagagagatagagagagagagagggaagggggctgttttagggttaaggtaaatgcagaaaatgaatttcattttttttacaaagaatgcctttagttgaaaataaatccaaaaatacatatttaccattttgcccctagggccatttctcacatactcaaacaatcaagggcattgaattcatttcatatataacacatatttaaataatttcagattattcacacataaataaaatgccaataatttatcccaaaattatatttcggccccgaacccggttcggcccgaaatacccgattgtgactataccgcgccaacttgtcagaacacacctgaaaaaggacacaccagatatactatataataatatagttcataagcacataaataaattaaattcacagttttacccttctcgggtcaaaattactaaaatgcccctaactcaccaacggggtcttaacatgtcatttctcatattaattcgcatataataaattataatataatataattctacaataatactcaattaactagttagggctttgctaatccatttccttaattccagggtattacaattaccccctccttatagaaatttcgtcccgaaatttacctaaacaactctggatatttctgctgcatatccgtctcgag

SEQ ID NO: 283193 - DNA, 501 bp, Cannabis indica
gcagattcgtgtcaaaatcaacggagaaatgtgtcccattcttcaacatcctgcgaggaaacaaaaagttcgaatggacagaagaatgtgaaagagcttttcaagacctgaaggcacagctcgcaaaacctcccgtcctctttaaacctctggatagtgaggaactggggatatacctagcagtaacgaagcatgccataagcgtcgtactaatcagagaagaagatggcgtgcagcatccagtctattacatcagtaaaagactcatcgaggccgaaggccgatatccgttgatagaaaagctcgcctactgcctcatcttagcaacaagaaagctaagaccttactttcaagctcatcctgttcgggtgtacaccgaccaaccactacggcaaatactgcaaaagccagatgcctctgggcgattactcaagtgggcggtggaattggggcagtacgaaatcaacttccaaccccgaacagctatcaaaggccaagcct

SEQ ID NO: 283194 - DNA, 529 bp, Cannabis indica
aggaaataaaaataaaaggaaagttgccaattgccttggaaaacgtgatcagcttaatttgggactaaattgagtctactttgatgagaaacacaaatttttgctctccttcagtgttgaccatggtctcctcttattttaaaattctgttgactaaattgttgagttcttctttgaatttctcggctcgcgccctcgtcatcgggccaattagaattttacttgtttctttagccttagtgttctcttcactatgggcatgcacaagttcctagaaagtacaaactagggcatgcattacctgtgtagtaggctgtttaggttttaggtgagattagccttcatcccttcttggttaatgtgattcttcataatggattcatcactagctcccttgattatcgtgtaattacccaaagtcaggtttatgacgtctgacacgtcctcctatgggtattcccaaaagtttctccatgtcgcattaaatgcaaagtggttgttcaactccagccttactggcccgaagaag

SEQ ID NO: 283195 - DNA, 656 bp, Cannabis indica
ttaggtggcatcttagattttttttatattctatttttaaaattttgtaaagtttttctattttgtttagaaaataactacaaaaatacatgaactaaatatcccacattgtttataaatgatgtaggcatcatctatgtagcttataaatattattctttttatgtcatattaattcattcaaaagtatttttgtttatgggtggttgattaatttcttactctatgaaatttttattattttatttttaaaattttaaaattttttttatctttcatctaatatatatttcattatttatatttttaaaagtaattatttaataaatatttgttttatacgttttttatatttgatgtaatatataataataatatacaatttaagttaattttattttaagattttttatatataattctatatttttattagcccaaaaaaattcgaactaaattattttaaatgaaattaaacattatttttttctcaatatataaagaaaaatataaatcaaatgagatgtcatgaacatattcttactatttatctattaatattctatctattttataatatttcttctaagtaatatatatattttgtaatagtttcacattgtttacaaactatgtgagtattatacttattaact

SEQ ID NO: 283196 - DNA, 645 bp, Cannabis indica
ttttgcttttgtatatgatttatgtttttggtgaactcgctcttagtccagtatctttgttctaggtgggttttttgctatgtctatcagcaaccatggtagttgtgccacttcgtctaataagacgaccagttcgtctgatgatccttcgaatattcctactggggtggtaggttatgtgttggatgacgggtgtgaggatacaaatgtctattgctatgcgtctggggttggagtagatactgatcgccctaggagtgatactgagtcgggcgatatactttcgggtgttaatcctaggtcagtaataaccttgaatgacttgccgaaaattcgtcgtcgttataatattcccatacacattagtttttatgctccggctagcggggaacgggctgactggaagataccgggttggacatgtttgtacaagcttccatttaagtatggtttcaaatttcctctccctagattggtgtctgaactatgctcctatcatggtatctctcccagtcagctaatgccaaatgcttggcgtgttcttatggccatagaagtgttgaccgaaaggcataacattacatttacggttgctgaagtcttgtacgtctactacttgaaagagcatccacatgataaaggtag

SEQ ID NO: 283197 - DNA, 514 bp, Cannabis indica
ttttgttgttgttattttcgtagtgttttatggtgttttatcagtgttttcattgttctgttttttaggattgggaatgcaagtacactcgatctcaattttatcattctagagtagtaacatctgggtattactctgtacttggtgacattaagagaattttaactgaaagccaattggaaattttttcaaaatctgtgtttggttattttcttcgaattcctgagtacataattcattaccaattgcttcattgtttgctgttgagggaggttcagcagcctaatgggttggagttttgggtttgtgtccaagggaaataccttaggtttagtatcgaagagtttgcgttggtcacgggttagattgtcatgttgattctgatttttatcagtttaagcaagatgataatgaattggtcaaatcttgttttaaggggtacaaaaaaattaccaagggtgctattcagactgcttttattgctgacaatcttaaggataacgacgatcttgca

SEQ ID NO: 283198 - DNA, 575 bp, Cannabis indica
ggttcagagcgtctcccacatcataatcatgttcttacaaatagacaaggtagtcatcatgaatagcaggtttgcgagctctctctgatcttctcaacacaacttcaccaccctcaatatcaggattttcatcttgcatatgattctgaggttcatcatgagcttctgttggaatttgttcaatcacaggatcaatagtaggagcggaagcggaagcaacaggtacagggacataaatacgttcttccctgaatacaatttctcttgacccttgacttgaaccaaattcatcttcaaaatagacagctctatctgattctatcaccctggtggtgtgagaaggacaatagaatctagaacccctcgaaccaatagtgtagcctacaaaatagccactgatagtcttcggatcaagcttcttagattgtgggttatagggccttacttcagctttacatccccaaacatgaaaatgacgcaaactcggtttcttgcctgaccacaactcgtatggtgtctttgggacagacttgctaggcacttgattcaagatataagcagcagtccttaatgcc

SEQ ID NO: 283199 - DNA, 896 bp, Cannabis indica
ttttagagaatttggaaggaaaaactgatgcttgctctggtttttgtctcagccgaaagagagaaagagagagtgctcaagagaaatgcaattttcttttaattttgactttttccttcaaatgaaaagaattaacctaatctaatagcttgctgaataaaatggacaggtgtccccaccctaggcagccaccaaatcacttagtaacaaatgacaaaaatacccttaagcctacactaaagcataaccaaaactaggggtaaaatggtcaaactccataaccccctctaatcccagtattttattttctctaaaatatttcccactaagaaataaggttctaaacttacccatgtgatcaaactagtcatccatcgcatttttcgttgtcgccaagtaaaaattacaaaaattgcatatttcacctataagccaaataatacccctagaatttaataaaatctacgaaatttagaaattataactccaatattcatatctaaatattggggtccacaaataattaattcatagataattataaaataaccgaaattagagctaattgcctttactaatccaaattactaaagcggtcattacaatgttggatcagtttaggggtctcggatcccggttatctctgtcctgagggctagagatttactacacagtggccatgtagaattttaacagtggtaattgacttcagcagacctgaaccatttgggcctgaggcagtcagggtgtaaaagattttctcgacttgtttcccgaggagttgtcgggattgccaccgcaacgagaaattgatttcgtaattgatccgcacctggagtcgagcctatttctaaagctccatataggatggctccagcagaactcaaggagcttaa

SEQ ID NO: 283200 - DNA, 1481 bp, Cannabis indica
aaaaccttctcttcggaattccatgcacagttctcctcctcacgccaacttccattgcatttgggagacttggtcaaagttaagcaatgaccaagcgagccactccgggcatacatcagcagattcatgacggtggcaactaaagtttcacgggtaaccgaggatggaaagttatccgcgatactggggggcatcgaagtcctcggtgaactttggaaggatataaagaagaacgggccggtagactcaatgagtgatttccttgaccgagctaaaggcttcatcaagctcaaagaagccatacaacgagcggaaggtgaataaaagtcgggcaagtcaaaggctccttccattggaacatccacctaacttcccaactacaaaaataattcaagctcaagtagcaagtgttccagcaacaaccacaagcaaggaaacgggaagaaaggaaagttcactggtaaatccgaacaaactccccaagagaatcatgccaaatacattgcattcactattctgacgaagatatagaaagtgtatctatggcaacccagtcgttggccccgtacaagaagctcgggcccatgaagaaagacgccaacaaaagggacatgacaaagttttgtcggttccacggagactacggccactacactaacgaatgctacaacttgaagcgggaaattgaatttctgataaggaaaaacaatccacacctacagaagtatgtcaagaccgaccagggtcagaacaaccaagacttgctacctccaccagtagatggacatctgcaagtcattattggaggccctcacattgctggagattcgggcaaagctcgggagaggtatgcccgaacagtgtagcacgaacaagaagaaattatcctggctgtggaagaaaggaagcccaaagttccacgagaaggagagccggccatatccttcaacgatgaagacgttgtcaaaattaaattttcgcacaatgacccgctggtcgtggaagtctagatagccaataaaatggtggccagaaccatgatcgataatggagcctcttccaacatcttgttcaaaactgcttacgaaaaaatgggactccagctcaaggatctaaccccatgcctccagactgtctatggtttctccggtcaaggagttgcacctctaggacaaattcggctacccctcactgttggacaagctccgacgagcataactatcatggcacagttcctaatattggatgttccttcagcttttaacgtaatgcttggtcggccagccttgtatgacttaaaggctatcacatcaatatttcactcgtgcctgaagtccccaataaagaatggggtagggtgtctaagaggaaaccaacagtctgcttgggaatgttataaccttacagtggccaaggctaagaaggaagtatcctccagccatagcacagacaagggaaaaaatattcccaagtagggtatt

SEQ ID NO: 283201 - DNA, 849 bp, Cannabis indica
cttaacgctcctcagggtaattgccttgcagttttccttaagattaacttcagttgtactaggcaaatttccttgaggacgggttgctacctgagttgctagttgccccatttgagtctgcaaatctttaatggaagatctagtttcagtcataaattgtaacaataaatctgtctgcaaactagaatttccactagagctttgttgctgagtatactgttggttctgtgtctggttctgatttctttgctgatagaacccactgttccttcggttacctccttggttgaacccatagttgttgttctgagaataatttccaatggcttttgcttcatccattggcaaatcatccacatctgcctgacactcagaaaagtgatggggacctccacatatctcacaaaccacttgagcttgtttggcttgccctgcgatcagctttgttagggcctcaacctgagctgtcagctttgtaatggcatcaacctctagcacaccagctaccttcttagtttgacttctttcagttggccactgctgattgtttagggccatctcctccaacagatcataagcctcatttgcactctttctcataaatgctccaccagctgctgcatctataagagttctagtgttaccaaccaacccgttgtagaagttgtgaaccagcatccacttctctataccatgatgagggcactttctgatgagatccttaaacctctcccaagactcatggagagattcattatcttgctgacaaaagttgttgatttctcctcgcaacttggcagactttgctggaggaaagaactttgacaaaatttcgttgccaagtcattc

SEQ ID NO: 283202 - DNA, 517 bp, Cannabis indica
tgatctcagatagacatgagagcataattaaggcagctgctcaagtatttccagaaataacgcatggctattgtgtataccacctgttaagcaaccttcaagaagaatgcaagcaagctctcgataaaccattcttcgcagcagcaagagcatacacagggaggaaatttgaataccatatgagcaagctagatagcttagacattcgtgtcagaccatatttacaacaagttggatacaataaatggtcaagataccacagcaaacacaataggtattcaactatgacttcaaacattgttgaatctctaaatgtagcaaacttagcaactagagaactaccaatcacaacactaatgtagtcattgagagcattgatacaacaatggacatacacaaataggaaaaaggcacagaaaaccacaacattttaacacttacagcagagaagaagctagtcaacaactttgtagactcattgacaaaaaatgtaaaatctctttaaactttaagttgc

SEQ ID NO: 283203 - DNA, 509 bp, Cannabis indica
gttaaaataaatttatgcacaattgtattgtaccctccaaatggtaaatttggtggagaaggaccattaacgtaaatttatcaagtcaaagaataaaattgtatttatctattttttcttttttttgtgtttaatcatttgatgaaaaaatatatgacagtctgttacagtccatgccatcccaaatacacaaagatttttaatgaaaaaaatgaaaccaaagctaaaaaaaatatatacatagcattcaatatcacaaaaacatgtgatatttacaaaacaaaacaagaatcatacacccatttcaatatataaaatatagagaagaacatatattaaaatgaaatatatatatatatatatatatcatattcatcatacctaagatcaaagcttcaagatttggataaaaatggaggttgagaagagaaaaggggtttgggaagctttaggctaggtctcagagtgaggaaaatgatagagagggtttcagagagagagagagagag

SEQ ID NO: 283204 - DNA, 1008 bp, Cannabis indica
ataaataatatatggtgtgaaatgatgaagacttctagaaggtagaatcaccatgtgatttttttaaaaaaaaaataaaaaacaaagccagttgtatacttgtataagcggacctcattatgccacgtggcatctcatgctgagttggatcagatcagttgctatttgaaactccttgattaattattttcaagatttatgttagtaatttaaatatattaattaccttttacttaatatagttaattattcactactaatcagttaaaaaactaaaaccacaaacaatatttattttgacaatttctagaagacacaagtcaataatgagaatttatctcgtgttattatttttttttttacctctagttaatataattaagaaaaaaaatagttacaatatcaaattttttttatataacaatatacattctagaatatctaaataatttacccttttttttaaaaaaaaaaaacataattcaaaacatctcatttttatattttaaattattttttttattatatttttataaaatttacacagcaatctatatagaaaaaaaaataatatattaaataattcctctaatttttataatagtagactaaaaatagaaaccccaacataaaaaatccaacgaaataaaattcaaaacaaaaaaaatcagactatttaccaaaataaccaaaagttgactatatacaaaatacatcacttttttttttgtcaatataaataaataaataaaatgtttccttaaagtccttttctaagtaataattaattaattaattaaatttaaaagaaaaaaaagagagagaaaattatgctataaaaagggaaacacaacacaaaaacaacataccaaacaaaacccaaattacgtttttatatataactcgccgcaatacaatattcataccaagtttgtgttgtgtttggttttattttattttatttatttaaatttaaataaagtaagaaataagaagaagaagaagaag

SEQ ID NO: 283205 - DNA, 809 bp, Cannabis indica
agcccaatctgcatctgtgtatatttgaagatctttgttgagagttttcctgaacattaacccttttcctggtgttcccttgaggtacctaagaatccggtagacagcatccatgtgttcctcaaagggattattgagaaattggctaacaacactcacagcaaagcttatgtcaggccgagtgtgagttaggtatattagctttcccacaagacgttgataccttcctcggtcaacttttgttccgtctgtctgtgcttcaagtttggtattagggtccatcggagtttcacttggcttgcatccgatcatccctgtttcctgtaagagatcaatgacatatttccgctgagtgactgagataccttggctggatcttgcaacttccatccccagaaagtatcttaattggcctagatctttaatctcaaattcgctggagagaagctgcttgagatgagaaatttcttccacgaaattacctgtaaccacaatatcatcgacataaacaatcaatgctgttaattttccaccaactgagtgttttataaacaaagtatgatctgattggcattgggtgtaaccatctcctttcaacacttttgtaaacctgtcaaaccaggctcgaggggattgcttgaggccgtagagagattttttcagtttgcacacttttccttttgagaatcggtcctcaaatcctggaggaatgtccatgtatacttcttccacaaggtcgccgttaagaaacgcattctttacgtcaagttggaataaaggccattcattgttgacagcaatagataaga

SEQ ID NO: 283206 - DNA, 569 bp, Cannabis indica
ttcacaagatctttaaggttttacccaattggttttgagccaatgctagaaattcctgaaacttttcaaacgtttcagatatcttatgcataaggtaaatatgaccatatctagagtaattgtcaatgaaagtgacaaagtactcataaccacctctaactttgacattcagtggtccgcaaagatctgaaacctagtggttccttggcacgctctccctttgcagagaaagaatgttttgtcattttgccttctaggcaagattcacaaactggtaattcacctaaggtgacatttttcactggaccacctttggttaatctgtgaagtctatcatagcctatatcaccaagacggaagtgccatagatatgtttcattttcattatcgatcttttgctttttgtggtttctaggtttagctaccttaaactgttcgttatgaagcgcaaatggttcgtccggtcttagaacgtaaagcccctgttccatagatgcaacataaatttgaatgtcatttcgagaaatggtagaaccagaactcgaaaaaactaatttgtattgttgcaa

SEQ ID NO: 283207 - DNA, 775 bp, Cannabis indica
gtatccttacatgtgacgtaccaaatagtagtaccggacttcctaacggagtagtcaaaccccttcttcattgcatacaagccaacaaccatctttaaatgctctttgtctttaaaaaactttcctacatgtaactccccgcctggtgtgccacccatagatatataatgactatgatcctcgatgtcttctcttgtatacattttctccttgaatttaccataacttgtcgataaagaaaatggatcgctaaattcagtcacattggtccctctagcatcactaggaccactagcatcattggtctctctagcattattaggacctgtactgtcagtggttcctctagtattactggttttgcctggacgactactactagtactaggtgtttggcgattttctctacggggcattcttttctgtgtggtggcgtgggtggtatttggtacgatagtggactcaacttcaaagctacagcagcagggaccttgataccttggtcgtctcttacgtcatcattgccctcaacataacattcagggtctagaccatcaaaaaaaccatcaatgaagggcatttgtgctacaatatcaacactcgacatcatagtgtttaatttaggtaatacatcggcaaccaacacctctagatttatttctggaacaaaactctcaacctcgctacaagtgtccttaacagaacttggtgtgggactaggatcgacatgaacattcttctttaacaaagtcacaaacaagagagtaaaattcat

SEQ ID NO: 283208 - DNA, 374 bp, Cannabis indica
acaattctgccattgcttagtgaaaattcataaactagacatagcctaattttagaattataactgattaatcaaaatcaattaactgagtcatacaagtagtattgtctcaactagtatggggaccatgggcctatatatctgagcttccaataagcagaccaagaacttaccaggtaaattcactgacttattaattccttgttgcatccactcatagaacttggaattgcactctcagttatatagaacgctctatatgttccacgatatagatatgctatcaattatccattgttataatcccaataatcaatgatcctctatagtgatttacattgtatagggattaaattaccgttacacccttcaat

SEQ ID NO: 283209 - DNA, 545 bp, Cannabis indica
gtagtaattatagagcaattttttacaatttttttttttttttggaaatggtactacttacaataaatcattttggttttcggaaaaatatgaatagctagctattagaatgttagactaatttgtcgtattactcttgaaaatttattattgtgccagccttttagtaaaaacaataataaattgtcaaataatttattattttcaaaaaaaaatttaaatttataaatgtagtgtgtattattaagtaatattaaattgataattttagtgttaaatttataaaaaatatttaaattttcaaaatatagaattttattaaataaattgataattctgcttaatagtttcaatatatttctgaattaatggaaaaattaataaaaaaaaataaaaaaaaaaaacaaaaaagttttaacgatatttaagaaatctatatgtaaaagtatagtgacattgatttttcttttttctttcacttagagactaatacattgtaatggttttggttatctaatttgtattaatggaattgaagcttgaga

SEQ ID NO: 283210 - DNA, 503 bp, Cannabis indica
agacgacaatcaaaagctcagtgaactaaagcaagaaattttgaatagtaacgccaaagattatgaaatatcagacacgggattaattcggttcaagggacgaatttatgtgcccgataatgatgagctcaagaaggggatattggtagaagctcatactacaccttattcagttcatcccgggaccactaaaatgtaccatgacctaaaagcattgtattggtggcctggtatgaaaaaggatgtagttgaatttgtggccaaatgcttaacatgtcaacaagttaaagcagagcatcaaagaccagcgggattgttacaaccactgaagctccctgaatggaagtgggaagagatttccatggattttgtgactgggttacctaagactacaaagcaacatgacgccatttgggtagtcgtcgataggtatacaaaatctgcccattttctaccagtacgcatgacttactccatggaccattttgctgaactttatgtga

SEQ ID NO: 283211 - DNA, 722 bp, Cannabis indica
ttaaagtgggcaatgatgttggagttgacgttatctatgttggaacatttattcttgaattacagtctcgtgataagattattctgaacaatactttttatgttcctacttttaaaaggaatttagtttcgcttccgcttttggttaaacaaggatattcttttcattttgcaaatgataatgttgacattatgcttgactctcgaattattggaaattgcttttattctgatggtctttacaagttgtcattggctcctttagattcctcttttaatgttgtgaatactgtgggtaaaagacctcatattaaggaaacatccttattgttatggcacaaaagattgggtcatatttccagagaaagggttgatcgtttaattaaatctgaaatacttcctcctcttgatgcttctgattgggatacttgtgttgattgtactcgtggaaaattgactaaaacaagaaagaagactgcaaaccgcagtcaatctttattggaaattatccacacagacatcagtggtccttattccaccacgttgtgcagaaataagtattttatcacttttatcgatgatttttctcgttatggattcacctatttaattaaagaaaaatctgacgcccttgataaactcaaaatttttcgaaatgaggttgagaaacaattaggaagagtcatcaaagttgttcattctgatcgtggaggagaatattat

SEQ ID NO: 283212 - DNA, 1048 bp, Cannabis indica
ttcttacatccatttgatccacctcaagatcaaatttagcagcctttgacagtatcattcttattgaggcttgcttgacaacaggtgagaagatttcattgaaatctaccccttcttgttgagtgaaacccttagctactaacctagctttaaatttctttgaaccatcattagaatcaccttccttttctctgaaaatccacttgcagccaacaactctctttccagcaggtttcttgaccacaatccaagttctgttctttctaagtgaggtcatttcttcttgaattgcttgtaaccaggccttcccattcttaccatttactgcttcatagaagtttgaaggtactgagctgtcaatttcatcagcaacagtaagtgcaaatgcaataaactcagcatatccaagtctatcaggtggctttatttctcttctctctctgtctctggccaactgatagttgctgagatcctcttggtcatcttctgatctctcttgtctttcttcaatctgatttccttgtgtctgatctgaatcattatctggttccacctcaagctgtaaactgcttgaatttgtgtctgcagcaggagcagtttcagtctgtattgtggttgttttcatggccatctcatcctctctaaacacaacatccctacttatgatacacttcttaaaaccattttcaagacaccatagcttgtatcccttgatcccatcaggatagcctaggaatagacacttgatggctctaggttgaagtttgtcttgcctaatgtgtgcataggctgtgcatccaaatacttttagatgctcatacttaggaatttgaccagtccacatttcttgtggagttttgaagttgattgctgttgagggacacctgttgattaaataacaggctgtctttagtgcttctccccaaaacttcctttccaaaccagcactattcaacatacatcttactctttcaagaagagttctattcatcctttcagccaatccattttgttgtggatttttgacaactgtgttgtgtcttctaat

SEQ ID NO: 283213 - DNA, 625 bp, Cannabis indica
cttccctttttatataaattgggttgaaaaaagggaagctaaaggcctacattgtagtattgctcggaaggaaaaatggcccaactcgctattatgatcactggaaccaagcttctgtcgagacatccctggatacaatgattaaagacgtgtttaaatacacgatcattttgacccagtaaaagcgagctaatcacagctatatgattttcaaatcataaccgcatttacactacgtgatatgtaatcaaaccccatgattttaggggatgatcgttgtaaaaagattacaatcaactttgtaattaactgcacactatgtgattataaatagtggcaagaaagatcagaaaagggacggaaaaactcatacaaaagaggccctgagaaaacaatcaaaaatctgaataagattgactcgtggactacgcagaattttaactgcaaaaccacgtaaaaaaccctgtgttcatacttttattttatagcttttattttttctgtgtgagattgtcacggttaggctcaaatttgattaacaaaaatatgcgttaacagtttgcctctgtgaaaaagctcagaaaaaaccctccttccttctaaaaaaaaaactctctcattcatg

SEQ ID NO: 283214 - DNA, 551 bp, Cannabis indica
caccatttgtagacattatcctggagacatttggagacaaaatatataataaaaataataataagattgtaaataaaaggagatagccaaagtaaatacctaacaaagtcattcatacaaacaatgtcatacaaacaaagtcatgcttacaaacaaagtcattcatatacaaactaaatcattcataaatcccaacaattataaagtgtaggctaaacaaagtaaaaaaaaaaaatcacttcaaatagttcaaccaatcaattcttctatgttctggcatctttagaaacaatgctctagacacttcgctctcaaacttctcaatagcctttgcatatacttctccactgattccatcaatttgattgagagcttcaatacactcctccaataagtgatgttttgtcgatgtcattgaattctcatacatttccatctttcgctttgcggtttcattatacactgtcaatgtttctgccaatgcgagtgaaaactttgctttttttgccgatcgagaactcgtagtggaagttgatttacctcttcttttg

SEQ ID NO: 283215 - DNA, 508 bp, Cannabis indica
ttagaaagttcggtactgatgtttggtacgtcacatgtaaagatacagattgtgggtggagattaagagcgaagaagaacgtactttctaacatgtttgaggtgagtacatttcataatgtacatacatgttcccttgatcttcgaggaaaagataaccgtcaagcatcacctttaatagttgcccatctaattaaggataagttcgcaactgacggctcggatcacttggcctctgatataagaaaaagtatgcacaaggattacgggatccaaatgagttatgaaaaggcatggaggtgcagagagaaggcactacacctagcttagggtacacctgaagattcgtactcgaaattacctagttacttgcacatgctacagctgcggaatccaagttccatcaaggattttgtggtagaagatggtcgcttcaagtattgtttcttctctctgggtccttctattcgggggtttaggttttgtcgacctgttgtatgcgttgatgg

SEQ ID NO: 283216 - DNA, 566 bp, Cannabis indica
ggacgctcaggcggaccgcttgaaggagaaagtcgatgctttggagactgccggcctcgagctcttctttgatttttggaaggctaatccctaggccaactttgactacttaagcgacgccaatgacatgtacctcgagtactgcgcggcccaagttgcctatggtgggaaagaggtggctgcttcaacttctggccaagcttctgaccaggctgctgatgcttctcctgctcgaacaacagatcctcctgctccagtcggcccagaagaaccaaatccagagcctgggactccagctgtttgaacattgatctttttatctctcctgttaatatatatatatatatattatatggccgtaaggcctttaagacatcatgaccggccaagcggtctttaaacttggaattaattttcatttttcggacaacgggctgaccggacagcttttaatcccgatactttatgctcttgctatccttaatgaatttcattctctgtttataattacaatgcaattgtgttggtttttgctaaccacactgttggtttttgctaaccacgtt

SEQ ID NO: 283217 - DNA, 535 bp, Cannabis indica
attgctattgtcacgcctctgttgttactgtgtattttctttgtagaaggccatacgttcttcgtatgatggttgcttagggtataggacagactcttttctttctgttttctttatcgcgtaaagccgtcttctgtgaatttactgcacccgacacttgtccagggaatccctccagggtttcctgtgtgacacgtgtccggagggggcctctttccagcggttaggggacccccattccctttttcttattttagggtttggtatggggcctaactgctggaatcttactctttttacagaatagaaaaatgtctgcttctggctcaaagtcatcaaagaaaagtggtaagcgcatggctacccttgaagaggtctccctgggacccgttgcccaggaggggtataagtcccgggcgaccggatgggaagcggctgagctttattccaccttgacctgtccccaccaattggagaacattgtggaggttgctggaatcaagccttccacctcaggaacctaccaccggccacc

SEQ ID NO: 283218 - DNA, 529 bp, Cannabis indica
agagtctggttgacttttttcccaatttttataagccaaccctattgtctgccgacatctgactcccagagtggatacgagcttcgcgtagctttttccacagtattgacctttatcattaacttcgagggccactcttttgccctgatccattagtttggatatttcattcatttgcgtcggccctcgtgtaggtattgtggttggacactcattttctgctcccgaatcagatcctgattctgagttcgccatgtctacaccatatcaccctcttcagtaccatcgaatgctttcttcttccgtctatcaggatgatttgcaggcaagtaccgtctgtgacccatataacacatcttgtgtccatttgccaagcgacgagccgatgtgttagtgcaacaaatcggacaaccttcgtaaccttttgtgcttaagcctgataaattactataagcagggaaatcactgacagtccacaacaacacagctttcagattaaaaaattcttttttaaaaccatcatagacct

SEQ ID NO: 283219 - DNA, 458 bp, Cannabis indica
aaataaaggagatatttttttgattctaaaagtgttctatcatcttattctacatatgatgatcccactgcctctgttgtcttgacacaactaaagacactacaagaaaacccacttttgccggcgcatttttgcgccggcaaaagtacactactgcgccagcaaagcttatctgggaagcttggtcggtaaaatactttttaccggcgcgtagagtaaatgcgccggtaaaacttccttttaccggcgagaaatcacgccagtgaaaaataagcgccggtgttaaaaaatgcccttatccactataaacttgctttgataaagttttgccggcgcaatagtgcccggcaaaactattggcgccaaccgtcagattcgcgccaatagtttttggccactttttaccagcgcacaaatgcgccggcaaaagtattaatatttatttttaaaaaaaatta

SEQ ID NO: 283220 - DNA, 806 bp, Cannabis indica
ctattttgaatttttcagctaaagtgtaccaatttttagtgttgagatccttaacctgtttcaaaaatccaaaaatttcctaatttggccttttagaattctttcaaatgtcacgctcgatcatttggtcttttaaaagtcggtcgtctgtcatacccatactttttaagtccaaatatgaggatgatgtagaattagttccgcactgttaatgtgtaaaaataaaataccaactacaagatgaataaattatttcttttattaccaattaattttaagatagaattgcatctactaaatcatacaattttaacattctaacaatatatatataaatatttgttttgtatttaataaatttatatgtaaatctcaggtaagggaagtgaggcaagatgtgagcctagtggtgagaatggtttcaacggtgggtaattatgactacattaatgattgggaattcaagcctagtggatccattaaagttggggtacgttccaatacaatggctcttctcattctcttgttgatatatataaatatatatatatatatatatatatatatatttctttttatgaatcagcaaagtttatattcctccaaaacaattacgtacattctaacagcacctcttcaaaatgtctgtattgttttctatatttacaaagattcaaaccaatttaaatgccctgtttaatcttctctttactaataattacattaattctatgtttgtacaatatatttcatgcactgagcgtacacacgagttcactggttatattatactctacatttccaat

SEQ ID NO: 283221 - DNA, 560 bp, Cannabis indica
ttataggttaatggatcgtcatcaataccgtcaccaatgaccatattgatttcaccatccaagccataacgagatggttttgtggaaaccctcccactacgacgaggagccgtgatcttctgaacaggaacattagtggtagatttctcagttgtatcaacttgcaaaggttcaaccgagggagtgggattatcctctacttgagtagaagaggatggaacattagaaggagttatatctgaaagcatttcctccaatactactttgctttgtggcttgaaattcttaatatagtcatcttcaaggaaagtggcgtttgtggaaacaaacactttatcatccttgcgactataaaatagtccacccctagtctctttagaatttccaacaaacatgcaaacttcagttcgcttttcaagtttgccatctttctttcttaagacatgagcagggcacccccagattctgtaatggcgtaaactaggtgtacgaccattccataattctaaaggtgtcttagggactgatttagatggaacaacatttaaaatgtcagttgc

SEQ ID NO: 283222 - DNA, 544 bp, Cannabis indica
tgttagtcaataagggtggttttgaaactcttagactacaccacatcagatttcgaaagttgcctgtgtgctagaaagttgttaggatatttttagtatttaatttaggttaattttagcacatttttcggtttaatttaaattatggttggagcatttttacgcttttatcttttagttttgcagatttaaaatagatgaagagttagaaaatatcagaagaaaaaggataaaatatcgaatgaaaatatcctggtggaaaatatcagaatcaaattcggataaagatagaaacaagtggaagttgggtgcagagatcaacacgggccgcggcatggtattagcatgccacggcccgcctacttggaagaagtccacggaagcaatctaatggccacacgggccgcggcatggacttagcatgccgcggcccgcctctttgtcaacagagagaaatatctggaaaagctggcgtgagatttttccagatatttcaaatccgaatggaatttaaacagtgcggttttccaccttttgagggacc

SEQ ID NO: 283223 - DNA, 989 bp, Cannabis indica
gcacctaccccgttaagtactaccaccaaacttagcaaagacgagtctggtgagtcagttgaccccaccctgtatagaggaatgataggtagtcttctttacttaacagccagtagacctgatatttgctttagtgtagggttgtgtgctcgatatcaagctaatcccaaacagtctcatctgtcagctgttaagcgtatttttaaatacctatctggcacttcagaatttgggttgtggtattccagagataccaacatgtccattgttggatacagtgactctgattgggctgggagtcttgatgataggaaaagtacctcgggagggtgtttttacctgggaaataatcttgtgtcatggttaagcaaaaaacaaaattcaatttccctttctactgcagaagctgagtatatagcagctggtagctgttgtactcaactgatctggcttaataagatggttactgattatggatttccccaaaactccttggtcctttactgtgatagcacaagtgccattaacatttccaaaaacccagttcagcactcacgtaccaaacacatagacatacggtatcattttattcgacatttggttgaatctaaactgctgactattactcatgtgtctacaggtgctcaactagctgatttgttcactaaggctctggatgctcacacctttgcccatcttcgcaactccattggagtgtgcactatctgatcctatgaaagttgcatcttacaagaggcaactgcctttggctgtggtaagttagtcaatattatatgtacaaggagttcatatatagtttggatcattgttgtatgtgattagggatgaatcctcagttaccccagttgaaaaagctacctttcatggatgcaatgggaagagctatccttgtacctttgagtgtctagaaaagtttgctcctttttgagtcactctcagagaaaaatccaaaggatgacggctacatc

SEQ ID NO: 283224 - DNA, 672 bp, Cannabis indica
tatgcaatgttatgcactagacctcacatatgctatgaagtaggaattgtgagcaggtatcagagaaacccaggataggaacattggactgcagttaagcatattctaaaatatttgaaaagtactaggcattatgtgttagtctacaatggtggtgctttaaatctcataggctatatcaactcagatttccaggcttgtcttgatgatagaaagtctacatcaaggatggtttttactcttgggggtggagcagttgtttggagaagcgctaagcaaaccgcaatatcggactctaccatggaggccgagtacatagctgccgttgaggctgctaaggaccttgtttggctaagaatgttcttctcaggactatgtgttgatcttggaatggagaaaccattggttttactttgtgacaacactggtgctatagccaatagtaaagagcctcgaagccataagagaagcaaacacatagagaggaattatcacaacatcagagaatatgtggcaagagaggacgtactggtgacgaaagtggacactgaagacaacttagttgatccattcaccaaagtattgactgcaactacatttgaaaagcacagattgaatttaggattaattgaaatgtactaatagttgttggaatttattttaccaggatct

SEQ ID NO: 283225 - DNA, 606 bp, Cannabis indica
agaatgaccttgactctacgcctaaacgggacaacgctggattcttatcttgatcgaataaaaagttgctagaatgtttatcatttcagatgagttgacaactctattcaatggatgatatctttgactctcgcctaaacgggacactgatatcagtttattgaagaccttggaaattgtttaggattttatattttagtatttttgcttgtcattcctacttgctaaatgcttaataatttctgaattgtgtgtgaatttatattgaaccatgatgttttcttttattaattgtagtttaattttgaatcttcattgttggtctaacttgacttattattttaatgggacaaatcctcataatttgttatccattatacaaacataatagtgttagatctcgatagataaatatttgtaaatgcaacatctagctgttcatcaatagacgacaccttagactagtatttacaatatgaaacaatgaagaaatttataaaaataagaataactttgactctcaataatcgggatatcgttggattcttgtttttaatcgaaattatcctttatttttcctcttagcttattcatttcgaattagct

SEQ ID NO: 283226 - DNA, 143 bp, Cannabis indica
tttggtcagggtgatacgtacattttgggaacacaatagtacaattgagttataagtggccaagtgtattaaggataaaatacattgaaacggtgatacggtaattttgtccttatgcaatgtagatcatctatagaagatca

SEQ ID NO: 283227 - DNA, 502 bp, Cannabis indica
aatcaaaatacaaaccttaacagcaattagtaatgaattaccaacaacaatcaagaacactgattgttaatgcacaatcccttgtgctgcaactgagctcttcttcaacatgtcttcaacctgaaatcccttcagatctgatgatgaagatgacactgaactcccttcagtttgaactcagcaattccagattcagatcattccgccattgatgaacatcctcaagctccaagatctgacctgccatgaaacatacagaagaaacaagacgaaagaaacgtaatcccaaatctccgatcaaaaagttcgtcaacaaaatacccagaaatcgtatttatacccagctaaaccaagaaacccgaaatagacagctgttaccatctgaacaattaaaacctaaaatatctttgctgacgtggactaacactaacagtacgaaccccagacaaaacactacgagtcccagacgcaactggaatgctactggacataatttgtcact

SEQ ID NO: 283228 - DNA, 590 bp, Cannabis indica
gttataaattggagtcatacgcctatggagcttttttgggattagtttagccacattctgctacaacactcatccacggcccaggaagaattgctcatggttctttgggcgatttggtatgcccgaaatgaggtagtttggcgggacaaatcaatgtcagcggcggaggttattctattggcaagagtagtccttaatcaatggagaaatgctcaacaaaggagaatggggtctttacttgttcctacgggttcaagaatggacttagagcattgggtgaaaccggttatgggaaagattaaggttaatgtcgatggtgcaatctttgcaagtgatggtcgatttggagcggcaggggtggcccgggattctcaaggtcgattcattgaaggcttcacagttttacgagtggggtgtgtggattcggctatggctgaattggtaagggttaaggaggctttgagttggataaagaggaaacaatgaggaccggttgaggttgaaaccgattctttggttgttgtccaggcagtccaaagcacggtggatatcccttctccttttggccttcaggtggtggtttgtcgttc

SEQ ID NO: 283229 - DNA, 854 bp, Cannabis indica
tatcataaactcaaggtgatgatgaagaagtctatgctgaagggtcttcctcaactcgaggtcagaacagagactgtatgtgctggctgccaatacggtaaggcgcatcaattaccgtatgaagattcaaagttcaaagctaaagcaccattggagctggtccattctgacgtgtttgggcgagtcaaacaaccatcaatcagcggtatgcgatacatggttacattcatcgacgacttctcaaggtacgtatgggttttctttatgaaagaaaaatccgaaactttttcaaaatttaaagagtttaaagaaatagtagaaggagaagtcggcaagaaaatccaatgcctccgaacagacaacggtggcgaatatacctcagatgaattttctgagtatcttcgagaatgccgcatacgccatcaattcacatgtgcaaatacgccacaacagaatggagtagccgagaggaagaatcgccatcttgcagaaacatgtcgaagcatgctacatgcaaagaatgttccagggagattttgggctgaaggtatgaagacagccgctcatgtaatcaataggcttccccaggctaagttagggttcgtttcaccctttgaaaaactgtggggttgtaaacctgcagtaagtcactttcgagtatttggttgtgtgtgctacgtattcgtgccaagccacctacgtagcaaatttgacaagaaggcgatacgatgtatctttgtgggatacgacagccaacggaaagggtggagatgttgcgaccctacaactggaaagtgttatacatcaaggaatgtggtctttgatgagacatcatcatggtggtcatcgcaaaa

SEQ ID NO: 283230 - DNA, 599 bp, Cannabis indica
gagttcaagcaagccagcaatcgtctgtaagcacttcggtaactttgaagccataaaactctctattttcgctctggagtttacttaacaacgaagggtgataaaatgagtaatgtgccagtactccgagtatttataggcaaaccaaagggtaaatgcatacaaaggaaccttagacgcctcgactccccgcttcaaaagtgaatatgggaaatcaaaagtaatcgagtgcaaccgtcaaccatggagagagaaatttggattttcaaaatattaattatctgagtattaattagccgaaaaccgaaaggacgcccaatcagcttcacatcgagtctcgaacggtcatgctcaacacgtgtccccatccaatggcagagccagttcgaaataagtctacacgcaacctcggaggtcccgtacagaattggggggcaaatgttatcccgaaattgacactctgacgtggcatcccgagaatggtgacacgtggactccacttggagcatctgttcggaacgatatgccgagcaggatgccttgttggcacatctagaatggaatactcaatgagctgtgccgaatgatcaacacttagc

SEQ ID NO: 283231 - DNA, 708 bp, Cannabis indica
aactgtgaaaaatagatgcaccttaaatttatactatcagttcattaatttggacggttatactgtcaaaatttatgcttagagcagctccaaggagacagcaaataagaggtatggcatgtatatatatgttccaaggaggctgcatatcatgcagctagttttgtaggtttatctactgtagtcacgtactatttcctttttttttaatttttttttataattttaattaatattttatattattatattttgtaaaatttaagaatttatttttttggaaaatttttttaatgcacatttttaaaagtgatttacgaatctactcctattcatttcagcacccgactaaacttttttagtctatttatttatacagttgtgcatattataattatttaagacaaactgtaaaatttaaaaaaatttagaaaaatttaatacgccgaaaataatgcacttctttaaaagtggtgcactaatttactcctacctgtttcggcattcaggagacttgtttagtcttttttttttatggtcgtgtacattatagttatttaaaacatcctgcaaaattttgaaaaatttaaaaaaatttaacatgccgaaaataaaattcaaactttctgtcgcgtaactcttttatttagaaggatacattataaaagcaccttataatatttttttttgtgtaaatttaaatgtgaa

SEQ ID NO: 283232 - DNA, 527 bp, Cannabis indica
ttttggatgatcagactggaaatgaacggtggtgattttcttgaaaattctagaccaacgaaaaagaaaaggtcaaattttgttgattgttatttcccctaaatttggattttttttttcgcaaaagcttttttttttttttggttgaagatgtttaatttgcttaattactgtatatatgtcatttaattcgataaattaccaacttaaacctaatcttaactaaatgtttttttttttttaaaaaaaaaaaccccaatttttggtgaattttgctgagtctctttctgctatcaacttttattgaattgcattctgtcacacgcgaaagacccatcatgaataatggaggaatgctttaagcactacaaatgattgtctttccggcaaaatcttctcaactttcgttttatttgtattaatttggtaagtttaaattttaagagtaaaagtctaaattactgaaagtaaatttaaggttttattcagttaacagtagatattattatacacatattatgtttata

SEQ ID NO: 283233 - DNA, 672 bp, Cannabis indica
aagcatcaagctttgagttccaaactcaaacttgattaaacacctaacatgcaccaaaccttgattaaaattacaattcatgcatattaaaactgcagaaacagaactcaaacacaatcaaactttacagcagctattttcacattttcactttgaaaaaccatagttttgagtattaaattccaagcttgaatcaaagaaactaacatgcatcaaactagctctaatctactcaactaatgcttaagcctctacaaacaacaacaaaatcacagcaacaacatcaacctaaactaagcatgcaaaccatcattttcttccaaaaattccaagaaacaaagaaaggaagctaggacaaggtttacctctactagaattactttgaacttgctgaaaatcacttgaataaagcaaagaaacccagccctagcagctcccaagcttggccgaaagaaagagagagaaagagcttttgaaatttctaatttttctaagttttccaattttgaataaaaatgaaagaaaaggcataatgtaactctttatttcagccaaaaagatgccacctaatcacatatcacattacactaagtccactaaaggacaaaacataaatggggcaaaatgaccattttgcccctccacacttaaaataacataaagggcactaaa

SEQ ID NO: 283234 - DNA, 834 bp, Cannabis indica
tcgtggtgcgcctaggccacgagtctcaacacgagatgacacgggtagtcattcgtggactagcttgcatacacgcatgggacggatgcaccatgttggaaaaggacagaggtcgaatgtatgcaactagtttggtggcttgtcttgagggcctgccaacatgcgtggaggcatggcgccttgaggattggtccatggacgtatgggagtccttgggcgacgagggagactattcggacagtatcgaatggggcatgatagaggcgttggcacgttggcttggtgttggcatcttgccacacatgctaccttggtcacgagtgacaaggtgagcgtcggtgttgggatttgtcttaccatggtgggaacctatggacagtgcgagtatcttggctagagagcctcgatgcatgaatgcactcatggatgcttgcgagcatgactcggcgggagttgttcgagagacggaagtgtgcacgaggcacacggtcgcgcgaaaaatgagcccattgttactcggatggttggaaggctgaccttggcttagagaagtcaaggtgccgcacgggtgttccgctgcctgaaaaggtgagcccgtgacagttggtatcagagccaagttcatctcagtgggaggtgaacctggttggcctatcctagagaggatgtaggcgtgtggacggatcgagatggtccgaatgttggaacaagacgtcgttgagccagttagtcttttaaagaggatcagtaggctgagatggagttaagactgggttgcttctctcatgggaatactggacatcctaaagaggagacattgatggttgcttcgag

SEQ ID NO: 283235 - DNA, 651 bp, Cannabis indica
aggaggcgcttttgttgaaaaggaagcttgttggcaggagtgtggaagtagtgcagggaccgtcagattcttgttagtcacgacagaggtcgagagttgatgaccgagatggttcagtttgggatagacatgggatgcttcagttgctacgttgtgtgtcaagagggacgcacatggagaccaagggggcaggtgtcgcaatcgccagaggatgattgtacttagaagggttcgcatgtgagtttgatttgatccatatggaagcgccgaggcagttgagtggaatgtgttggcttgacaaatcgccagagggcgtaagtcacacaaagatatcgatagagaggtgtagttgtggaatgaaggcatcaaagaagccagcagggctgagaagaccgagcgcaagcattgagatggcgctagagtttgtgtggaggccagagggccgtgccagtgagacttagtagtcatgttggcctgcgaaggtcgagaagggtgctagagtttgcatgaaggccagagggctgcgtcattggaacttagtacaccgtgggagccagaagggcgtgatgcaagtgtgaatcagttggatggttgagtgggaagtcagtgcatgcatgtggaaatcgacaggggtgctaatgagatagttga

SEQ ID NO: 283236 - DNA, 518 bp, Cannabis indica
caatgccaaacttccaatacccaagcctccctcttcccgtttcctacatacattcccatgagactaagtgttctccacccgaagactcgctaccttcccagaaaaaatctctcatcgtcttctttaataattttattacgccctttggagctttgaataaagataagaaataaattgggagagaggataacacagactaaataaatgtcaacctacctccacccatctaatctcgtagcacacttatccaagattggtccccaaaagcaccacttcctaggcgatctaccaaatagcgataagtgtataatctcttaaaaaaaatctcttcaaccacatcgtcttcttcatcgataaacgatccatcccccctttcaattcatgaaattgttattctttcctttctcgcattcaacatgtcatgaaaaaatctcgagttagcatcaccctctttggcccacttgttattagctttcaagcatacacttctttcttcagcaaaagctaaattttgccat

SEQ ID NO: 283237 - DNA, 160 bp, Cannabis indica
ttactagattacatatcaaaatttttaggttttagggtcttagtaagggatagtaatcctaagatgatgatgaagtaaaatacaagagttaagttgctactagccaaagggtggaccctttggctagttatagtattttatatggggatcttaatttttc

SEQ ID NO: 283238 - DNA, 1205 bp, Cannabis indica
cccctcaaagctcattaaatgtgatcgagaatcttgggctgcataagagcaagaagagtaaatactcaccaagaacattctctgtatttataagagtgaaacactcacaaaatacattctctgtattaaatacatccataaatgcgatagactcgtggactaaggctcattaacgccccaaccacgtaaaaatccttctctaattttcttacagctctataaacttataatattttattagttgccgaaaacctcggtcaacactttaaaatactaaactataccactctcacatttttgtcaatccatcgagctttcactgttaccgatcataaacataagaaaatacatacgacacatatataattccataaaatttctatagttgagtaatattatcatattttgtaatttttctaataataaacttttatttctaacatgcacatattatactataatttatcagaatatcaattaattattaatttcttcatatctaattatgtattcattataaggatattcaatatgtagaaacatctaataaagataccacattcccactagcaatactctaataataaaactatgtaaagtaaatatcaaagagtgtctatcgcataaagctttggttacaaccaaatttagcagtaaaaaagagtcttgaaggtaggagtatgtaacatctcaaccaatctaaattatatcgaatcaatttaatccaatttaattacaaaaatttggatattcaataatatttctattagattagttgtgaatagttggattttaattagactggatcgattattagatgaaaatttcaaaatttaattaaaaactaatccaatctaactctacataatatatattaaaagcatattatatttatttatatacaataaggcaatatttaaatttacttttactaattatttttattaatttttataaatctcattgcacctaattaaaaaatccttacaaaaaaccttaagaacacatgtatagtttagtttttatgtgttttttttaattttttttcgttattattaaaaattaagtgtcaaattaaaatacaattaaaaaattgatctaatccaattattaattgtattggattttgaagtctaactgaatcggatcacatgatgattttctaaatccaatttctaattggattagattggattaaatggaat

SEQ ID NO: 283239 - DNA, 591 bp, Cannabis indica
ttaaataaattaatataaagtataggcaaatgattagcttatgatcaagtcaattttgtaagccaactatatagatatgtgatatacgtataatgaatttgaaatagcgaattgcagaaaaaaaaaaattatctatatactatttttttttttttaatttaaaatttagattgctaattattatagaaatttttatgtaaaattttgtaaaagtaaaaaaaaataatattttaaaatataaaaataaaaaaaacctaaaaaaaataataattgaactagcgagattatcttacttgttctgatatatgtaataatgttttttattttttattttttttgaaaattttaatgttatttataagtagtaaacattaatcattatgggtaaaaaaacgtgacctaaccacaaatagaaagctacattgaagttgtagaattaactatatataattaatgaacactgtagttggataatattatataagctccacgaccgtcccatgtatgcttatcttgttaacaagaataattaagataatcatcgtgtagcttccacttcttattttctttaagaaaatagaaataataatt

SEQ ID NO: 283240 - DNA, 548 bp, Cannabis indica
cattcgaggcatgcgcctgatgttgaggtcgaggagacagatgacgactggacgaccccagctctcaaatcaggcgatgaagaggaagaggcagaagggagcggtactgactcggtcgatgacacccagctgaacgagcctttctcgtgcgaggatttggtttcgagggttaccaaatccgaccttaccacctttacgaggctgaacctactacgacttgcgtctttacgtcctaaaccaactcagagggcgcaccttccttttacaaatcctacgattatccccacaaaggatgtggtaatctcaatacccattctccgatgtggggtatcagtccctttccatccctttatcgcggctatcctcaaacgatatgatgtatcacctttccagctaactcccaatagttatcacaccaccctggctttttacgcgatgtatatggagtacgttcatagggctccctcagtagaagagttcagctacttctacgacataaaaagcgtaggccttcacaatggtttctactgctttagcaaatgggcgac

SEQ ID NO: 283241 - DNA, 250 bp, Cannabis indica
tgggacgaaatatagaggtttatgtagatgacacgctcgtcaagtccaaagcatgcaatagccatgcaaacgacttagaggaatgtttcgaagtagtccagagatacggcatgaagctcaacccaaagaaatgcacctttggggtcaagtcaggaaagttcctgggcttcatcgtcagccagagggggattgaggcaaacccggaaaaaatccaggctctcttgagcatgccatcccccaaaaagcacaa

SEQ ID NO: 283242 - DNA, 758 bp, Cannabis indica
tgattggtggagactgttgtgatggtacagggctatcagtagccttctattctgttgatgttgggattggcactggttgaactttaatctcctcatctactggttgtgtcaattcaggcccatcatatttcttaccgctcctcagggtaattgccttgcagttttccttgggattgagttcagttgtgctaggcaaatttccttgaggacgggttgctacctgagttgctagttgccccatttgagtctgcaagtctttaatggaagatctagtttcagtcatgaattgtaacaataaatgtgtttgcaaactagagtttccaccagaggcttgttgctgagtatactgttggttctgtgtctggttctgatttctttgctgatagaacccactgtttcttcggttgcctccttggttgaagccatagttgttgttgttgttctgagaataatttccaatggcttttgcttcatccattggcaaatcatccacatctgtttgacactcagaaaagtgatggggacctccacatatctcacaaaccacttgagcttgtttggcttgccctgcaattagctttgttagggcctccacctgagctgtcagctttataatggcatcaacctctagcacaccagctaccttcttagtttgactcctttagttggccactgctgattgtttagagccatctcctccaacagatcataagcctcatttggactttttctcatcaatgctccaccagctgctgcat

SEQ ID NO: 283243 - DNA, 603 bp, Cannabis indica
aacataaccatacattattgcttccttacctttataatattgtagagtaataaccctagaccacattaaaattaactcaagatactagtttactgagtctagcttaatcatgccttagacgcataattctttattccaacatatttatcacggtataacattcaacatcttttaactactagggtaataaccctagaccaaacaactgcttattttagggtaataaccctaatcccggttcttaattaatcacaatcacaatatccaatatgagcgccactgcgcttaactctatgtgcatactattgtcctacctgatgtcccgcaaacatggagattccaaatccctgggtgctcctgaccaagtgctggtaatcctagtcacaaattctgggattcacacatatagggttaatccctaattccacatgtacaaaatatatacttggcattcaaaatataaatattccagtagagctcgaaacgagctttccaacggcatatagaactcccaaatcggagtccgggtcacaaagttatggccatttaaagtttgcattaggatctgtccagaaagaaaagggcgcgcgcggcgctgctaaa

SEQ ID NO: 283244 - DNA, 469 bp, Cannabis indica
ttaggtttttctatgtaagtggaataggaatatttcatttaccttgcataacttataaaattaatgtttgaatagtgttttacttgctggtttgatataggaatatattgagctaagcggtagacttaaattattgagtgttgggaaattctcacaagcctagaggaatttttgttatctctgtgcagaatgctggagtaatgctgaaccaatgttttaacacctggaaaaaaacctgactacaaggaattagctattcaagccatttttgccatattacatttttcatcttgcaaataatttttctagcagcagtagtattaattttagcaagtttaattcatgtcatttttaattttgaatcattacttaaccatttgcatgttatttcctcttgctttaagttgtaattagttggttttacatcaaactttgtttgcaatccctatggagacaatcttacttatca

SEQ ID NO: 283245 - DNA, 525 bp, Cannabis indica
caaccggaaggccggttccagggaccaaccggtcgaccggttgccacaggctcccaggaaccggaattccggttctgaactgggaaccaaaaatccgacccccacacctcaatttaatcccaaactttacaataacttccagaatacctgtacacactaatataaatcaatcccaagcaaaaagattcaataatatacccaaaatccatacatgccattagagctccaacttgagctcttaactccaaatgactcaaatatcaaaataaacccttagcttatcacaaaccagcagtaatcaacacaatctaacttcagaatacacattcaaatcatccttaaacaaacagccaccaaaacccccaattcaataaacaacttcaacctagtcttaagaaaaacaataagagaaagctaagaaggattaccttagattggaacctttagaactcaactagaattcttgatagcaaactgaaaattcacagcccttgctgcctaggaaaatcgagagagagagagaga

SEQ ID NO: 283246 - DNA, 707 bp, Cannabis indica
aagtgtaaaaggagagagtgagatacacatgtgaataggataggagagtgagactcacacgcgagtggggagagtaaaattttttactgacgcgcgtcagaatgtggcagtgactctgcggctgccacatggcagtttagacaaagtgagcttgggcgtgtagggttttcttttctcaatgcaacagttatgcgaaaacaactaattaacaacacaaaaacaacttaacaacaatcaaacttcaaaagaaatttattaaatattaacatattgcattaacacaattaaaatttagacaacaacaccgtacaagaactactaattgaacatataaaaaatatttacaaatttaatacaataaatataaaaaaaaaattagaaacacataaactaaaaaaataataattttttttttaaaaaaattaaaagtgattaataaaaaaatatgctcaattagaaatcaagtagacaataatatcaaacattgatatatataatttaaacataattaactcaaaatatatctatgaaaaattatacttaagataataatcaattaaaatataaaataaaaattaatttgatatttgtttactataataccattcaaaaactataaagtacctaaaaataaaccaaaaacaatattaaaatatgtacatataaaaactaacatatatatatatatacatatgtatttatttttt

SEQ ID NO: 283247 - DNA, 681 bp, Cannabis indica
taacagatgagcatgaacgttcaataccagggtacaaccactataccacatacacaacgtacctcgctgtacgagtgttggtagggtttatcccgatcactgagtatcactgagtgatgtaccacacaccttagcattttctatgcttgtgttggtatcactgtatcgtactcaaattaacaacaatcactgtaccaatacactcacacaagtgttggtagtgtttaacataattcaagcatgcatatataaacacatatacacacattcagataatcacatcatacattatacacagttcttacctgttttccgaattcaagtgtgctggccgacctgaacggaattcacgtgctagatggatgccctaatcacaataacggtaacacagatgagtgactcgccaaatcactttccgggacttaaaacccgaaactaaatgtttccctatcaataaacctcatggcaataccctatataacccaaaattggccaaaactagggttctggaaaaacccccaacaggcagaccggatccaaccggtatcccggttctgggtcaccaaccggtcgaccggttggtatagaccacccagaaccggaattccggttcatctgcagaaacccaaaaattttctcccccttgattcaaatcaagcccaatctttaccaaactctcca

SEQ ID NO: 283248 - DNA, 592 bp, Cannabis indica
aacaatcacaacactgataagtgctgcgctaaatcacctcccgggcacttaaactagaaattaaaagtttccctatcgataaaaagcatggcaataccctaaataacataaaaacgagaaaaactagggttcctaaaaatttcccaaccggaattccagttctgggaattcctgaaccccatccggaattccggttgcacatccggaattccggttcctcgcaggaatcaatcaaaattccacaactcattcaaatcaaacccaaaccacaccaaaacttccagacctgttctaaatacccctctaaacatttctaaagcatcaacacagcccagaaagcacagaatcaaaaatcaccatgtgagctccaagctttgagttcaaaactcaaacttggctaaagctcacctacaagcctcaaaactagatttaaactacataatcatgcataataaaactgcagaaatcattctcaaactcatgcaacaaacacagcaaccaatttcacattttctctttgaaaactataatttttgagttaaaaagatccaaacctactcaaatccaattagttcaagcatataaaatcaca

SEQ ID NO: 283249 - DNA, 519 bp, Cannabis indica
cttgtttttcggtagcccatcacgaaagaactccacagttaagcgtgcttgacctggagtaatttcaggatgggtgacctcctgagaaacacgctggaaacactcgtgttggtttgtagggtcagtcgtcaatccaggaagcagccagagtggcatactcgtgtataagagctgtaggattttactattttagccctacaccaacaaagactttgagaacttgctcgattctagatctgaaacccagatccacacccacacacaaacatagcttagattagatgagtggaaaaatgaaaaacaaggagagaaaacaccagaatttgtttcagagttcacccaaatctgggctacgtctctgtcaagctcttctcagagatagaagcttgatatccactatcacaaggttgatttacaaactttggagcttcctgtcacagaaatcgaccaggtaaactcgatttcttcctttacactttatgttttgttgttttcgttctatttgttctcgatctaact

SEQ ID NO: 283250 - DNA, 669 bp, Cannabis indica
acaacactatacaacattaaaaaaaaaaaaaacaaataacaacggtaaaaagcagtaaataacaacatataatacttagttaataaacttacgtcatcagaaagccatagtttgtctgtatttagggtcgagaaccaagccacgccacacagaccggtgaagacgtccctcggatacttgtttccgatggttcccactaaccaatttcgaaaactatgtagtagcttctcatcaacgggccgaagtgggtcaacattcacattggttgttgatggcttcatcttcttcttcatttcggtgtactcgtcaaaccaccttggccttttcttcgttctcttctccaccggtgttggaacggtctctaaaacctgaacctctgaatcttgggtatctccaatggacgtgaccgacatgttctgaggtgtctggagtacatcttccacatcattaggtctgtaatcattcggaagaatgaactcatctcctggagacacggcgtctggctgtggctctgcctctgcgctgggccttctctgatctcccataagagccaatagggtcttcaagtaacccattatctcattctgccctttcaaaatatcagtctggccttgcttcaaagaagctgttccttttcaacacgctccaatcttgccaatatggcagaag

SEQ ID NO: 283251 - DNA, 881 bp, Cannabis indica
ttgggtccagggctgggtcccaatccagacaacgactacgggttttgtccaagccctgggtccagattcggatcccaatctcgagccccagtctggtttcatttctggtgccgtgtcacgagctgggtccttggttcaagttcgggtctgtgtcgggtactacgtcccggtcctagttctgtttcccaggtccgtatccttattctcggtccaggtcccggttattgtgtgggtttgggtcccggtctaggttcgggttcgattcctagtctcggtttgggtttcggtctctgtctcgattttgatctgggttcgggtttgggtttaggtcctagtcctggtcctagtcctagttcgatcctagttccatttgcgattctgagttcgagtttgggtttgagtttgggtcggagttcgagtcttggtctgtgtttgggttcgggtccagattaactctaggtccaaatcaggctccgggtgtgggttcgcatcctcagccttggtctaggttcggtgcgagtcctaagttccaatcccgatctgagtctagatttagttctgggtctaagtccttggttctgatcctcgtttgggtttgagtttgggtctgggtctgggtctagctttgggtctgattttagttgtgggtttgagttcgggtccgagtctatgccgtgtttgtgtgcaggtgtggaacctagtctgggtctaggttcgggtcaagttccaagttggggtccctagtgcaggtccaagtttaggtctggctgaggatctcgatccaaatctaggtccagcttatcgatcccagtcttggtcttggtctgagtccaggttcttatccagatccctatctaggtccaagtttgtgtttgggatcg

SEQ ID NO: 283252 - DNA, 545 bp, Cannabis indica
aaatatatctagcactataaaaggaatttatgtatagcatttaaatcatacaaatcaaaattaattgtattaaaaaataaatttaccaaataaatacaaattaaaacaattattgtatgataataaattaaatgcttaattccatgatatgtaattaattatgcatttatgaccatataatatcttaaatatttgtactaataattaatttgtataataaggtaaatatacaaattagtacaattaattatatgaatgaattaaatgcaaaattaaagaatatacttaatggcagatttttcaaattttattaatttaaacaataaattacataaatttggtaataaataattaaatgcacaattatacaaattgcacaattattacatgcctaaataaatcatgtaattaattaccaaattaaaacaaatttccattttcaatttatactagatatatgtattaaacaaaaatggaaaattaactaaatgcaatttattgaataaattaacacaaaaataggaaataattaatattccaaataa

SEQ ID NO: 283253 - DNA, 600 bp, Cannabis indica
aaaccgaagggacgcccagtcagcctcacatcgagtctcagacggtcgcgctcgacacgtgtccccatctaaaagcagaagcagctcggataaaatctacacacaacttcggaagtcccgtacagacttggggggcaaatgttatcccaatttttacactctgacgtggcatcacatgaatggtgacacgtggaatccacttgaaacatctgctcgggaagcatagtccgagtaggatgcctcgttggcatgctcagagcaaggtattcagtaatccgcgcagagcaaccaacacttagcaaattcaactttcacatcatgagtcatcaacacaatccctataactcagggatcaatttacgtggatatggcatacacacgatcccgttatcagtgtattcagcctcaatcccacgatccttacattcagcattgatcccacgatctttctgtttatatgcattgtaacgagaggggaaactcttcctccccaagcttactagccctataaatagtgatatatattcactaggcaaaggatcggtcgaaaagcagttgagctaagactataccttaaatatatctaagaattatatattc

SEQ ID NO: 283254 - DNA, 371 bp, Cannabis indica
agggtgctcctgcagtgccggtgccagaagttccagtggcacccgcccctgctgctcaggccgaattagttgtggcggccaacagattggaacctttgtatgaacggttccggaagcaagcacctccggtctttctgggaggtccagatgtggcgaaggccgaacagtggctaacggtgatcaccaaaattttgaattttatgggtgtcaccgggaacgacagagtggtgtgtgccaccttccagtttcaagaagacgctctggtctggtgggacatggtgtctcagatccatgacgtcatcactatgacctgggaaaggttccaggaactcttcagcgctaaatattataacgaggcagtcagaagcgcc

SEQ ID NO: 283255 - DNA, 580 bp, Cannabis indica
tattcaaaatgcaagaataccatcagagtgaatgacgggccaaggttgcatactatatttgatatggactatatgaatcagatgtgtaatcatgtttatcaatgacatcttggtgtattctgaattagaagaaaggcatgaattgcatttcagagcggttttgcaaaggttacgcgatcacaagctttatactaaattcaaaaaagtgtgaattctagttatctcgtgtctcatttttggagcacatagtggataaagacgggatcatggtggatccggccaaaattgaagctgttcgagattagccagcaccgaaatcagctatagaggttagaagttttctgggtttggttggttattatcgtcggttcgttgaggattttttcaaagattgttgtacccttaacggagctgacccgcaagaaccagaagtttgtttggactgatcggtgtgagaaaagtttcctgaagttaaagcaacgcttgattactgctcccgtactaactcttccttcagataaggaaaagtttaaggtatattgtgatgccttgagacagggtctcggctgtgtgcttatgc

SEQ ID NO: 283256 - DNA, 534 bp, Cannabis indica
ataatatggatgagtgcaagaagaatggaccaaaagcttagaatggaccaaaagcttgggttaaaaaaaattaaaggaagaaaaagctgctggtgagttaaagcaggtgaaagagatctcagtttcaataggggactcgattgtagttatggttggagtggataaaaaagatgatttaggaatagagagccatcatgtgcataattttgtaagttttgggttcaaaaaattgtatccggacttaacctgtgaaatggtttgggttcgcgagtttcgggctcacgagtttgcgagtttggtttgaccggattggccaggttaatgggttgacccggtcaacacgttcaatttttttttttaaaaaaaaatcaaattttatatgattttttttatatattaaattaaatatataagttatgaacttataccaccataatttatattaattagattaaaataaaataaaaaatacattaatctatatagccaccaacttcaaaatttgtgttttttttatgtaaatatatatatata

SEQ ID NO: 283257 - DNA, 829 bp, Cannabis indica
gatctagaagaaataattctagccataaagtgtaaggggtgagcaactataaataccccatcaaacttccaaattgtaaccaagcttgagtagccaaagcaagtcttttactactagcctactaccttgtctcctctcttactacacacataaaaattaaaacactacataactcttccttgtcccaccaatcatccaacttatcaacttatcaacatcatcatactacactacctaatatccatcccatacaaatctaaaccaatacaaatttattctcaaaccatcagtggtatcagagctccgttcgatcatatatcactgggcgtaatcttttccactcatcaacatgagttcggagtacaatcgctcttcactacctcttccaattttccatggagaaaactatgatttttggtccatcaaaatgaggacctattttcgatcacaaaatctatggaaaattgttgaagaaggaatcactattccggaagatattacatctctttcggaagatcaaaagaaggcactcgaggataatcaacaaaaggattctcatgcattatactgcttgcaacaagctatggcggacaatctttttccacgaattatgagcgcagcaacggcaaaagaagcatgggacacgctgcaggaggagttccaaggaacagtcaaggtacgcacagttagactacaaaagcttagaagagattttgagaatcttagaatgaaagataatgagactgcaaaagattactattctagaattaaagaaatagtaaatcaaatgggagcctatggagaaataatttctgacaagaatatagta

SEQ ID NO: 283258 - DNA, 525 bp, Cannabis indica
gatttcattcaatactaaaggtgaattttctgtgcataatatttggctatatataatagtataactatgtcattactactctaattttaattaatatgctcgatattaaatgtttggctcttccttttcatatatatataatggttttggttgatattcttaaatatcccaacgacccatattactatatcacgttttctctattattattacatttaataaaactttagaagcctcattttcagttgtactatttcacgtctgttttttttaaaacgaaaaattagtatgaaagatgatcatgaatgattcacgacggttagactttcatccaatcagatttcagaacgggacctttataacttgttatgatccaatccaattaatgcttggctgtactatatactatacaacctctatccaagaatagtaaattatattctaattggaaagttataattaaatagaattacactagaaaaaaaattaaaaaactaaaaaatattaatgtaacaataaataatc

SEQ ID NO: 283259 - DNA, 106 bp, Cannabis indica
gatgcagaaatgataaaactgcaaaattacaaaaagtgaggcccaaatccataatgccatggccggccacttttataagatttatcatatgatattttcattattt

SEQ ID NO: 283260 - DNA, 870 bp, Cannabis indica
tgtgtacaactgcgaagttgcgagaacaccagctgattccagagaacgcaagccttcaaagagagccagtatacaaagaaccatctgagaggcaacaagagcggatagacaaacgcctctccaagcaaacttctcgaccaatctcaggtaatttatctcttgttataaactaatatcttgagttttatttatacttatctttcatttatcctcgcagatatgacttttttgaagtctgcgcctgtccttaagatcaagccgaagggtggagcaacgacgacctcgcccgttgtcgcccagaagaggaagagcgatgtggtggctacccttgccgcagactcttccaagaagctggccaagaccacgcaggacaaggggaagaaagtcctgatcgacccaactgttcgagctcacaacttcttggccatgcaggagaagttcctggccgagatcccttctgaggagcttgttacgcgctctgtggagttggcctcgcagtcgatgaccctgttcataaaagctgctgccgcaggttcgaaggaagccgactcgctgaagaggcacaatgcccagcttcaggagaacatgaaaaggctgaagcaagaggcagctaggaaggataaagagcttgaagaactttgcaaagctaaggagcaggcggagctcaaggtcaggaactcgccgacgaagatcgaggagatgactcgggatttggaggctgagaaagagaatgggaagaaacaatatgatcaggcagtgtctgattacatttacaccactctttccaaagttccagacttcgacttctcgatcctcggagcaaaagccgctgagatggccgaggcttttcgtgctatgtcgcctactcag

SEQ ID NO: 283261 - DNA, 98 bp, Cannabis indica
ttatgtacatataaccatgaaataaatcatgtgaaccatgcaacattaaatgttgggcataaaacccaacaattatgccctagatttacaggaccttt

SEQ ID NO: 283262 - DNA, 711 bp, Cannabis indica
ccatgcttcctgggtaactatcgtgcaaccatcgtgcaactacgcagcaatccaacgcaactgaaacgaaaattcaatgagaaagagaactaccattaattccgacgacttcacctgagaagacgaccagaatcaataaaaacaggggctgcttcgaattcataaaaaaggtgtagaaaaactactaagaaactaaaattcaactggaaatccaatttaatttgcataaaactaatgtcctgacttcaatttttagatccatgaaaggcagatctcaaaaagttgaactggagttcccaaacaatccaaaaaaaaattaacatcaatactatagtaaaatatttatcctggtgtatttttgttgttttctaaatttctaatggtgaatttattcatattaaattattaagagacatgtagacagagttacgtacgtggaaacactgttttgattttttaatgttttcactaacagttgcattacagttgcctaaacattttgctaacagttattttacaaccattgtctgattcgtttgatgcaaccaccgtgcaaccacgcagcaaccaccttgcaaccatcgtctgattgtgtaagtgataatagtctaagtggtattttagtaattaaaaatcacataaaaggtataaatattgtctttaccttatggaggtatttttgtaaataaaatgtcaatttatattttctat

SEQ ID NO: 283263 - DNA, 786 bp, Cannabis indica
tgtttaatatgttatttgtttggctgaagtaaaaagagttatatggcttttattctcatttttccaaacttagaaagaaaaaattagaaaatttctcaaaagctctctctcttttcctctccttttcggcctcttggagcagcaaggaactttggatttttccttgtgatttcaattctctttggtgttcaaatcaagctgggttagcttctaatcatttcttcttaaagtttgttgaattttgatgaaaaatggtgtaatgcatgcttagtttaggttgttgttgttgttgttgctgtgatttttgttgttgtttgctgagatttatgcatgtttatttgagttgaattgagctgctagtaatgcatgataattgctttaatttcaagattgaaagttttagctcaaagtttagttttcaaggggaaatttcgaaatctgttgctgtgattattgcatgagttagagtttgttttctgcagtgtttttatgcatgattatgtagttttaatctagttttgaggcttgtaggtgagctttagccaagtttgagtttgaactcaaagcttggagctcacatggtaatttttaattctgtgctttctggactattttgatgctttagaattgttctttagggtctagatagcaagtctggaagttttggtattgtttggtttggattttagctttgtgtgaatttttgaaaaattcctgcgaggaaccggaattccggttgtgcatccagaattccagatgggttttgaaaatttccagaaccggaat

SEQ ID NO: 283264 - DNA, 701 bp, Cannabis indica
caaaccctagcttgggtttttatcaattccgaatcttgcttttgtgcttctttaattctctctagaagagtggattgcagagtaatattagccaattgccctacaaccaactcaatctgagctcgagtcatttcatttgctaactgttgagagatttgcttcacagtactcaactgactctgaccctttctacttaaggcatcagcaaccacgttggccttaccaggatgataaaggatttcacaatcataatccttcaccaactctagccaacgcctctgtctcatattcaggtctttctgggtaaagaagtatttcagacttttatgatcagtgtatatctcacatttctcgccataaaggtaatgccgccaaatctttagcgcaaataccactgctgcgagttctaaatcgtgagtagggtacctctgctcgtactcttttaactgccgagaagcataagctattaccctcccagcctgcataagcacacagccgagaccctgtctcgaggcatcacaaaataccacaaacttttccttatctgaaggaagagttagtacaggagcggtaatcaagcattgctttaactccaggaaacttttctcacaccgatctgtccaaacaaacttcaggttctttcgggtcagcccggttaagggtacaacaatctttgaaaaaccctcaacaaacgggcaata

SEQ ID NO: 283265 - DNA, 338 bp, Cannabis indica
ccagaacccaaacgaagaaccaaacccgaaccttgacctagacctgggaccaaaaattagaacctaaacaagaatggccgaacaaagacccgagaacaagactaggactgtgaccaggacccggacccagaccaagaacccaacacagacctagcctctgaccctaactgagactggaactcgggcccgtacaatgtcgtgtacccatacaagatgtgagactcggaccaggacctaaatctgggaccagatcccaaacacttgaacctagatagggattcgaatacgaacctggactcagaccaagacctgaacttggatcgaaatgctggtcctag

SEQ ID NO: 283266 - DNA, 578 bp, Cannabis indica
tttgatggatctggagactatagaatttggagaaggaagatcaggtcattactagcacaacagaagctgcttagagtgctaaatgatcccattgaatggcctgatggaactactaaagttcagcaagaagagttgcttgagacagcaactggaatcatcattttcaacctatctgatgcaattatcagacaagttgacaatgaagaaacccctgctaaaatctggaaaaagttagaggaacaatttcagaagaaatccctaacaaataagatctatttgaaggagaggatctttggattcaagatgtcacactctaagactcttgaacagaacctagatgaattcttgagactacacattgaactagctaactctggtgaaaatgaagcccttagtgatgaaaaccaagcaattataattcttaattctctaccagaatcctatagagaagttaagaatgccataaaatatggaagaacagaaatcactttggaggaagtcatatctgccttgaagtctaaggatcttgaaatgaaaacagagaagcacaatggttctcatggtgaattaaacctaag

SEQ ID NO: 283267 - DNA, 606 bp, Cannabis indica
atttcatcatttaaaaaccatagttttgagtttaaaattctatacattgataaaaccaactaatcaccaacacaatcatgcttgaatcaacaatttaaatcatgttctaacatcagaaatcaaccacaacatacaacagcaagtacaacaacaaaactaagcatgcaaccaacttttacttgatttttcaagaaactaaagaggaaaagggtaagaacaatacctaaagtttgaattgcacacaaaatcatcttgaaaacacagagaaaagctcaaactcttgctgcttcaagagggctgaaatagagagagagagttgagagaaaaagttttgcttttcttgatatttctttccaatttgataaaaatgataaaaattaaactcaaatccttatttcagccaaaaccaaacataacataacataaatttccccttactaagtccactaaaggacaaaacatcattggggcaaaatgaccattttcccctccacactaaaataacataaagggcactaaagggtatttttgggaaattctaaattcccgaccaatcccgacattcccaatgtctaatagaccgtcccacaatactaacatactaag

SEQ ID NO: 283268 - DNA, 639 bp, Cannabis indica
ctcgaacaatacctgcatttgacaattttttcaggtttttataattaatatgcccaagcttggcatgccacaaatccgtggtgttgttgatggctgaatgacaagtaaacacaggagttagggtataacaattatcattggatcgaaatccttgcaagatacattcattatcatcattaagtacataacaatgatcactgtcaaatgagacagtatacccttggtcacaaatttgactaatgctaagtaaattagcccttagtccttcaactaacatcacatttttcaatctaggtaacccttcaaaatttagagttcccataccaatgacttttccagctaagccattaccaaaagtgacttctccacattgcataggccgaatgttagtcaaaaaatccttgtcacctgtcatatgtctagagcaaccactgtcaaaataccacatttgagatgcagcacttttattagaaaaaccagctagacaatttttcttaacccatatttgtttcaaacctttatgtttcttttgagatttttccaaattatcaaaataatttgttttaaacagatttttcaacgtgaaacatttaggtctgatatgtccagtcagaacaaatctttttacctgagatctta

SEQ ID NO: 283269 - DNA, 800 bp, Cannabis indica
acataaacaatcaatgctgttaatttccaccaaagtgataaacaaagtatgatctgattggcattgggtgtaaccatctcctttcaacacttttgtaaacctgtcaaaccaggctcgaggggattgcttgaggccgtagagagattttttcagtttgcacacttttccttttgagaatcggtcctcaaatcctggaggaatgtccatgtatacttcttccacaaggtcgccgttaagaaacgcattttttacgtcaagttggaataaaggccattcattgttgacagcaatagataagagaactcggatggtgttcaacttagcaacaggagcaaatgtctcttggtaatcaatgccatacgattgggtgaatcctttagccactaatcgggctttaaatctttcaatgctcccatcagccttatacttgaccaagaatatccatttacaaccaactgtgcgtttgccatttggcaaatctgtgataatccatgttttattcttttcaagtgcttttatttcctccattgtggcagcattccaattgggatcctgtagagcttcctgaactgaatttggaatctgaacttgatccagggtggtgataaaagctctataggtaggagataagcttgagtaactcaaatagttgcgaatgggatgttgagtgcaagaacgaacacctttcctgagagcaatgggaatgcttagatcgtcagacacatcttcttccacagcaggttcaactcgaacatcttcctgtgtttgttcaagaacaaatggaatcagattatattcat

SEQ ID NO: 283270 - DNA, 505 bp, Cannabis indica
acaagaatcgccgaaccaggaccctagaacaagactaggaccgtgaccaggacccggaccaagacctagaaccgacacagagctagcctcagacccaaactgagactggaattcgggctaggacacggtcgtgtacccagaccggaactaagacccgaacctggacctaaatctgggacacgttcaaaaacacagacctggacctagatagggatccggatacgaacctggactcggaccaagacgcagactgggatcgaaatgctggacctagatgtggactgagatcctgacccagacccaaacttggacgcgcactcggggccctaacttggacctggaccccatcctagacccagatcggggtccaaacctggacaaaaacctgaacacagactctgacccgaactcaaacccacacctagaatcagacccaaagctactgctggacccagacccaaacttgaacccagaccaagatcagaaccaaggacttagacctaga

SEQ ID NO: 283271 - DNA, 532 bp, Cannabis indica
ttatgaattgaataaaataaaaaggaggtgtgagattgtgtagaagaagaaacatgtgtgagattatgaattaaattttttcataatgtattatttttatattccaatcatataaagttgatgtcatcattgtagttcctattgatatcctcaaatttctaaacttaacactcaatttatcgttctgttagttgatcaataaagtgccacatgtaaatatagtattagtcaaactaataattcttttagaaaaaataatttaaaaaattaaaattaattaaaataaattcatataatttaaaaaaatatattatatacatattaaatgaaataaaaattaatttttttttatcttcttccagccatataatctttacagattaacaataattttttttttgtaaggagattaacaataaactttgattctcgattcaaatgctattttttaattctatttttcatatattcaaaattctcattccataaagtttctactaatatttttcaatcaatgaaacgaaaaggcaaa

SEQ ID NO: 283272 - DNA, 674 bp, Cannabis indica
actttccaggagccaacttgaaataccattgctgtgcggcttccgacagagtgacagggaagattctacaacatacgtcccctcgcactccttgtaaatccatttgcatctcaaaatacttgagatgggagagaggatcttctctcccagtgtacatcttccgcgttggtatcttgaacttgtggggtagtggtaggagattgatctctagtgagaagggagttccgcgtgcacagtctaactcaagatcattgttacgctgtccggccatgccataaaacatattcatcaattcgtcgagctgggcctgtacggctgggctgacttgattgatgttttggtcgagtaggattacattagcgtctttctgagcggggatttgagtatgggcttcgggctgcacgatcgttgtagtattctgctcgtctgttccccttcttctgtttaaatcgtcccttaggtcatgggttgttcccagcctatcgaacacaaaagaacctggctgccttagccattggttcgcttggttgacaggcggaatggctccattattctgcgtggatccgtcgggcatggctcctcctgatgaattcccgaacaaggtctgcccgcctacctcttggcccacgagtggaactcgtgacccgggactggacggctgaccgttggttgtc

SEQ ID NO: 283273 - DNA, 777 bp, Cannabis indica
gaaatacctctctctcttttcccttcatctttttcgtgaccctagtgaaagagtaagtgcccacacacagcaagcagtaactcaatcatagattggaagactgtgaaggatcaaagcttgaagaagaaggagattcgggctcagatcttgattatactctgctacagaaaggaatcaagggttagagatctgagtggaaggagacatttattccgctgcatcaatgtaaggttttcttaactttatatgtgtttattttatcgttttagaaagttcatatttaggatgttaataaacatacttgtgagtagatctaagatcctggtaaaataattcccaacagttgcgccataacaatcttgttgtgttggatagttggccaccatataatattaatttttgcttttaaatttaaaaaaagtggctttcatgcatatctttttcatataattttttagagaaatgtaagtaaatggtcctatttctaactctatagatagttaatgtcccttttttaaaataataaagcaaatgttcttttttactttttaatacctaaaatacccttcattatataaaaagtagtatatattttagtcctttaatagaaattatgaaaaacaataaatcaaaacctctctactgaatttttgtcaactattttttcattatataaaaggtattatatattttattcttttagattttgctactgttgttgatgtctaatatgttatttaaccatataattaattttttattaatatatcgtatgat

SEQ ID NO: 283274 - DNA, 720 bp, Cannabis indica
gtccttgtcctcatcctagtccttgtgtccggttctagttccatttgcgattctgagttcgagtttggttttgagtgcgggtcgaagttcgagtcctcggtcttggtctaggttgggtacgtgtcccaagttccaatcccattctgagtctagattcagttcaaggtctaagtccgagtcttaagttttgatcccgatctgtgtctggattaagttcttggtttccttggttatgatcctagtctaggttcgagttttggtgtgggtccgagtctggctttgggtctgattctaggtgtgggtgtttgagttcgggtccgagtttgtgtccgggtttgtgtccagatctggactccgatctaggtctagcttcgggtccaggtccaagtttaagtcccgagtgcggttccaagtttgggtctgggtcaggatctcggtccagatctaggtccagcatttcgatcacaatctgggtcttggtccgagtccaggttcgtatccggatccctatcaaggtccatttttgtgtttgggatcgggtcccagatttaggtccagatatgggtctcaggtacacgaccgtgtccgggccagagttccaatctcagtttgggtctgaggctaggtctgtattcggttctaggtctgggtccgggtcctggtcacggtcctagtcttgttctatggtcctggttcggcgattctttttcaggttctaat

SEQ ID NO: 283275 - DNA, 729 bp, Cannabis indica
ttagacttaaattaaaataaaataaataaataaacgtaagcaaatgcaatgaattaacaaactcactttttttgcaaataatctgatgacttcctctttcccgagtggggcatccttactctcccagttcaccattcggggaaagcgatgcgatcttctgattgcaaatttctcagcaagctcgaggatggactcataagcccaatactgcaatgctacagcatatccataggccgaatactttgactccttctgagtcgttcccttctcaatcttctcatccatatgctttttcttttgtacgaagtccttactccaagtatctttcaacaagttgaaagaaattttcccccacgggtaattgtagaaaaaagggaggtcctcaaccattctaatgataaatgggggaaccagggtcttctcttctttcccagtcagaacacccatcacgaacagcaccaaacccaacttgtaacaatcatccttctcagtgcaactctcaaagacgctgcgcagacgaccaatgctgatagatggatccccattaaaatattctactatcaaacggtctgacgtcgccctctccgaaacctcagcctcagtcggtccacgtaacaaattaagcccagtcaccaaggcaaactcagttcggccgaatcggcatctcttctttgcaatataaaaatgcacctcatcatctttatctgattttatcttatgcatgaagag

SEQ ID NO: 283276 - DNA, 178 bp, Cannabis indica
gaactagaataccaagtaaactccctaacttattaattccttattgcatccactcatagaacttggaattgcacgtctcagtcaatatagaacactctattatgttaccacgatatagatacactataaacatttaaccatcattctaatctcaataatcaaagatcttctatagatg

SEQ ID NO: 283277 - DNA, 957 bp, Cannabis indica
actaaccactgatatccaagggaactggtctaaattcctagactcatcatcgatcgcaaacagattcccataacactctaagtttctctttccacctaaacatgcccttaagataggattttgtctcactgcactcatgttggctcgataaacaatgaaatcaccactaggggttaaaagagtcactcttttacgtgaacaatccacaatagcttggtatttagacaaccaatccataccaagaattacatcaaatttccccataggcaacactaataagtttccagacaacttgtgtccctcgaacacaatacaaactgacctacatatggtggatacctcaccatgtccccccataggtacactcaaatgcaatgcaggactaaaagtttcccaactcaaacccaacatactagcaaacatcaaagatataaaggaatgcgatgcaccagtatcaaataacacatgagcccaagagtgtgagataagaaccataccatcaacaactccctggtcagcaccgccctgtacatcatcaaccccaagagcgtaggcttgagcggatgactttgcttttgcctttccccttccctgactaggatagcttgtacttgcaccagaccctccaccttgattgtaccctctttgactcccactaggagcaggagtttggaaaccttgtgagtaccccatgttgaaccctgaaccttgtggcctgaactgatgttgatactgagactgctggcccgattggggtgtgaaaccataggatgaagactgagactggtttgtcctgggctgtccatgaaaaggagtagactctacatagctccctatgggtcctccatgagatgcttgaaatctttgttgtcgttgcgggcaatctttcttcttatgaccttgttgaccacaactgaaacacccgtatggtccactacgagtctttccagatgaacc

SEQ ID NO: 283278 - DNA, 589 bp, Cannabis indica
gttctgtgtccctagtctggttccatgttttggtccgagttcaggttcgggttcgggtcccgagtccaggttagggtggggatccgggtccggctcccaattcgagtctaggtcggatttggagtccgggtcctggtctggttacggttctagatctaagtccaatttcagttatgattccaagtccaagtcctagttccagtcccagtcaacttccggttttggttccaattttgggtcacacggtacgggttcaggtccagttttgggtttgggactgggtttaggtccgggtgtggtttcgggtcctcgttagggttcaggtccagggctgggtcccaaatccaaacactgactacgggtattgtccaagccggggctcgagatccggaacccaatctctggtccttgtgtggttccattctggtgccagtcacgagctaggtccaaggttcaagttcgtgtctgggtcaggtactaggtcttggtcctagttctttttcccaggtcgctatcctgattcttggtccaggtcctggttattgtgtgggtttttgtcccggtctaggttcgggttcaagtcctagtc

SEQ ID NO: 283279 - DNA, 525 bp, Cannabis indica
actagagaaggtgggctagaacgaagacgaggatgatcctcgtgcaaaagttgaagcaggtcctagtcgatccgatgttcgctctcccaaaactcacctgggttcatctataaaagaaaacacacaagatgagtgtttggtcagaatatcgagcgacaaacaagcaaatatgccgactaggagtactcaacagattaaagaacaagaattttcaaagaaaagtcaaaactcaagaagcttgaaattttcttgagttagggcaaaaaaaattcatgaagcttagaataagcaagatgaaagatagacgttacgcagttaagaaaacaagcattatgggctgtaaaattgcatgaagccatgacaaagaagaatcccagagtttctgaacctagggtttcctaaacattttctaaagcaaagtcgaaggtacattcgaaacttaaacaaataaaaataagcataaaggaaatcgaaaacttactcaagagtcaaatatctgggtttaagcaacgtcaatctaacaag

SEQ ID NO: 283280 - DNA, 516 bp, Cannabis indica
aattctaaaattagactatgttagtttatgaattttcactaagctagggcttaattgtgaagaaaagagattctggggtttatttgttaattaagagactttattaagtctagttaataaatatgttaaatggtaattttatttgataattaattttaattattaaataagtagttttggcatttaagtggttgaattttaaaaaatatggcatttttgagaaagataagataattagttaaaaaaatggcaaaattgcaagtggtgggcccacatcctatggctggccacttaagcatgattttaccatttattttatcaatttttttaatgccaaataatttaaacctaagcctagatggattcctataaatagatagtaatggtctcaaattaaatgatgatgcacttaagcctttcagtcaaattttgagccttctcttctctctctatttcgaatccttctctctctcttctctcttcaattttgaatcctatagtgatagagtacattcc

SEQ ID NO: 283281 - DNA, 544 bp, Cannabis indica
ccttcggagggataggctagaagccaagcaccgggaagcactgagggcggagggcgaggctgttgccaaggccaggcgcgagctccgggaggctagggaggccttagacgaaatggctgccaaggtgaagtccttagaggaattgcaccaggcggacttggagtccagggctaacttggccgtggagctgaaggagcttaaggattttaaagaccaagccttgaagaaggctaagaaagatgagctcctttctcctgtctcctgcagccgttgcattaagcgcttcgatgatggcgtctatatggcctggtcaacaaatggccagagtatcaagctcgacttctacccaaaacctgcggagatgattgccaaattctgggagaagaagaagcttgacgccatgctggaggcgcgcattggtcctcgccttcctcctcgaattgactaggccgttccgaatacaacccagatttttcttatctcttttttttttaattacagctaattctcttttatttaagacaatctctatttacatagctgt

SEQ ID NO: 283282 - DNA, 852 bp, Cannabis indica
tcattttttagtttttcttgtttgagcatttttattttatcatatttgagctattagaaaagatttgagatcaaacggatttttaaaacccgagttaggaccctttttggcccactgtgctgagaaaacggcagtccgtttttcccagtaccagagaaaacggactaccgttttctacaggaaccgtgggcatgggccttttggtctttccaaactcggttttctctccataaaaccattccaaacctttttctaaccccatttctgatttcctaaccctatttggcagcctcctaccctcttctatcaacatttctcttaccaaaacctaatccctcttttctcttttcaaaatcctacctctctccaaaatcaattatcttccatggcttcatcatcaagacaaggaaagaggacaagaacttccatgcaacaagaagagctaaggagcaaggctaggcatgaactcttctcccatggaaaatgggcaagaaaatttcaagaggatttctcaaagagggacatactcattggtaagaaatgtgatttggatgcccttaactttattaattttagcactctttttgaagaaatgggttgggaaactttgataggaattaacacttatatctatcacaagaaatttcaatgatgaaaccgaagtgctagaatttatggattccgatattttaggggaaatcaatatcaagggtatgtcctacaaattcgataccgatgaagaaagatggatttacaccaagcaagattcccaagctcaaggagggggccaagcaattcctagtgctagtgaagaagaagaagaagaggaagatgaagaagaagacaatcctc

SEQ ID NO: 283283 - DNA, 561 bp, Cannabis indica
agaagacgtaccaaaatatctactaatgaaataatcaaataagcaatagatcatactataagtataaaacaagcccaaactatccatgcggacaaacagtcctggataatttggagaagcgtatttaagagtccttactgactcagcctctccaaacgggtctaaggtactttgggcatgtgtaaaattaaaaaaaaaaattataaatataaaaatttaaaatttaaaaatatcacttgattacattttaaattttataataaatattaatttataattttttattttatttatttaaattacaaattacaaactttttaaacttcaaaatatcacttgcttacattttcaattttgtaataaatattcatttataattttctattatatttattaaacttaaaaattacaacctttttaaagttcataatatcacttacttactttttaaaatcaataattagtaatttataattttcacatttattcaattaaattaaagattacaaatttttaaaaataaaaaaaaattgaattacctattatattttataatatata

SEQ ID NO: 283284 - DNA, 572 bp, Cannabis indica
agatcctggtaaaataaattccaacactccccagggtgacaccctaggccgaataaccctatgtcaagtaacccttgaagctgaattttcaattctttaagctcaaccagagcaattctataaggagccttggggaccggttctacttcaggtgctaaatctattataaaatcaattgcccgctgaggtggtaaacccagaagtccttcgggaaaaacatccagaaattcccgaaccaccttgatatcttctggccgaacagagtctagccgagtggtgtctaacaccagggccagaaaccctaggcatccatcacacaataattccttagctgacagggccgaaatcaccgggatccgagatccctgaaccaaatcgacgaaaacaaacggttcttcaccttctggttggaagattgccatcttcctcttacagtcaatactggctgagtacttagataggaaatccatccccagtatgatatcaaaatctactaagctcatctctattaagtcagcacttaactccctatcgtcaattctgatcggcatagacctaatccaccttttgga

SEQ ID NO: 283285 - DNA, 600 bp, Cannabis indica
aaaataatatacagataacaaaaaatatcaacaagaaattaacaagaataaaacataaaaagactgtattttttgtaaataaaatcaaaaaaaatatttaaaatatttaaaattctgtaacaccgtatttttgtaattttttttttttttttgttgtgtatttgtgaaacaattccaattattattagccaaaaaaaaaaaacaacaattttttatgattaaatgtgtttgtcacaataagtaaaattttgtatctaaatattactttttagtaataagtaactttacattgtgtaaaacaaattatttgtgactaaaaatgttgtcattcaagaatatatttttttaagtgaaactgttcctcaagattctattaatattcaatatacaaaaatataaaaacaataaaaaatttacaaaaatacggttttacggaattttaaacattttacgattttcttgactttattaatagaaaatacggtcattttatgttgtaatcttgttaatttgttgttgattttatgttatctgtatgttattttgatgttatttcatattacttttatgtagttttcttgttgattttatgttgttttc

SEQ ID NO: 283286 - DNA, 283 bp, Cannabis indica
tatagcttctataggtatttaaaagttaaatgatgatttccttcgagcttagatgtaaatggaagatctcttgttttagtgattatattttagttcaacatcatttacaggtagctaagtgttttaaggatcaaaatacattgaggtactcggtgtaaatcatctatatagaggatctttgattattgagattataacgatggttaaatgtgatagcgtatctatatggtggaacatatagagcgttctatatgactgagagtgcaattccaagttctaagag

SEQ ID NO: 283287 - DNA, 675 bp, Cannabis indica
ctactacaacaacaacttccaccaatccaaaacaacaactgccaaccctccagccaccaataactctgggcacaataataagagaaagggcgacaatggaggagatcagaacaatgccaaaaagagcaaaggttatcagtccatgttcacaatatactccgaacttgtggagacacaagaaaccatatatgtggcaaacgaacatcgggtggcctttcggatacctgaacccttgaaaggaagtcgtgcgaagagagatccatccaagtattgccaatatcataaagacattggccataccaccaacgagtgtcgaaacttgagggatgagatagagactcttatacgtaatgggcctcttgctcattatgcaaggaataggcaatacaaccaacaaggagcaaatgcacaacaacctgtagccccacgtgccaatgtgcaaccacagggggcacctggaaacaatactcctaacccgccgacacaaccacaagggggacaactgggacataacccggacattcctccacttgtggaaggagaggacgtattggtcatatcaggaggaccacactttgcagggaccaccaatggggctcaaaagagatatattaatgagctcaagaactcagataagactcctttcacaccagaacaacgtgctcccaagcaaag

SEQ ID NO: 283288 - DNA, 796 bp, Cannabis indica
ttggtccacttatattgggcgaaatcaggggcaacattttaccccccaccgacgttcgttttagttttagttaaaagtaaaagtaacgaaaacggaacggttcgttcgtcctacggtagggtccgtccccggtttccgggttacgtacccttccctaggtcggacttaaaatttaaagtcgacgtaggtagttactaccttttacgtttcgacgaagggtacgggtacgttacgttttccgtttaccgaccccgaccctagagttagtagtagcgacggcgcattgatggtgtcaggtggatactcaaacgtttgcaccgccttaatggcggattgatctggcccgttgatctgttgggaattcgaatcgtgcgcttccccaaccgtacgattggtaggtgaagacgcctgttcctcatgcatttttgcctataaaagccaccacctttccttcatttcggttactttccattccttaccatttttgcttgaatttctcagagagaaaatttcctcaaagtagcacaaaccgtcttaacacttgaacattttctgtaatcttccagtgttcgatttcgccagtgcttctcaactctcgctcaaccatacccagtacccccagttcaacaatcaactgtaagtttttcgcatctttagacactagcatgcttacatttattttttgtttgtcttctgggttcgtactcagagatttctggaatgtgagtgttcgagctcttacgttttactgtattagttgtaggcatacagttttgtttgaagaaggccgtgtatc

SEQ ID NO: 283289 - DNA, 854 bp, Cannabis indica
acaaaactaaggcataacaagataacaagagaaagaaagacacacacacacacaactttgaaagttactttgtggattctaccaacgaatttgagtttttttttacttaattttagttaaagtacgtgaatttttgttaagtaaaaaactactttcgatttcttgtaaccaacaaacaagagattaaggtcgtttaagcgtaccatatatggaaaaagggcataccagtggttttgtgccgaggtctctgaacaatgttgcggaaaataacgcggggctcggtctctccagcccatctggggaaggaaaacaaaagtagaattagtcgaagaaaggattttgaaaaattgaaatggaagcagaattagggttttcatgggaagaacaagaagaacaagagtgaaatacccgatccgaaaataggaggcgccattgtcgataacaataggtgtggatggagggaagagactgtaatcggattggcgctgtatcctcgagatgaaaggcattttgactaatgaagacgaaccaccggaccagagccttgtaggaggctcgggggttgaagatgaagcttgaagagtgtgtatgactgagcgacgtcccccggcagctccagctcgaactttgttttttttttttcttaaaagtctttttttttacttgtatttttcattttattcattttcaactttaccacttctctaattggggtgattctttgtaaaaaataaatatggtgattctataagggaaatttcattttttgaccctaataaaataccccgtatcaaaatttatacccctttatttttttgtacaaattgattccactaatttaaaaagattcctaa

SEQ ID NO: 283290 - DNA, 834 bp, Cannabis indica
  modified_base (75)..(75): a, c, t, g, unknown or other
agtcaaagccggtgaggggtcctcttctaaggaaaataggcctgctggggaggcattgatcttccgagagctacngctgcaaacccctcaccccaaaagctactaagccaatgagctcggggaggaagcttggacaggtctagaccaccgaaggttggggctgagctggtcaggagtgaacctgaatgggtgcgggcacctactccacctttttcggtgcttctagaggccaaaaagggcaaggagatgctggcccattacatgaaccgaatggttcctaaggtcagtgagcaactggctggtgctgacaatgactcttctttggaattgctggtgggcaaagtcttgagggagttcactagggtaagtctatgctgaagacgccagggcggaactcagagctgttcggttggagttgggcgaagccaacaagaagctgtttgccgcccagaagaagataactgagctgactaaggatctcgaggtttctgaccgtcttgggagaccatcgagaccttatctgctgaagttaacagtctttaggatgagaggacttctcttcgagcagttcttcatcgggtgaaggaggaggaggagcttatagccgaggtgacaaagttgaaagagaaggtcaatgccttggagacagccggtcttgagctcttctttgacttttggaaggctaatcctcaggccaactttgactacttgggtgatgctaaggacatgtaccttgagttctgtgcgtcccaagtggcctatggcgaaactgaggtggatgcttcaacctccggtcagactgctaatgtgactcctgttcaaataacagatcct

SEQ ID NO: 283291 - DNA, 482 bp, Cannabis indica
cccctaaagctgggaaacttgtactcatcaaaatgacaatcagcaaaacgtgctataaatatatctccagttgtgggttcgagatatttaatgatagatggagattcatacccaacatatattcccagcctcctttgaggacccatctttgttcgttgtggtggagcaattagaatatatactttacaaccaaagattcttagatgagaaatatttggctcctgaccaaaagccaattgtagtggggagaatttgtgatatgatgttggcctaatgcgtacaagtgccgcagcatgtaaaatagcatgtccccaagctataattgggagttttgttctcataagtaatggtcttgcgattaattggaggcgcttaataaatgattctgctagaccattttgtgtatgtacatgagcaacaggatgttcaacatttatccctattgacatacaataatcattaaaagcctgtgatgtaaattc

SEQ ID NO: 283292 - DNA, 589 bp, Cannabis indica
cctggtccacttccattatagtattgaacttttctaagtaatctaacgggttagaagtagctttatatttgagggattcggataaacgaaacccttttggaagttgggcctgccgcacttctgcggtaaaaggcgaagtgccatgcagcttgtatataggcttacgatgctgctcgagcatcttcaaagcttgcagaagcatgctttgatcaattcctcctgtcacaggggttggagtcgctgcgactgcggggctcgcaactactgcggcaaggttcgcggggatattaatcccagtggtcgcgatcggcgcgataggcgggttattacctgcgttgacaccctgatcgcccgcatggggatcatggagcgtctcagtgttatgtgggccgcgggagcgtgccctaaaaactgcgttgaggtgatcacgcagatcccctcgatgtacatgataacgtcctccctgctgtgtctgtacagagccagacctcgtatacctgctcggagtgcggccatgcgaggatgaagaggccgattctgcgtcgttgtctcgagatggacgactgcgaggattgcggcgctcaggatc

SEQ ID NO: 283293 - DNA, 440 bp, Cannabis indica
tgtttaaacaacatacttgtgagtagatctaagatcctggtaaaataaatattccaacaaatgctccaccagctgtggcatctataagtgttctagtattaccaacaagcccattgtaaaagttgtggaccagcatccacttcttaataccatgatcaggacactacctgatgagatccttgaacctctcccaagcttcatggagagattcactatcctactgacagaaattattaatttctcctcgcagcttagcagactttgctggaggaaagaacttagacagaaacttcgttgccaaatctgtccatgttgctatagaattcggtggtaaggagatcaaccaactcttggctcgctctctcagcgagaatggaaaaagtctcaaatgaatggcatcatcactaaccccattgactttaaaagtctgacataactcc

SEQ ID NO: 283294 - DNA, 864 bp, Cannabis indica
tctttcactaatgtgtcccaacctcctatgccataggatagccttagtgtcttccgtcacatgctccttggtgttgtggcagcaagctacggggcttccttgcaagtagtatagaccaccatttttgtgtcctttgatgatagtcatagaaccttttgccaactttattgtacctgcctcaattttgctaacaacaccaagatcatcaagtacactaatagaaattaagtttctagataaatcaggaacatatctaacattagttaaggttctaataatgccatcaaacattttaaaattaatagaacctgaaccttcaatgttgcatgtttggtcattcccaagaatgactttgccccctctagattccctgtaatcaaacaaataagacttattgttagtcatgtgaaaagtacaacccgaatcaataatccaatcatctttaaaagatgatgcagccacatagacatctccactatcataaccatcacttaggtttgcattttgatagtcatttttagtcttgtttgatttgtttgattcctcttgatgatctgaattttgtttcccattgcttttcttgtaaaagtagcattctctcttgaaatgccctaactttccacaatggtagcacccatttggatctttaggaccctttgaatttgacctccctttgtgatgatgattgctgcccttgtgtgaacccctactagtgcttgaacctctactagtgcttctacccttattatgccatggtttcttttgtccaggccttcccctacttaggttaacatccccattagtatgccccggtctttcaaccttcatttccaaatcttttgatttcaaagctgagattacttc

SEQ ID NO: 283295 - DNA, 1057 bp, Cannabis indica
aaaacaaaacagttgaacgacgacgacgaccacgcattttccctctcttcccactcgatttttccctctctctctatctatctctgtttttcctctttctctctctctcggtcggtcttgaattcgacccgtgctcgtggaaaccaccacgaacagtcgccaacacaggccatcgccagtacccgtgctcgtcgaaacccaacacaggccatcgccaccacaaccacggaccgtcgccaccaccacaaagctcagtcaaaggtaagttttttttttacaaaaaaaaattaattttttaatagatttggatgtgaaatattgcatgttgttgaaattagtggaatttttgtatattttgtgctctttcttgtggtaggttgtatatgttggatatgtttcaatggtgtttgtgtgtttttacagcgttatcgatgaaatgtcgataggatatcgatatatgtagttttctgtttgtgtgtttgaacattgttgtcgacaggttgtcgatatcatgtcgacaatttgtcgatggttttaccttgtttgatgttatgtagttttgccatgtaatgtcgacaatttgtcgactatatgtcgataggttgtcgataataagttgtagttgattcttatgatagttaattgttagaatgtcgataatatgtcgactatatgtcgataggttgtcgataataagttgtagttgattcttatggtagttaattgttagaatgtcgataatttgtcgactgtatgtcgataggttgtcgataggaatatggtagttgattcgtatggtagttaattggtataatgtcgacaatttgtcgactgtatgtcgatatgttgtcgatgttggtcatttgtcactgctcttatgataatgtcgatagcatgtcaattgtatgtcgacggtttgtcgaccaattaggtggtcactgaatgtttgataatgtcgacagaatatcgacatgatgtcgatgttatgtcgacatttcttaacttttttgacattcaaattttttttgtttttgttttttcagatggcttccagact

SEQ ID NO: 283296 - DNA, 778 bp, Cannabis indica
gactaaaactaaattagtgacaacttataactaaatactatgttttagtcacaattaacattttgttgtgactaaaagtcacatttagtcacaaaaaaattatgttgtgactaaaagttatcactaaaaatgctagtttttgtactgttattttaaataataaagattataaaaaactgataacctattataaaacatcacgccatataagtaatagggaccttaatgctcatagtaatactcataaaaagtacatataattatataataactacattatttagaaatttattatttctattatgaacttattacttcatcatttcggatgaattagagtatcttcactagtatcagattttaaaaaagtaatgtataattatattttagcaatatattttagcgtatatcaaattcgacacaatatataatattaaatgtgactaacactaaagaaaaaaactacttttagtaacaaacttttagtaataatattaattttttttatgactaaatgtgactttcagtcacaataaaaaattattttataattaaaatatattatttagatataattagttgtcactaatttagtttttagtcacaacatgtttactacacagtattcagaatcggaataaattaatagagaaatgtaacggaataaataaaaaataatcggaatcaatatttgtaatatattgtttactaaattatttttgaaaatagaatagttgtgatttatcttgtttactttattaggaaacgtaagcgaaat

SEQ ID NO: 283297 - DNA, 607 bp, Cannabis indica
catgtttttcatttccaaattaagcggcattagtaagctcattgatcatgatctaatatgccaactcttggttgcgcaggctgttcagactagatggacgccaggcgaaatacctggagtcagggcaattcagtcgggtcgaatgaaggtcagggagctcagtttcccctaaatgctcggggctgaggtagagctcccagagcagggctcgtggtcggggtgatgctaacctgctacaggctgcccaacccactcaggaagcccaaaattgggaaaataggtttgcagaaatgtaagccagaattgaggaacaagataatgagatccagggattgagacagcagggtgctcatgcagtgcctgttccagaagttccagtggcacctacccctgttgtccaggctgaaccagtggtagcggtaaatagaatggaacctctgtatgaagggttccgcaagcaggcaccttcggtttttctgcgaggtccgtatgtcatgaaagccgagcagtggctaactgtgatcaacaagattttgaattttatgggtgtcaccgggaatgacagagtggtgtgtgccacttttcagtttcaagaggacgcattggt

SEQ ID NO: 283298 - DNA, 675 bp, Cannabis indica
tcaagacaaggtaaccctagttctttcccccttaagtttttgaagttgtagtttagtttcattatgaaatttctaggtttagtggctgttaggttttaaaatgcttagggttcaatttctagggttagtttgagttaatctaagtccctagcagctggttttgatgcttgatgttagttctaagcaagcttgagttttgaaactcaagctttgagctttaatggcaacttgagatttattggtttgttctgtgaattattggttggaaatggttgtttatgcattgtataggtgtactggagagtttgataaagtttggttgagttttgaggtcatgggggaaatttttgggttcccagcacagaaccggaattccggttctgggggacctgtagcaaccggtcgaccggatggtgacccagaaccggatttccggttgggaaccggtctgcctgttgggggaattttcagaaccctagttttgcccaattttgagatatttagggtattgccatgaggtttatcgatagggaaacttttagtttcaagtttaagtcccggaaagtgatttagcgagtcactcatctgtgttacaattattgtgattagggcatccatctagcacgagatttccgttcaggtcggccagcacacttgaattcggaaaacaggtaa

SEQ ID NO: 283299 - DNA, 959 bp, Cannabis indica
gacatttttcgattctgtaaaaagagtaagattccagcagttaggccccataccaaaccctaaattaagaaaaagggaatgggggtcccctaaccgctggaaagaggccccctccggacacgtgtcatacaggaaaccctgggaggattccctggacaagagtcgggtgcaataaattcacagaagacggccttacgcgttaaagaaaacagaaagaaaaaagtctgtcctatgccctaagcaaccattatacgaagaacgtatggccttctacaaaaaataaataaataataacaacagaggcgtgacaacagcaatcctatcactagagcagtaaactcaaaccgattatacgaaggatttaaacacttgcatgcccagaaacttcgaatgcaaacccagaaaagaacaaacagataagtaatagcatgccattcaataataaagcaaagggtgcaaagaacttacgatgaagtgttgaaactgggggtcctgctgtgaatcgaatagagacaagaaggactgatagcaacgaacgaagaggaactggggaaaattgcaaagtgtttaaaggccttgttttaggtctgagaattttctctctgggaaatttgagcaaagttggcaagaaatgggaagtaaccgaaatgaagaaaaggtggtggcttttataggcaaagctgcatgaggaacaggcgtcatcacctaccaatcgaacggtgggggaagcgcacgattcgaatgctcaaagatcaacggaccagatcgattggcaataaaggcggtggaaacgtttgagtatccgtctgacaccattaatgcgccgtatcaatcaatgggcgcgaaacgaatcgacccctgcaaaaagtgaatcgctgcattaaaagccatcattaaatacaccctcacgcgctcaaagctcgtgccaggaaaccgaggagtcaaccggaggcacttga

SEQ ID NO: 283300 - DNA, 700 bp, Cannabis indica
tggagagaactcaagcgacatcgagagggagaacaaactccgatgtgctctgctgatgcgtagatgaagagagacgtccaactgtgatggtgttggtttccgtccaccattgatgtcgacgaagagaaaggagattggcagaggaaggtgcgcaaagaaggaaatttcatgcgattgaagagagagaagaagaagaaactgaaggagagagaaagggtgaggttgtataattttagggtttcatttttattttttttagaatttaatgattttttatatataataaaaaattataaaatcatgattttgttaaaattataaaatcatttttatgttatatgtttattttttaatttttaaataatttatttttaattttaaaaattgttagaaaaaataaaattaaatggcatggacctattaggggctgccacgtaggtactgatttgacagttgacggagaggtacctacagaagttccaagagtgtaatggaatgtatttttaccgccaaaatacgacttaggtatttatctgctactcggcataaaacttaagtatttatgccgtaaatactccaagttttttacatccaaacatgaacctgatagtcctcatgtcatttatttatttattttgttacttttttttaaaagtacattaagatctaagtgtctcttttattttatttatatttttta

SEQ ID NO: 283301 - DNA, 615 bp, Cannabis indica
gtcgggtactaggtcccagtcctagttctgtttcccaggtccctatcttgatttcgggtccaggtcccagttattgtgtgggtttgggtccctgtctagtttcaggttcaagtcctatgctcggttcgggtttaggtctctgtctgggttttatctgggttcgggtttggtttaggtccttgtccttgtcctagtcctacttcgattctagttccatttgcgattctgagttcgagtttgggttttagttcgggtcggagttccagtcctggtctgagttctggttcgggtccagatttcagtgaaggtccagatcaggctccgagtgtgggttcgcgtccttggtcttggtccaggttgggtccaagtcccaagttccaatcctgatctgagtctggattcagttcttggtctaagtccttggttctgatcctggtctaggttcgagtttgggtccgggtccgagtctagctttgggtctgattctaggtgtgggtgtttgagttcaggtccgagtctgtgtttgggtttgtgtccaggtctagaccccaatctgggtctaggttcgggtccaggtccaagttcgggtcccgcgtgcgggtccaagtttgtgtc

SEQ ID NO: 283302 - DNA, 548 bp, Cannabis indica
gttgttgttgttttcaaaagcttaaatatgtttaattatgtggattcaagtaggttttattgatggttagttaggtttaagcaagtttggagttttgaactcaaacatgaagctttaatggtgaattttgtttctgtgcttaggtagttattttgttgccttgaatgtgttttctagggtgtatagaacaggtctggaaggtttgaattagtttggggttgatttggtcgagttatggaatttttagtgtttcctgcactgaaacagaattccggttcagagaggcctgtaggaaccagaattccggttggcttccaggatttcctcccagaactgaaattccagttggggaaacggtctaccggttggggcaaatttgggaaccctagtttttcccattttgtgttatttagggtattgccatgttattcattgatagggaaacttttagtttcaagtttaagtccccgagaagtgatttagcgtgtcgcttatcagcgttgtgattgatgtgatttaggagcctgtaatttgccgagcagattgtt

SEQ ID NO: 283303 - DNA, 387 bp, Cannabis indica
acccatgttcgacaccattccctcaactccgttgatttcagaagtcgcccatttgctaaaacagtagaagccgttatggagacctacgctttttatgtcgtagaaataactgaactcttctactgagggagccctatggacgtactccatgtacatcgcatagaaacctaggacagtgcgataactgttgggagttagttgaaaggtcgatacatcatatcgcctgagcatggctgcgatgaaggggtgaaaggggaccgatacaccacaccgaaggatgggtattgagactaccacatcctctgtgggaatgatcgcagggttagtaaatggaaggtgcgctctctgagatggtttaggacgttgaaacgcgagtcgtagcaaatt

SEQ ID NO: 283304 - DNA, 443 bp, Cannabis indica
gatatttacatcttaggaacatgatagttcaattgagtgggagtgctgatcatagatatggaatctatagcttctataggtatttagaagtgaaactatgatttattttgagcttggcttgatagagataaatgattgagatttcatttcagtaattatattagtttactgaaatatcatttataggtagataagtgttttacggataaaatacattgaagggtagaacggtaaatttgtccctattcagtgtagatcatctatagatgatctttgactattaggattataacaatggataatcataacgtacctatatcgtggtacatatagagcgttctatataattgagagtgctattcaatctatattggcgcaatgcagaattaataagttagtgaatttacttggtgagttttggatctacttattgaaagctcagt

SEQ ID NO: 283305 - DNA, 928 bp, Cannabis indica
ttatcaattaccaagataaataaaaacaaaagaatagtggtatatataatgtaaaagtataccacccacaatgatttttaaaccatgtaggacttttttaacatgactctcttattaccaaaagtataaaaaaaaatatgaaaaaaaatgaagaaaaaaaaaaagaaaataaaaaaaaaaactcaacaatagaatgcgatatcatctctctttaatccttccattatattgatatattgattattaatatatttttgtatttttcaatatttttcaaatttaaaataattattaataaaattatttaattaaattttcctataaaaattatttcttataattatttatttaaataattaaaactatactaatttattattacatgaaattataagtaattgagcaaaattaaatttatcaatcacccacataaaaactaaattaatataattttaattatttaaataaataattataagaaaatatcaaaaaataagtaaatgattttattaataattatttaaacttgacaaatattgaaaaatacaaatataatttttgtatttactttagaaaaattataactaattgggcaagattaaatttctcaatcacccacataaaaactaaataatattaactttgaaacaaatcaaagcaaaaataatagtgattgaaaaatacaaaatatattttgtatttacattaaaaaattataactaattgggcaagattaaatttaccaattaccaagataaatcaaaacaaaagaatagtgatatatataatgtaaaagtattccacccacaatgatttttaaaccatgtgggacttttttaatatgactctcatattaccaaaagtataaaaaaaataattaaaaaataataaaaaaaatgaagaaaaaaaaaaaagaaaaataacaaaa

SEQ ID NO: 283306 - DNA, 702 bp, Cannabis indica
tatactaactttgaaattataagactttattatttgtattattaatataatcattggtttaaattttaaaaaataaattatcgttttagttgtcactaactttgaaatggtgaaaaaaaaagttaaacaagtatgaagatgtaaaaaaaaataatagtagtaaaaatagttaatctgtcaaaattaagtaaaaaagaacttcattatacaaaaataagctgaggagttgagattaatttacatattacaaggaggtcgatgtcttataatttttatgttgttttgtaactggtttttttatagttattttcatgttgttgtttaggtgttgtataattgttttattgaaacagtatctttataattttgaaactttaagatagtatttttgaaaacttaattttgtaaaaaaaaaacaaaaaaaataaaaggtaatttgtaaaaacccaaatatttagtaacaaagaatttgcaaatttgtcttggattgatttgtttgctgctgtatttgatgactgggccttatgaagaagagaagttgccgcccatttctgctcggcaagagtttagagtgaggcccataggctggaattgattgaagacttttcaaggccaagcttgaaagatgaggaaaagatgcaattaaatagagaaaattgcactctatactttttttatattgtcctcttttatttttatctt

SEQ ID NO: 283307 - DNA, 598 bp, Cannabis indica
tatgatacgggataaggtcgttgaatgtagagataccctaccctacatttgtctgatttgtgtatgacattattatggtaaggtatgatacagcgacaatgttgttgaatatagagataccttattccatagcaatggtagggctaaatgtgcccaggttattgtagggctagttaagcacaggttgtgtatggagtggctatgatacgctacattatggtaaagacatgatatgattgaaataattattatatgttattgctatgattgtgctatgattatgatgtcagggttgtaatccctacatatatgtaatggttacgtttagtacagatatatggtatatgatatagctttccatatctagagttatttaaattacaattatgagctaaggtatataatattgttaagactagatacgttaatattataaagaatcgtattattgtgaattttaagatatgcttagtgtattaaatgctattgtatgttaagcatttccttaatgggcttttagctcacccccttactttccccctacaagcaatagacagggaacattgaatgtaagtttgatgagttgggtcagttctgg

SEQ ID NO: 283308 - DNA, 709 bp, Cannabis indica
aaatcacgtaatacgcctaagttagttagggtgttacaaactcctccagccgcagagtaaccaccatctcgaattctttatgagttggtgtagatataaggactactaatatatacatccttattatctaacacataggtcacattcataaatctctcttgactttgcttaatgttccttgtttgattacatcttagatagctcccactcaacagtaggtgtctggttaaattatacataaaagtatatttaacctcttactattgttttgatggatatcttgttgtgacatattatcttagtctgaaactgtaagttccttctagactaagtcatcaacatatcaatctagtattttaaatgaagtgtaaaatacttgctagagattaagtaatcaaattaagataccatataattttatgaggattaagaactttttgcccaagtcattcgaatagactatgcaagaattctagtatcttattctcataattctgataagttatttctatccatatgaatggttagatttactttctcagtagtgttcttaagttcctatcacaagtgtcaaccaaatgaagatgggtaaataattttaaaattctcccactcaattaaggtagtgtgatacattatcaaagaactttattggtatcaatttctattacaatattaaatataaactggaacataaatcaagatcaag

SEQ ID NO: 283309 - DNA, 520 bp, Cannabis indica
gtgtctgaaggcacacgacttcaaacagctttcctgtcccatacgcgcgtgcacaagtgggtctccttgtccaagatgctggtgggataggcatcatctcgacacgatttcaacccgaatcttaaaaaattcataactctttcaatttttatcggaatcgagttctgtaaaaactaaaattgcttaattttcacaaggaatctaaataaaatatattcagaacgaaaataaaattattttcatggaaaaattttgtaaatcacaaacattcatcaattatcacataaaccaacatgaaaacatccaaatcaacatacaaacaatattcatcgttttaaatccatatttcatgaaagtaaatcattacaatggctctaaggccagttgttgggaatattttaccaggatctagatttactaacaagtatgttgattaacattctaaatatgaattctctaaaacaatgaaaataaacaataagggtttaagaaaaccttattgggttttgtgctctaaata

SEQ ID NO: 283310 - DNA, 767 bp, Cannabis indica
agtcaaatataactatacctcatacttaaactaatatttcatatgagacaaagacgctagctagagttggtgaaggattatgattgtgagatcttttatcaccctggtaaagcaaccgtggttgctgatgccttgagcagaaagggacagagtcagataaatacggtgaaacaaatctcccagcaactagcaaatgagatgacccgagctatgattgagttggttgtagggtagttaactaatattactctgcaatctactcttttagagcgaattaaagaagtgcaaatgcaagatccagaattggtaaaaacccgagatagggtttcggctggaaagactagtgatttttcagtggatgaaacaggaatgttgcgattcagaaatcatgtttgtgtgcctatggatgatggtatcaaaagagagataatggatgagtctcgtacgactccttattcagttcatccagggtcaacgaaaatgtatcaagacctaaaggccatgttctagtggccaggcatgaagaatgacattgctgagtatgttgcaagatgtcttacctgtcagcaagttaaggctgagcatcagaaacctgcagggttactgcagccattgaacataccagagtggaaatgggaagatattgctatggacttcgtggtaggtatgcctagaaccacgggacaatttgactctgtgtgggtcatagtggacaggtttacaaagtcagcccacttcttacatgttcggatgaatttctccattga

SEQ ID NO: 283311 - DNA, 608 bp, Cannabis indica
tttcttgcctttctcgaattcaacatgttatgaaaaaatctcgagttaccatcaccctctttggcccacttgcaatttagctttcaaccatgcacttctttcttcagtaaaagctaaattttgccattccttttttgtcttacttcttttctccattaaagcttgtttcccgccactttatccaattcgacctagccttctttccaaagcattttttatcatctgatttgttaccgaaagtcgacttactccaatacttgatgttttcttgcctttctcgaattctaaaaagccaagaaaaaatctcgagttaccattaccctcttcggcccacttgcatttagctttcaaccatgcacttactttcttcagcaaaagctaaattttgccattcctttttttgtctttcttctttcctccattaaagcttgattcccgccaacactgccaatttgtccaattcgaccagccttctctccaaagcattttttatcatcttattgttacagaaagtcgacttactccacgacttgatgttttctttaaccatcttcaatttacacatgagcttaggtccccgactatcccaacgccactgcatttttcca

SEQ ID NO: 283312 - DNA, 543 bp, Cannabis indica
cgcaggctgttcagactagatggacgccaggcggaacaccaggagtcagcgcaactcagtagggtcaaatcagggacaaggagctcagtttcttccgcatgctaggggtcctggtagaagtcccaggggcagggcccgtggtcggggtgatgataacccaccacaggctacccaggctgcccaagccaatcaggaagcccagaattgggaaactaggtttgctgaaatgcaagccagaatagaggagcaatatcatgagatacagagattgaggcagtagggtgctcctgcagtgccgatgccggaagttcctgtggcacctgcccctgttgctcagcccagatagtggcagcggcgaacagaatggaacccctctatgaaaggttccggaagtaggcacctccagtttttctgggaggtccagacgtcatgaaagccgagcagtggctaacagtgattacaaagattctgaattttatgggtgtcaccgggaatgacagggtggtgtgtgccacctttcagttccaagaagacgctttagtc

SEQ ID NO: 283313 - DNA, 686 bp, Cannabis indica
aacgggcttgactaacccttacaaccggggaatttttcaccaaggtttttcccaaacctctcacaatagttttcttccaaggactatcaacctcaccggattgttgaagtgccaatctcactatcggattgttgtagtgacaatctcactcttctcgggttgtttacaaaaccggtgtcaacctcacctacaaccgagttgtttttctaccggtgccaacctcacctctcaatacaatgaatatgtaattttgaaatacaaagcaaactctctctaataagatggaaaacaatgtaaaatcctagagagaattgcaagcacactagagaagataagaacaagtttggctcaagtgtgtgtggttggtgtgtttatgaaaagatgataattctttagtttagaacacttagaatgatgttatatgatgaatagaagctcaaccaaccttatttttgagtgaaaaacaagtttatatagtgtaggaacaaaaactagccgtttatagccgttagcacatttttcaaaaagaatcctgggaaaaacggactacctattttaaaacggactacctatctgcgaaaaacggactacctattttcaataggtaggccgaaaatcaggcaggttcaaaacttgcatttttcggcactaaaacgcgcataactctttactcgattatccgattt

SEQ ID NO: 283314 - DNA, 519 bp, Cannabis indica
aggatagggacctgggaaatagaactaggaccgggacctagtacccgaccaaaacccaaagttgaacctaggacccagctcatgacccgacactagaaatggaaccagacgcggacccgtgattgggattcaaatctggacccagggcttggacaatacccttagtcggtgtctggatttgggacccagccctggacccgaaccctcatatggacccgtacccacacccagacctaaacccagtcccagaccaaaaagtggacccgaacccgtaccatgtcacctaaaattggaaccaaaacgagaagttgacccggactggaactaggacttggacttggaatcataactgaaattggacatagatccaaaaccacaaccgtaccaggacccgaattccaaatcagacctagacccgaattcgggccagacccggatcccaacccaaaccttgacttcggacccgaactcaaacttgaactaagacccatacatggaaccagactagggacacagaac

SEQ ID NO: 283315 - DNA, 366 bp, Cannabis indica
ctcttttcttagtgcccgatgtctctggaacatcacccactaaatttttagcaattttttttaaccccatcttagcttcgactttggaagtaacagttggaggcttcttcgattttttagaaagtttcttcgccggagatggtgatttcgaaccacttctagtggttgccatttatatagaaaaaaaatagtggaggatgacaatgtaggttgaggaaaacgtgggtgagggcttggagaaggtgatcgtgggaagaagaaatgggttagggcttgaaaatggtgatcgtgggaagcacacggtttggtaagaagtggaaggaaatacagataaatagaaaaataactaaaaaaaaaaataaaaaa

SEQ ID NO: 283316 - DNA, 650 bp, Cannabis indica
ggtaaaataatttccaacaacgtctcctcgcaccccttgtaaatccatctgcatctcgaaatacttgagatgagagagaggatcttctctcccagtgtacatcttccacgttggcatcttgaacttgtgaggtagtggcaggaggttgatttctggcgagaagggagttccgcgtgcgcggtccaactcaagatcattattacgctgcccgaccatgccatgaaacatattcttcagttcgtcaagctatgcctgcacggatgggctgacttcattggcattctggtcaggtgtggctacgtcaacgtctttctgagcggggatttgagtatgggctctggactgcacattagttgtagtattctgctcctctgctccccttcttctgtttaggtcgtcccttaggtcacgggccgttcccaacctttcgaacacagaagaacctggctgccttagcgattggttcgcttggttggcaggtggaatggctccattattttgaggggatccatcgagcatgactcctcctgatgaattcccggacaaggtctgtctgcctacctctaggcccacgagtggaactcgtgaccggggattggacggctgaccattgtttgtctgggaagcattcaccgttgggtcatcctcgg

SEQ ID NO: 283317 - DNA, 501 bp, Cannabis indica
ggagcatacaagttaggtaagtatgaggaaaaaaatgcaactcgttctaggaccacggtactggaatggagaatatttaagaaaattctgccaatgaagtaccaggtcgggtgaccactttaagtactaaatgaacatttggttttaagttaatggccttctgggcggactacgcccaaaggttttgataaaagaaacaaagtactcaggtcgggtgaccactttaaagtacagtttcttatgtctgcaatttgttttatttcatgttaagctaaaagatcatattagatcaaatagctctgatgtatgttactacgctaacaaatacacttttcgatcaataaatgaataaagatagtatttcaaaatacaattgagtcaaaattattagcatgtttataatttaccatacaatgcgtacaaaaggtttggtcaaacccaaaacaccgaacaaataagcaatatatttgtaaaagataagtgaccaagagtcatacgtct

SEQ ID NO: 283318 - DNA, 599 bp, Cannabis indica
ttttcatagatttggatgccaattattgcatgttgttgagattagtggattttttgtagcttttgtgatctttaggttgtagatgttagtgtttcaatgaaatctgtgtatattacagggttgtcgatgacatatcgataggatatcgataggatgtcgatagattgggtgtctgtttgaattttgctgtaatttgtatgtcgataggatatcgcttgtatgtcgataggatgtcgattggtagtttaagtgtattttttgcactatattgtcgacgacttgtcgacagtatgtcgattaaattaacttgttgattgttaggttgtattgtcgactgaatgtcgacagtatgtcgatatgttgtcgacatgttgtgtaattgttatctgattgaatttgtcgacagcatatcgacaggttgtcgatatgttgtcgattgtattaacatgttgaatttaagtttgtattgtcgactgaatgtcgacaggatgtcgatattttgtcgacataattgaattgtgtctgcttttgataatgtcgacataatgtcgacggtatgtcgacataatgtcgacataattgaattgtgtttgcttttg

SEQ ID NO: 283319 - DNA, 571 bp, Cannabis indica
agtagcagttttttgtagtgtctatgtgtgttgcgatatggttcaaaataaaaaaaaatacttttaattgtaaaaatgaaaaaactcctatataaaatgtatggaaataattataaggtggttaaggaggccaaagataagcaaggtaaagaagtaaattttagttgttgtcatagcagctcttgtttacgaaatatggcgtacaagaaacaatattttttggcagaattccaatacaaatgtagagattgtaattgtaaaagtgaaaaagatagtgaaaaagagaattacatgtatatggccaaaaaaagcaaccaaaagtgagaaagaatggtttgataccttgtaaagttttatagatatttagattctcttacttggagaatgctattaggtggtataaatcttttttgagcaatacatgtaaagaccgcttagtttaatttagaaattagcagttaatcatgtttatttatgaaaaattatttatagatatttaaataattattaatactgttattgttgaattctgaaatgcattttatgtcatttagtaattttcataattttg

SEQ ID NO: 283320 - DNA, 682 bp, Cannabis indica
tacacaaaaataacaaaaaaaaaaaaattacaaaaatacaaatttcacgaaattttaaatatttttaagatttttttaattttatttacaaaaaaatactatcttcttatattgtacttttgttaatttattattgatgttttgttatttgaatattatttttgttattatttaaatgttatttttatgtaattttttttattattttcgtgttatttttataaaaaaattataaaaatataaaaaaaaaaattccttaaatccaactattagatattgaatcgattgatagaaattggaatttgaatagaagtaaaaatattagatgtgatggaattaatagcattaattttaatgtgttgactgggtgtgatgattgtgagtgagtgggaagtggagacagataagaagttgtggattagttgagctgagaggaatataatgtgggaatattattattttattataaagactaatcttttttttctttatttataaaaatataggttcaacaatcaatattaatcttcctttaggaggcgtttggttaggaggaatgaaaatataggaatgggaatgggagtaggaataagaataggaatggaatggaataaaatttaaaatgcataaaaaaaattgataaaaaaatcattaatttttggaaagagcattccattgaaat

SEQ ID NO: 283321 - DNA, 534 bp, Cannabis indica
ttcaagaatttgattaattttttgattttgagtgatataaatgtgtgtggtgcaaaaatattgatgatattgggtttgttattattgtattgtggtattgagtgtttgggaatattgtttgagtgaattttatttttgggatagagaaaatttaaggggaggtgcggcccaatttttttttagaaaaaaaaagagttttaaaaaaaaaaaaaaattcgaaaaaaaaaattgaaaaaaaaaagaaagaaaaaaaatggcaccaaagaggactaggaatgttgaggaaggttcgtcttcaaacccaccaccaacgggttttgatagaacccgctttggcagtatcgaggcccacaatcgcttcgtaaggttgaagaatagagcttatattgaagatcggggtattgaattcccggaaaatccattgaggcgccaacctcggtttgaaacgatcagagcgcaaattgaaaggatgaagtggggaagctttgtggatactcggggtcgggctaatgttactatggcctgtgaattcct

SEQ ID NO: 283322 - DNA, 536 bp, Cannabis indica
tctgccttacgccactatagatttgaaattgaatacactctcaattatatagaacgctttatatgtaccacaatagagatacattatgattatcaattgttacaatcctaatagtcaaagatcctctatagatgatctacgctgaataagaacaaatttaccaatctacccttcaatgtattttatccttaaaacacttagctacctataaatgatatttcaataaactatacaaatactaaaatgaggcctcaatcatttatttctattcagccaaactcagaggaaattatcgtttcacatctaaatacttatagaagctatagattctatatctatgtttatcgctcccactcaattgaactaccatgttcccaagatgtaaatatctgccagaaccataagctagcttccacgaacaacttgaagaacataaataaaacaactaagctgaacctaaccataccaggattaagatccatagacctaagatcaaccattgatactgacttagaaagatataacgataaatttat

SEQ ID NO: 283323 - DNA, 629 bp, Cannabis indica
gctctttttgccttcttggtggtttgttctttgaagtccctgagctctttcagctccgcggctagagcggccctggactctaagttcgcctggtgagtttcctctaaggatctcaccttggcaaccatttcgtccaaggcttccctggcctcccggagctcccgcttagccttggcagcagcctcactttccgccctcagctcctcctgatgctgggcctccagcctgtccctccgctgggcctcatcccggatcatggcctccgcttggcctcctcctcattggccttggcagccgcctcccggcgctcagcagcctcctggtagagctgcctctccgcagtgagatcctgaaggaccttcctgacgtcgttcatgtccccaaaatcagacagaacgaagccatgattaataatgttcttggagaggcggccagcctcagcagcaagctgaacaacaacacaagggtaagaaagaattcccaagaagaaaaatgaagggaaaagcaaaactaaaaagcacttaccacggtgagggagtggctgaggtcctgggcctggaagatagagttcagggaggcgcaagttgcgaaccgcttaggtgcgcaccgggtaagctgagaagcgaact

SEQ ID NO: 283324 - DNA, 593 bp, Cannabis indica
aacgaattttattcattttctttcttttttacaaaacttaataatttttgaaattccatatcacattattttccttatacaaagcttggtaatgttatcactacatacataacacttattaggataatctcaagtgcaagccaaccaacctaaccatgtgagagatttgaaatgggagagcaccaatcaatgaacttaattgccacatgttagatccatcaatatttgaataaatgggtgtattttttgggggggttggaaaaagaaaacacagctttaatactttctcaagtataatatagatataaataattagtgaatattggcatggttataaaaagagcaatgtgagagaagaaagaatatgcaagaagtggtgcaaagacagtgagaaagagggtgaaaaggtaggtgaaatacacgcacataattacacaagtggacctccttgtagcccccctttgacaacaacttctgcccatgatcctttaactcctaccatccacttgatttttatgaagagagagagagagagagagagagagagagagagagatggcatgtgtgtgtgtgtggtgagtggtaggtaacaa

SEQ ID NO: 283325 - DNA, 565 bp, Cannabis indica
agagcatgcatggccttcgaattaaaattggccctctccatctcatctggagtccacaagctcataggttttggtttggtgacaccattatccatcaccgttgggcatgtccaaccatcttctatggccatccaaactctttcattcaccgccctcaagaatgctcgcattttggttttccagtatgggtaattggcaccttccagcattgggggtcgtgatgtggaccctccttctctgaacatctccattcctgtacgaatcaaggaaaaacaaaacaaagatagagagcagtatactcccagagtcgtgtctggagagggggttagttccaactgggtgttgcagaaaggaaaaaatgcagaaaaatcaagaattgcagcaacaatgaatttcagtacaacgaatcttgcaagaactctaaggatcaatatttctaacagaaatagctggctctgataccaattgtaagccccaagttcttgtctaacctatctttttcatatttagattgattttatcttgatttaagcttgaatataaaaagaacaaaatcaaagattca

SEQ ID NO: 283326 - DNA, 617 bp, Cannabis indica
ttatacataattatctagttagggttttgctaatccatctcttaattccggggtattacaacagcggtggttgtagtatagatcgggcgatcaattccacagggaggtgattatggacaaaattgttagtagaaaaatagaaacaaaaggttaataaatagtgataatagttactgatgagtttgtgatttttcggttttagtaataaatattaaaagaaagcaaataaaatgtgtaatcaatagtaaaagaaataaaggctttaagaattattcatatgcttgtttagctatcttgtactcttgattcacaaagctgacacaaataatatatagtattaaaattcattatattttgagtatacaagttcttgaaaataatagaaataatttaatgttatatagaacctataaatgacattatacatcaagcaataatgcaataaaagattaaacataaaactaaacataaatattgtttttactaaatagaaacatatagaaagagcatgactaatcctatatatctttagtaaaaataatgacaaagagatagaaatagagatggaggtgatagtgaaggaaatgaacattaaaattacttttcttaacttttaa

SEQ ID NO: 283327 - DNA, 687 bp, Cannabis indica
taggcatattacgtgatttttgaacgtactgtgcagctcgttgctaatcaacaaggtttatggaaatcgtgattaactaaattttttgcttttgaattaaacttataaaatattttatacaaaaatactcaggatcccgattacaaaacactttacaaaagtttactgtctaatacaaaatacttgtcgcctaccgactaattacaaaaaagcattggtatcccgaggatcgtacgctccaggcctaaccgccccgacatgtacaatcttcatttgctcgctctcacggttcctcagccttggccttgcccttacctacacatgaacatagcactctgagtcgacagactcagtaagaaaagcataaatcataatcatacataaaacccatgttatgatcagatgcccatacccctgactataaccctaactgccgtgtcccacacgatactgagtcccgaacgttcataagacagtactattgacaagtaacagcctatacccggttcactggtcatactccagctgctagtctatactctagcctgtaccgatgtgttacaatatcaacctatactcggttcactagtcatactctagcctaaccgatgtgatacggtcaaatagcacagtaccaccaacccttgaatcagcctaaaactacggtatactggtcatactccagtt

SEQ ID NO: 283328 - DNA, 675 bp, Cannabis indica
atttctgcataggttgtggtatcacttgttgtaataaccaagtcatgtctgattttggcattcagcccagccaaatacttttctttcttgctgaaatctgttggtacaattccggaggccaacttggccaagcggtcaaacttggtagtatactcggtcactgacatactctcaccttgtaccaactcaataaattccttccgctttgcactgcggaccgcctcgttgtaatacttggcattaaacaattctcgaaactcttcccaggtcattctagttacatctctggtgagggataccatttcccaccagatcagggcatcctcttgaaattggaacgtggcacacgccaccctatcatttccagctactcccataaaattcaatattttctcaataacggtcaaccactgctcagcttttaccacatcagggcctcccagaaatactggaggcgcttgctttctgaacctctcatacaaaggctccatgcggttaccagcaacatgttgctcagctggcaccgcaggggctgcaggaactgcaacagccggttgcaggggaggctcaacaggggcatcccgttgcctgagtcgccggatctcttcttcttgttgctcaattctagtttgcatctcagcaaacctttgttcccaatcaacaggggcctgaggt

SEQ ID NO: 283329 - DNA, 452 bp, Cannabis indica
gatacgtatattttgggagcatgatagtaataaaatacattgaaatggtgtaacagtaattttgtccctatgcaatgtagatcatttatagaggatcattgattattgggattataacaatggattattattagcgtatctatagcgtggaacatatagagcgctctatataaccgagagtgaaattccaagttctagggtggatgcaatgaagaattaataagttagtggatttactttgtaaactctagatctgcttcttggaagctcggttatataggtccatggtcccatactagttgagacaaactacttgtaagactcagttaattgattttaattaattaattataattctaaaattagactatgtctagtttatgaattttctctaagctaggtcttaattgtgaagaaaaagattctagagtttatttgttgattaagagact

SEQ ID NO: 283330 - DNA, 873 bp, Cannabis indica
tggatttctgcagtagcagaactcgagcttgcagcagcaacaccagctttaggccccttttgaaacactccatcaaaatactccgagggttggaatgttgctccagtcaatgaaggctcaagagtttcatgagattgtgccacatttttctgagaggatataaccttaaagattaaatttggaaacacaagcttaaaagttggctttttacctcttcggaatgaaacaatttggttcaaaatgtgggaggccaagtcaatagatgctccagaggtgatacggtaaaggaatgaggccacatcttgagacaccacagtcttgttgaagtttggaacccaattgctaagagcaaaccgcctaagagatgcatgagcaaatgtgagatgtgtaatccgaagactctcccccaatttcagttcagaccgtgcaccagtgagttcagagagcatcaattcacgacccatagacataatggcatttgagacattcttaggagaagattccttcattggctgcttgcctttggcagcagcagaagcctttgctgctgaagaggatcgagcaggagttggagcagatttggtcaatggaggctctggctcgagttcagttccctcactatctgaggaaactccaatgtcctctggaatctccttctcagaatggagagaaacggatttgtcagaggagacttccattggttcatcttcttctgagctcgaagaaaccgaaggtggattcgtcttaagcttcttcttggctggaggcgctggcttgtcacgacttcgagatgatcgaagttccttctcgacagaggcttgctgggcacgagtgcgagtagaaggaccaattggggtagaggcaggaactgat

SEQ ID NO: 283331 - DNA, 798 bp, Cannabis indica
gctgctcccaaatacactttcattaaatgacgtggcgtgttctgattgccaccgagacacttccaatgatggagtcttttttggagcccctatattaaaaaattcctatattattattagcatgctatatatatttttattatatataattttattgtatagttcatattttttgttatatttgatatatatattttattgtataatatatatttattttagatgatgtttagcctgttctaaattataaatgaaacgttgcccaacaagcttattatgcaattcaagccataaatttatcaccttactttaaatcaaagctattatattagtattataacatgaactctcaacatcttcatagtctttttctttccaaaaatattattaaagaataatgattgtgatatatttaagttgtacatatttaataaaacataatgtaattctaatatataattatttattatacaaattaaataatcattgtgtttgaaaatatatatataatttttttcatattattacttggcattttaaagtgctcaacactatgtcgcgtgacactcacggccagttctaacaaaaagtaggcataatattttttgggttgtatgtaaagtgaagtggtaattggtgagtttggacctatatttaataaattttactaaaaattataattaactttttttctctacatattaatatattgtattaaaattttgggtcttgggtttgggagaaccttgtgtacgggcctaattgttttaagcctagggtcgtatctggtgacaatat

SEQ ID NO: 283332 - DNA, 494 bp, Cannabis indica
ccaccatctttccttcattttggttactttccattccttgccatttttgctcgaatttcccagagagaaaattcttcaaaacagcacgaaccgtcctaacacttcgccatttcttccagtttttccgtgtttgctatcatcagttcttctcaactttactcggccacactcaggacccccagttcaacaatttactgtaagtttcttgcatcctttggtagtgacatgcttttacttgctttgtttgtttttctgggttcgtactttgagatttctgggcatgcaagtgtttaggttcttcaggtgttctgttttgtgtctattgctttagttgtaggatcgccattatcatgcctctgttataatcgtgcatttttgttgaagagagccatatgttcttcgttcaacggttgcttagggcatagaatggggtcttttcccttctgtttcttttaccactttctgagattttactgcacccgacacttgttcag

SEQ ID NO: 283333 - DNA, 584 bp, Cannabis indica
tagattgaagacaacatgttccagaggcctagggccttttcttcatcagcaacttctctcagaacctcatctccaagactgagcaagatagcactgtgtgcttttgtttcaatttccagcctttttctcttgtcatcgatcaggtccaatgcatcaggatccaatgcctcatagatcccttgatgcaccagaaaagctctcatcttaattctccacaagctgaaatcattggagccagtgaatttgtccacctcaaaccttgcagaagtcatttcagatcagattcttgaagcttgaatctgattcttgatgacttgaatttggttcttgaaagtttgaagatgaatcttgatcacttgattgctgttcttgatcttcaaagacagccttgctctgataccatttgtggtgaaaaacaccctcaatacttggccaaatcagtgccaattaacaacaagaacaacaacaacaacataacaagcaaacaagattaatacaaatcagaaaaactaaaaccagaaatgaatgaaaattaagtgagacttagcattgaatcaaatgaactttattcaaatgtatagcac

SEQ ID NO: 283334 - DNA, 417 bp, Cannabis indica
ttgagtgggagaatattaaaattctttacccatcttcatttggttgacacttgtgataggaacttaagaacaccactgataaaacaaatctaaccattcacgtggatagaaataacttatcagaattatgagaataagatagaagaattcttgcatagtctattcgaatgacttgagtcaagatttctaatcctcataacattttatggtatcttaatttgattgcttaatctctagcaagtattttacacttcaaatactagactgctatgttgatgacctagtcttaaagaaacttacaatttcagactaagacaataagtcacaacgagatatccctcaaaacaataataagaggttaaaaagtttttttttaaccagacatctagcattgagtaaggtttcctaaactttata

SEQ ID NO: 283335 - DNA, 713 bp, Cannabis indica
aggctaggtctgtgttcggttctaggtctgggtccggatccgggtcctggtcacagtcccagtcttgttctagggtcctcgttcggtgattcttattcaggttctaattttgggtcccaggtctaactttcctgggtctcggtctagttctggtttaggtcccaggtcccatttctgagtttgggttcgggatcgagactggggtgtggttctaggtcccgaccctagatctgtgtccctagtttggttccatgtctaggtttgagttcaagttcgggttcgggtcccgagttcagatttgggtggggatccgggtcctgctcccaattcgggtctaggtttgatttggagtccgggaccttttccggttacggttcgggatatttgtccaatttcagttatgattccaagttcaagtcctagttcctctcccgatcaacttcccgttttggttcgaattttgggtcatagggtacgggttcgggtccccttttgggttcgagacttggttcaagtccaggtgtgggttcgggtccctgtcagggtttgggtcaagggctgggtcccaaatcacgacaccgactacgggttttgtcgaagtctggttccatttctggtgcagagtcacgagctgggtcctagattcaagttcgggtctggtggggtactaggtccctatcgtagttctgtttcctaggtccctatcctgattc

SEQ ID NO: 283336 - DNA, 685 bp, Cannabis indica
tccttccgaccaatgtaaaaatgcatgtgcaaatctgttggaattattataccaggatcttagatctactcagaagtatgttgattaacaacctaaatatgaacttctaaaacgataataaataaacacatataaagtatgagaaaccttacagtgggtgcagcggaataatatgtctacttccactcagatctctaacccttgattcctttctgttgcagagtataatcaagatctgagtccgaatgttcttctcttggatgtgatccttcacagtcttccaaactatgattgaggtactgtttgctgtgtgtgggcactactctttcactagggaattcgaaattgtatctctcttgtattgttgtgtattgttctgcaaagaagaagaagagatgggcggctatatatagagaaaagggaagctcaactttttgaaagaggcagtttcctgaattactgagtaattgcataactgccttatttggtgtgagccaccactttccatttatagataactgctaggtttaggttagtaattaatttggcattaaaattgaaaatagtaattgggaaatacacacacaagtggccggccatgggtgtgatgggtctcacttggattttgcagtttccacaattttatttctattttcccaaaaatgccaattttccaattataacc

SEQ ID NO: 283337 - DNA, 794 bp, Cannabis indica
ataatgacttgcaagtgtccatctatcggtggaggtaacagatcctggttgttttgacctttgttggccttgacatacttctgtaagtgctggttgtttttcttgatcagatattctatttctcgcttcaggttgtaacattcattggtgtcgtggccgtagtctccgtggaaccgacaaaattttgtcatgtcccttttgttggtatctttcttcatgggcctgtgcttcttgtacggaattaacgactgagttgccatatacacactctctatatctttacttagaatagtgaacgcagtgtgtttggcatgatcacggggagtctgtttggatttctcaatgagcttccctttcttcccgtttccttgcttgtggttgtttcttgaacgcttgccacttgaattgctgaaataattgggaagttgggcggatgttccagtggatggagccttcgttttgcctgacttttgctcaccttctgctcgttgaatggcttcttcgagcttgatgaagccttcggctcagtcaaggaaatcactcattgagtcgaccgacccattcttccttatatccttccatagttcaccaaggacttcaatgccccccagtatcacggataactttccatcctcgattacccgcgacactttggtcgcttccatcatgaatctgctgatgtatgcccggagtggctcgcctggtcattggtttactttgaccaaatctcccagatgcaatgggagctgacgtgaggaagagaattgtgcatggaattccgaagagaaggtttt

SEQ ID NO: 283338 - DNA, 517 bp, Cannabis indica
taatccaacaatctcccacttgggcaacatatgttacctgataaatgtataaccttatgagctcaaaatttgctattatgtaaaggtattcacaacaatctcgtccatcaactatacccatataggatcaaagcgattttcgtcatatcaatcatgactaaacccatcaatggtcacatatacaaatatagccaaatgacatagatcaatcatggatgtgtagcatggaaattacatgcaatgtgaaccgaacatgcctatttccaactggtcctccttaaaccaaagtgaggtcaaacttaaacataacaaaacagagtgaataaactgaaaactttatttctgatcagaaaataaccaaatacataaatgtcttaaacaaacataaagcaaagaaaatacaaactcccactaaatcatgatatcctcaagtaatactacacccatatgagcagtgtgctcatgaaagaccttgggtggtaatccttttgtgagcggatccgctatcatggagttt

SEQ ID NO: 283339 - DNA, 530 bp, Cannabis indica
tagaagtcgagaagcttctattgattgccattagaaaaaaaaatgctctagcatcttactaaagtacgttgcttgcattagagtaagttaatcaccaggcataccacaagccacaagtttagataaacgtaaacctacaatactaggatccaaaagttttgttaagtccattgaataaatttattttcaaaatttcctttcttatccttgtaatagaaaacttttagttacttcatatgaatggtttaaccatagttatcttggttttgcttctacgttccttattctgaccatccattacttgttgaaactaacaatggatttttaatcacaagtgtctcccaagtcataacagggtgagttccttgaaaccctcccactacgacaaggtacgatgactttctatctaagaacataagtggtattgtcctcatcggttgtatcaagacaacaagggcaatgtgaccatcttatgtagaataagattgtaatgaccgctctagtaatgtggattagaaaaggcaattagc

SEQ ID NO: 283340 - DNA, 459 bp, Cannabis indica
cttcgaaactttgcatttcttgttggaggaaagtactttctcaagaatttttcagccaagtcattccaattagtcaccgaatcgggaggaagagtgttaagccatgctctagcccgatccctcaaggaaaatgggaacaacttcaatcttaaagcctcttcacttactccttgtagcttgaaagaatcactcacctccaaaaatgagcgaatatggaggtgaggatcttccgttggcgacccaccaaattgaccaaccgtttggagcatttgaaacatgacgggcttgagctcaaagtgaggtgcttggatttcgggtctcacaatacccggatttagctcattgaacataggggctgcatactctcttattgctcgggctctatcatcggccaaagcaataggattggcttcattatgagcacccccaatttcaaacccatcggccatattgcagcgt

SEQ ID NO: 283341 - DNA, 581 bp, Cannabis indica
tgatgaggatttggattaattttttaaatcaaataagtaaataaatgatctcatgaaccaaataacacattaaaaaagtaatgaaattaaatctgtttctttattgataattgaataggaatgattacattgaaatagagttttatttagggcacaaaccccaacaaactcccacttgcactaacataaaacaatcagtacatttcaattaatcctaaattcaaactgtacttttaaaatgtagctgcagtccaaaactttggtgaatggatcagctaagttgtctttggtgtccactttctccaccagtacgtcccctcttgccgcatattctcagatgatgtggtatttcctctctatatatgtgtttacttctcttgtggcttcgaggctctttactattggctatagcaccagtgttgtcacaaagtaaaaccagtgatttttccattccaggaacaacacaaagtcccgaaaagaactttcttagccaaacaagttccttagcagcctcagcatcagttatgtactaggcctacatggtagagtctgatattgcagtttgcttaacacttctccaa

SEQ ID NO: 283342 - DNA, 682 bp, Cannabis indica
acatgcatgtatggatcctctttacctaacccataaaaagatggcaaaagttgaattatggaaggtttcagctcaaaatgtgtagcatttgtttcaggaaaaataatgcatgatggtggattagcagaaatgggagaaaaatgatcaataagagttttttcttccacatttacttgatttggttccatgatgtcagaattttcacttttaatttcaacccacaataattttctttttaccaaacgatttttagaatttcgttcccagcgaatcatacaccaagtatcacaaaaattaaaataacatgaaaaaattaggaggcggtgcctaccatataattgcgtaaataaagactgaatttaaaatatagcgggaaataaataatatgtatatatttgacagaaatataaatactaatattaatatatgtgcagaaataaagacagaatttaaaatatagcgggaaataaataatatgtatatatttgactgaaatataaatattaatattaattataatttataatatatactttattatatataattataataataatatacttttcttaatagttaagtaatgtatataataataaataatatataataatatataataaattttttatatatatatcagtttacataaaaacgtaaactgataataataataataata

SEQ ID NO: 283343 - DNA, 633 bp, Cannabis indica
tgcttcatgaaacttcttgtgttgatactgcacctcaaaatggtgtcgcagaacataaaaacagacatcttcttgaaactgcacgtgccctcttgtttcaaatgaaagttcctaaacctttttgggccgatgcagtttccacgacatgctttcttattaatcgcatgtcatcctctgtccttaatggtgaaatcccatttaaaattctttttcctaataagtcattgtttctagttgctcctcgagtatttggcagtgtttgttatactcgcgatgtccgaccatctgtcaccaaattagaccctaaggcactaaagtgtgtctttcttggttattctcgtcttcagaaagggtataggtgttattgtcccgatctcaacaaatatcttgtttctattgatgttacctttgtagaaaatacaccttatttttcatcttccactactcctactagtcagggggaggaggatgatttgttggtatattctgtcacatcctctacacctgctacatgttctgacgagtctcttgttccttcacctacctcggtcataacccccacaatgtctacacctccaccacctccaccaccacctccacctccaccactccctcggcctcctatagtgtaca

SEQ ID NO: 283344 - DNA, 490 bp, Cannabis indica
tgaattatttatagttaaaattgacagatggttaggttaataaaatagggaaaatgctgcccgatttttcgtagatatgtttatcaattgcatggattaattgatagatatgagaatatggtgttaatgtaggttaaaatagaatgtctggtcaaatcgattctaattttgaggatgatgttgattttgtgccatcaactacaaatgaagtacaatctgttagcaatacagtagatgaaactcagaatcagagaaaaagaacttctcgtgcatgggatcatttcacacgggaaaaaattgatggaaaaattaaagcagtttgcaagtattgcgagcgtaagctggtgggagaaagttctagtgggactaggcatttaaattctcacgtgaaaacgtgtcctgtaagaaaggcccaacttgccgccaatcctagtgcaactgcaagcccttcggtttcttttaattttgatcctgatttagcaaggaccaa

SEQ ID NO: 283345 - DNA, 742 bp, Cannabis indica
gtatgttaggaaaaaaaaaggaatttagttgttatattagtatttctaacgagagtgtatgtttcaggtttaataaattagacatatataactattggtacgttcttaagtttgattttttttaagtgttaatggatagataattttaagctctactcttttattagaaataattaagttgaattttggttaagggtgaaatctaatcattaaggttataatagaagaacagattgtgacagtcagtagtcccgtgattcgtaaggggatataccgggtaagctgtgcaatcccacaccgcttggggaaggtcaagtgtgatgattctgaggctgtgtaggtatgggactacacagttgaagagggcttaaatggattgattggtactaccagtagccagagtagcgtactcgtgtataagagtcattcattctgtgggtgtaagggcccaatggaggcttgaagcgggggcgttacaaatggtatatgattaagtgagtaaaagaaaaatgtatatgagaattggattaagtgatttttgttctcgtgttattcttagaaagagtgattttgatagtaaattttattcctatttcattagttggatggattagtaaatgtttcttttatagtgatatgcatgtagctcattcctgagagtatgttaacttgtgtgcttctaagcctatatattggctagctcgcatgtgtaagaagacctttaacgatctttagcttacat

SEQ ID NO: 283346 - DNA, 486 bp, Cannabis indica
aatgtgtatttggatatttttctgatcagaaattatgttattcagtttatttcactttgtacatttaagctaaagttttgatctccataaagtaaagtaggaccaattgaaaattgacatgaatagatcaccatgcatgtaattttcataccacattatcatgattgatctatgtcatttggctatgttgatatatgtgaccattgatgggtttagttgtgattgatacaacgaaaatcgctttgatcctatgttgatatagttaatggacgagattgcacatgcctatggttatgatgacagagttatgagctcaataaggttaacacgtttacatgtatacatatgtgaccagtgggagattgttagacataattggggttacaattgtatatataaaatgtgtgttgggtcatcaaataaataagtcaaatttatgtggtctattttggaataaagtttatgacttaagggcatgattgtcat

SEQ ID NO: 283347 - DNA, 235 bp, Cannabis indica
gttcttcagttggatgtgatccttcacagtcttccaaactataatgaggtactgaatgatgtgtgtgggcacttctctctcactaggaatttcgaaatttctctcttgttttctctcttgatttcgtgtgatacactatgcaaagcaaagttttctctttcaagcacaccaagagaagagagggggcggcaataaataggaaaagggaagaccacaactttccaaataaacagtt

SEQ ID NO: 283348 - DNA, 567 bp, Cannabis indica
ccatgtcaaggaacgccatcgctttttcttctccttcgggtttcgagctgtggagcatccgaagcttctcacggagtgggtcaggattcctccatacgagcggaccgcgcctactcagatctttcttcagcgggctcaggtctttgcgacttatgacagggcaaatctcgacgtcgggggcttggtcacgacggagaactgccggaaggccaagctaatcctgccgtaccagtcagtggaggactctaacatttctaaggttatctgcccgaacgtgagggttccggccgtggagaacaccttccgggatgagcttattgccaccgcagagaagaagtaccaggagtatctctactggaaggcccaggagaaggcttataccaaggtccaggcggcttccgggaggccccttcgcgttgggagcccagtcgagaggagaagccaagcgattgctgggagctcccttcgcattgggagcccggttgagaggaggggtcccaggccaaagccttcggttcaggtgctgaatacaggggctcctgacgccagtacttccggctccggtaa

SEQ ID NO: 283349 - DNA, 491 bp, Cannabis indica
ctctctctctctcttcttccttcatatttcgaaacccttagtgattagagtagtgcccacacacaacaagcaatacctaaataatttccaacacatacaccaagatgtcatcgataaacacgatcacacatctatctaggtaatccttgaacacccgattcatataatccatatcaaatatagtatacagccttggcccgtcactcaccttgatggtgcttcttgcatttagggcacttgggatatgatccgaatgaggacccgcagccctgacggccacctctgtttccccagaactttctattaccccctgatactccggaagtctcagccttccgtttgtgattagggttgccactgtcggtccccttactgacattaccactagcaggagggttcgatgccatgacgacatcctttacagtcttctcttttgcaacatgttgctcagcctcctcagcaatcaaggctagctctacaactttcttgta

SEQ ID NO: 283350 - DNA, 832 bp, Cannabis indica
cccaaactcagaccatgactcaaactgcgacccgaactcaaacccaaactcgaactcaaaatcgcaaatggaactagaaccgaactaggactacgactaggacaaagacaaggacctaaacccaaacccgaacccagatcaaaaccaagacagagacctaaacaaaaagcgagagtaggattcgaacccgaacctaaaccggcacacaaacccacacaataaccgggacctggacccagaatcaggatagggacttgggaaacagaactaggaacgagacctagtacccaaccaagacccgaacttgaacctaagacccagctcgtgacccggcaccagatatggaacctgactgggacccgagattgggatccggatctggacccagggcttggacaaaacctgtagtcggtgtctggatttaggacccagccctaaacccgaaccttgacaaggccccaacccacacccagatttgaacctagtcccaaacccaaaagtggacttgaagccgtatctagtgacccaaaattggaacataaaccggaagttcaccaggacttgaacaaggacttggacttggaatcataactgaaatttgacctagatccagaactgtaaccggagaaggacccggactccaaatcagacctagacccgaattgggagctggacccggatcccaacccaaacctggactcgggacccgaacccgaacctgaactcagacccaaacatggaaccatacaagggacacagaaccagggtcaggacctagaaccgcaccccagtctcgatcccaaacccaaactcagaaatgggacctaggacc

SEQ ID NO: 283351 - DNA, 1256 bp, Cannabis indica
ctatcattagttttcttattttacaatttttcagacaaatgctatcttcaattattaacaatttagagatttgatttttaactttctttttatcctacacccatttaagtaatgtttttttaagtattggaatattaatttttagtttatttttggattaacttaagaacatatttaaatcatcaagctttcttaaacactataatatttagatacacataataataatctcacctaataactaataatatatattttttaatttttaattgtaatacttttaaataacatagaaatatattagtataaaatttagtatacgtgcatcgcacgtaattttttgctagtatatatatatagaggaaaagtatgaggcagtgatatggcggtctaaaatctcttcaaagctatttttcttttttctccttaattttctcaatttgttaatattttattaaagcataaatttacaaattaatataatacgattattttaataaatttccataaaaatatctaatataaacttatttttttataaaaaaaaaacacaataaatataatacatacacgtttttcttcttattatgattattagtattattatatctaatttaacttcatatatctccattacacaaaaatatttactataattaattagtaattaaaaaaattaaaaaattaaatttgtaaatatctattctttttaattctctcttttttttgtaatttttttgttctatttaaattctctcttttttttatttttttaatttttattttatttaattaaagattactaattaattaaaaaaaataaaaaataaaaatatacaactatatataataactaataaaaaaatatatatatattaaaaaaattatctacatatatacaattttttcagagaaagatataccgttaatattaactaatataatttatcaaaagaaattattagttaatatactaaaaatatcaaaatcctaaacttgattattttttatcaccccctttctctttacataataaaagtaagtatttacctattttgaagaatataaggtgtgatacggtgatgacatcaactttaaatgcaatgataactaaaaatgagatacggtgatgataattgttttaaaattatatgatgagttttctatagatttattgttcagtttctaatttttcttcactataatgtacattcaaaaaaaattgtgtgcttttttatttatataagaaattgtat

SEQ ID NO: 283352 - DNA, 715 bp, Cannabis indica
tcaatgagtgattttcttgaccgagccgaaggcttcatcaagctcgaagaagccattcaacaagcggaaggtgagcaaaagcctggcaagtcaaaggctccttctactggaacatccgcccaacttccccactgcccaagtaattcaagctcaagtggtaaacgttccaacaacaaccacaagcaagggaatgggaaaaaaggaaagttcaccggcaaatccgaacaagctccccgggagaatcatgccaagtacacagctttcactattctgactgaagatatggaaagtgtgtacatggcaactcagtcgctggccccatataagaagcccgggcccatgaagaaagatgccagcaagagggacatgacaaagttttgtcggttccagggagactatggccacgacactaatgaatgctacagcttgaagtgggaaattgagttcctgataaggaaaaataatccacacctgcaaaagtatgttaagaccgatcaaggtcagaggaacgacaacaaccaagatatgctacctccaccggtagatgggcatctgcaagttattgttggaagcccacacattgctggagattcaggcaaaactcgggagaggtatgcccgaacagtgcagtacgagcaagaagaggttatcctggccgtggaagaaggaagcccaaagttccacgagcaggagagccgaccataaccttcaacga

SEQ ID NO: 283353 - DNA, 1130 bp, Cannabis indica
gttagagagagagaagagattgatatgaataaacaacttcaacatgactagtttctttattaactctccaaagtaattttacaatttgagacaagcactacaagaatgtcactttttaccagcgcattccgcaaactgcgctggcaagatgtcaaagttttaccagcgtacatttgcagtggctaaaatctaacttttaccagcgcatttacgcactaggataagtcatttttaccaacgctttaattttatgttggcaaaagttttaataccaacattgatttgccaaccccatttgccaacacatacaagtaaattctattttaccagcggaatattagcttttgccagcacaaaatgtgctggaaaaagtgacatttcttatagtgaagagagattagtgttgggactcgttcttccatcttattgggccgctacctcaccttgactctcacattagtatcatgttgttcactttgggcctaagctcttacggttttatttttggacacctttccaaaaggcctcatactaatgagaaggtggaatacttatatccaagacaactcttgtatattcttccaatatgggacttggattgatccccaacaattctcccgtcaatgcaaggaccacatactcgtggcctccctttcagaaaaaccaccttatgtcgtcattatcaccaagagaactcgtcgcatgaccatcacctttgtcaggaagacttttgacacatgtcctaacaacgatctacccactaaaaaaaactgctactttagtaacaatttttagtcactaacataattttttgtgactaaatgtgacttttagtcacaacaaaatattacttgtgactaaaacatagtattagttacaaattgtcactaatttagttttagtcacaacaagtattgtgactaaaaatacatttagtcacaacaaattgtaaattttgtgactaatacctttatccacggaccttttaatcacaccacaggaatcatgatttataattagtcacaattttttcacttttagtcacaagttttgttgtgactaaaagtaaaaaaaaaatttaagtgtccatcttgtacagtcgtaatcatcaacggaacacaccacttaaa

SEQ ID NO: 283354 - DNA, 489 bp, Cannabis indica
gtaaagcctctgaggatagtgctattaacatgatagaaatgttaaatatctttcaaaaggcctcaggacaacaagtcaatctacagaagtcctctatatttttcagcgctaatattgtcaatgaggtgaggcaacatctgtgttctatgttgggagtgaatgaggcaggtgatgatagcacatatttgggtttgccaaatattgtgggtcgtaataaaacggccttacttgggttcttgaaggataaaatgcgtaaaaggattcaaggttgggaaggaagattgctttctagagcagggaaggagttgctaataaaaactgtggctcaatctcttcctagttatgcaatgaatgtgtttttgctacctgtggaaacttgcaatgagatggagcaattgatgtgtaagtttggtggcgatcatcgaagaacacaaggaattcattgaaaaatgggatagattgacggtacataagtctaaaggtggtatg

SEQ ID NO: 283355 - DNA, 500 bp, Cannabis indica
agaatcaggatagggacctgggaaaatgaataaggacatggacctattacccgacaaagatctgaacttgaacctaggacccagctcgtttcccggcaccagaaatggaacaagactcggacccgatattgggatccggatctggacccagagcttgaacaaaacctgtagtcggtgtctagatttgggacctagcccaaaacccaaaccctgacgagcagaagaacccacacccgaacctgaacccagtcccaaacccaaaagttaacacgaacccgtaccatgtgaccctaaattggaaccaaaaaaagaagttgaccaggactggaactaggacttggactttgaatcataactgaaattggacctagatccaaaaccgtaaccagaccaggacccggactccaaatcaaacgtagacccgaatcgggagcaggacccggatcccaacccaaacctggactcaggaccctaacccgaacctgaactcagacccaaac

SEQ ID NO: 283356 - DNA, 516 bp, Cannabis indica
ttttttttatatgttagaaaggaatttagtactatattatacttatatatagcaagagaaagttattaaaaatgcatactaatataccttgtgagctaattcccccaccccaaacttacaacccaacattgtccccaatgtggctaaaagtataatcttgaattagctcgccacaaattacactcaccgcactcaccccaaacttaatgtgaaacttggctcttgacaagtgagcaattaagttaggacatatgtggaaatgcaatttaggatggatgtgatatgtgtgattgggttgcacaacaaaacgaggctaacggctcaaacttgggtgactagggaaaaattgattgatagggagggttagaaaggctcaaacgtccaaggaaggcctaaatcatttctaagggacaagtctaactaggatttcgcttcaaggagatgcactaaccaattctagatgctaaaattacatgtgaaataatcgtatgagaaaggcaaagcatggtggaataa

SEQ ID NO: 283357 - DNA, 861 bp, Cannabis indica
cctatgacgaaggaagttactcagagctggtgcttctcagacaaaaagctatcgatcatgaagccgagatcgaagctcagaaagcgcaaaaccagaaaatgcaggaagtgatgctagccatgcagaaagccatggaagcagctggcattcacgtgcaccccaaggcaatgaccgctggactcaacagggagccagcgacgtcttcgcctaattcccagcagcagaaatctagggaacctagccctataagatatcctgctgagggaaatcagacaaaaaaccctacttctacccctaaagggaaaggtccgcagaggggcaagccccaaaaagggagtcttggccctcaggatcgaggggaccgaaaaagcgtttctgtgcaccaggaaccagggggtagagggagaagaggacagagatgtcctcccattgatctgagaaatcaaatcaatgggaatcaaggtgacctccgggatcaccttgaccaaaaaagatacgggcccgtggtttcctcgggtacgttaaatgaaggaattatggcggaactcgccatactccgaaaagacattgctcgagtctcccggaggcagaagggagacgactccgattcagacagcgaggatcgggagccatgtgccaagcacatcctggaggcggagctccctaaaaacttcaagatgcccgaaatggcggcatataccgggaactccgatcccagtgaccacctgtcacggttcaaccgtgtcatgacggtcatgcgggtcagcaatgatgccaaatgtctgtgcttcccactcactctgagtgggtccgcggaggaatggttcaaaaagctggaaccaggatccgtgggctgttgga

SEQ ID NO: 283358 - DNA, 625 bp, Cannabis indica
atcaacaatcaatgtacacttgtgtatacactttctaggtttatactatttttaacctaattcaataataatttttttagtagtgaataaaatgtatcatttttatattaattttccaattattgagttctattatcaagaacacaattactaatgaatatgttctaagaattataaacattatgtatttaaatttatttttaaaattatgctaagcatcgcttcacgcagtgttgcctaacttttctaaattatacatatatattatatttattgagtgatataatttaaaatataatattttaatgtatgtattataaacaaagtcttaatattgacattaaaaaataattttaaaatacataaaaaagtaacaattttgtgaaaaatattaaatggtagaattaataaagaaattgcatgtgtttttataataaaataaagaaaaaagataatagcttctcaatttaataaactgagcttgtaactgatggtgtatttgagttgctctgttagtacttagttgttatatgggttgctatgtgaattttcgtaaaaaatacaaaaaaaaaaaaaaacaaaaaaaaactaaattgaaaatgtaaaaatgaaaaaacacctaaat

SEQ ID NO: 283359 - DNA, 500 bp, Cannabis indica
agggtatggaccgcaccttgagtactgttaagtgttgtaccgcagacaccttgtacctttctgtacaagtgctggtaacaccacagtgtactttcagacatcatacactttaccaatgcactctgtaccgcaatcgtacaagtgttggtagtgtatgaatcacaacatataagcatgcatatacacttaacatatacatacactcgcatattcatattacacattatatacagttcttaccttctttccagattcaaatgaattggtcaacctgaacggaaagtcccgtgctaaatggatgccctaatcacatattgaaactggacaaatcacatgttcaaaaccctaaactggaaaacctgagtccacaactcaaggctctgttatactcactagggattacattaacctaggaaatagggaaacacccaactatggcactgaaatggacgagaattgagaaaactggttttttgagaaaccctgccaaaaccggtata

SEQ ID NO: 283360 - DNA, 579 bp, Cannabis indica
cctttaaatctaagaaattcaatagttcgtaagaatttcttaatgacttgaaaagttcataaggcatgatttggtacatgtttaaattcaagtggtaaaaattctaattagtacaaaaaaaaaatgtacgaagataaaattttactatttaatttaaaaattattataatatgtataccttttggtaagggcaattccagtagtaaatgttaaatttagtgttaaatcaatacaaaaatgataaaattttggctctaaatttttttctatttcatcaaaatactaaaattacagtaaaattatatatttaattaaattataaataaacacaaataataaatatacaaaaaaattaagcataaatatatcgtttaaatattaaaactaatagaaaaagatttggtgcaatttatagtgtcatactaataagggtaaataccattttggactctctgttttacaaaagttaccaactggaccttgtgttttgttaaatgacaaaatggaccctgtattttctaaaatagtacaaatcggaccctgaattgattttttgtcaaaataaaatttaattataat

SEQ ID NO: 283361 - DNA, 569 bp, Cannabis indica
gaaaaatggcatttttgggaaaatagaaataaaattgtggaaactgcaaaacccatgtgaggcccattcacaccatggccggccacatgttgtgtgtttcccaattattattttcatttttaattgccaagtaattgctaacctaaacctagcagctatttataaatggaaagtggtggatcacaccaaataaggcagttaatcaattactcagtaaaagaggaaactgtttattttggaaagttgagcttcccttttccctatatatagcagccctcctctcttcctcttgcatgcatcattcacacacgaaatcaagagagaaaagagagagagaattcgaaatcctttgtgagagagaagtgcccacacacagcaaacagtacctcaatcatagattggaagactgtgaaggatcacatccatctgaaggacattcgggctcagatcttgattatactctgcgacagacaggaatcaagggttagagatctgagtggaaggagacacattattccgctgccatcactgtaaggtttcttaactttttatgtgttttatttatcgtt

SEQ ID NO: 283362 - DNA, 762 bp, Cannabis indica
cttctatttctgtccctttgttcaagcattgtatttcctgtcctgattcctgcttttgccatttttattttatttttttgctgttaataaactattaggaaactaaaataaaactattaagaaacgtcaaaaaatatttcagaaactaaccatttctcaaagtgttttctcctttctcttttccaaaataaattcctgtcaaaaaatgtaattaaactattataaaatgattatgcaactgtaaatcaacttaaaaaccacaactctttactcaaattaacatagttgtttgtcattgtgacttttcatcatgtttatttgaatcagatcaatttccaactattataaaactaatttgccaccatttacataaatcgtaccttgtatatctgctagtttttggtacacgtcaagtgacactccttcataatttgtaaaccattttaaaacgatattgcaactgtaaggcaacgcaaaaaattaaaaacagccttattcgtaacatgtggttccttaattagaatcagatcttgttttttgtttttaagaatctgaattgcctgttgtacaccagtgaatcaaccagaatgcaactgtatatgacgtatattcattgttgaaataaattttcatatcatacctttttttggattcgagggggagctccagatctgtttaatacagatttacattgcttcaatctggattttcgaggctggattgagtgattttgaacgataaaaaccgaaatcaaatgtttaa

SEQ ID NO: 283363 - DNA, 659 bp, Cannabis indica
ataatttgatagatatcaaagtctggggagcataatttagtacataagcaatcactaaaatagtaaaattgaatgaaattagacaaaagtccttaaattcaacaatctcaatagttcaacgggtatttttaacgaccttaaaaattcaagaggcataatttggtacatatcaaagttcaggggtaaaaatcttaattagccatttctttaattatacattactcaatataattaatatttagtataacaatttcattagatgataaaaacacagtggcaaacgtatcttgtccatcatcaatcgttttcttttaaacttttatcaacataaatcaaaattaattagcaaaacttaaccaatagtattcaaaccactaactttccaagtgaaatattgatcacctcacaattacactagagatcacaagtgatctataaagaatataaatatacttataatattagttggttaaaacactaattatttttgaatttattttcttaagaaaaacattataaaataggttgtcattttttcatatcatattttttttggtcctctaattcccttaacaatttttttgactactctttttaaagaggacctataattttatgtacaaatgcacaatatcttgaagtggatcgtctatctacct

SEQ ID NO: 283364 - DNA, 607 bp, Cannabis indica
tatgatggtttaaccccttcaaaccgacaaatgattcaatctatgcataccggaaaatttttgaaattacaaggcaagaggcttgggaagctcttgaagaattatctgttaattcacaacaatggaattattctgagcctaggtctagagcaaataattcacctaaaagaggaggaaaatatgaaattaaagaagaaactgatttgagaacatcttttgaaaaattagcaagaaaagtagaagccttagtcataagtcaaactatgaattctcatgttcaacctaaaaaagatgtttttgctagtacttgtcataatgatcaatcatgtccttcttttcttgaaacattttccgaagaggctaatgcattacattcatatggtaaaccaaatgatagcccattttctaacacatacaatcctaattggagaaaccatcccaatttttcatggagacaaaaccaaccacaaatgaaccaaggaaaccaattcaacatgccaaatccgaatcatgcccaaccaagtcaaccttaccctccacaaagaaagccttccttagaagacactttacaacaattcatgcaatccacccaacaaatcatgcaaaa

SEQ ID NO: 283365 - DNA, 496 bp, Cannabis indica
aattccaaaaattcatgaaatctgctggaaataaaaagaacttttcaaagaacccaaaaggtaacatttctggtaatattccctctaaacctttttcatctaacaataaaaaaggtattaaatgcagagaatgtgaaggttttggtcacactcaatccgaatgtgctaataccttaaagaaaaataaaaagggattaaatgttacttggagtgatgattctgagagtagtgaggatgaaaaagaaaaggttgtcctaacaagtgttttgtcaagaaatttgcaggaaaaagaaaagagcatttgcttgaacaatatcctgatcgatgacaacaaggaagaatctagatccgaatcagatgagtcagaaattgatgagaattctatggctgaatcctacaaggtaatgtttggtaagtggttggaaacatgtgctgaaaatcgctccctggttaaagataataaagtcttgtgtaacaacattaatgagttggaaga

SEQ ID NO: 283366 - DNA, 651 bp, Cannabis indica
attacatgaaccggctcgttcctgaggtcagtgagcaactggctggtgctgaaaatgactcgtctttggatgtactggtggcggagtcttaaagaagtttcaccagggtaagtcgtttttttatacttcccttaacttttccacacttagctcaatatgctaaagttttttctcggggcaggccgctctgaagttgggcctacacttactctcaggctaagtctgttgcttccaagaacgcgattctgtccgacaccttgaaggcggagacgaccccaagaaggaagctgaagaagccagggcggaaggcggagctgtttggttggagttgggcgaggccaacaagaagttgtttgctgctgagaagaagatctccgtgctgactaaggatctcgaggttgctgacagttttgaggagaccatcgagatcttatccgctgaggtaaatagtcttcaagatgagaggacttctctgcaagcagttcttcttcggatgaaggaggagaaggatgccaaggaggaggagctttcaaccgaggtggacaggttgaaagagaaggtcaatgccttggagatagccagtttcgagctcctctttgatttttggaaggctaatccccgggccaacttcgactacttgggcgatgctaa

SEQ ID NO: 283367 - DNA, 711 bp, Cannabis indica
atgatgacacatctatttaggtacacctccggataaaagtgttgtcgcctcctcatcaaatgaaatgccgcatccaaatgctaaaacatgaaaattaaatatgtcagagattaaataaaaagagttagataaagtctttaaaagcaaaagaagtaaaaaagtcttaaaaacttacatcgtccccaagccatgtcctcggagtatgtagttcgaggaaccaagccgaatcgtgtctaccggtgaagcactctctcgggtacttgttcccaatcttgctgagtacccaactgtgaaaagtcctgagcagcttccgatcaaccactctaagtgggtccgcattcatgagtgtcttcgtagccctagacttcttttttatttcagtgtactcatcgaaccacctaggtcgctttctcttcctccgattctccacgagttctggagctgtctctaacacttgtacctcagaatcctgagtatccccgatctataatcatttgggagaatgaagtcattttccggtgattgagcctcttcttctggttgtggctgtggctgtggctgtgactgtgaatctgctgccgaccttccaggatcttgcaggagcctcattatggtcttcaactgatccataatccctgtttgtcctcttagcagagcggtctgcccttccctcaaagtaatctaccccctctccacagtctccaaccttgc

SEQ ID NO: 283368 - DNA, 815 bp, Cannabis indica
agtttggaaaccttgtgagtaccccatgttgaaccctgaaccttgtggcctgaactgatgttgatactgagactgctggcccgattggggtgtgaaaccataggatgaagactgagactggtttgtcctgggctgtccatgaaaaggagtagactctacatagctccctatgggtcctccatgagatgcttgaaatctttgttgtcgttgcgggcaatctttcttcttatgaccttgttgaccacaactgaaacacccgtatggtccactacgagtctttccagatgaaccactactagtgctacccccactaaattgttgtccttgggaccactgtccttgattcttcttggtcatctttcggtcatttcctcttcctctgcttgtgttcttcttctcattcccctctacatgagcctcagttcgcaaggctgctgtcacacactcagtcaggttgttaaaggtcaaaggggctataggaccacgtatcgcaggcctcaaacgacgagaactgttcaatcaccaagggttgatcaacaacaccaggatatgcataagaggatagctctacaaacttcatgtaaaattcattcacagtcatatccccttgtcttagaccatcaaatactccaataagagccctcctgtgagatggactaaaatattgttccctgaaaacttcctcaaattctcgccaagtcatcccatcagtttccattgtcctggacaaggtctcccaccaatctgctgcaccaccctctaacttggacacagcaaaagtaacttgatattcctcaggtgttcctattgtgttg

SEQ ID NO: 283369 - DNA, 509 bp, Cannabis indica
aaaaaaaaaaaaaacaagaattagggccagtttggcacaactgtgctgtgggaaaaaacagttgtagctatgctgtgtgaaaaaactgttcaatgtttggtaaatataatttcaaaacagctgtcagttagaaaagttgtatataagtgtggtaaactaaataagtagatagttgtcaaatatactaggggtgctcattggatcacatccaatatttttaggtctatccagatccgatccaatcatatattggatgttagattttaccatatgatccgatccaataaatttcagtcatccaatcaatccaatatccattggatgttggattggatcggttctatccattggatgtgtaaagtccttttttggcaagttagttgacaaaataatttttccttttatagtaagattgttgtgcattcatattcgaattcttaccttataaattcggttttcagttgctcttttccttgttaggaaagttgcactttcagctgaactttcct

SEQ ID NO: 283370 - DNA, 926 bp, Cannabis indica
gaaggatgacgtgggtgtcgaggaaaaggatggtgaagggacgaaggatcaattggaagaggatgttgatgatgtagagagtgtcccttcacttaatctatcagaagagaaggtcgttgttccaactaaggtggttgtttctgatgattcgtttgaggttatgaacttttggggagaagatctccccgctattgtaaaagaggaagttgagcagacagtgaaggatgattttgatgatgctgcgttcgaaagattcaaagaatctggagggaaggtgattggtccgttcactgtgaagaagggttactcaaatcaacagtacgagttgttccgttacattttctctagcgccaatgatccgaggtaatctcatgtgtcatgattactgtgtacgtagttgatattagtacattcgtttcgttgttgattatttgtttggtatttcagtgaagtgttagcccattttgggaaggttgaggtcgagcggaggtatttcaaatgcatgaaaccggagaccgatatatcaaacagtgtacgtagaagttggcatttgggtgctttgaaatttgtagttcattattttagttaatgccatttacaaattgtatgaatgacaacataacggatattgtttgtgtaaatgtcaggtcattgattgctttgctcaaatcatgaattttcgagagaagaagcgcaacggcattggaagaaagagaacttggtttatgcccaccagaatttcggtatgaaatttgatatttaaaagtggacatgaatcttttgtatttgtgctgtaaactctgttaaatctatgtttttatttaaaatgtaatctattatgtgtgcttattgtgcagagcaagttacttggaagaacgatgactgtggagaggatggcgaagcagcaagagtggtccactctttat

SEQ ID NO: 283371 - DNA, 594 bp, Cannabis indica
agaaaaatgtcagagcaccgggtttaattacctcggagtgtgtcaccaaatagtttagatttattttaaataataatagtaataagtatcttggtatttatatgtataaggcatatttatattattagcatccaatcctcactaactgattagcttttggttctcagacctaagaaaatgcctccaaaaggaaagaagacaaggagaacggttggagaagacgcccctcaagctaatgtccaacctccacaagctgaattccctatgaacgcccttctcgaagccttaagagctattcccgctcaacagatggatcctgccgctcgacagagtcatcattttcaagtctttcatcggatccaagtgcctgagtttgagggtggacaagatcccatggtagctgaaaggtggttgaggcaaataaagaaaaatttcaacacaataggaacacctgaggaatatcaagttacttttgctgtgtccaagttagagggtggtgcagcagattggtgggagaccttgtccaggacaatggaaactgatgggatgacttggcgagaatttgaggaagttttcagggaacaatattttagt

SEQ ID NO: 283372 - DNA, 744 bp, Cannabis indica
attcttggattatcacaaaagagctatatcgataaagtactcaaaagtgtgatacaaaattaaatgaccaattatgttatgggtatcaaaagagtattaaattatcatggaaataatgtgtagataccataagttaatttataatttgttgaggggccaaattataaatatccaaaactaaatctaagatgagtctataaataggtagtggtccccaagaaacactagggttttctgtattctctccttacccattagagaacatactttagaaagatagtgtattcttagaagatcaaaccttctctgtaatctttaacaatagattcaggttagtgctgcttctgttcatgttttatcatcatcttcttctttaatttagcaaatgttttatagatttatgatttagaattttctatattaaagcactattaggaatatgattagatctgtgatatttatatttctttagtgttttataaatcctaaaaagtttaggttccatccctcaaaattcatgctttaatcttgtatgaagattaagcaatttgttaaccttacacttttgactccaaacaaatcatgctagccaaatatagtgtccacctttaaggtgaaccactattctccttaagtatttaagctttgaaaatgcaatcataaaatattgattttaacacaactcaaattctcaataatttgtatatcaagcatataaaaattaaacactaatttagacaccaa

SEQ ID NO: 283373 - DNA, 511 bp, Cannabis indica
caatagtgtttgcttgtgacaaatttcgaccctacctgattggaaataaggtaattgtctacacagatcattcagcaatcaaataccttatgaccaagaaggatgcaaaaccaagactgattcggtgggtacttctacttcaagagtttgacttagagataaaagataaaaagggcaccgaaaacctggtagcagaccacttgtcaagattagagctggaagagagtcagaatacaaaggaggtacaaataaatgagcaatttcctgatgaacaactctttagtgtgagggaaaacctgatggtaccgtggtacgctgactatgttaatttcttggctgcaaaaataactccgcccgagctttcgcgtcaacaattgaagaaattcttttctgaggtgaaacattactattgggaagaaccaatcctctacaagcactgcgctgatcagataataaggagatgtgtgcctgaagaggagatgtattctatcctaaatcattgtcatgcttt

SEQ ID NO: 283374 - DNA, 674 bp, Cannabis indica
gatcatttcgcgatggctcggacaagcaaagcaaaccattacaagagttcacaatcttgtacttgtgatcttttggcttcaaattaaggcaacgattcttcttcttcattacaggatcgtcctggttttgtaacacaatttcggcattgcgtaccgggatcttcaatttagcattaagtttcatgtgaggagaaatataataaccatcttctacatccaatgaaagcctgcagagatcaaaataagattcaaaaccatagacaccatgaatatcaggttcaaccaagtacagagttctcgaaattcgaatggaatccagagtccggatcaagaattgaggctttgcttgagcgaaatgcaacttagcgaaatgagattccgatatcagattgcgccatttcttgcagactgatttgcagaaaacaatgcttatagttgtgagaccaagaaaatttgaacaaggatttgatcaggaatatcacttatggtgaccgaaccagacatttgaatcagctcatcatcaaaatgactcttgtcgacatcacaaactatagatgttcgttttctttttcacggccatattcttcttttgatttgatcaatgttacaagcataatgcatacacacaaacacattcatcagatacagaatatacatatatacatatatataaa

SEQ ID NO: 283375 - DNA, 577 bp, Cannabis indica
atcatcgttcacaaactcatttttcaaccttttaagcaagttcagagcaaaaaaagaggtttttagctttgagtttgctggaaaattttcacaagaactgttcgttcagctttgcgtaaactgtatccagacgtcgatcattgagtaagttctcgatttctcttactttgcacatttactttctgaatgcaatcttaactttgttgtagaagatatgtagaaaaccctaggttcagaaactctgtgattttcctttgtgatgattcatgcgacttcaccattcatgatgcttgctttttgactgcacaatgtctgtcttttatcttgcttattaaaagcttcgtgaaatttttgccctaactctcaaaaatttcaaacttctgagttttgacttttcatcgaatattttcattctttaatctgttgagtactcactgtcggcatatttgcccgtttaatgttcgatatcccgaccaaacactcatctcgcatgttgtcttttatagatgaacccagttgagttttggggaagcgaacaccgaatcaaccaggatttgcttctactcttgcacgagga

SEQ ID NO: 283376 - DNA, 937 bp, Cannabis indica
atcccccatactgcgaagggccaaggacttgtgatggaatgcaagttgcttggaggttgatggacatatgcggctattcgctgacatttgtcgcatttctttgcaaaagtgaaagcaacttgtcgcaaggtaggccagtaatacccttgtcgcataatttttagagcaagggaattacctcctgtatgattgccacaaatacccccatgtacttcacgtagtatatagtcgcagtcttccctgtcgatacacttgagtaacggctgactaaaacttctgcgatataaccttccatcatacatgacatatcgggcagctcgttgtcgcagctttcttgcttccatcttgtcatcaggtaagatacccttttctagatatgcgactattggagtcatccaggtgacttcttgagcggtatctatttttatgatcacttcttgatttatcgttgggtgagccaataaatccaccggaattacatcgagcaattcggcttctctagtcgaggccaaacgggccaatgcgtctgcgtgtgaatttcgagcacgcggtactcgagacacgattactctcttgaatttctgcatcagttcgcatacaatggctaaatacttaaccaacctcccgcctctggccagatattctccattcacctggcacactacgatttgggaatcgctaaaagcctgtagatactcgattttcatctcgagagcgagcttcaaccctgcgattaaagcctcatactcggcttcattgttagatgcagaaaattcaaaacgtaaagcagcgtgtaccttaaaattgttgggactgattaataagatcccgccaccagaaccttcgctatttgaagctccgtcgacgtacaacgtccatgcttctccattgggcatagcagtgtctgttgggttttatgccctaaataaaactcttt

SEQ ID NO: 283377 - DNA, 95 bp, Cannabis indica
gttaattatgatactttttatggttcaattaataaatatgataaataaacctgagcctctctctctctatctggtcgccaactccgtctctctct

SEQ ID NO: 283378 - DNA, 788 bp, Cannabis indica
caaagcgcaagtaaaaaatgattcaactaaccctaaaacgaaacacattcgttttaataagttttttgcgatgcaaatatgcctcggcaaaagttttctaccaactccaattttcacgctagaattttctcacttcttcttttatcaaggtccaatttgttaagtcctttttaacaaattagttgacaaaatatttttgatataatgtgcatatttttattgagcaattaaattgattttattgtgttaatttcatgcctctaattgctcttttaatttatgggaagttcttttctcagctagttgcatttgtttgattttctcagctcttttaatttatgagaatcttttcttccataaagagaagaaattctctttatggaatattgtctatttttgagaaacttgacttttccttttttctaattgatgaattctgttttgatatgtttttagcaaatcaaacaaactttattagcaggtttgaagtctaaattcgtgatcttagttcaatttaaaaagtttcatttctagtcttgatctgctgctgcaaaattcgattctactgcaaatcaggaaattttttaagaaagttttgtatagttgggcaatcgtttttgtgcctatctttggggttgctatgttttataattaggacctagagagcatcctaatgttttttttatctcttcgaggctcatattttcatgtctacctttgtgagaagagtgtttcatttgtaaaaacctagagtgttcaactagattttaattttcttgttatgatct

SEQ ID NO: 283379 - DNA, 548 bp, Cannabis indica
acgcgctctgttgagttggcctcgcagtcgatgactctgttcataaaggctgctgccgcaggttcgaaggaagccgactcgctgaagaggcaaaatgcccagtttcaggagaacataaaaaggctgaagcaagaagcggctaggaaggagaaggagcataaagagcttagcaaagctaaggagcaggcggaagccgaagtcaggaactcgcgggtgaagatcgaggagatgactcgcgatttggaggctgagaaagagaatgggaagaaacaatatgatcaggcagtgtctgattacatttacaccactctttccaaagttccagacttcgacttctctctcctcggagcagaagctgtgagatggccgaggcttttcgtgctatgtcgcctactcagacccaaggtggtggaggggaccttcctgatgaggtcgagggtgcggatactgaagaagtcgagaacgaggtcatcagcaaagttgcggatgagactgctcctgttgctccagatgtctgattttttttctatgttatgctttttaatttt

SEQ ID NO: 283380 - DNA, 597 bp, Cannabis indica
gcgtatgttccacaaccatacgctcgtgaggatgagggtcaaccacaaacatatgctaaggagtttatttccctcaatgagccagcgctcttgtacaatttcgatgaccatgcggcccatgatcaacaagtatatctctgctctgacaacatcgacaacattgtggcccgagcgtatctgtacgagcatgagggtgacatcactgttcactgcacgccatacgatgattcacatgctcggattctggtttcgaaaatgctgcaagaggacgctgaaatcccaatcccaattgaagggtgcagatatgttagggacgtaccacacatgttccttccttggcctaagcacttaattctaacatccgaggtaacttctcttataaattaattattaatgattagtggagtttgaatatcttcaatattcaaccatagggaagtaggttctgcgaatatatgagctgcagtgggatggatgaacaaactattgttatatctgtgttatttgtcgttatacaagcatgtttataatttttgggggtcattcaattacagccattatgctgtcaaattttggtagaatttggataaaatttga

SEQ ID NO: 283381 - DNA, 683 bp, Cannabis indica
gctttacgttttgaattttctgcatctaacaatgaagccgagtacgaggcattaatcgcaggattgaaactcgctctcgagatgaaagtcgagtatcttcaggcttttagcgactcccaaatcgtggtgtgtcaggtgaatggagaatatctggcaagaggcgggagattggttaaatatttagccattgtatgcgagctaatgcagaaattcaaaaaagtaattgtgtctcgaataccgcgtgctcaaaattcacacgcagacgcattggcccgtttggcctcaaccagagaagccgaattgctcgatgtaattccggtagatgtattagctcacccaactataaatcgtgaaatgatcatggagatagataccgttcaggaggtcacctggattactccaatcgtcgcatatctggaaaagggcgtcttgcccgatgacaaggtagaagcaagaaagctgcgacaacgagccgcccgttatgtaatgtatgatcaaaggttgtatcgcagaagttttagtcaaccgctactcaaatgcatcagcggggaagattgcgattatatacttcgtgaggtacacggggggatttgcggcaatcataccggaggtaactcccttgcattaaaaatcatgcgacaagggtattactggccaaccttgcgacaagatgctctcgcatt

SEQ ID NO: 283382 - DNA, 627 bp, Cannabis indica
atgttgagtaaaactgatgagtttggttttacttggttgattttaagagagaaagcaagatgatccatttcatcatggctagccaagcaatcaagtttttgacattcttatccagctaaagataaatggtctgctgttttatcgacaccagagaggaggttcttagaaatgaagaggatgaggagaatgctaatttgtgttatgatgacttcattattgggcaaccaattcatgaacaagttgtggaaattgatcgtaactttgaggaagacgatgctaaatacattagagacgatatcaatgagggaatatgggtcacatgaacgaaaaaaaaagaaaagaaaacatgtctaattggtaacttacttgtgatagcttacttgtgataatgtttgtttatgtagttaatattttttattagattacttgtgatacttttttttatgtatgtagttactctgttatagctaactttatattttttttaatggtgtagatacggctaacttaggttcacgctcagattcagacccagtaatagagtatcctagagagagacctaaataaggagctactcagatgaatgaagtatcaaagctaatggaccaaggaaaaagacttcctctc

SEQ ID NO: 283383 - DNA, 678 bp, Cannabis indica
ttcaagttttaattttttggatttttcggtctcctttctgcgaacaacaataacgtttttatctgaattctgaatgcttccaactttaagacatggaaacgagatgtgaaaattactttaggcataatagatttggacttatgccttcgagaagaaaaacctgctgatcttactgactccagtacaactgcccagagaactcatcatgcacaatggaaaaattcaaatcatcttagtctcattgctatgaaacgtttaattcctgaacatcttttggtggtttgccaaacaccacaaatgctaatgagtttttcaatgctgtagaaaaactatatgacactggtgaaaacgctgaagctggacatcttatggataaaatgacaaccattcagtttgataaatcaaaggagtgctagattttattttgaaaattattattcttcagtccgagttgaaagatcataatatttcttttcccgacttttacactattcttcaagttcttcatgaacttcctacctcttttagattatcaagacagcctaaacacttataataaaacatggagttttagtgatctaatttctcatgtagctgaaacaagcaagctaacaaaatgaaaagaatgagtcttctcactttgtttctcaactcaagcccaacaaaggataaagaaaa

SEQ ID NO: 283384 - DNA, 497 bp, Cannabis indica
cataccatccccaaagtaatggccaagctgaaatctctaaccgagagattaagatgattctggagaaaacagtgcaaagatcaaggaaagattggtcaaggaagttggatgacgctactgtgggtcatactaaaacagctttcaaaacaccgattggcatgtccccatatcggttggtgtttggaaaggcttgtcatttaccggtggagttagagcatagagctttttgggccatgaagactcttaacatggaactaaaagttgcaggggagaaaagactagttacagctgaatgagctagatgagtttcggaaacgaagcatatgaaaacgccaagatatacaaagagagaactaaaaagtggcacgataaaggtctaatacgaaaagagtttcaaccaggacagcaagtgctaactctttcaattcaaggctgaaactgtttacctggaaagctgaaatcaagataggtcgggaccatttacggtggtcaaggtg

SEQ ID NO: 283385 - DNA, 602 bp, Cannabis indica
accaatcatgctgggctgggttatgttccaaatcaacctgtgtctaataccactaatagttttgtttctggaagaactgtttctacctcgcaggtttctgtctcgacagcaaagcactctgttgttacagaaaagaagcagcacggtaagtttgacaatttcaaagggaaaggaagacgtttcattcctatttgccatttttgtggagtaaaaggtcacattcgacctaaatgcataaccatgcataacatgtttaaatctaattacattggaaataaacatgttttacaaaaacaaaaatgggttgtcaaaaacaaatgcttggtaggttctacttgttttaaaactgttgcttctaacatgtggtattttgatagtggttgttccaaacacatgacaggtgaaaaagaatttcttgtgaacataagaccaatgcactgtggagaagttacatttggtaacggtcttactggtaaagtcataggaatgggaactctcaagttcgaagggcttcctaaactaaagaatgtcatgttggttgaaggactaaaagctaatctacttagcattagtcagatttgtgatcagggttatactgtgag

SEQ ID NO: 283386 - DNA, 656 bp, Cannabis indica
ttatacaactctcgccttcatctgtttcccggtaagttacgttctaaatggactggtccatttactgttcgtactgtttttcctcacggagctgttgaaattgaaaattctaaaactggtaacatattcaaagtcaatggacaacggttgaaaccatttttagaattaacaccacctgaagtggaggaaacactccttcacgatccaatttaccaaggttagtgaattctttcactactggtcctatctttaattgctttctttattttcagtattttagtttattttctgtcatttgttttttagaaaatcaacatctatcactgtgcatattctcttttttttttttcagttctcatctcatgttcttatcatatacatatttagacattgaggacactgtctcattttagttgggggtactgagtatattcttgcgttaagttcgataaatttcttacctttttgaaaattttgagtcaaattctgctgctaattatgtgaataaataaatattgtgttagactagtttatactatatttagttacttagatagtaattccagtaaaaattgcacaaaccaaacatatgatttgattgtttttaacacatttaattgagaaaaatcttaagttaaaagctttcattttttgtg

SEQ ID NO: 283387 - DNA, 566 bp, Cannabis indica
agtgtaatcttaatgcatgctatactcacacacataacacatagtatcttatcgcacattgtcctcacatacgataatctactcccactcatgttgatcagacatgaagtgtaacttgccctgccttgtgctgttctcacactcggcatccaatagggcaatcccttatcacaagttgtactcacccatgataggataacctgcaagtaaacccatacaagcagccaaaaatatatcctgcagtgctatgctcacaccagcagcagaaaacctatcctataagtgctatcctcacacaaacagtcaaaagccttatcactatcacacactaataacattagcataaaacaacaatctaccataaaacatgtaaatacaaacccataatacagttgtatgtttcaacatacaccctgtgcacagatgtccactcttcttacctcagttgttaagaacaccttcttgctactccaagcacctcaatgaattttcttgttgaggacaagatcctcaaatcccactgcttaagacttgttatctcgtcactactacctataacaacacat

SEQ ID NO: 283388 - DNA, 65 bp, Cannabis indica
tggatatgggcctcacttatgcaatttgcaattttatcatttttgcatctcattttctcaaaaac

SEQ ID NO: 283389 - DNA, 521 bp, Cannabis indica
gcaagtcttcaacgggagccagtatacaaagaaccatccgagaagcagcaagagcgaatagacaagcgtctttctaagcaaactcctcgacaaatttcaggtaactcgtcttttgttataaactgacgggtaggattgtgattttttacttatctttcatttatgttcgcagatatgacttttctgaagtctgcccctgtcctgaagatcaaaccaaagggtggaacagcgacgacttcgccggtcgttgcccagaagaggaagagcgatgtgatggcttcgcttgtcgcagactcttccaagaagctggccaagaccactcaggacaaggggaagaaagtcgtcattgaccctcctgttcgcgctcgcgacttcctggccatgcaggaaaagttcctggctgagatcccttacgaggatctcgttactcgatccactgaactggccgcgcagtccatggctttgttcataaaagctgcggctactccttcgaaggaagccgactcgctgaagaggcagaa

SEQ ID NO: 283390 - DNA, 556 bp, Cannabis indica
ttttaaaaaataagttactttaaatttactattaattaattaaaaaccaaaaaaaaaagagtattgtatcaaatatcatataatttaatgacaaaactttcttagttaaataaataatgtaaaataaacttttttaaatttactcaaattatttgtgatactagtatggtaatgagttatattaaaaaaacttgtattattttatgaatgtgtgtatataatacgtaaatatatcaaattataataaaatataacaatgaataattgagactttaaataaaaaagataagaagtaaaactagtttaataaaattgtatattaaatacgtacaaaaataattatattatatatgtataatatagaatatatatgttcggtcggtttgccatcaacactaaaatcgaccgtgttaaggtagttttaaccgaatgcagttttttcggtgttggctttttcgatattcagacggttggtgtactcggtttggtcaatttcttggattttttgctcacccctaatgaaaaactttaggtgtgattgatatatatatatata

SEQ ID NO: 283391 - DNA, 614 bp, Cannabis indica
gactaatgctcctgcggcctttatggatctcatgaatagagtattcaaggatttcctcgataactgcgttatagtgtttatcgacgacattcttgtatactctcagtcagaagaggagcacgagcatcatctttgaatggtattgcagcgacttagggatcacaagttgtatgcaaagttcaagaagtgcgaattctggttgtctgaagtgtcttttctggctcatattgttgggaagaatgggattatggttgatccaaacaaggtggagtcagtgaagagttggccgaggcccaagtctgtgatggaggttcaaagttttctcggtttagcagggtattatcgacgttttgtcgaaggattctctaaaatttctatgcccctaaccgatttgacaaagaaaaatcagaggtttgtgtggtcagataaatgtgaaacaaggttttaggaattaaagcagcgtttgataacagctccggtgttagcattgccatcagatcaagagaaattcgtggtttattttgatgcatccagacagggtctgggatgtgttctgatgcaagctgacagagtcatagcctatgcctctcgtcaactgaaagattatgagcagc

SEQ ID NO: 283392 - DNA, 684 bp, Cannabis indica
aattggccgcggtagtttttgcattgaagatttggcggcattacctttatggagaaaggtgtgaaatctataccaaccacaaaagtctcaaatacttctttactcagaaagatttgaatatgagacagaggcgttggttggaattagtgaaagattacgactgtgagattctctatcaccctgggaaggccaatgtagtggccgatgccctgagcaggaagggtcccaggcacgtagctagcatgattcagatctcacctcagttagcagaggacatggttagatccagcaatgagtttgtagtcggtcagcttcacaacttggcactgcaatctgatctattggaaagaattaaagccgcttagatgactaatcttgagttagtgaaaatcagagatgaggttttggctggtcaagccagggatttctcagtgtcagacaacgggatgcttctgtataaagctagggtttgtgttccgaatagtgtggagctcaggaatgagatctttgaggaggctcattctaccccttattctctgcatcccggcaccactaaaaagtaccaggatcttaaaccatacttctagtggagcggtatgaagaagaatttggtagaattcgtatcaagatgcctcacttgtcagaagattaaggctgaacatcagagaccagcagggttgttgc

SEQ ID NO: 283393 - DNA, 509 bp, Cannabis indica
aaatttttttttcaagttttagaaacctccactcgttcataagccgttcatcttcaaaacgattcatgtcgtcaagcactttttgcatttgaggcgtaatttccccacaatcaggctcctgcttgatctcttcaggagtaagaatcggatatttgcccttgttccttctagtagacattgctaagagaattatcttaagagggaaaaaattaagaaaatatgtaacttatgagatagacaattggcttttatagagaaaactagtagttgggaaggtgggataataaatgtaaaaattgaattacacaattgtacacatgtttgtcatgcacaaagcaatctgggcaattttcgcgacatgtcgcgacacagagcgacatgttatcgacataatcaagtagttggttaggcgggataataaatgtcacattaattaccatttaatgtggaaacgtcttttgtaccgacgtttcgcgacataattgcgacatgttaacgacatcaactga

SEQ ID NO: 283394 - DNA, 741 bp, Cannabis indica
gatccgagatccctgaaccgaaccgacaaaaacaaatggttcttcactttccggttggaagattaccatcttcctcttgcagtcaatactggctgagtatttagataggaaatccattcctagaataatatcaaaatctactaagctcatttctattaggtcagcacttaactccctaccgtcaattctgatcggcatagacctaatccaccttttggagataactaactctccgccaggtaatagggttccaaaccctgattcatatctatcatgcggtctatccaatttactaaagattctggctgccacataagaatgtgtggccccagaatcaaacaatacggagtaaaaagagttgttaactgagagctgacctgtcaccactgaagggctggcttctgcatcagcctgagtaatggcgaacaccctagctggagtgggtctcgccggagcctttggtgcttctgttctaagttgagggcaatccctcttgtagtgtccgggcatgccacactggaagcacccctgccctctacactcacccagatggtgccttttacaactggggcactctgggtaggtatatcgggtctcagaactaccctgacgactgcctcgactctggttccctcggaacctcttgttctgacccgagccaccggttgcagtggatgctttcctcttctggtccatggccgaaccactacctcccctgctatagcctgatgcaggaggggt

SEQ ID NO: 283395 - DNA, 571 bp, Cannabis indica
aataagaatatgtagtaaagcaataataagacacataaattttatagaggttcagccccgagcagttcggtaatagcctaatcctcgttagttgtattgacttaagaataaggaagaagattccttttcttatagctcttacaataatatctctgaatatataattcttagatagccttagcttatagcatttcggcgtacaatttctccgtcctctgcccagtgaacattcctcactatttatagggcaggaaacttgaggaggaagagtttcctctctcgttacaatgcgcataaacagaaagatcgtgtgatcaatgctgaatgctaggatcgtgggattgaggctgaatacactgatagtgggatcgtgtgtatgccacatccacgtaagttgatccctgagttatagggattgagctggtgactcacgatgcgtttagttgaattcgctaagtgttgctcattctgcacggctcgttgagtattccattatggacatgccagcgaggcatcctgctcggcatgttgatccgaccagatgctctaagtagagtccacgtgtcaccat

SEQ ID NO: 283396 - DNA, 862 bp, Cannabis indica
gtaaaataacttccaacaggctatgcttcccccttcaggattatttcattaatttccttgtatttgtcggccttgcgccataccaacttattccacaagcttaccgcctgctttcaggcttgtttattttttactctgcccggggctggggctctcccagtccggcagagatattgtatttttatgaactcgtttctgtccccaagaagggggacaaacttaaggacgacttttatggcttccgggcccaccctttgaatgagggcccggtccccttcaaccagcaaaaacacgtcaaggagtatcgtcaccgcttcttcttctcctccgggttccaggctgtggaacacccggagcttctcacggagtgggttaggatccctccttatgagcggactgcacctactcagctcttcctccaacgggccaagaccttcgccacatatgacaagaaggaccttgacgtcggggggttggtcacgacggagaattgccggaaggccaagctgatcctggggcatcagtcggtggaggactccaacctttccaaggttatctgcccgaacgtaagggttccggccgcggagaaggcattccgggaggagatcattgccacggcggaagataagtacgagaagtacctcttccaaaaggcccaggagcaggcttacactaaggcccaggcggccgccgggaggccccttcgcattgggagcccggcggagaggagggcccccagaccaaggcctacggtccgggtgccgaatactggggctcccgatgccagcacttccagttctggtaagtcccctttaacgatacattacgtccctcctgttcgtgaatacgctagccttaggcc

SEQ ID NO: 283397 - DNA, 521 bp, Cannabis indica
atttcagtgatgtctagtgattagaaaaaaaaaagtgaaaaaatctcaatcatggttagttgaggaacacttcgggcaattttaaaattatgagaagcctgtgggttcttttgtgcttatgatatctttagccaaaaatatcttgtattttccgaatatctaagccgtaaaattctcacctaaaaagtccttttgattctgaaaagaatgttgtcaacattagtggagagaggtaagcatgcaagcatattagctattggtttgtgaactagtttgatggagtgaaaccattatgacattatttcgatactgaagttggtttgtatctctgcattgtgtgataaaatgagcatcctaattaattgttagagtttttggaattgaaaatctagtttagttaattgaaggaaatttcacatgagccagcagtaatataattatctgatagcttagttaatcgagtttttagtgttagtcttagtcttactcgagggcgagtaagaatctagtttgggggattt

SEQ ID NO: 283398 - DNA, 694 bp, Cannabis indica
aaaaaatcttaaaatagattaaacatgacattaaacattattaacttggaaaattaatcaacgtaaagtgtggcccaactagtaaagaaagaccataagcaatctactctttctctatatgtataaaaccaacaattttaaaaactagtaacacctactagttcaatagataattgatttattattggcaattgaaagtcacctcattatcttgaaatatttctaatgcttgattgcgtgcctcacatacatgattgcaacataatgatggtcatttcaaaatattgttcctaatcaaatataatcttagtggaaacaaattttacttatttatatatacacatcggttctttcaacaagattcatctacacatttcaaattaaaaaaaatagccaccttatattgtggtcatttcaagagattttcatagataaggtatgagtaatattttttcatcttatattttgaatagaattagaaaagtaaataaagaaaaattaaagctcaccttcctgcgatttcttggtatgtactgagaaaacacattttataaagcttgttgaaaggacatcatgttcttttatgaatacctcacattacattgcaattattctgtgacaatttacatccatattaaaactagtcataagtatatatcaaattaaaatagcatagcaaattaagttttgaata

SEQ ID NO: 283399 - DNA, 393 bp, Cannabis indica
acaagagttgggcttgcaacaagaaagagacattgtctactgtgacagtcagagtgccattcacctctccaagaattcaactttccattcaagatccaagcatattgatgttaaatatcattggatccgtgatgtacttgagatgaaagaattgcacttagaaaaggtgcataccagatatgttgacaaagactttgcctaaagagaagcttaaagcttgtaggagaagagcgggcttagtagagcccaccaactgaggcgaagggggagattttttgggtccgccccttttgttgggcttggaccaataagggcttaaggcccatttgtttgattcaattaaaagaaaaaaaaatggcagcaagcatgggagtgtgcttcgtgagcagcaag

SEQ ID NO: 283400 - DNA, 729 bp, Cannabis indica
ttgctcagcctctcttcagttgagaaatttcctgaggctggaaaatagatctcagcttcaggaaatgggatcttctgatgatgaggggaatgaggcctgtgcagagatcaaggctctctacgtgtagccggtctttctcaagctatgtgtagtcactctgtcttcgagttacatgtagataatcttttttaagctatatgcagacggtctttctcgagtttattagcttcccctctcatcctttgtttatgagaatgacttaatggtttgcccctagtggcatttttgtaaagataagtttgtaaccagtcttaggtttttcttatcttaaatgccttatactgttttcattcgaacttaatacaattgtatttgcttgcattttattcacaatgtaaacaattatattttgatcgaatatacaacacttttgggtttctccattgttcgtaatcttcttgttaaagtagttcataatctaccaaactttatgattttcgagcggttgtcaattctgtctcacaattgcagttataatctgccttaagcaaacttaaatatactttaaggattttatcactttgtatatttttaatttgctcgtatgaatagttatattctctatcgattttctaggtttaagtacttttatcaaggcgtcgtgatgcctcgtttagtactttcctagctcgcgagaaccgttgtatttagttttatacgcgagttata

SEQ ID NO: 283401 - DNA, 525 bp, Cannabis indica
ctaaataaggtcaaattacttaaatagaatattttataaaaattaatatctgaccttagatttaaaaaataagataaaataatcaaaattaaaaaaaaaataagaaaagaggtaagcaaaaattgattttacctattttcaaaatcaaatttcactaatatctaaaattaatttaaaaatcaaattaatttatttctgataattagatttgaaatatgaaaattaaaaatcaaaatacaaaactacgcaaaaaatcggaagttaattccatgaaatagcatgaaaaatcgaagaaaacgaaaaaattgatgaacagtacggatggtatgcatagcataccattccgcgcgcgcatctagggggctggccgagtttccacggcgctgggaggctgcaagagccattccgcgcgcgtgggaagagtgctcatcaccccgatttttccgattttcaaaaattcataactaattcaaattaaatcgaaatcgagttctgtaaaaaaagtaaattgcttaattttttcca

SEQ ID NO: 283402 - DNA, 572 bp, Cannabis indica
catgcgcagaaagtcgatctcaaaaccaaaaaatttcatcgactgaagacagagcttcaacaacgatcatcgacatccgatcgtcttctacagctatgatcgtcttcaggtaagttcttcaatttcttctaatcctcttccttatctttataacctgaaaagtcaatgctaattaaaatcgaaaatgaaaaactgaaaaaacaaaccaaattatacacagaatcaaaactagaataacaattgtcaataatacacattacaaatatataagcattaatggtatataaacattacacgacattttaatgaacacatataaaaaaaaataaccggttaaaacaatatacaaaccaaggtcaccgtaagaaacacatacaaaacaagccaaaaaaatatataaccggaaccaaaataactagttaaaaacaagttaaaaaataataaaaagtcacatataacaaaacataaacaggaaaaaaaaattagtaaaaaaatcaaatcaaaaaacatgaaaaatagttaagaacatataacaaaacatacaatcgaaaaaaaaaaaaaaaaaaccagtt

SEQ ID NO: 283403 - DNA, 528 bp, Cannabis indica
ctttgcccttcgcgcaacaggtaagacagtagttgcacgtagagatatgcacggtggtgcttatattgaatattatattggtgataattagaaaccgagattagggttattaccctaaagtgagcggtttaatggcctagggttattaccctagtaattattaatgtgtaaatgctatgccatgctaaatatattgtaataaagaattatgcgcacaaggcataattaagttagactcggtaaattagtaccttgagtttgatagtaatgcggtctagggttattaccctagaatttatgtgaaggtaagaaagtcatgatgtacaataatattgctaatcaagtgaaagcatgaattagggttattaatctctataagtgttattttgagcatgcaatgatatgttatatgagagactatttggtatgtaatttagggttattaccctaagattctatatgtgttttgatatctattgaatacatacatatatttcaagagttatgtgcataagacataacttggtt

SEQ ID NO: 283404 - DNA, 501 bp, Cannabis indica
tttctctgattgttgtcctgaacatctattgatctggtctgtttttgatgttatatatagatgttgtaattttctccgttatatatgttgtagtggaatacaggagagttagttataaagttttaacaaactttataaactaacttaataacctatctagggttttcaatttattgtacctgcctcaatttcgctaacaacaccaagatcatcaagtacactaatagaaattaagtttctagataaatcaggaacatatctaacattagttaaggttctaataatgcaatcaaacattttaaaattaatagaacctgaaccttcaatgtttcatgtttggtcattcccaagaatgactttgccccctctagattcactgtaatcaaacaaataagacttattgttagtcatgtgaaaagtacaaccttaatcaataatccaatcatctttaaaagatgatgcagccacatagacatctccactatcataaccatcacttag

SEQ ID NO: 283405 - DNA, 689 bp, Cannabis indica
gctgaactggacgcgctaccttgcggttgtgatggtaaaaatttttgtaaaaaattatcaaaccgcgggtcatgcagagacgcgtcactggaggtgccagactgatcaatcttatcacgcatttttaacataaactcggcgaagactcccatatcttccggagtaatggatgaagtcggtacttgtgattgagctcgactttgagtactagaacttgatgtcgagctgcctttcaatttataacccagtcctcttagatagtccgaccggctcccaagaactttattcatagctttcaattgcttgtatttgctagcagacccatcgctggaatcatcttctgtatccgtcatgctagcaacctcttcaagcattttctcctgatcaaataaaatattagaaatacaataacaacatcatgcattagttgtaagaaaattattaaaaaacatattgaaacttacatgtagttctttgcatgtctcgctaatccaagtgtcttctgttccttttttgaggtggcctttcttccaagtatgaattgcgtagtcttcagggacgtcctgtttaaaaatagagttagtttgtgcttagtaaaagaaattgctaatagaaagttgataattttacttacatgttcattacgagacgctgccatcgacctcgagccttgcgttgacaaatactgc

SEQ ID NO: 283406 - DNA, 735 bp, Cannabis indica
tatgaccatagaacttcggggagttcttctggccagtttcctttggcatcttcgagtttcatttttagtgtatccttcaaggttttgttgactgcttcaacttgaccgtttgcttgaggatgtgccactgcggagaaacttttgatgataccatggttcgcacagaaatcagtgaaagattggctgtcgaactgcttgccgttgtccgagactattttgtacagtagtccaaaccggcatatgatgttcttcactataaagtcttgaaccttctttgatgtgatggttgcaagtggttcggcttcagtccacttagtaaagtagtcgactgctaccactgcgtactgcaccccgcctttacctttaggtaactgtccgattaggtcaattccccaaatggcaaagggccacggactttgcatctgtgtcagctcgttgggcggagctcttggtatctttgaaaatctctggcatttgtcgcacttcttgacataggctctcgaatcttcaatcatcgttggccagaagtagccctgccttcgagcaacaaaccctttcaaatttttagctttctggccgagatagttggatcgatctcgatctcttctaactcttccacaggtccaacatttctgcttgggtccccaagtcgaggatccacatcttcatccctgccttgggaagtttcctacttgggaatgttttttcccttgtctgggctctcgctggaggata

SEQ ID NO: 283407 - DNA, 547 bp, Cannabis indica
atttgaaaagtttagttcacttattttcgaaaaatccgtgtgcttggcgatattacattcttgactaatttcaattttatacttgaaagaacatggaatcatattaggtaatttgctagtaattgaattattttatgtatgctgattgtggaatgtggaaagttgtttgaaataaattctagaacttgcttgcttgctatttgaggcgaaataataaattatgcatgactaggaaagtgatttaggcatttttttttggatcgattgtgcctttcaagccatccatgtaattttatcctagttacccttttttgagcctcaacctattctttgttctacacatattgagcctaaaaagataaacccatgaatatccaaaatatttaaccctaattataccataagtagatctttagtttgggggaatttggatgagaaatttgttgtatgtgtgtgaaaaaagtgtgaaaattgagagaatgtgaaaaaaatttgattggaaacaacttgaaaaaagaaaagaaaagaaaaatctgacaatcagtgt

SEQ ID NO: 283408 - DNA, 611 bp, Cannabis indica
tatgtaaataataattaatatatccattgttggaaaaattatttctctacactagcatgatactcccactcaccgactcaaatataatgaccttactatatgtattgtagtcttatgcatgtattgctagtgttccaactttattaatatttatgtaatttccataatttaattacaacttctgttcagggtttccgagtgttaacacataataacattcgttgcctgtggattatttagccaagtaaactacttgatagttattactcatgtgagatttggtctatcaaacattgttttgtttatgcttagttaaataataataagctctattattatttctgttaatagctgtaaggaaaaagaaaaaaagttaatggatattttaaagtgtcaactaaatacttataacgtattatatcaatattagacattttaagatacttcataatatcattgctgaggaagataacatgtaaagtttgtcattttaatagggaaatttgacattttatgttaaaaaatgacaaatggtgtttaattatacaactttcctatttttttttaattatgctaatcttttagtgttaaccccaaaatgtccctctcct

SEQ ID NO: 283409 - DNA, 560 bp, Cannabis indica
gacaaggcgaacctggtcccgatccagattcttgaagagcctagcatcacaggcacggaagaaatcgaaatgatcgatacatctccgaactggatgacgccaatagcagcctatctcatctctggggaactcctagataaccgaaatgaagctcaaaaaatgagaagaaaggcagcacggtacatcatcctagacgggatcatgtacagaagaggattctcaattccattactcaggtgcgtcacaccaaatgaagctgcacgacttctatatgaagttcacgacggattctgcagaaatcatgcagccagacagagcttatcaaagaaaattttaaggcaaggctacttccggccaacaatgattgaagattcgaaagcatacgtaaagaagtgcgaggaatgccagaaattttcaaagataccaagagctccgcctaacgagctgacgcagatgcaaagtctgtggccctttgccatctggggaattgacctaatcgggcaattacgtaaaggtaaaggcagagtgcagtacgcagtggtggcagtcgactactttac

SEQ ID NO: 283410 - DNA, 692 bp, Cannabis indica
atttatttccaattaatatttactgttgtaatagaagttgataccaataaaagttctttgacattgtatcacagtaccttatttgagtgggagaatattaaaattctaaacccatcttcatttggttgacacttgtgataggaactttagaacacaactgagaaagtaaatctaaccattcatatggatagaaataacttatcagaattctgagaataagatagtagaattcttgcatagtctattcgaatgacttaggcgaaaaattcctaatcctcatgaaatattttatggtatctctaatgattacttaatcttaagcaagtattttatattaatgttgatactagattgctatgttgatgacttaatctataagataatacatcacaacaagatatccctcaaaacaatagtaagaggttaaatgtacttctatgtatgaatttaaccagactcctactgttgagtgggagctatttaagatgtaatcaaagaaggaacataaggagaaagtcaagaaagattactgaaagtgacctatatgttagataatagggatgtatatattagaagcccttatatcgacaccaactcataaagaatccgagatggtggttactctgggggtagaggagttattctagaagagagtaaaaacccatctataataattcaagcttcatcagtga

SEQ ID NO: 283411 - DNA, 567 bp, Cannabis indica
cataaaacccaacagcatggaccaccctattaatctaactctaagtttaatttgcctaaactaagcatatacaaatcggagattctaagatcgaggatttctatcattttgggtgtaacaccctaactagcataggcgtgttaacgtgattttaaagatactttgcaactcggttctaatcaacgaggttaatggaaatcgtgattgattaaaatttgcttatttaattaaaaacttatagtgttacatacaaaatatttcgggatcctgtttacaaaatactttacaaaagtttgctattcatttacaaaatatttgtcgcccagcgactaacaataaaagctctgatgtcccgaggatcgtacgctccaggcctaaccgcctcgacatgtacaatcttcatctactcgtcctcacggttcctcaactttagccttgcccttacctacacataaacatatcactgtgagtcgacagactcagtaagaaaagcataaatcatataacatacatatatctcggtttatgatcagacgcccatacccctgaccataaccctaatccccg

SEQ ID NO: 283412 - DNA, 431 bp, Cannabis indica
ttggcgccgtctgtgggaatcgactaagattttattcatttcaaagaaaaataccatcatggctggaaatcacacaaacggaggagctaacaacgggtccatcaacattgggacgatgaacgtaccgttatctggaactggaatgccacctgtggacgtcattaacggcggagtagggagaggcaatatcagacctctcaacctgttcccagaaacgactgaccctcaagtcggggacacatccacaccaccagcaaccatgcattttcccctgtcactccggcagtggtatccgagggaatcatccaactcaccactgatcaatatactgcgattcaggatcaactgcgcgcgctacaggccgaagtagatggacaaaaccgggcccgacgcccccctccgagttcctgctactcgcacggataaccctc

SEQ ID NO: 283413 - DNA, 872 bp, Cannabis indica
tactgaactcagccctccctcacatgaacaaccccaattgtgaaggcccatttgcctcatttgaataactgtactaggttaagtaaagtagtttaacctaataaaattgattagcaacataattaatttcgaaatatatgaaattaatttttcgtttcattattttgaaattaattaaagaaaaacacacttagtttaatgaaactttttcaagataaactatatctatttttcttgtatttaattaaataatgaagttataactaattagattcttctaaatacttaattatttaatatttcataaaaatatattcaagttgaaaatcagttatttataactaattttggatcaacttgaatttgaatattttcgaaattaataattaagttgaatttttctagaaaattagttattcagatattctttaaatattgttttaagttaaaaatttgttacttttggatcaacttaaaatggaatatttttcaaattaaggcgattaattcaagatactaaatttgttatttaattaattttttaaaataattttagttgaaaattttattattttagaacaacttaaattagatattttttaaatatttattatattttaattatttttgaaatcttatatattttttatataatgattttcgaaaattaaattaaaattgaaaattaattatttaattaattttggatcaacttaaattaagtaatttttattattaaaatatatagattaaaataagtgattaaattaaaatatattttaaataatgagctttaatcaagagacattcgatctccattgttggttctacatagttctttttttagtaagtaatcatccctaatggatgaa

SEQ ID NO: 283414 - DNA, 576 bp, Cannabis indica
attgcgagccaccttcaatacagtgagttctctatagacaagtctttctcgcggggagggtagatttatgcctataacacatgcccctagttcttcagtatagcttgctctgtgctggagaacttaaaatagtccaagcccgcgtttgtcgatgatcatgatgtcttattcatgttgtgcgtcacattttcgattggttatctaaactcacaagtttctttataagaccatcgcacaataaaaatgtgaatctcgcgggattcttttggatgtgtgaaccgctcgtggttcatattgacgcatggacctcgcagggttttcatcggtgcatgaccctatcagggttcttatgaaccttacgaagtttgaataaatgcaggagcctctcagggtttgctttgttgtatgaacctcttggggttcaaataaatacatgaaactctcggggttcttaattcatggaatgcctgcgactaaacgggtcgcgtatcgagcattcatgtgaacctctcggggttcttacctcatggaatgcctgcgactaaacgggtcgcgtatcgagcattcatgtatgaa

SEQ ID NO: 283415 - DNA, 545 bp, Cannabis indica
tcatgcttcttgtttgcactcaacatgtgcgagacatgtatcgtgcctaacctttgaacttgtttgcctgcaggcgcgtttaggctgacttgctagctcggtgtgccagcaagtgccgcacgttccacctacttgggggtgtccaaataggcggcccgtgacagttggtatcagagccaagagaaaagggaagcttggtaacacgacataatggtgagcaacacccaaaggattcaagagcttgagaggcgcataggggaattagatggcctggacgagagggtcagggatctagcccctaacaatcagaactcagggccaacagtgacacaacaacaagttgcctcgttggctcaagactatgctaacttgttggccagggtagctgcgatcgagagaagagatgctgctaccggaacatcaggtgcacctcagatggaggatcgcatcaaggcattagaacaagcaacagcagacatgcaggctgctatcactgtactacaaaatgggcaggctgcattacaagactccctcaatgatacgat

SEQ ID NO: 283416 - DNA, 1272 bp, Cannabis indica
ccctccgcctggcctcttcctcactggccttggcaagggcctcccggcgctcggcgtcctcctggtaaagccgcctttcagcagtcaaatcctgaaggatcttcataacttcgtccatgcccccaaagtcggacaggacgaagccatgattattaagttcttggaaaggcggccggcctcggcagcaagctggaaaaggatacaagtatgagtaaaagtccttaagagaaaataatgaggaaaaaagtaaactacgaaatacttaccacggtgagggagtggctgagatcctggacttggaagatggagttcaaggatgcacaagcagcgaaccgcttgggtgcacaccgggtaagctgagacgcaaactcgccggtcatctccgcggcaaagggagctagtgtgggcccgaggaaacgaccgaaccaatccgacagggggtccaagtttagatcccacggattctggtagttcgggtcgttaagggtattttgcatttcaactcgcaaaaccctcctcagagcctccacgtcagcatgcccccgggagtactcatccatggcgtagttgtgtttagctatccggagttcctgcctcgcctcatctccaggaaccggagtcagcacaatgttgggaggggctgtgtgttcctccacctcgggagagatcccggcgtcaataccaggggccggagtatcagctctccgctgccgtttgggctcttcctgggcaaccatcttgcccttacgcttgcgaatcagagcaacttcttgctcttcttcactttcttcaacttcctcaggaagagcccgttgctcttctttaccttcttcaacttcctcagaaaagccccattgcttttcttgaccttctcccggaagcacctcctcctcatccactaagtcaatagtgtctggaggggcactggaagaggccttcaagggggtggccatctgggaggaagttaaaggaaggggagcatcaggagtgtgagccccggcaagttcggccaaaatggcatccatggaagtacctgctacaacaaaagaaaaaaggcaagtgttagaacatccatggaaaacaataaacactcagatatagcaatcaagctagtcctaccctgactctctaattcggccctagcaaagttccgaatcttaacgctggcagcatcgtctctgagatagctgtccgaaggccggaaccagctggaagaaatgtaagccgaagggtctaagggaacgggctccggaggaccagaacccatccggg

SEQ ID NO: 283417 - DNA, 630 bp, Cannabis indica
tgatttctgcatccgtaagagtgttggcaaacattgtcttcaaggtatcaactatgctagacaacataatgtaacaagcttcattgttagcattctgtcaatgctcaaacttttcctttactgccttggttgcattctcacctggttgcttaagggcttcttcaattaacataaataatgagttttcacctatgagagcaatattaattttctctatctatttagcagagttagctcgagagagcttgttgttagtcaacagtgacataatcgggttgttcatagtcatattgaaaactacaaatattaacaaatagaagtcaaataaggttcaatacaaaatcatacacatattcataaattaataaagcatttagcaaaataggaataaacaaagcaaaaatacaaaaacaaacatatcctaaatactttccaaggttttcaactcaaagacataagtgtctcgttcaggcaagagtcaaatatatcactagttagatagagttgtcagctcatctaaaatggacaccattttagcaaccctttattcaatcaagatgagaatccgacgttgtctcgtttaggcgagagtcaaggtcattcttatctcatgagcttctaccattgttt

SEQ ID NO: 283418 - DNA, 654 bp, Cannabis indica
gttcctttcgttggcgaatatgccagtcttaggcccgtagggttcgatgagcgtcttcataggtttaggatgccctcgacccggtggggagaccatatgaaagattattatttttccaacttaggagatttcctaggtcggtcccggatgggtactggtcctccggagcctattcccttggacccttcggcctacatctcttccagctggttccagccttcggacaactatctcggggacgatgctgccagcattaagattcggaactttgctagggccgaattagagagtcagggtaggactagcttaattgctttattcgagcgtttactgtttccatggatattctaacacttgccttttttcttttgttgtagcaggtacttccatggatgccattttagccgaacttgccggagctcacactcctgacgctccccttcctttaacttcctcccaggtggccactcccttgaaagcttcttccagtgcccctctagacactattgtcttagtggatgaggaggaggcgcttccggaggaagctaaagaaggtcaagaaaagcaatgggcttttcctgaggaagttgaagaaggtaaagaagagcaatgggctcttcctgaggaagttgaagaaagtgaagaagagcaaga

SEQ ID NO: 283419 - DNA, 465 bp, Cannabis indica
taagcaatttacttttttacagaactcgatttcgatttaatttgaattagttatgaatttttgaaaatcgggaaaaaccgaggtggtgagcaccttccctacgcgcgcggaaatcatgcgcaggggtgcttgcgcccagatttctgggctgtggctcctctcccacgcgcgcggacagcatgctttgcatgatgtccgtaccacctgctatttttttgctttttgtttttcaaatttcaaatctaattatcagaaataaattaattttattttaaaattaattttagataataagggaaatttgaatttgaaaataggttaaaatcaagtattgcttacatcttttcttatattcttttaaattttgattattttatcttatttttaaatataaggtcagaaattaattttttttttataaaaatattctttttgtaatttgaccttatttagaataagattact

SEQ ID NO: 283420 - DNA, 622 bp, Cannabis indica
agacatcatcatcatcatcatatgtcggcggtgatggatgtaccgtctgtaatggctctgccgtgtcggatggatgtgtggggtctgattgctgtgccggccctgatggttgtgtcggctccgaaggctgcttctgtaacaaacttatcacggtcgcaatttgatccatgataagattcttcatctctttctgacttctcttgaagtcagccttcatctcagtctgggcagtgagaatcgcaagttgttgcgcttctaccttctccaatctcttagccaacaagaggtagtcggagtcattgggtggagcagagcttgggggcacagtggcaggggttgggggcacagtggcagatgtggaggcgtctgctgtttccttgggtggggatggtggaataattttggacctttccacatattctgccacccgttgggcttgggtctcgaatgcggtcgaatcttgcgccccggcttgtgtttcttcgacctcatccaaccccatttccactgtggggacctcaccctcacaattgtccttccagtaatcaacctcccaattccgaggatacaagatttgaagcacaaccatctgcaaaaacacaagatcacggtaaatcgcaaa

SEQ ID NO: 283421 - DNA, 588 bp, Cannabis indica
tgaatgataatctgaaatttatttgaaattaattgagtattgaaatgacttatttacccttgtgagggtgtaggtgtgaataataagccatgagggcattttggtcatttgacccctatttactatgtttgattaaaattgatttttaatgaaatgaaatgcaaaattctggttttactttcactcttggccgaccccctctctctcccaaaccctcttattatttcaagttgaatttgaagaaaagcttggttcttagcttgttttggagctttgaagttgtgaattcttgagcttggagttgaggtagattcttgctaagtttatgtgaaatttatggttgaattcttgctgaaattattgtggaaaaagcatgctttaagttgtttgatcttggtttgcatgtttagggaaatggatgtttaatcttgataatttgtgtgttaatctcttgatttgtgtttgattgggcttagagtacaattcaaggatgttttacatgcttaacctaatttttttatctattgttttactgctggaaattgaataagtatgtgttgggttaaagttcatgttcttgaacttgga

SEQ ID NO: 283422 - DNA, 783 bp, Cannabis indica
aaaattttaagtcaaagacttaaatttataccaaatatacacgagtaattattccagcttggacaaccactactaatataactctaagtctaagttgtcttaagtaagcatatacaagtaggagattttaagattgaggatttatatcatttcgggatagaatgtcgagaatatattcatatgcaccattcaatttcataagagaaaatagaatgacatcataagcatatgatttataaactatctatccaatgatatactatctaagaaaattctaagtgaaaaagctaagaggaactaataaaggataatttcgattaaaataagaatcgaacaatgtcccgtttaggcgagagtcaaagttattcttattttataaatctcttcattgtttcatattgtaaatactagtctaagttgtcatctttggatgtacaactagatgttgcatttacaaatacttatctttcgaaatctaacactattatgtttgtctagcggatgacaatcctttgggatttgttccattaaaaacaacaagctaagttacaccaacaatgaagatttgaaattaatactacaacattaataacagaaaacaacataggttcaatataaattcatacacattctaaaattatcatacatttagcaagtaagaaagacataatgaaaatataaaacaacacatcttaaatgatttacaaggttttcaacaactgttacagtgtcctgtttaggcgagagtcaaagatatcattcattgaatagagtactcaactc

SEQ ID NO: 283423 - DNA, 848 bp, Cannabis indica
tatattaatcttacctcgatttcgaattcaggtgtgccggtcaacctgagtggaacgaactgctcggcgatttacaggctcctaaaccataataatcacaacacttgataagtgacacgctaaatcacttctcggggacttaaactagaaagtaaaagtttccctatcgataaaaagcatggcaataccctaatcaacacaaaaatgggaagaactagggttcccaatttttccccaaccggtagaccggttctacaaccggaattccggttctggaaaattcctggaagccccaaccggtcgaccggttgctactggcttccctgaaccggaattccggttcagtgcaggaactttcaaaaattcgattctcattcaattcaaacccaaacctcatgaaaccttccagacctgttctaaataccccaaagaacaatcccaaagcatcaaaacaacccagaaagcacagaatcaaaaatcaccatgtgagctccaagctttgagttcaaaactcaagcttgactaaaactcactaacatgcaacacaacctgtttaaatctactcaaatatgcatatctaaacctctgcaaacaacagaaaacaaccaccacaaacacagcaacaaaattcctcattttaccatgaaaaccaagattttgagtcaaaattccaaacttgaacaaaagcaactaaacatgcctcaaaacctattctaattcactcaatcaagcatgtttaaacttctgaaaacaacacataattacagcagcaacaacaatccaaaactaagcatgcaacctatcattttcttcaaaaattcaagaaacttaaaagaaagctataagaa

SEQ ID NO: 283424 - DNA, 658 bp, Cannabis indica
tttggttttgctctttttgggctgcgatttcagcttcatgatcgacagccttttgccttaagagcaccaactctgagtagttaccttcgtcgtaggcgtactcatcgaagtttcctttgtagtcgtcatcaggggttccttcttcttcctcagaacccacagttgctcttgaggccacgtcctcatcgttaggatcttgagcatcttgaagagggcgaggttgacgtgtgcttcgagtctccaccattgttgtagtgtctacttacagacgctttcttcagctctcaatgaaagtaccaaaatattgaccgaggttttcggcaaccgatataataatattaatttagagagctataagggattaagagagagatttttacgtggttggggcgttaatgagccttagtccacaagtctgtgtatttatgatagtatttattacagagaatgttcttggtggatttttactcttctagttcttattaaacccagaattttcgacccctctttaatgagctttggggggtatttatagtgtttttgtggggtgatccctagaattaaggtacatgcatttctgtaactatcactaaagccacacattcccaatgaatatatcacaggtaatgcatggtctaatccctaggttctgtaggga

SEQ ID NO: 283425 - DNA, 834 bp, Cannabis indica
gagggattgacggcgattctcaaaatatcgcagaacagaatgtgatacgatgagatagaatgcaatagaaacaaagacacagggaacgggttacctactctcttaacggtcaaagtgaatcctttcattccgaattaaagaattcggaatgaatcaaatctccccaagtaggattcgaacctacgaccaatcggttaacagccgaccgctctaccactgagctactgaggaacaacaggaggttagatctcataaagttcaattcccgttctcaacacatgacccatatgagctcgaagtttcctttgtaactctcggaacttcttcttcgtggctccgttccatgcctcatttcatagggaacctcaaagtggctctatttcattatattccatccacatcccaattccattcatttaagatccctttggtgtcattgagataagagatgtcgtttctagtttatctctttctatatatggaaagttcaaaaatcatcatataataatccagaaatggaaatagaaaagaacaaggggaggtttgggatgatttttcaatcttttatactaggtaatctagtatccttatgcatgaagataataaattcggtcgttgtggtcggactctattatggatttctgaccacattctccatagggccctcttatctcttccttctccgagctcgcgttctggagaggagagaggaccgagaagaaagtatcagcaacaaccggttttattacgggacagctcatgatgttcatatcgatctattatgtgcctctgcatctagcattgggtaaacctcatcaataactgtcctagctc

SEQ ID NO: 283426 - DNA, 507 bp, Cannabis indica
aatgggagaaaatagggggtgagcttataaagcccagtagaaaaacaactaatatcaaaggacccttggtttaataaaattcctgcatggttagctttgtaaaaataaaatttctcatcaacagtatcaatatgtacaaataaagtagagagaccacaaataatcacaaatcaaacatcaaatggatatcacaccgtccactagacccctagctctcaatatcaatcatagaaaacgacatccaaaaccaggtagtcgcatctgatatccaccctaatactagggctcagatttaattcactccctgtacagattctaagtatttcacctacaggtgagtgcacacctgatctacctatgatgacacagagactaggtcgtgaaataacaatatgcaccgaatatgatcaacatggctctcatcagtataaccaaagcaggaaaataataagcataataaaagaacatattcctttttattttctagaaaatttggcaacataacag

SEQ ID NO: 283427 - DNA, 642 bp, Cannabis indica
ctcttgccaagcaatgagccaacttgtttgcagattgtttaacaaaacacaactgatacatggaaaaactaaaagcaaattacggacatcttgaacaagtaaaccaaattgagaaaccatagaaaaattactttggatagcttggacacagaccaagctatccgtttccaaaataacgtggtcccatggatgatatgcaatccaacttaaaccttctttgatgcctattatttctgcaatttcaggttgaacacgtccaatcttccccttagtgaaagcttttagcatattaccatgatgatcccatgctacgcaacctacaccatacggaccgtcctgatcaaacaagccccatcaatattaattttgatcttctgtaacataggtgcattccaatgctcagaatgtccccccttcattcaacggagaaaagaagaccctttctaccttgagcacatttatactgatcaagcatgtatttcgctgatgcaacaatatttgatgcagcccaactcttttgttgccaaacaaaatcattccgtgcacgccaaatagtccaactcatcatagccgcttcctccatctcgctagcacgtcccctgccaaataactgcagcacctagctgctaaatgttgcagacc

SEQ ID NO: 283428 - DNA, 666 bp, Cannabis indica
atcagattgtaatgggttttatttagggaacaaaacccaacaactacaaggttataacattcccgagcagactgctagtttcctctgagacaccctaccccattctttgttggaaactttaggcatgagtgaaatattaatgtaacagcctttaagtcatacaaggctggtcgacctagcattacgttaaaagctgaaggaacatctaatatcaagaattgtgcaatgatagtcattctcaaaggagcttgtccaacagttaggggtaggcgaatttttcctagaggtgcaactccttgaccggacaaaccatagacaggctggaggcatggggttagatccttgagttgaagtcccatattttcataagcggttttgaacaagatgttggaagaggctccattatggatcatggttctggccaccattttaatagctatctggacttccacgaccagtgggtcgttatgcggaaatttaattttgacagcgtcttcatcgttgaaggttatggttggctctcctgctcgctaaactttgggcttcctttcttccgcagccaggataacttcttcttgctcgtgttgtgctgttcgggcacacctttcccaagctttgcccgaatctccagcaatgtgtgggcctccaacaataacttgtagatgc

SEQ ID NO: 283429 - DNA, 625 bp, Cannabis indica
atctggatacttctccagcttataaaactctagtttcctattgtttatgcgcatgggttgaggcttgaccgcataacaatataatatttcctccgggctgggaacttcaagcttccgtatcttacatagaatttaccatccaatcaggagcttgtaagatgaggggattagctggaagggagaaatccaaatttttaagcaaagctccacgaaataagtcttcaggggtaagtgtgctccactcgaaatgtgggcccagctccaagcactaaacttgtcggtgctccgggaagcgaactcctctgtgatcgacaatttgttccatactaagtccgggatgttacgaactccaccttccttagacaagttctccatcatcttgtatgaactgaagttgttagggttttgatccatctcctagatggagtcattataaaccacaagagaggaagacaaggcttttgctttgccctttccattgttatcattattatttatgttgatgacttgaatattattgtaactgttgaaaatttttctgaagttgtagactatctaaagaagagttcaaaataaatatctaggaaaacaaattttatcttggtttacaaattgagcatttaaa

SEQ ID NO: 283430 - DNA, 505 bp, Cannabis indica
caaagccaggtagcatctcttcggaatcttgaagttcaattggggcaattggccaatgatttgaagaataaaccacaaggcaccttgcctagtgacaccgaaaatccaagaagagatggcaaggaacattgcaaagcggtaaccttgagaagtggaaaaataattgagtcaaatgtggctgcaacaggcagtaaagagccctcttcaatccaaaaagagggggaaatgaagaaaaaaccagcaacttcagctgctgaaattcccccagtagttacagcatccagtcagcattctgctgcagaaaagcctttgcaaaagccacctctaccatttcctcaacggttcaagaagcaacaagatgatggtcaattccggagattccttgatgttttaaagcagctccacatcaatataccattagtggaagctttagagcaaatgccaacttatgtgaagtttttgaaggatattttgacaagaaaaggaggcttggggagtttgaaac

SEQ ID NO: 283431 - DNA, 755 bp, Cannabis indica
gtgaccaggacccgaacccagacatagaaccgaacacagacctagcctgagacccaaacagagactggaactcgagcccggacacggtcgtgtacccagaacggaacagacagacccggacctggacctaaatctggcacccgatcccaaacacagacttggacccagatagggggatacgaaccttgactaggatcaagacccagactgggatcaaaacgctggacaagatctgtaccgagatcttgacctagacccaaacttctacccgcactcgggacccgaacttggacctggacccgaaaataggcccagatcggggtccagacctagacagaaacccagacacagactcggacccgaactcaaacccacacctagaatcagacccaaagctagacccgaacccggacccaaactcgaacccagaccaggatgagaaccaaggacttagacccagaactgaatccagactcagattgggattggaacttgggactccgacccaacctagaccaagacccatgacgcgaacccacacccggagcctgatctggacctacactgaaatccggatctgaaccctaactcagacttggactcgaactccgacccgaactcaaacccatacttgaagtcagaatcgtaaatggaactagaaccaaactaggactaggaccaggacaaggacctaaacccaaacctgaacccagatcaaaacccagacggagacctaaacccgaaccgagactagg

SEQ ID NO: 283432 - DNA, 643 bp, Cannabis indica
ggcgtttttgagaaaatgggatacagaaatgataaaacagtaaaattgcaaaagtgaggcccatatccacaagccatggccagccacttgtatagggtttatcatttaatgttttcattattttaattccatataattcaaacctaaccctatgtggcatactataaatagatagtgatggcttaggaaacagtaacatgcatcttatttcctttcagagaaaaacctgagccacttttctaaacctatccgccacctctcttttcttcttcttctttggttgtttcgaaaccccttagtgatagagtagtgcccacacacagcaagtggtacctcaatcatactgtggaagatcgtgaagaattcagattcaacaagaaggacattcgggctcagatcttgataatactctgcgacagaaaggatacaaaggttagagatctgagtggaattattccgctgcacccaatgtaaggtttctcatactttatatgtgtttaatttcattgttttagaattcatattaagatgttaatgaaacatacgtggtagtaaatctagatactggtaaaatatttccaacaactggcctgagagccatggtaatgatttacttcatgaaatatgaattaaacgatgttat

SEQ ID NO: 283433 - DNA, 555 bp, Cannabis indica
gatcatttttctttcattttgaccaaaattagataaaaaaaatatatatatgaaacgatgcgccggaccataagtccacctctcgtattttccggtaaagattttcacaggaaacaaacagaataaaaaaaaaaaaaattaaaaatatacatacctttaagctcagaggaggcagttgaacgagaaaatgaagaaccagaaattgcagcagatgacgatgaagtaacagcaagagccattatagcctaatgaattgaaattcttctccaaatttttcttaattattattttttttttttcagttttgagggagattgttcttccactccttaagattaaaaggattaaatagatgtcctaataaaagggcggcctaacagattcattgaacctggacgtaataacgttttgtagagacccaaattgttttgctaacgtggcacattttaattggtggaagcgctaattctgtcagcacattcgtcacgtggcccgcccagccgaagccatgaggactcttctgggtgtcttcgttttccttttttcctttttttt

SEQ ID NO: 283434 - DNA, 838 bp, Cannabis indica
aaaaattgtatcaccataaaacatttataatgataccttcttatacgacatagattacaaaccaaattccataaaatttgacttcccaaatatatctgaacacaataaaattcgcatttgacaattagtattcccacctccttttattacaatatcttcgtatttattattcttcaaattacttgattaattttaaataataatattagaatctgaatactaaattacaccactttccctttttgctaataattcctaaaaatatgaaccaatcatagctaaaaactattatcgtttaaacttaatcctaaccttatttcacttgaaaatatttttaaaatatcactttaaaatttctttacatcatcccttaacttaaaatttgtctagtgcataacttgtttattttgcaattttattgttccaacattttgttatattttcaatacaagaagtcgtaaaattttaaacaaactaccctaaataattaggggtcagccatataataggcgctatagccttgtaaggcgccaaagccataaaaatggcgcaaatatagaacaaaccaataacaaaaagattacaatatatcccattataataattcaacattatagaaacaagaaattttcggacaacaaattctttgaaaaaactttatagtttgccccgtactctttcctcttacaactatcaaaacaagtttatacaagaaaaataataaaattaaaaacagaatatacaaaatttaaaatgcaaaagaaaaaacttgatggtagatcttataagaaaaaaacaccatataaaactttaaagattttttccatatattttgaca

SEQ ID NO: 283435 - DNA, 503 bp, Cannabis indica
ttttcaattggtatcagagcgggacactaaactcttagtgtggtccttttaacgttttcttgtgtttttgcaatatgtttccctttgcagaaggaacttctattgttcgcccaccactcctcaatgattccaactatccttattggaaggttagaatgagagcctttatcaagtctcaaaatgagaaagcatggaggatggttctttcaggatggtctcctcctgttgtggtagattccgaaggtaattctaaattaaaatctgaacttgaatggtctactgaagatgataatttgtctgcttataatagcaaagctttacatgccatatttaatggagtaggtgaaggttatattaagcttatatcttcttgtgaatctgctaaggatgcttggcagatccttcaaactcagtttgaaggaacatctgatgttaagcgttctagatatattatgcttcagaccaaatttgatgatcttaggatgtcagataatgaaacccta

SEQ ID NO: 283436 - DNA, 578 bp, Cannabis indica
tggagggacaaagagatggaggcattaagggctcaccatgcagaaatcgaaggtttgagtcggcaagccactgtgctgatacgaagagcctatcagactgtaggccagcaagcgttgagcgtcattccccttggagaaaccgaggatgacccaacggtgaatgcttcccaaataaccaacagtcagccgtccaatccccgatcacgagttccactcgtgggcgaagaggtaggcggacagaccttgtccgggaattcatcaggaggagtcatgcttgacggatccacgcaaaataatggagccatcccacctgccaaccaagcgaaccaatcgctaaggcagccaggttcttctgtattcgataggttgggaacaacccatgacctaagggatgacctaaacagaagaaggggaacagacgagcagaatactacaacgaacgtgcagtccggagcccatactcaaatccctgctcagaaagacgtgatgtaataccctaggattaggaatggcttagcaaaaccctaattggtaattatgaataaatgaggaattatattattatatagttcaattta

SEQ ID NO: 283437 - DNA, 509 bp, Cannabis indica
aaagcattgccacaaatttgatataacaatacattaaacaactctatatacatatgttccattctcgagacaaattaattggacataaaatttgatacagaggctaaaaatcttgcaaatctcataacatatacaaattcaaatcctatattcgaataagaaaaagaagcaacactggacttttttgttcattcataatccaaattctcataatacatataataaatttgattcagaggctaaaaatcttgtaaatctcataacatatacaaattcaagtcctatactcgaataagaaaaagaagcaacactgaacttttttgttcattcataatccaaattctcataatacatataattgatagaggggtgagaaaaaaagatgaaagagtgaatgataaaaaataattagattttttttaaagcagaaaaataattagatttaagatgatcctgtgatatatataaatattttaattttttatttatattactatttaaaaaaaaaa

SEQ ID NO: 283438 - DNA, 935 bp, Cannabis indica
attattttataacaggctacacattattattattattattattattattattattcaaatttaacaatttttatacatagttttatgagaataaatttttttaggggaattactagttatacggaagttttaacattttttagagtaatttgtggctaaattcattgaactacggaatttggtacgatcaacctctcttattgaaattttttgggtagaactccccaaactacagaattgttttgctttccacttttttgttagtttttggctgttaaatgccaaatagacctgtcacattgtacacgtggcatgattttattagtccacagaagaggagctgagagagagaaaaatagagattagggttttagaagaagaaaaatatatattttttaagaatattcttttatgtattttttaatatttgaataaataaaatgatgtggattaatgaaatcatgccatgtgtacaatgtgtaggtctatttgatattttacagccaaaaactaacggaaaggtggagagcaaaacaattctgtggtttagggagttctgctcccaaaacttaagtaaagggagttgatcatgccaaactctgttagttcagagaatttagctgtaaattaactttttttacttgtttacgatacattatttcatttctaatttataaatatatttacataaataatatgtattaccttctcaaatttcgtagaactaatttgatgaattatgcctctactgctactatgttgttggacgtacgagtgttgcagctatggacatagcaacctaaaaattaaaatttttaaaataaattaaaaacaaaaaacaaaagaacacaatcatctggaatactacttctttaaacacttcaaactaaatagcaaatgaaaatttgaaaaaattacagagaatgagattagtg

SEQ ID NO: 283439 - DNA, 833 bp, Cannabis indica
gagtctttaaaatttaaaaatgacatttaatgggattcgactgtcaagaatgaaaattattttaagacttagatttagctgccaccacatcactattattataagattatctgtatgtctttagttttttcgtgagactatatgtcccgaatttaatagaggtatatattaagaaaataatagtaaaaataaatataatttatatatatttatcatattttataaaaatacaagaaaataaccaaaaaaactacataaaaaataataaaaaaataatattaaaataaaaaataaaaatatatatacatatataaataacaaaaaattaacaacaaaataacaaaagtatacaatataaaaagactgtattttatgtaaataaaatttaaaaaattgtaaaaatatttaaaaattctgtacgatagtatttttgtaattgtttttgtatttattttttttttttatattatcccttgaggaaattatactctataccctttttatattgtcctcttttatttttaccttcttttttaaatctatcatttttacctcttttttaaacattgtaccaatttcgcccctgtcacttcaagatactctccatgtgattctcttatgtaagggtattttgggtacaatacatatgaaaagagatatgtttcaaataaatataaaattagaggtaaatttgattaattaatgaataaaagaggcatttttcaacttaccccttatcccttcccataaagaccaaaagtgggcattttaaggatcctccaggcccaactattttatgagacttacggcccaaaccttttagtctttcaaga

SEQ ID NO: 283440 - DNA, 721 bp, Cannabis indica
gtctggcatgcctgatctactacgaggcttggggcctgttcggatggtaaatattgaaggttcaaacttaattgctctaaattaatctggtcagaattataagtaggtatactctgtccaagttgagatgtacttcaagaaagcgtatcatttcgtccgtctgtctaaatgacccatccaagtaacttgttcccatctggatatttctctgcgtaatatctttcaagctacctgaaaaggcatacatcatgtttcagatgttactcatatgataccaaatgccaaatgggtattgtctgtgcatgtttcgtttgacatcatccgagtggactatttatttatcatttatgcgtccattgctaactttacttgccacatatcgtataacatcatgcgatgtcatcaagttgattttcacgaaaacatgattcattttgattaccagaaaaatttataaattcaaacccacaaatttaaagatttgatagcgattctaaagggattttttctataataaattaaaaagggaagcaatttacatttataacctaaaaagaaaaaataaacataaatagaaaacaaaactttctatttacaaaaatacctgccaaccacaaaaaacggaggagagacctccttcttcgtgacccagccgagaaaccccaaacaaccaaatactccaccactttttttttctcaaaaacctaaggaaatcagatct

SEQ ID NO: 283441 - DNA, 590 bp, Cannabis indica
ctccacttcggcatgcccccgggtgtattcatcaagggcatagttgtgcttggctatccgaagattctgcctctccttgtctccaggaatcggagtcaagactatgccgagaggcactgtgtattcctccgcctcggagggaatcccggagtcatgactcggggccggagtgtccaccctccgggggcatttagaaggctcctcttctaccatcttgcccttgcgcttgcgcacaagagcaacctcttgctcttcttcaccttcttcagcttcctcaagaagtgcctcctcctcgtccactaagacaatagtgcccaaaaggggcgctggaggaagccttcccgggagtgaccaactgagaagaagtaggagaaggggaaacatcaggactgtgggctccagcaagagtggccaagattttgtccatgggaacggctgctgcaacaagagaaaacgttaagtgttagaatatctgtgaaagcaacgtacacttaagaaaaagcaatcaagctagccctaccctgactctctaattcggccctagcaaaatcccgaatcttaacactggctgcatcatcctcgagatagct

SEQ ID NO: 283442 - DNA, 252 bp, Cannabis indica
tgaccagtgaaccgagtataggctgatactgtaacacatcggtaaagctagagtatgactagcagctggagtatgaccagtgtaccgagtataggctgttactttgtcaatagtaccgtcgtacgaacgttcgggactcagtatcgtgtgggacacggcagttagggttatggtcaggggtatgggcgtctgatcataacccgggattatgtatgttttatgatttatgcttttcttactgagtctgtcgac

SEQ ID NO: 283443 - DNA, 448 bp, Cannabis indica
agatcatgtattttgctcagatatgctatcattttttctcctcgagcctcgtattcgccagatacatgatttaccactagctgtgagtcactgtagatctcgatgtgatcggccttcatctcctttgctaatttgagtccagcgattagggcttcgtattcggcctcattgttggaggctttgaatctgaatttgaccgctgcatggaggtgttgccccccaggtgtgacaagggcaattcctgcaccggataactgatcagtggcctatccatccacatgaagcttccaggtcgacttgttttcagtgctgttcggctgtggtgttggctcgggattgccttctgggatactttcagtttttcctgtgcattccaccataaagtcggccaaggcttggcctttgatagctgttcggggttggaagttgatttcgtactgccccaatt

SEQ ID NO: 283444 - DNA, 790 bp, Cannabis indica
tagcactatcgggctcaaacactaccatcttccgtttacagtcaatcatcgctccatacttagacagaaaatccattcccaggattatgtcaaaatcagataattgcaactcaattagattggcggtcaactcacaaccgtcaatccaaaaagacaaggaccgaatccaccttgtggacactatcaggtctcccgagggtaacagggttccaaaccccgaagcataaatatcacatggcttatgtaaactttctatcactctactcgatacatatgaatgagtagctcccgaatcaaataacacagtatatgcacaaccattaatagacaactgacctgtcacaactgacggactagcatcagcgtctgcctgagttatagtaaaaagtcgccccgggttctgagcagcattcttcttaggctcttctttcctggcttggggacagtctctgataaagtggcccaccatgccacattggaaacatgccttggctcgacactcaccaggatgatgcttcttacatttaggacactctggatatgatcggaatgaggacccgcgaccctgacggccacctctgtttccccaaaactttctatttccccctaaagctccgaaagcctcagccttccgtttgtgctcggggttgccactgtcggtccccttactgacattaccactagcaggagggtttgatgccattacggcatcctttgcagcctgctctttcattacttgctgctcgacctcctcagcaattaaggccaagtctaccactctcttatacag

SEQ ID NO: 283445 - DNA, 705 bp, Cannabis indica
agtattagagcatggccattgctaaagtatatatatttaaataatatgtttataagattcatgttatttaagtatgtatgtaaatagtgtgtttataagattcacattatttaattatgattgttatgttatttaaataatgtatagtagtttgacattatttaaattaggtagattataatgtgacatggtttgaccgagaagataatggttaaatacttgactgttgggtctatatggtagatagggggccatttagtagtgggtacgattttactgaacccagccctccgccatttagtccaatagctcgggtttatttgccaaagtcggactcgggcgtaatcattttatgtgatttagcttagaacctagttattagctactagtgatatgattaagtttatgttttgctagttgtctatatatgtgcatgtgcatttttagttaagttttatttttatttatgtgactacctgacacacatttccttactgagtttagtagctcacccttatcaaattaccatgtgcagaccaaggtaactgaaagtctagaatgccggtggcgagtggaactttggacgcttgtgtgtgtgaactcgctgagggccatataactgcgggcggtctagggcgctctatttatttatttacgctattaaacttatgtcgcaattattttagttattatttattatgtctt

SEQ ID NO: 283446 - DNA, 526 bp, Cannabis indica
aaatggaactagaaccgaactaggacaaggaccaggactaggtactagacccaaacccgaacctagataaaaacccagacagagacctaaacccgaacagagactaggactcgaacccgaagctagaccgggacccaaactcaaacaacaattgggaccttgaccgagaatcaggataaagacctaggaaacagaactaggacagagacctaatactcgaaccagacctgaacttgaacataggatccaactcgtgacccggcaccagaaatggaaccaaaatgcgacccaagattgggatcaagatcgtgaccagggctttgacaaaacccgtagtcggtgtctggatttgggacccagccctagacccgaaccctgacaaggacccgaaccaacacccagacctgaaccaagtcccaaacaaaaaagtggaccagaacccgtaccctatgacccaaaattagaaccaaaaccgaaagttgaccgggacaggaactaggacttggacttggaatcataattgaaa

SEQ ID NO: 283447 - DNA, 757 bp, Cannabis indica
aattttattttcatcttgtatccacttttgagttaatttacttgttttctcctttatttagttgattcattactcatttcattttgctttttaggcatttttgcttggtaattaacttttgcaatagaaattttatttttacagtccttgtggagacgatactcattacttatcactgtattacttgattgtgactgcgtacacttgcgtatctaatttttacacacaattagcacgaagacgagggtggacttcgtgtagaagttgaagcagttcctggtcgatttgatgctcgggctcccaagactcaccagagtttatctacaaaagacaacacgcaagatgagtgttggacggagtatcaagcgaaaaaacaagcaaatattctgaccaggaatacccaacagattaaagaacagccatgttcgaaggaaagtctagactcaagaagtcagaaagtttttcttgagttagggcaaaaaaaaagttcatgaagcttaaagaaagcagagtgaaaaacagacgcaatgcagttctaaagtaagcctcacggctgaaagctaacacagggacatggaaaagaagagtcgcagatgtttcaaaccatagagtttcctacagtgttctttctacagcaaagatacattcaaaagcacaagcatgcaaaaggaaaacataaaggaagtcagaaacttactcaaagattcaagtgtccggattcaagcaagcctgaaatcgtctgaaagctctcagcaac

SEQ ID NO: 283448 - DNA, 760 bp, Cannabis indica
ttctagttccatttgcgattctgagttcgaggttgggtttgagttcgggtcggagttcgagtcctggtctgagtttgggttcgggtcctgatttcagtctaggtccagatcaggctctgagtgtgggttcgtgtcctgggtcttggtctaggttgggtccgagtcccatgttccaatcccgatctgaggttggattcagttctgggtgtatgtccttggttctgatcctggtttgtgttcgagttgggtccgggtccggtatacatttcggtctgattctaggtgtgggtgtttgagttcgggtccgagtctgtgtccgggtttgtgtccaggtctggaccctgatctaagtctaggtttgtttcgaggtccaagttcgggtcttgagtgcgggtccaagtttgggtctgggttaggatctcggtcaagatctaggtcaagcatttcgatcccagtctgggtctcggtccgagtccagtttcgtatctggatccctatctaggtccaagtttgtttttgggatcggtcacagatttaggtcacggtccgggtttcagttctggtctgggtacatgaccgtgtccgggcccgagttccagtctcagtttgggtgtttgagttcgggtcccagtctgtgtccctagtctggttccatgtttaggtctgagttcaggttcgggttcgggtcccaagtaaaggtttgggttgggatccgggtccggctcccaattcggttctaggtttgattttgagtttgggt

SEQ ID NO: 283449 - DNA, 692 bp, Cannabis indica
tatttagtatattcagtacaatggttacaaaagttaggttttaggtcataaattatatttagtgagtcatgttatatatttgcatcatactactgttaggtgatttggaattgcactaatgttggtgattttataatttactatagggtaagacttgtggtagtttttggaatttggtggaacagattattattactgtatggtgattattattgtgaatattattactgttgttatattttgccattactattaggttttcgaaatttttttaccataacaatatgtgaagtacattattctgaaaatgaaattaaccaattttacattctttttcacactatctgttttagtccaatgatgtccatagccaaaataataaaaatacctatacttatgtactttcccattattattgtgaatattattactgttgttatattttgccagtactattaggttttggatatttttttaccataacaataagtgaagtacattattttgaaaatgaaattgaccaattttaccttctctttcacactatccgttttagtccaattatgtccatagccaaaataataaaaatacctacacttatgtactttcccattatagagatgaaggcattaattctggccttggacataaatttggatcaaaaagagtaagtacagtacaataatgagaaa

SEQ ID NO: 283450 - DNA, 821 bp, Cannabis indica
tcctgggagtccgtcagttccgtgtactgggtgtattggggagtgtacccccttttctgtcgcttgtcctccgtcgggttgctaccttttgaggacctcttgctccgagagccttgagaaggtcccgctaggcttgcagcaggagcggagtgagacgggacttgtccatttatcccagaaggattaccataatgagaagatgcaggagccaatgcctggctctgattatatcctagggtagcggagaattgtatgccgctcattggtggagtagccgttggtagggttcccgggagctggactccgggcgcataccctactattccggtcgaatagtatcccccataagccactatttgggcctcttctaagttgatgtacttttggactctcttctggaagtcttgaaggttggaggctccttcttgctgtaattcattccagaatggagtccctgcttgaagaagtgcaagctgttgtctgtcatcaactttcttagtcttcgaggcttcttccttaagcctctttatgaaatttttcaatgtttccgtggatagttgcttgatgttagtcagggcactgacctcaagattaacctttctcgcggcgacaaactgtctccggaaactaacttgcagcttgttccagcagtccactgatcctggttccaacttcttgaaccattccttcgcagacccattcaacgttagtgggaagcataaacatttggcgtcaatactgactctcatgaccgtcattactcggttgaaccgagacaggtgatcgctgggtccgagttcccggtataagctgccatttcg

SEQ ID NO: 283451 - DNA, 573 bp, Cannabis indica
ggtccagatcaggctccgggtgtgggttcgcgtcctcagttctaggtctatgttttttgtttcagatccttgtctgggttcgagtttgggtccggatccgggtctagctctggatctgattctaggtgtgggtgtttcagttcggatacgagtctgtgtccgggttcgtgtctaggtttggacctcgatctgggtctaggttcgggtagagattaaggttcgggtcccgagtgcgggtccaagtttgggtcagggtcaggatcacgatccaaatctaggtccagcatgttgatcccagtctgggtcttagtctgagtccaggttcatatccggatccctatctaggtccaagtctgtgtttgggatcgggccccagatttaggtccaggtccggctctcagttccagtatgggtacacgaccgtgtccgtgcccgagttccagtctcaatatgggtttgaggctagatctgtgtcggttctaggtctgggtctggttcctagtcttgttctatggtcctagttcggcgattcttgttcaggttggaattttgggtcccaggtctaggtctggg

SEQ ID NO: 283452 - DNA, 428 bp, Cannabis indica
aaaaactaaaacttagttttctctcttggttgatgagacctcttccttttcttctctatatttcgaaaataccatagctattcttcacaaaccaaaaattcagtcattagtgattgagtgcattcccacacataacaagttggtcctcaatcatagtgtgcaagacagtgaagaatccaaacacaaggaaggagttttgggctcagaacctaggtgatactctgctacagaaaggatacaagggttagagatctgagcagaagggaacatttaattctgttacagccaatgtgtttattttcatcgttttagaaattcatattaggatgttaaaaacatacatgttagtaaatcgtgtttattggtgattgattgaggtttgcaaattttttacgtaaaataattggatttcgttctggaattatttt

SEQ ID NO: 283453 - DNA, 517 bp, Cannabis indica
ttcagtgtatatcatttttgttttgttttcataatatttattattgttatgtaacaaaattagttccttgatgaagaaaccacttttttggtgaagaaaccggcttcttgatgaaaaaaccactttcttggtgatttttctagtgattttgctggcgacaataccaattatggcaacttttttgacggcggcaataactctaatgatttttccaacaccagcaactaattcgacgacttttccagcatcgacatcaaactccagaatagtcgtcgaacttggcattgtcaccggtaaaattatcgaaaaaataccaagaaaaccggtttcttcatcaagaaactagttcttggtgatttttccagagacaatgctaattctgacgactttttcggcgccggcaacaactccgtcgacttttccggtcaccgacagcaactccgacgacttttccggtgccgccgtaaactaccggtcgacttttccggtcacgagtgacaacttcggcgatcactat

SEQ ID NO: 283454 - DNA, 567 bp, Cannabis indica
aaaaaaaaaaaaaattcaaatctgttttagacattgaaaattaactataatcaatgggaaaatcaacctctcaaacacccctaacctacacagagagactgagagagagagagaacgcaagagaaaaagagagggaaagagagagacttacggaggtgggaaaatcgccggttcgaaacagagagcttcagaccttcgaaattgcaagagaccttcagttcttcgaaatcgcaagagagaacgagagggaaagagagttgttcagagaaaaagagggaaaagagagctcgaaaatgaaagtgtctttgactgtttgggggtaagtgaacaataggagaatttgcgtcgttttctcaccctcacaatctctttaccgtcagttttaaaacgccacacaaagcgtgagtgaggcttttaaaacgacgctaataatgaacgaatttttttaatttattgacttttaccgtcggttgggtaattagtgacaaacatagaaccgacgcaatttgttattttttgttgacattttaaaaatgacgaatatagtgaatatagtactattcacgt

SEQ ID NO: 283455 - DNA, 510 bp, Cannabis indica
gacatccttgtgtactctcaatcagaagaggagcatgagatacatctacaaatggtactacaacggcttcgggaacacaagctttatgccaaattcaagaaatgtgaattttggctatctcaggtgtctttcttagggcacattgttagcaaggatgggatcaaagtggatccaagaaagatagaatctgtcaaggattggcctagaccaaaaacaatgacagaaattagaagtttcttcggtctagcttgttattatcgtcgattcatagaagggttctctaaaatctcaacacccttaaccgagctcaccaaaaagaatcagcggtttgtatgaggctagttttcaggagttgaaacagaggttgattaaagctctagtgctagctttaccttctgacaaagaaaagtttgtggtttattgtgatgcatccagacagggtcttgagtatgttctgatgcaagccgatcgggttatcgcttatgcctcccgtcagttgaaggattatga

SEQ ID NO: 283456 - DNA, 498 bp, Cannabis indica
aagcaaacataaagcagaactcgaagaacttaaacactcacacacccagaagcctctaagtacgaacccagaaaacgaacgaagtaaatataagcatgttattatctaaggatgcaagaaacttacagtagatcgttgaactgggggtactgaatgtggatgagtgaaagttgagaagaactggcgaagtcaaacgctggaaggctgaaagaagtgtttaagtattaaagcagtttgtgctactttgaggaattttctctctgggaaattcgagcagaaatggcaaggaatggaaagtaaccgaaatgaaggaaaggtggtggcttttataggcaaaaacgcatgaggaacaggcgtcatcacctaccaatcgcacggtgggggagacgcacgattcgaattcctgaaaatcaacggatcagatcaatctaccattaaggcggtggaaacgtttgagtatccgtctgacaccatcaatgcgccgcatcaatcatgggg

SEQ ID NO: 283457 - DNA, 546 bp, Cannabis indica
acacgatggtacaaactcgtagaggcctgtccaacccagcaaactctcacaaacgctggatccgacgttacaggacctagggagttcgagggttccactcgctgtcaatcctggacagacgggaagcgtggtgaatggtgggacaacttctgttactgaaactgcgcctggtgtgtaagagaccagaaacaacggtttcgcacacatccaggacgttcataacatgactgttccaccaggcatcaacgcccagacgaccatcggagacgcaaccgaattgcaaaacctctgagctgcactcggactcatgcagggtcacaataataccctacatcacgactaggaggaattacgtgccgcagtaaacctcgcgtttgatgaacagaggcgtatgttcgccgagtggagggacaaagagatggaggcattaagggctcaccatgcagaaattgaagatcgtagtcggcaagccactgtcctgatacgaagagcctatcgactgtaggccagcaaacaccgagcgtcattcccctaggagaaaccgag

SEQ ID NO: 283458 - DNA, 587 bp, Cannabis indica
tgaattcaggtgtgccgatcaacgtgagtggaacaaactgctcggcgaattacaggctcctaaatcacatcaatcacaacactgataagcgacacgctaaatcacttcctagggacttaaactcgaaactaaaagtttccctatcgataaataacatgacaataccctaaataacacaaaaatgggaaaaactacagttcctaaatttgccccaactggtaaaccggttctccaaccgaaattccggttctgggaagaattcctggaagccaaccggaattccgatcctacaggcctccctgaaccagaattttggttcagtgcaggaatggttcaaaatttcataactcgaccaaatcaatcccaaattaaaccaaactctccagacctgctatatagaccacaaggaacattttcaaagcaacaaaacaaccctacaacacagaatcaaaatccaccatgtgagctccaagtttgagcttcaaagctcaaagctcggctaacaccacaaccagccactacaacaagcttaattcaacataaaacaacatatctaacatccgaaaaccaaactcaaacacaaacaa

SEQ ID NO: 283459 - DNA, 843 bp, Cannabis indica
aatcatgaagaaatacatatgttttggacttaatagaatttatacattaaatataatcatgaaataaatcatgtgaaccatgcaacataaaataattttttatcttcattaattagtaaatacgattatattaaaatgggttttatttagggcacaaaatccaacactaagttgtgccaaatttagcacatactaaaaattaggtcaaattgctctgaattagataacataggaccgccgtcacccgagtttcaagttcgctctgctagggttcagacacagggaagaaggagatccttagaaagaaataaggaccaacatcctttgaagttcaagcaggttgtggacgtccccacaagtatcagagctctatcggtcatattaaagcagtaacaaaagggaaaaaggagattcttagaaagaaacagggaccaacatcctttgatattgttgtcaagaaaaaatctatggcgaaaatccttggacttagaggaagacgaggaagaggagatgatgactctctcaggcaatttgatttcaagatcattgaagatgtgtcgaattgaggaggaaactaaagtagattttagatcctatttggaagcaactaagaattttaaagctcaattgaaatttggtaagcacactactcccctaattttacacctgatcatcgttaatttataatttgaatggtgaatttggggatactgagaatttatctaaatattgaataagaggatattgaagatgaaatgttgtactggaaagcaactgtaacaccctaactaacaaaggcgtatacgtgatttttaaacatgttgtgcagctcgttgctaatca

SEQ ID NO: 283460 - DNA, 720 bp, Cannabis indica
tctactttgtagtccgtgaactcgtggagcagttcccggactattgttacatatgcggccattcgctcgccgcgcgttcgatactctcccgatatctggtttacgaccagttgggagtcgctatagacttctactcttttggcccccacggcctttgctaatctcagccctgctatcaggccttcatactcggcttcgttgtttaaatctgagaagtcgaaccgtagggctgtctggagtcgaattccggtcggggatatcattgcaacccccgctccggatccgttttcgttggaggctccgtccacgtatactctccatgtggggaccgatggtaccggtgcgttcgcggttgcctcggcttcattacattcagtgatgaagtctgccaacgcttgtccctttatggagatgcggggtatgtagtgtaagtcaaattgacttgactccatcgcccatttaaggagccttccggacgcctctggcttttgcaggacttgtcggagtgggtaattggtcaacaccttgattgggtgcgcttggaagtacggtcttaattttcttgaggccattaggagacaaaaaactaatttttcgatgatgggttaccgtgtctccgcccctatcatgcgcttgctgacgtgtacacggggtgttgagttttctcttcttcccgaactaaggcagcgctgccgcgtgctcggagacggccaagtaaag

SEQ ID NO: 283461 - DNA, 538 bp, Cannabis indica
aacaaaacagtggcccgaactatgatagataatggagcctcagcaaatatcctgttcaaaacaccatatgaaaaaatggggctccaactcaaagatctgatcccctgtctccagcccgtatatggtttctctagccagagtgttgcacctttagggcaaattcgcctaccccacactgttggacaagctccgaagagcataattgtgatggcacaattcttagtacttgatgttccatcagcctttaaagtcatgttgggccgaccagctttatatgacttgaaagttgtacatcaatattctatttgcgcgtcaagtttccaacaaagaacggggtagggtgcttgaaagggaatcaacaagttgcatgggaatgttacaacattgccctaagcaaggccaaaaaggaagaatcctcaagtcagagttcggacaaggggaagagcattgccaaatagggaaccgcccaaggcggggacgaagatgtggatccccaacttgaggagccaaatacaaatgttgggccggtggaagaatt

SEQ ID NO: 283462 - DNA, 1150 bp, Cannabis indica
aatgaaaaattaaaaactctaaggactgacaatggattaaaaatttgtaatgaagagtttaacaattattgtaaagaaaatggtatacagagacacaggacagttagaattacaccccaacagaatggagttgcagagagaatgaacagaaccattctcaacaaagtgagatgcttactgttgcaatctggactatcacaggagaagcagctttaacagctgtgtacttaatcaacaggagtccatccagtgcaaatggattcaaaactccagaggaaaagtggtctggtaaacctcctaacctatctaatcttagagtatttggttgtgcagcatatgcacaccaaagtgttgggaaattagaacctagggctatgaaatgtgtttttctgggatatccagaaggagttaaaggatatagactttgggtttgggaacaaaggggatttaaaactattaatagcagggatgtaatattcaaggaagatatttttccatgtttgcctatttcttctaaccctattgcaggtacaaaagacattgaaaatgcaggtaacactgcaaatgaaggaactggatctattcaggtggaacaaacagtgaacacacctgaacagaaccagggagatcaggttcaggtggaacctggggaccaggttcaggtggaacctgatgataacactggccttattgatgaagggactcaagaagacttgggggattaccaattggtcagggacagaggtagaagggtaccaagacctaatcctaagtacagttttaatatatgggatgaagacattgcatatgcctttatgagtgagttggaaatggtcaataatgaacctcaatcatatgaagaggccattaaaggaccaaattccaggaaatggaaaggtgcaatggatgaagagatggaatctcttaagaaaaatagaacctggattgtggtgcctaaacctaaagataagagcatagttgattgcaaatggctattcaaggagaaagaaggcagaactaaggatgaacctataagatataaggccaggttagtggccaagggatttacacagaaagaaggcatagattttaatgaagtatttgcaccagttgcaaaatacaagactataaggataatgctaagtctagc

SEQ ID NO: 283463 - DNA, 753 bp, Cannabis indica
caactgcatgttttctccttgaggttgatgacccatgatctggttagttcaatgacttcgaacatggtctcgtttattggttttacctgcggattaagtgtaaaactgttaatatgtataacaacgaaaaacaaactataaagaaactataatgcaactaaaatattaaacatgtcattacattttctgtcaatgattccacaaagttgtcgactaatttcttttctgctgtaggtgttaaaaatgttgttgttttctgtgcttttttcctgtttgtgtatgtccattgttgaatcaatgctctcaatgactccatcagtgttgtgattggtagctctctagctgccaagtttgctgcatttagagattcagcaatgtttgaagtcatagttgaatacctgttgtttttgcagtggtatcttgaccatttgtggtatccaacttgttgtaaatatggtcttacacggatgtccaagctgtccaactcgctcatatggtattcaaatttcctctctgtgtatgctctggctgcagcgaagaatggtttatccagcttgcttgcattcttcttgaaggttgcttttaggttgcttaacaggtggtatacacaatagcaatgtgtgatttctggaaatacttgacaagctgccttacttatgctctcatgtctatctgagatcaagcactgttcctctctaatcccatatgtttctctcacttttgtgaaaaaccattgccatgagttgttgtttt

SEQ ID NO: 283464 - DNA, 545 bp, Cannabis indica
ataatatttttactaacatacaaagtacatattaaacaatttgtaaaagactaagataaataagacaaactatatataaatctcttatcctattaataatagttaggtcatatcacaatatatatatatatatatatatatatatatttctatatgcataaataagaagataatattagccaataatttctacctaatatatatcataacttttctgcctgctttgagaagcaaacatccgaactttgactttatcaatagcctcattggtcctctgcattaactctggacccaagtacttcctttctccaacctcgtcctaatgaatagggaaacgatattttctaccatataacatctcataggaagccatccctatagtactctggtagctattgttataggagaattcaattaaaggcaagtgcttaccccatgaaccttcaaagtccatgacacaggctcgcaataagtcttcaaatacttggattgttctttttgactgaccatctgtaatacccggtaaaaatatacatatattttaa

SEQ ID NO: 283465 - DNA, 654 bp, Cannabis indica
aaattttgctatttaattaaaacttataatattacatacaaaatatttcgggatcccgtttacaaaatactttacaaaagtttactattcaatacaaaatatttgtctcctagcgactaactacaaaagcactgttgtctcgaggatcgtacgctccagacctaaccgccccgacatgtacaatcttcatttgctcgtcctcacggttcctcagctttggctttgcccttacctacacataaacatagcactgtgagtcgacagactcagtaagtaaagcataatataataaacatactaaatcccgggttataatcaagcgcccatacacctgaccataaccctaactaaatcaggaacgtccatgataatgtatgattaaccgtgaatccagcttatactcggtactctagccgtaccgatgtggtagcagttaatccatactaactgatagcctagcatatatctattggcatctcggtgcaactctatgtacacctcactattgccctgatatgctaatctgacggctatataaaatttgcttaacatatatctaatatattaatctgatggcaactgacatgtactctaaacatgtataagcatatgcataatattatactaatcttacctcgattctgaattcaggtg

SEQ ID NO: 283466 - DNA, 924 bp, Cannabis indica
gtaaaataatttccaacagcagtggcattggtggtacgcccagcagttgtctgtccagtgactgtagttcgaccagttgctccatggccagcggtttgagcggtggtggtagtgccgccgttccccggacgtgggggtcgttctccattgtttccggcaaggttgctcgctgatggaacttggtgggcactttccatctcttcgtcaggtcgctcttgagatcttcgggttaacaccattttttccggcgaaaaacttgaagattttggctaaagctctcaatgaaagcaccaaaatgttgactggatttttagccaaccgacgcggagtcgtaataaatgagatttaaaccaaaatcacaataataaatgcaattaataacgccggaattcgtaataaatgtaaataaaagacaccggaatttaaagaggttcggccccggatgtcggtaatagcctactccccttgagttttattgatctgagttgcaatagtcaagaacaggctcttgattgcaaagaatgagaaatctttatttttctaagtgtttcagattgcggatccccttcccaggtcatgggtgaccccttatataggggagggggtcggtgcttctcgcttcaggagacgcgaccaacgcggagctatctcaaccgtctccttgattttcggaggcggttggagtctgatatttaggataatatcccgctattttcgtgggttgacaactgtctttgagcctttcgcgggatttgaacatttgaaggagtcactgatgacaagggtcccttatgggtgtgacatggtcgtcaaccacctttgaggattaagcccatacttgggggtaacaccctcgagactctcgctgagggggggtgaccaccatcatagttaggtgactcccccatgatccaacttgagaga

SEQ ID NO: 283467 - DNA, 506 bp, Cannabis indica
aggaaaattgacagaaatatcaagagagaattaaataatgaaaaagtggaaatggaaaagttgcagagatatgaagagagagaattaaatagaggtttaaaagttaataaatacactttaatataatattgaaaaatacaaacacgtgagctgtaaattttgattattagattttttcaccttgaaaatcttaatatttaatatattaaaaacatacattaacaatataagaaaaagtggaaatagaaaagttgcagagatatcaagagagagaattaaataggattgcagcctgtttgataaagatcgagttcttcagcccgaagaaaggaatcccttagatatgatgcaaaatggatcttgttctatcgttgatcagagatttctctatgaacaatacaaatcggagtttgaagaaggggaaggagaatgagaaggagtcctcgacccgcaacagatagaggaggatttattcaatcacatagtttgggctcctagaatatggc

SEQ ID NO: 283468 - DNA, 720 bp, Cannabis indica
cacctctgccttggttcccacggaaccgcttactctgccctaaaccaccagaagctgggataactttccttttctgttcagtggtggagtcaccaccatccctaacatagataggagtaggagcagtgggggttccaacaacactcggagtcactcggggctcatgtagaaatttcaccgcaccctcggctctcaaagccttttcaaccatttcagcatatgtggttgcttcggtagtagtgatcaccaaatcgtgcctaatctttgcactcaaaccagccaaatatttctctttcttgctaaagtcagttggcacgattcctgtagcgagtttggccagacggtcaaactttgtcgtatactccgtaatcgacatcccttcagtttgtaccaactcagtgaactctttccgcttagcactacggactgcttcattgtagtatttagagttaaacaactccttgaattcctcccatgagagcgtcctcctgaaactagaaagtggcgcatgtcactcgatcgttaccaaccactcccataaagttgagaatacgctcaatcactgtgagccctgctcagccttcattacatcaggacctcccagaaacactggaggtgcttgctttcgaaacctttcatacaacgaggattttggggatttttctgaccacctccagtctcaaccatatcaccctgacttcttgtatttcgcggggcgtc

SEQ ID NO: 283469 - DNA, 498 bp, Cannabis indica
tttttttaaaaaatgtcatttttaaatattttaattttttttgtattcaatttttttttagaaaagtcaaaagcacaagaaaaaaaatacatcaatcttaatttaaaaaaaaaaatcaattaaaaggtgaagaagaaaaaaagcaaaaaagcaaaaaaaaaaagaattatttttttaaaaaataaaataaaaaatgaaagaattacggagaaaataaataaaaatatatattttatatcaattatgtaaagaccgcatatgattaataccttgaattattaaataattagggtttatgtatgagattttattattattaataataatgcaattatgagaatttatttgagttcgtatatatttattacgctatttatgtaaatttctcaattactgtgttcgtgttcggaagcggtggaaagcggcgttggacctttagagagttgtatttgtatgttatagcattgttttattccggggtcattattgtaggtttaa

SEQ ID NO: 283470 - DNA, 778 bp, Cannabis indica
tctggaaccagatttttgaaaacttcgtttttatcccattaaacacaaattaaagtgttggtaacagccatgtgatgaaaggatttgattttcaaatgtgatcctcaaaacactataaatagaagtcttaggttcactttgggtgaagaagtttctatcaaaagagaacattgctagaaacactataggcttgataaattcaaaaagctattttcattcttttcttttctctaagtgcttgtggtaggagaaaataagcttttggacaaatgtgtaagatcttgtttaagttttgtgattcccctattatatatacacttgtggtgtatgtggtgttaagattactctcatatctcttttatatataatatatatattgtgattcatgtgtaacattatttaatctatatttttgtcctttgtattatttatcattgagttgtactcttgttggtttgatatttctattggagcacaacaattttccaacagtcaaaagcttatcctttcctacctagcttcaatggaatgtaagaaatcaacatgtggtaatacaaaggtaagaattgtgatattttgtgatttactatttttataatagtaaaatttatattcacatatttttctatattgaaatatatgtatatatatatgagttatatatgttgtgtgtatatatcaatagagtgatatataatatgacatttgaatatgttacatgttaatatgtatatgtgagatatgcataatatataacatgtatatgaattatatatat

SEQ ID NO: 283471 - DNA, 468 bp, Cannabis indica
cgaggttcgaacatagatcaatgtaatctatgcctacatccgggaaacaatcagcatacttctttattgattaatcaggaatgattacaagtgatttgatcacaacagaaaggatcaattacagaaggagtctagctcctaatcctctcaatcactcagtctcaattctctctcactctctgattttgtgtctcaattagtgtcctcttcgaattgtcttggtttagagtttatataggtgtagtacatgaagagagctttccctcctaaaccaactaacaaaactaacatttgaacttgtccaatccgagagtgccacatgtcctgaatattagacttatgtctaaaaataccacacttttttatctgtaatatttctcttttcatctaactgaaataatttcaagattttttttcttttttatctatatgtctatatcatttatgtatgtgtatatgtttttattc

SEQ ID NO: 283472 - DNA, 1290 bp, Cannabis indica
aatggcacctacgaatcctttgctacagtggactaagcagatcacaatctgactgaaccactataattctctgtcttactgatattttccagttttgttgattgttttcccattcccagtcgagtactcgccattctaggttgaatactcgcacttgtcatttctcttaaaattctctttcgtattaataaaataatataatttggtgttgcgaaattcactcgacaacatttggcgccgtctgtgggaaacgactaaagatttcattcatttcaaagaacaatatcatcatggctggaaatcacgctaacggagctaacaacgggtccatcaacattgggatgatgaacgtaccgctatctggagctggagcgccacctgtggacgtcattaacggcggagtagggagaagcaatatcagacctctcaacctattcccagaaacgactgaccctcaagttggggacacatccacgccaccagcaaccatgcattttccccccgtcactccggcggtggtatccgagggaatgatccagctcaccactgatcaatatgctgcgattcaggatcaactgcgggcactacaggccgaagtagatggacaaaaccgagcccgacgccctcctcgagttcctgctattcgcaccgataaccctcaggtaacaacttctagacgtcatactaaccgtgtacgcagggaacgaagaaccaaccctgaaggtctggacctgaaccatccaacgtcgagggatcaatccgcaaggtatccaaaccaaagcacacaaatcgatgaagatcctgagcgccgtaatcctcgcagccgaccatcaagagacaacgacgcagaatcagcctcttcgtcgtcgcatggtcgcactccaagcaggtacacaaggtccggctctgtacagacacaacagggaggacgttatcaggtacaccgaggtgatctgcgtgatcatctcaacgcagttttcagggcacgctctcgcgtcccacataatactgagacactccgtgatccccatgcggacgatcagggtgccaacacttataataacccgcctaccgcgccgatcgcgaccactgggattaatgtcccagcaaatcttgccgcagtagttgcgagccccgcagttgcagcaaccccgcagttgcagcaaccccggctcctgcggctggagggattgaccaaagcatgcttctgcaggctatgaaaatgctcgagcagcaacgaaagcctatatataagttgcatggtacctcgccttttactacagaagtgcg

SEQ ID NO: 283473 - DNA, 629 bp, Cannabis indica
ttaagtggtgattagtgctttttgtgtcttggtgtgttctcttgttctttatgtgcaatttttctttgggggcattgtttgaaaaaataaaagaaaaaggggggcatatttttttcgaattcattttcgaatccttgtaaatatttttttcttttattttttcattttatggaaacatgtgttaattgtatactctattttgtgtttcctttatttgtggagatttggtcttattctaggaaacttgttcttaaatattcaattatttttggtttcctttttggtggcaatttcggatttggtggggtttttatttcttagattttgtgggaatatttggtttcctttttccatttaaggaaacattgactatatttgaaaaaccttttttggtttccttttttctctccacacgtgagtcaaaggtaaggaagttactttccttttcaattatttttctgattttgggtaagtaatatcaaatgttatatatgctcaactacccactcacccacgatcaccactctctcttatctttctatttttttctctcaaaggtctaatattgttcaaagtgtaagagtgtttgtgttctagggtttgaaagaaaaatggccaaaactaagaat

SEQ ID NO: 283474 - DNA, 712 bp, Cannabis indica
gtgggatcaatgctgaatgcaaggatcgtgggattgaggctgaatacactgataatgggatcgtgtgtataccatatccatgtaaatcgatccctgagttatagggattgagctgatgactcatgatgcgaaagctgaattcgctaagtgttggttgccctgcgcagatcgttgaatatcttgctctgggcatgccaacgagacatcctgctcgacctatctttccgagcggatgttccaagtggactccacgtgtgaccattcttgtgatgccatgtcagagtgtaaaatttgggataacatttgcccccaagtctgtacgggacttccaaagttgcgtgtagacttcatccgagctgattctgcctttggatggggacacgtgtcgagtgtgaccgttcgagactcgatgtgaagctgactaggcgtcccttctgttttctgctaataaatgctctgacaattactatttcaaaatttgactttctctctccacggctgacggttgcactcgattacttttgatatcccatattcgtttttaaggcgggaagttgaggcgtctaaggattctttgagacaattacctattttcgtgacttgcctataaatatccacagcagtagcacataaactcatttcatcacccttctttactaagtaaacttcagagcgaaaagaaaatttcttggcttcaaagtcgccaaagtgc

SEQ ID NO: 283475 - DNA, 542 bp, Cannabis indica
ggaagaacttgaagatatggaggaattggcatattacactatcataatgtacttgtccaatacagtgagaagaaaggttcagaatatgaagacagctcgagaactatggagcaagcttgaagagatttacatgaaaccctctctaactaacaagattaatttgttagaatctttatatggttttaaaatgtcttctcatttgtctttagatgataaccttgatgtatttaaccaaatcattatagggttggctaacttgaagcacactgttgatgaagaaagccaagctgtcattcttctcagatctttgccacctgcataccaagaattaaaggctgtgatcaagtatggaagagatactctcacccttgatgatgttcttggagccttgaagtccaaagaacaagaaatgtccaaggagaaagacaatgtcaaagatgaagcttacttggccagaggaagagacaacaataggggcagagatcactacagaaaggatcatttcaaaggcaaccagagatcccaatcaagatcgaaatcaa

SEQ ID NO: 283476 - DNA, 682 bp, Cannabis indica
agaattatgagaataagatagaagaattcttgcatagtctattcgaaagacttgagtcaagagttctaatcctcataacattttatggtatcttaatttgattgcttaatctctagcaagtattttacacttcaaatactagactgctatgttgttgacttagtcttaacgaaacttatagtttcagactaagataataagtcaaaactagatatccctcaaaaacaatagtaagaggttgaaagttttttttaaccagacacctattattgagtgggagctatctaagatgtaatcaaatgaggaacattaggggacagtcaagaaagatttatgaaagtgacctatatgttagatattaaggaactgtatattagttatccttatatctacaccaactcattaagattttgagatggtggttactctgggggtggaggagttattctagaagagtgtaaaaacccatctataataattcaagctccatcagagaagatatatataactttgtaaattcgaaattaccagaaagttattctactgaagaaaaattctacactgtattatctcagttccaaattttaaaatatgagagatatgtcttctgtttgttcagatgtacttaataagcagtaaggatttcagtataccttgatgattaaagcatatagttaaggat

SEQ ID NO: 283477 - DNA, 571 bp, Cannabis indica
ccaaacccgaacccagatcaaaacctagtcagagatcgaaaccagaatcgagactaggactcaaattcgaacctagaccgggaccgaaaccctcacaataattgagaccttgacctagaatcaggatatgaaagtgggaaaaagaactaggaccgggacctagtaccagacccagacccgaacttgaaactaggacccagcttgtgacccgtcactagaaatgaaccagacttagcacgagattgggatccagatctggacccagggcttggaaaaaacccaaagtcggtgtctggatttgggacccagccctgggcccgaaccctgataaggacccgaactcacacgcgcacctgaacccagtcccaaaccaaaaagtggacccgaacccgtaccctgtgacccaaaattggaaccaaaacgggaagttgaccgggactggaactaggacttggacttggaatcataactgaaattggacatagatccagaaccgtaacacgaccaggacccgaactccaaatcagacctagacccaaattaggagccggacacgaatcccaacccaaac

SEQ ID NO: 283478 - DNA, 586 bp, Cannabis indica
atggtatcagagcattgtgattcaaaattagggttacttaaaaaaaaaaaaaaaaaaaaaaaaaaaaaaaaagacaaaaattagggtttgagtttagggttgtttttcggaaacccgatttggagtgcgaatttattctcaccgcccactcagccgtgttgcccagccgccgatccacgaaaccccgaagtccggtcgccggattcctcgcgcgtggggctcacgcgccgcctgaagtttctgcgcgtggggctcacgcgccggcacgtggaggcgcgtgtgacggcgacttcgacggcgttcttttgccgattctttactgggttcttctaagcccactcgcatctgttctaggttgtaattcggtatttgtttgtcttcttcgtgtttgggtgttcattctttggtgttcttttattctttttctctgtcctttgtgtttttctctgtcctttgtgtttgcttttgagattatggcagagataagatcagattcaaaatcatttgttgtttctgatgttgtttctgatgttgttcccgtgatgtctaaaatcacggaccataagttgattggttcgaattattt

SEQ ID NO: 283479 - DNA, 679 bp, Cannabis indica
cccatcttttcataagcagttttaaacaagatattggaagaggctccattatcgatcatggttctaaccaccattttattggctatctggacttccacgaccagcgggtcattgtgtggaaatttaattttgaaagcgtcttcattgttgaaggttatggtcagctctcctgctcgtggaactttgggcttcctttcttccatggccatgataacttcttcttgctcgtgctgtgctgttcgggcatacctctcccgagctttgcccaaatctccagcaatgtgcgggcctccaacaatgacttgtagatgtccatctaccggtggaggtagcaaatcttggttgttgtcgttcctctgaccttgattggtctaaacatacttttgcaggtgtggattgtttttcgttatcaagaattcaatttctcgcttcaagttgtagcattcattagtgtcgtggccgtagtctctgtggaaccgacaaaactttgtcatgtctataaagaccgcttagtttaatttggaaattagcagttaattatgatttacttatggaaaattatttatagatatttaaataattatttatgctgttattttagaattcagaatgcatttttatgtcatatagtgaatttcataattttgcatttccgattcccggtaacatggaactcggt

SEQ ID NO: 283480 - DNA, 712 bp, Cannabis indica
gtgtgaaccaaagggaaggaaaggttatcaacttcttcatttatccgcagtccaaggcctcaacatctcaatcacatttgactaaatgagggaaatcaatttcctataattagttttccatttattcaaattaattaatataagatcaaactcaattaattaggattttatttttttcattgaacggttatagcatgtcaaaatgctatatattgaggggaacttttctttggagtgtgtaatttttcattggcaaaaactatagtaaattttagttttattttatctatctcttctcatatttttttttagattattgtgagaatgactagcatttttggctagtttcctagataaggtaaaggatgatcttatatgtgaggtaatatttacttgtgttttgattcaccaagtgcttaaagtttatacatttgagtagtatatttttcttctattttttatctctatattaatatatttatctatttagtattatatagaaatagtcatgctttttctatgtgaatatgattaggataaatatatattaatattataattttatgattaatctcttattgcattattaccaaacaaaaggtatattgtcattcttagatttttcataagattattttctacaatcttaatgtgagaattctatattactcaaatacatttttttattatatgttcttcaagttttatcttc

SEQ ID NO: 283481 - DNA, 593 bp, Cannabis indica
acttggagttaaataactccctaaattcttcccaggtcatcagcgtgacgtcccgagtgagggttatcaattcccaccacacgagagcatcttcctgaaactggaaagtggcgcaggtcacccggtcatttccaaccactcccataaagttgagaatacgctcaatcatcgaaagccactgctcggccttcatcacatcagggcctcccagaaacactggaggtgcctgttttcgaaatctttcgtacaacggttccatacggttgccaacaacaggttgttctgctggcaccgctggaactgcaacggcctgaacttcttgaggaggcacggcaggaggaccctgctgcctcaatctttggatctcttcatcttgctgacggattctatcttgcatttcagcaaatctttgctcccaatcaggaggagcttgaggtggatttacagggcgaccaccctgagctctgccacggccacggccgcgaccacgaggattttgaggattcccctgaccgcctccggtctcaaccatgccaccctgacttcttgtatttcgcggggcgtccatttaataggacttagcctgcgaatcc

SEQ ID NO: 283482 - DNA, 547 bp, Cannabis indica
tttattggatggatccaatccaatccaatgaaaaaccagttaaagcatccaatggatggaaccgatccaatccaatacatccattggatcggatcggatcggatcggatgactcagttcaattggattggattggatggaaaaatctaatatccaataaataattggattggatcggatgggtccaaatccatgatccaatgaacacccctatttctaacattacgcaacctctataaccttttttaaccaaatttacactgtagttcaaacgtgttctaacacacactatcttatttgaattttaatcagtttagctaaatttgaaacattggatatgtcacaagacgatttactataatcgtgaagaagaaagtgagagactaatgcaatgcttttcagaaagaaagacaaaagtcccacattgaatatatagtgatgatatcgtactacgtgtagcttatttaaagcaaagtctttctcattacaattcatacctttctcggccttttggctaagatcaagtgtagtatctgttcttatcagtt

SEQ ID NO: 283483 - DNA, 593 bp, Cannabis indica
aaataaccgttaaaaaaacataaataaacatgcatacaataagaaacaaaaaaatatgaaattacatgaaaaaacataaaaaaattaaaataagcaaaaagacatagattagagaaaaaaaaatccaaaatatctacagcaaaaaagaaaaaataaaccctaaaacaactaaaaaataatataaataccttcattattggctggtttgcttactgaaaaacaatataaactacacctaaaaatgagtcgacgacaattttgggtttattattcactagtttgcttgctaaatatatacatatatatataaatatatgtgtgtgtttactaatttgctcaagaggaatatatatatataaatataaacacatatattttcttgagtcaagtttttgtggaaaggattagaagcttcaaggaggaggagatcataaacaacccaggttgacaatatgtcaacttaggctctcggcctagctccaggtgttaaccttggcgctaggtcccaattttactccttcaaaaattttgtttggttctcgaatatagttgaatcttaatattttttaaaaacgtaagaagatggtcagaag

SEQ ID NO: 283484 - DNA, 628 bp, Cannabis indica
tttaaaagcaaccatcatatccttgaactcgatctccttcattttgactcccagatgaactgcttccatagttgctcaaacacttccaaagtataatatgggtgaaaatttcacatttgaagaatttgatgcatcgggtgattccttcttagcttcacttattaattatcagggcattttatttatttttgggttattgaaaacaacaattcttttggtgcacaccatgtgtttgataaattgaatgagtgaaaatcttattagaaagagtgaaaatgaaccacaagtagcatttcatttagttagctctttgaatttacggaggtttttttttttttttttagaaaaatgctagtaaataatcctatttctaatttagtgacagttaaatgtccattattttttcattgacatctatctatcttaatactactagtagtatattataatttatttaaaaagtagttaatttcaatagagtcaaataatagttttatcctgttggaaatgtcaatcaaaaagcttagatttttcaaggttgtttttggaagatctttttcaaatatggcagtcaacttttataattgatataaatagaaatggatcaaattatagtttcattatatat

SEQ ID NO: 283485 - DNA, 502 bp, Cannabis indica
atattgaaatgggtttatttacgggcacaaaccaacaaactccacttgcactaatataaaacaaaaagtgcatttcaaataatcttaacaccttgatatccagattaagtgtagtatgtagtattctctccgtaataggatctgacaggttgcattcaatacaacctttctccaccattgcatatccttaatcacaaaatccttgatattgtcaaattcctctctatatgtctactcctctaggaatactggattctttaccttttggcgactacatttgtgttagtcaggaagtaacactggtagttaataaattattggtacaatgccgaagttgtatagacctttccatatactaataagtatctttcctacaactttaacattcagtctcactggtagagttagagactccggatcggcttttacacttctctaaaattactgctccacccccagagtaatcaccatcaactcagtagactttgtagcatcaagcaag

SEQ ID NO: 283486 - DNA, 535 bp, Cannabis indica
ctttgtccaaaaagcttatttcccctataaaaaacacttagggaacataatggaaatgcttttgggaataaacaagcctctcaatattttctagcttagtgtttagaagatagaaaattgttgttctacaagtgaaccaaagccctctatttatagtgttttgaggatcacatttgaaaatcaaattccttcatcacatggctattactaacacattaatttgtgtttgatgggatgaaaacgttggacaagagagctggaaacatgctcaattaatttgtgtgcgataatgaacgttttcaaaaatctggtttcagatgttcgaaaacaaccataaaacaacatacaaacaactattaaacaactgtttcctgagaactcaaaatgtaactcctctccgagttaaatcattttccaacgtcccaatacccatttaaattatgtaattgagtattgtaatagtttctaacagctagaaacttatcccattaattccataactcccatatgtaacaactcacataattacatattt

SEQ ID NO: 283487 - DNA, 765 bp, Cannabis indica
atatttataatacataaaaaaattaataaaaaaatcattaaattttttctcatgttacataagtctttctttctatttcaaaatgaaatagtcattatattccaccaaaatcgtcgaaaggacattccattagaatgatattccaatattttaaaatgcaaccaaacaaaagaatagaataaaaattgtttcattttcatttcaataactccaatcaaacaccacctaaaaatcatttaggttatgatattgtatgagtcttttccaaataaataaataaataaatagtctttaaccataagtttgtatatatccttatagattagttctttcacaattgcccagaaagataaatttttcatcatcttttagttttagaaataatcgctcatagttatacttacataataaatgtcacaaaattttacttcctacgacgtttatttaggtacaataaatcctttataaaaaaacggtagttaaagacatgtgagtgtcttaagcttatacgttggtacttcataaaaaaaaaaaaaaagacttatatgttggtagatgtaactgaagcataaacttaaaagaacaaaataaacaaagttacataagggaatataacagactaagttcaaataatgacaaatactcatatcaagatactaaatataccattaatattaaatctttggacaattatattaactgacggtactcttgttgtagcaattaaatattgacaataaatctgatcaaacaattagtctattt

SEQ ID NO: 283488 - DNA, 823 bp, Cannabis indica
aaatagctaattatacatttcatcatcacaaaatgattaaactataacattcaacagtaggtaatataatcagtcctatgcatagaaatagatgtgctcatatatttgcattgcctaatcaggcaagcctgtgtgataatgcaatatcatatataatatcatcgcgccacctaatcaggtgagccggttccacaacttgacactaatatatcacatcgtctaattagacgatctcgtacctacgctcggtacttatcatatgccactgacgcccgtacctttgcctggtacgtcgccagatatattgcatcacctaatcaggtgaaaccatatattgtgtccatagtatcattatattatcattgcctaataagacaatcgataacttcagaacctgtcatgccatgtggtatattatacttttcttacctcaagtttcgaatcaggtatgttggccgacctacttagagaacgatcgataatctcaggccctatgtcataacaataataaatcaataagtgtttatcccaaaacaccatttaacactcgcgtatgataatctaagattttctatcaaattccgtagtataaatacactaaaataaaacttatattttggctctatattatacattttatcgtagagctcgtcgcaagcttcgaaacagtatatagaacgtccaaaacggacacccgagtgaaaagttatgataaaaatacgatttgtgatctcctatgaatttctaaatactatgaaacacgaaaatctcaattttcgcactcaccgaaacaacaacaaaacttatccaaatcactccaaac

SEQ ID NO: 283489 - DNA, 535 bp, Cannabis indica
catggagcagccagagggtttcaaagtcaagggaaaagagaatcttgtgtgcaagcttagaaaaagcttatatggactcaaacaggcacctagacagtggtacaagaagtttgattccttcatgtcgagccatggatataccagaactacttctgatcattgtgtgtttacaaagaagttttctgatgatgatttcattattctcctgctgtatgttgatgatatgttgattgttggccatgatgtcagaaagattgagaagctaaaggaagagttgagcaagtcttttgctatgaaagacttaggatcggcgaaacagatacttggaatgaggatttctcgtgacaggaagaatgggaaactttggttatctcaagaagcttatgttgaaaaagttcttgaaagatttaacatgagcaaagctaaagcagttagttctccacttgcaggccatttcaagctaagctccaaacaatgtcctacaagtgagaaggataaacaagaaatgacttcaataccttactcatatgcagtt

SEQ ID NO: 283490 - DNA, 540 bp, Cannabis indica
tccacgtgtccctgtctggttggtccacgtatattggacaaaatcagggacaacatttacccccaagccttgtttatttaaaaaatgaacaaggcttgttcagatgcctccggttgactcctcggtttcctggcacgtgcttcgggcgcgtgaagacgtatttaatgatcaccattattgcagcgattcactttttgcaggcgttgattcgtttcatgccctttaattgatacggcgcattaatgggtgtcagacggatactcaaacgtttccaccgccttaattacaaatcaatctggccgttggatcttgggaattcgaatcgtgcgcctccccagccgttcgattggtaggtgattgcgcctgttccacatgcagcttggcctataaaagccaccatctttccttcatttggttactttcatcctttcaccaaatttcttcgagttttccagagagaaagaaaaccctcaaaccagaaaaccttcaaacactataggtttcttattaaccctcattcgttactgtcagtcaacattt

SEQ ID NO: 283491 - DNA, 833 bp, Cannabis indica
actatactaaaattactaactagtaactaattatactattacaattttactagctagtactagtcctaactttctaaaaatttttggcagcataacggctataatttgaacattctgaaaaaatttaaagctattaatcactacaaaatacaatccaaaataatatcagacaatcacaacaataattggcaatacaaaaatttgtcaccccttcgactgtagtacatgaattcacggaatctatttcactatggatgaatatttaagatatttaaactcatcaacatgcatactattccactcatccgaccgcagtacaatatatcgcagaacttacttcactatagataaatatttaagatattcaaactcttctaagtattcatcattaattaataataaaagttaataaatatatacctcgaactgatcaacgtcaagtaggccagatccttgcaaattgacctcacaacataaataaatactataaaattgaaattttaattatttaactacttacaagttatataatttttgagtacttgttactaactagttaagttagcaatttattactaactaataacagatgagtaactagttagtaataacatatgaataggaatagtaactaactagtaaaaaaataaaaacacataaataggaataaataaaataaaagagctaataattaacatatacaaaataatataccataattaaaccaaaacacccaacaactaacatttacctttctgactcaaaactaccacaccaaactactatccgtttatatcgatttatatattcttatatgtactctacacatatat

SEQ ID NO: 283492 - DNA, 693 bp, Cannabis indica
gtaagttttggtggcgatcgtcgaagaacaacaaaggaatccattggaaaaagtgggatagattgacggtacataagtctaaaggtggtatgggatttcgcaacttgcatgactttaacttgagtttgctttgtaaacaaggatggagattgtttagtcatccggactcacttgtcagcaagatttttaaagctaggtactaccgtaatggtaccttcttaaatgctgagttggggagcaatccaagtttcgtgtggcgaagtatttatgaaactcaagagatcgttcgaaaaggggcgagatgcagagttggtgatggttctcgaattaatatagtgttggatccgtggctgccgaatgaagataatccaagagtaacttcgaataatcctgctcttattgatcaaaatgttaaagcacttatggaaactgatacgttggcttgggatgttgacttggtgcatgatatgtttaatgaaagggatgctaacttaattcttagtatttccttgtcttcaagtcgtttatgtgatgtttggtattggagttgggagagctcgggccatttctcagtaaaatcggtttataagttcttacaattgagcaaagagttgggtgcacaggatgataattccgtcttttggaatactctttggaagctaagtgttcctccgaaagtgaaagacttgttat

SEQ ID NO: 283493 - DNA, 734 bp, Cannabis indica
gaactcgggcccggacacggtcgtgtacccagacgggaacatagacccacaccttgacccaaacttggactagcactcaagaccccaacttggacctggacccgaacaaagacctagatcggggaccagacgtggacacaaactcggacacagactcagaccagaactcaaacccacacctagaatcagaccgaaagcccggatccggaccaaaactcgaacccatacaaggataagaacaaaggacttagaaccagaactaaatccaaactcagatcgggattggaactttggactcggacccaacctagaccaagacccaggacgcgaacccacacccggagcttgatctggacctagaatgaaatccggactcgaacccaaactcagaccaagactggaactctgacccgaactcaaatccaaactcgaactaagaatcgcaaatggaactagaaccgaactaggactaggaccaggacaaggacctaaacccaaacccaaacccagatcaaaacctagacagagacctaaacccgaatcgagactaggactcgaacacgaaccttgaccaagacccaaacccacacaataaccgggacctggacacataatcaggatagggacatgggaaaaagaactaggaccgggacctagtacccgaccgaaacctggacttgaaccttggacccagctcgtgacccagcaacagaaatggaaccagactgggaccc

SEQ ID NO: 283494 - DNA, 556 bp, Cannabis indica
aaggccacggattccgtccgtggtattcatccgctatgtggggtaacagtggttgctgtccgttcacaacgttcaaaagggctcttgtttgatgaagaactcttctgagagttgaaacaaatttgagctatatctagtagttacggccaatttttctggttggcattgacaaagtgccgcaaatactcccccaacatcccattgaatctttctgtctgcccatctgtctgtggatggtagctcgaggagatgttcatctgtgacccaagaagcttaaataatttggaccagaaggtccctgtgaatcttcgatctcggtcacttactatattctggggtactcccagtaccttactatatgcttgaagaaaagttgagctgtctcttctgccggacactgcttcgacactgggatgaaggttgcatgttagaaaatctgtccacgatcaccaagattgaattcaagtctccagtcttcggcaaaattgaaatgaaatcaagcgagacactctcccatggtctgcttgggactgacaaaggttctaacaaccctggc

SEQ ID NO: 283495 - DNA, 574 bp, Cannabis indica
aacattaaatgttatttctgatctatattaataagtaaatctgattatattgaaatgagttttatttagggcataaaacccaacagtttcaacagatactaattttcttagaaaatgattaagtctaaaaaataaagtagcaaagtagaggagatatttttcttcttgattccaaagtgttctatcatcttattctacaaaagatgatcccagtgcctctgttgtcttgatacaaacgatgaggacaataccacttatgttcttagacatagtcacgataccttgtattagtgggagggtttcaaggaactcaccctattatgacttggaagacacttgtgatgaaaaatctattattagtttaaacatgtaatggattgttagaataaggaactaagaagcaaagccaagagaactatggttcaaaccattcatatggagtaaccaaaaagttttctactacaaggacaagaaaggaaattttgaaaataagtctattcaatggacttaacaaaacttcctactcctagtattataggtttaaaattatctaaacctatggcttatggtatac

SEQ ID NO: 283496 - DNA, 630 bp, Cannabis indica
ggtccccaagtcgaggatccacatcttcatccccgccttgggaggttccctatttagcaatgttttttcccttgtacaaattctggctagaggatacttcctttttagccttggttatggcaaggttataacattcccgagcagcctgctggtttcctcttaggcaccccaccccattcattgttgggaacttaaggcatgaatggaatattgacgtaataacttttaagtcatataaagctagtcggcctaacatgacattaaatgttgatggaacgtccaatactaaaaattgtgccataatagttatgctcttcggagcttgcccaacagtgaggggtaggagaatttgccctagaggtgcgacaccttggctggaaaaaccatatacgggctggagacagggagttaaatctttgagttggagtcccatcttttcatacatggtcttgaataagatgttagtagaggctccgttgtctatcatggttttggccaccatattgttggctatctggacttccacaaccaacgggtcattgtgcaggaaactgatattgatagcatcttcatcataaaatgttatggtgggctcccctgcccgtggtatgtttgatttcctttcttcga

SEQ ID NO: 283497 - DNA, 943 bp, Cannabis indica
cttaagtctaacaattttaatagttcaggaggaatttttgacggtcaaaaaagttcaaggggcatgatttagtacatgtcaaagttcgaggaaaaaaattgctaattaaccttttcaaaatactttttatgttagttcggaatattcatattggcctatataaaatcattttccaaaatgatgattccaaaagatcttggaagcccttctacaccaaatataaaagacaataatttgttcctgtcctaaactcaaattttttgttcatcaactctgccatggtagacgatattttaatgttttctttaacaaaatggtatttttgtaataatttcgtaaaaaataaaaatttgcatattttttaaatgaattttctagagtgagggaaaggaaggaaatgtagagaaaaacctcgagtccaactagcaagtgtggattatttaagggaaatttacatctagtgtggattatttttaacgtactgtgcaactcgttgctaattaacgaagttattggaaaaacgtgaataattaaaattttactttttaattaaaacataacatattatacttataatattccaggatcccgtttacaaaatacaattacaaaagtttgctattcatttagaaaagatttgtcgcccagcgactaaacaacataagccctaatgtctcgaggatcgtacgctccaggcctaatcgcctcgacatgtacaatcttcacctgctcgctctcatggctcatcagctttagccttgcccttacctacacatagcaatagcactgtgagtcgacagactcagtaagaaaagcataacataataaacatactaaatcccgggttataatcaagcgcccatacacctaaccataaccctaactgaatcaggaacgttcttgacaaagtatgattaactgtaaatccagcctatactcagta

SEQ ID NO: 283498 - DNA, 1019 bp, Cannabis indica
ggatgtcaggcagcattgcgtattttactcacacaaccgtctaacacttggaaatgcaaagagttcagcacaatgcacaatcacgagctggcttcatcaagtgaggtacaatttttgagatcatatagagttgtctccaatgggttgcttgcccaagttaggtcgatgaactccgtaggaattaaaactgccaacataatgtctcatgttgctttgcaaagtggaggttacgagaaaatgccatgtcaacttcgagatgtgtacaacagggttgctggtgcgaagcgagaagagaagatagagacggactcagaaggggctctgggatttcttgattgtctcgcagagaaggatcctaatttcttcgttgtctatcaggttgacgacgagaatcgcttggctaacttattctgggcagatggaaactcacgcgtggactatgtagcttttggggatgtactaggatttgacacaacctacatgacgaatgagtacaataagcccctcactgttctcattggcgtcaaccaccatttcaacacatgcatcttcggatttgctctcctcctccacgagaagcttccatcatattcttggctacttcaaaaatttctagaatgccatggagataagaagccaagtgttgtagttactgaccaagatgcggccatgaaacaggctatcgttgaacacatgcctgatgttacgcaccgtctctgcgcttggcatctcaatacaaatgcttcgaaaaaggttaaagatccgatcttcttaaaaacatttaaggatctcatgtacaactactacgaggaggaagaatttgaagcaagatggttagacgtcatccaaacccaacaactaacagataatgaatggtgtcaaacaacattcgagtcaagacaacaatgggcagaaacgtatttaaggggttcattcgttgcaggaatgagaaccacacaacgttgcgaatccatcaactccgctctaaaaaaatttttagagaagaattattgcttgcg

SEQ ID NO: 283499 - DNA, 774 bp, Cannabis indica
gtatgttgctaagtgtcttatctgtcagcaagtaaaggctgagcatcagaggcctgcagggttgcggcaaccattaaacataccagagtggaaatgggaagacattgctatggacttcgtggtaagtttacctagaaccacgggacagtttaactctgtttgggtcatagtggacaggtttacaaagtcaacgcactttttacctgttcagacgaatttctccattgaccagtatgctgagttatatgtcagagaaattgtacgtcttcatggtgtcccaaagtctattgttttggatagagatccaaagtttacatcgagattctaggaaagtctccatcgagctatgggtactcagttaaagttcagcacagcatttcatcctcagacggatggacaattcgagaggactattcagattttagaagacatgctacgggcatgtgtgcttgactatgaaggatcatgggtaaagtaccttcccctgatcgagttctcttataataacagctatcaggcaacaatcgggatggcccctttcgagcttttatatggaagaaaatgcagatcacctattcactgggatgaagtttgtgaaagaaagttcttgggtcccgagggtgttcataaaacgagtgaggcagttgacaagattagagtgcgaatgctcgcggctcagagtagacagaaaagttatgctaatccaaagcgtcgggatattgattttcaaatcaggaacaaggtgtttcttcgaatatcaccgatgaaaggcat

SEQ ID NO: 283500 - DNA, 921 bp, Cannabis indica
ataaacgttcataaaattttaaaggtgaaaggtccaaaggaatatgcagtagacattttttttttcaaaagaaaaatatgtataatagaaataatagacatttgaaattaggaatgtcttaccatactctgttttatatttttttataggctttggcgttttgcaagtgtttgaaaagaatttgagtcaagtggaaatttcaatctcgattcatcagaggtatatatattttttataattaaattacatataattttatagaagagtttgaatatcttatatattcatccatagtgaagtaggttctgcgaaatttgtgtgctgcggtgatataaggatgataaattgtgtgttatctgattatttatagttaaaattgacagatggttaggttaataaaatagagaaaatgctgccctgtattattgaaaaaagtacaaataggaccctgaattgatttttttatcaaaataaaatttaattataacccgatctaaaaattgacaaaactgtctacactttttgtatttgtttgtattaagaattatcttcaaattggttatattaaaaaaaaagttgtcaaaaattaagctcagggctttattgttaacattttagaaaatacagggtctatcttgtcatttaacaaaatagagagtccaatcagtaacttttacaaaatatagggtcaaaaaatagtatttatccaattaaaaaaaaaaacgtaaatttaaattaatgtagaaaattctacattacactaccttaaaaataaacattgatgcatctctatatgttttttacattagagagactttttttaacccaattttttttatattcgtgtatattataattatttaagatatttgtcaaaattttgaaaaatttaaaaagatttaacatgaattcaaattgttt

SEQ ID NO: 283501 - DNA, 655 bp, Cannabis indica
aaattattgggactgattaacaagatcccgctgccagaaccttcattatttgaggctccatcgacatacaatgtccatacctctttgcccatcatggcgatgtcatttccaccctctacaaccgccacctctgtgcttgggaactcaagtataaaatctgccagggcttgccccttgatcgcagttcttggtttatacctgatgtcgaactgactcaactccatcgcccactttaacaatctccccgatgcctctggctttgccaaaacctgtcttaaggggaagtttgtcaaaacttcaatgctgtgagcctggaaataaggtcgcaattttcttgaggatattatcaaggcgaaagccagtttctccatttgaggataacgcgtctcggcgtccaataatcgcttactgacgtagtacaccgggtgttgacgtccttggtcctcgcggactagtactgaactgatcgcgtactcggagacggctaaataaatagacaaaacctctccgggcaatggttttgatagaattggaggttgccccagatgcgtttttaacgcttgaaaagcctgctcgcatttctcatcccattgaaacctcttgttacctttcaaaatctgaaaaaactctttacacttgtcagaggatctggata

SEQ ID NO: 283502 - DNA, 699 bp, Cannabis indica
ttcctgttccacggtccttattcaagttcttattccgatttcgggtctcggatccgagtttgggtttgggtcctagtctagaaatgtttccaggttcgggtcttggtacgattcccatatctagacccccactaggggttgggtccaagccccatgtcgtgggtcaagatctggatcccaatattcggtccgattcggagcttgggtccctgtccgtgtccatgtccgggtccaggtttgggaccgagaccggggttggggcttgggtcactgtcccagtcctaggtctcgattcttgttctaattttttgttttggaccccaatctaggtctgggtcctgggtccaggtctgagtctccaatccaggtccaggtcctgggtccgggtcttggtccaagtccatgtctgggtttgggttcgtgtcccgagtcctgattcaagttataattcgggtccgcatctcgtccggctctagttctgggtcctagtcatattctagttcctagactcaaacctagtcttggactcggacccaagtctcgggtacgggtgtgggtttttgtcagggtctgagtccgggtctgggattgagtccgggtctgggattgagtccgggtatgggtcccagatccaaagactaactacggggcagttccaagccatgaggtcagggtcccagtctagttcgactttgggtc

SEQ ID NO: 283503 - DNA, 617 bp, Cannabis indica
gtttaagttcaggagccatctgcaaaattgtcaacaaatttgttagaagtatgtcgcgaaacatgtcgctgtatgtcgctatacatcgctaaacataatcctaatcaaatcgccaaatacgtcgctaatatatcgctaatgaatcgctaaacacaaaaaggaggatgcaaaactagtcctatgtataactgttatatatcgctaatatatcgcaaacatgtcgccaaacacacatacaagtcgataaaaatcatgaaacctaagtactaaatgcaatatcgctaattatgtcgctagtatgtcgacaacacgtcgtgaaaaccacggttaacagaaaatccctaacttttctagacgatatcgcgttatgtcgtgaacatagtcgccctacgtcgcaaattttgcacaaaaaccagaaaatataccaaaacaatgaaattcaaacgaaatcaaacaaattgaacctaaactaactacattactttaaaatgaagcacaaacaaagaaaaagtaatgaaacaacaaaaaagtttgaaaaatacctttttttaatggttttggatctgggtttctttgggggtgtcgcgaatgggggtttctcgatctcgtctccggtg

SEQ ID NO: 283504 - DNA, 524 bp, Cannabis indica
ctttttcatgttcaaggagcaagtaagaaataattaattaatatatactaacttgaaaataaaaatatatactacatttaattttatgtttcatgatactagatagatgttacatgccaagtcacgtatattaattttattttagtttttagttttttttaatatcataattttaaaattaataatattcaatgtagtgataatctttgaaatttgaaagcataataatgataatgctaggttaaactatcaaaacatttaaatttaatttaaaataatatttaaaatttaactaattctaaatatcaaaatttgaaaataattttgaataaaaaaataaacaatatgaacaaatttattattaatcgcaacagtggattaattatatttaggtttaactaattacatggatgctgacacgtggcaacatctaataatttgtgtttttttatttaaaaaaaaaaaagttttagaaactcatttaaatttcatttttttctcaaacagaattcccttttttaaat

SEQ ID NO: 283505 - DNA, 527 bp, Cannabis indica
gtgctgaaaatcgctccctggttaaagataataaagtcttgtgtaacaacattaataagttggaagataaacttaaatgttgtgaatctgaactgtctttaaaagagtctaaaattatttctttaaccaaggaacttgataacattaaaaagaatgttaaaatgctaaatcgaggttccaccatttttgaaaaaatccaaaaatctggccaaactaatcatgctggtctgggttatgtttctaatcaacctaattccaataccacttttgttaaatctaatagttttgtttctggaagaactgtttctacctcgcaggtttctgtctctacagcaaagcactctgctgttacagaaaagaagcagcacggtaagtttgacaatttcaaagggattggaagacgtttcatccctatttgccatttttgtggaataaaaggtcacattcgacctaagtgcataaccatgcaaaacatgtttaaatctaattatcttggaaataaacatgttttatttagggcacaaaac

SEQ ID NO: 283506 - DNA, 755 bp, Cannabis indica
agggcacaaaacccaacaatgcgaccattttttctccgtgcgtctgatattctcccgacacctggtttactaccagttgcgaatcgctgtagacttctactcttttagcccccacagtttttgctaatctcagccctgctatcagggcttcgtattcggcctcattgttagaagcttagaattcgaaccgtagggatgcttggagtcgaagtccgttcagggatatcattgcaacccctgatccagatctgttcttgttggaggtgccatccacgaataccttccacgccaagactggtggtgtgggtatgtttgcggtagcttcagcttcattgcactccgtgacgaagtctactagcgcctgcccttttatggaaatgcgtggaatgtagtgtagatcaaattggcttaactccattgcccatttgaggagccttccggatgcctctggcttttgtaagacttgccggagcgggtggttggttaataccttgatcgggtgagctttgaagtacggtctcaactttctcgaggccatcaggaggcaaaaaactagtttttcgatcactgggtatcgcgtctccgctcctatcatgcgcttgctgacatagtacacaggatgctgagttttttcctcttcccgcactaaggccgcgctaaccgcattctcggagacagccaagtataggaacaagtcctctccgagaacgggcttcgataggattggtggcttggcaatgtgctctttcagtttt

SEQ ID NO: 283507 - DNA, 614 bp, Cannabis indica
tctcctttgaaaatgtctctgtcgaagccatacacatttttctctattatctcctccaccaagtagatgaccttgagtttaaagtttacaactttccttcggtaatctaatatttgttgatgctctgcttatctcttagtgtttaagataccttcataagttattacctctagtaattttatcatgtctctttctaacttctcattttggattctattcagcacactacactcctttctatatgatggcatcgtcctctcctgactcatttctataacatacttatctccaatgtctttgcatacagtactcatacttcttaccatctaacttaagagtgtgtaacttatagaatatccaacaagatagtaccttctccttaaagatctaatagatatattttgccttaaagatctattatttcatccttcttaataagtaggtttcgtaaattatactgtcccagtctggtataacgtctactattctaagtcatccctacttcctatatgttgggcttccattcatggctaggtgtagagaccgcttcttcaaccattcatagataggtgaaaatatatgcgtcggtacttagttggctattggtacatttc

SEQ ID NO: 283508 - DNA, 633 bp, Cannabis indica
gcatacaattctctgctaccccacgggtatagccagggccacgccttggcaccagcatcatctcattttggcaacccgtccggagtgaatgggcaagctccttcacactctgctccggctgctagcctgacaggcccttcccagggctcaaggagtaaaaggtcctccaaaggcagcacccggacgggagagaagcgccagaagaaggggtacaccccccaatatactcaatacacggagttgtcggactcccaagagcgtgtgtactttgctactaggcaaaatacacactaccggaggccacaaccgctgtacaaagatagctcccggagagatccgagcaaaagatgcgagtaccataacgacattggtcatagcaccaatgaatgtaagaatctcaaggacgagatcgaaaatctaatccgattgggccacctctatgagtggatcaagaataggttgccccacctcaatccgggtcaggtgaccgtgggtatgcctcagggaacaccggggggtacagcaggagtattggctccagctgctcccacgggcgacgcccagcatatccccggtctgccgccccggcctaatggaagggtagccatgatctccgtgttggaaattatttta

SEQ ID NO: 283509 - DNA, 628 bp, Cannabis indica
tgatcaagaggtattaaactacagaaaagttgcttcagaatcgtgatcactgacccttaatataaccaattctttcacgaatcacacagacattatatcaaacagtacatacaccaactaaaatactatcacaattcacataatattgaaatacgactatataaaatggaatgaattcagtctacgaaaaagaaaaaagaaaaacagatagagatatatttaccgtgatagtttgttggaggatcagaaaaatggagaagcaagtactgggaatgcgatcacgaacaacgatgaagaaataggaaggttgaagtgtttatctattggccattttatttcaactccaagccaaatttttccttcgaaaaacaagtttggcaacgaaattttttagggtattttttgaggaaaatattagaaacttttaagggctaaaaagtgagaactgattggaacaaaatatggcctggactggaccacactatgaaaagttatgagcccataactgtttggtcagatatatagagagagaggtcttcacatgaagctcatgaagatgccagaaaaagattcaaaaaggtcagatttatgactcgaaacagctccagcaagcacaatcttcatgatt

SEQ ID NO: 283510 - DNA, 549 bp, Cannabis indica
tatagatgatttacaccgtgtagggactaatttaccgtttcgcccctcaatgtattttgatccttaaaatacttagctacctgtaaatgatatttaagtgaactaaaatataatcacagaaataagagctcttccatttacatctatttagctaagctctaaggaaatcattactttacttctaaataccagttgaagctatagattccatatttatgtttagcgctcccactcaatcatacttacatgtccctaatatgtacgtatcaccatgacctgaaagtaggcttaactaacaaatcaaagaacatgaaaagtactcatgagatctaacctaagcatatgaggattaagatcttttgatctaagatcaactagtgatattgacttagaaagatataacggtaagtattataatgtcttaactaagttcaatatcggtccagtccaatgcatactccatacattcgagactagtatactatgccaatgttctagaaagaacataacacttatacaaagtgtaagtatacttcatcgctgattatc

SEQ ID NO: 283511 - DNA, 352 bp, Cannabis indica
ctttgatgctgattttccatagtgttacatactatgattgaggtaccacttgatgtgtgtgggcactactcattcactcaagggattttgaaatttagagaggaacagagagagaaagtggcgtgtaggctttttctgaaggaaacaatgtgcaaagttatgagtttcctgaagccaacactttctatttatagaatgccctctaggtttaggttagaattgtgtggcattaaaataatggaaaaaataaaatggtaaacctcttgcatagtgggcggcccatataaggaaattgggcctcactttgcaactttcccattttgttatttttcattcccattttctcaaaaat

SEQ ID NO: 283512 - DNA, 583 bp, Cannabis indica
tccattctcgacgaggtttgcgtacatgtgactttatttgggtttgagggaaactatttggtcgattgatcattgctttcaagtaatttggcaatttgtagcacttgggacgaatgtgacctcttctattgcagaaatgacatgtaggaatgaaattgtcattctgtggcagattttctacatcagtcctccttccttcaaacttgagtttagtgggtccagtgggaacttgtctctttgcagatgagtctgattcgttaatggtagttgggatgtcatgtaactcatcttccttctttgttgaatcgacatttgagggaagagaattctcaacagacaggtcattgccttgtttatatagcatcttatagccaaaggaggttcgatcaccatatggcttctggagctgtagagtttgattgatagctgctgtgcctgggggaatgaattgtaaagcttgcttggttctaattagatcagcagtgagtttatagatctcattctccttttcatcaagaagtctgttgaggtttttgactgtgtcttctaactttcctttttcagtctccacttgctctaggga

SEQ ID NO: 283513 - DNA, 391 bp, Cannabis indica
atttttttaatgccaaataattcaaagctaaacctaggtggctccctataaatagatagtgatggcctcaaattaaaagatgatgaaaacacttgccttcagtcaaaaatttgagccttcttccctatgctattcgaacctctcttctctctttctctcttcataatctcgaacactatagtgatagagtaagtgcccacacacatcaagtggtactcaatcatattgtgtaaggctgtgaagaatccaaattcaagagaaggagattcagactcagatcttagtgatactctgttacagacaggatacaagggttagagatctgagcggaaggagtcattttaatcccgctgcacccactgtaaggcttctcaaactttatatgtgttta

SEQ ID NO: 283514 - DNA, 542 bp, Cannabis indica
acaatctcaatagtttagggggaatttttaacgtccaaaaaagtttggaagcatgatttggtacatgtcaaagttcagaggaaaaaattcctaattagcctaaaggaaattaaacaaacgtgttgcctattttgccaacagagactgattaaacaagaacatatctcgaaaccccatactactatctattttatgcaagctaggggtgctagcataacttcgaccaagtgtaccaatacattttttgtttattcgagtcccgccccgcaccagaaatgagcacaaagacagtaaatttcattcacaatactgacaggaaagtggaatagccccatagtataaattggaatcgcctaaatcactgactttaaaaaaacctcacggccgaagaaaggagcttcgacgtccacccatataggttatgccatattcaatcaataatagattaaaataaccactatttactctatgtataatatttgatttattaagtttttaattatatttatatgatatgtattagatatttaaattattatttt

SEQ ID NO: 283515 - DNA, 140 bp, Cannabis indica
tccttttcctcaaaaaatcaattaaatcaaagtaaatcccttatggtcaaatgaccattttgcccctagggctataaaacaaacataagcactttcaagggcataatagccatttctcactcaaatattgccaaataaat

SEQ ID NO: 283516 - DNA, 621 bp, Cannabis indica
atagtataattgagtgggagcgataacatagatatggaatctataacttctataggtatttagaagtgaaaggatgttttccttcgagcttggctaaacagagaaaaatggttgagtactcatttcacttcactgaaatatcatttatacggagctaagtgttttaaggataaaatacattgaaagcgtgtaacggtaatttaggccctatacaatgtagatcatctattagataatcattgatcaaattaggattataacaatggataattaattgcgtatctatatcgtggaacatatagagtgttctatatggctgagagtgcaattctaacactactacaaaattcactattcacgtctgtttttaagtgtaacttaaagaatttatgttggtttataaaactgacgtatataccgtattcgcaaatagttttttattagcgtcaatttcaaaatgacgcaaaaaaaaatttcgacatttataaaccgacgctaaatacttacttttctattttattttaagcgtcagtttaaaaatgacgctaaatgtttcatggcattttaaaactatcacaaaaaacttattctgtcggtttaaaaatgacatatctattacga

SEQ ID NO: 283517 - DNA, 710 bp, Cannabis indica
atttatgtctacgtggcgtagacctacgtgttgcgctcacacgtctatttatgtctacgtggcgtagacccacgtgttgctctcacacgtctatttacaataaggccttagatcagttcatctcggttcttgttaccgagtccaacctggttatgccttgagcgcataacccttagtctcaacatatatatttatcatataattattggtgccactgcactatttgtctatttgctatagacctgcgtgttacgctcacacgcctatatatgtctatgtagcatagacctacgtgttgctcccacacgtctatatatgtctatgtagcatagacctacgtgttacgctcacacgtctatttacaataaggccttagtaaggtttatctcgattataattaccgagtctaacctggttatgccttgctcacataaccctattcatatatatttacgtaatccatacattacgttctttcagtggtttatcctagtaatatactaggtctaaccaagttatgtcttatgcacataactcttgaaatatatgtatgtattcaatagataacaaaacatatagaatcttagggtaataaccctaaattacataccaaatagtctctcatataacatatcattgcatgctcaaaataacacttatagagattaataaccctaattcatgctttcacttgattagcaatattattg

SEQ ID NO: 283518 - DNA, 606 bp, Cannabis indica
actaggtgatattgaattgaaaatatattacggtaagtttgacatatctgattcaaaggttcaatatcggccccttccaatgcatactccatgcatccaactcaagctttactttaaccaatgccctagaaaggacatagcagttatccaaggtgcaagtaaactatgttgtagattatcatatcagttaaaccctgtgtactgataaatctaggattatatatttaatcacataatcttaattactttccactgtgctagagacacaataaacaagaatataaatgtgataaggatttggattgttatcccaaatttggcattctgacgtggcatcacgagaatagtgacacgtggagtccacttggagcatctgctcagaccgatagaccgagcaggacgcctcactggcacatcacgaatgaaatattcaacgagccgtgcaaggcggtcaacactcagcgaatttagctttcgcatcatgagtcatcagctcaatccctacaattcagggatcaacttacgtggatgtggcatacacacgatcccactatcaatgtactcagcctcaatcccacgatccttgcattcagcattgatcacacg

SEQ ID NO: 283519 - DNA, 576 bp, Cannabis indica
taaggatttatcaagcctcatatgctcagcctagtgtctaaggatgagcatatcctcacaaggttctaaccacaacaaatggtttcaactacttctcatacaagtgaacaatatgacctctatttatagagttttcactctcatatgaacatgaatgaccaccataaagcccttggatgttaccaatcataaattggggatttatgttattaattgggtgatttggaggagttttgggctgttacaaagactctcaaaccttcaaaaacgtgtgcaagtatatgctgaaaaaaacagtaactattttttcagtttggccaattcttctccaaagtgttccaaatcattcccacttgattttgaaccatttatacaccttataaatgaataaatcaagtctccaacaataatattttcaataactatcattcattcacattcataaacaattagtaacatcttttactaatttaagagtaaaaaagagatgagagttacatattcaagtgatcatcaatttaaaggatttacaactcctattttgtgatcattgtacacattttgtaactccacaat

SEQ ID NO: 283520 - DNA, 648 bp, Cannabis indica
caagcagattccaagagaggaaaatacaactgcagatgcgctagcccgtttggcgagcagcaatataagtgacaaggcgaacctggtcccgatccagtttcttgaagagcctagcatcacaggcacggaagaaatcgaaatgatcgatacatctccgaactggatgacgccaatagcagcctatctcaactctggggaactcccagataaccgaaatgaagctcagaaaatgagaagaaaggcagcacggtacatcatcgtagacgggatcatgtacagaagaggattctcaatgccattactcaggtgcgtcacaccaaatgaagctgcacgacttctatatgaagttcacgatggattctgcggaaatcatgcagccggacagagcttatcaaagaaaattctaaggcaaggctacttctggccgacaatgattgaagattcgaaagcctacgtaaagaagtgcgacgaatgccagagattttcaaagataccaagagctccgcccaacgagctgacacagatgcaaagtccgtggccctttgccatctggggaattgacctaatcgggcaattacctaaaggtaaaggcggagtgcagtacgcagtggtagcagtcgactactttacaaagtggactgaagccga

SEQ ID NO: 283521 - DNA, 689 bp, Cannabis indica
catggaaataccctaaataacacaaaaatgggaaaaactagggttcccaaatttgtcccaaccggtagaccgattccccaaccggaatttcggttctgggaggaaatcctggaagccaaccgaaattccggttcctacaggcctctctgaaccggaattccggtttagtgcaggaaacactaaaaattccataactcgaccaaaacaaccccaaaccaattcaaactttccagacctgttctatacaccctagagatcaatttcaaagcaacaaacacaacttcatgcacaattacaaaaatcaccattgatgagtcaagcttgagttcaaaaactcaaagcttgctcatcccacaaactagctatcaaaacctgctcaattcaccttatataaccataatataacatcagaaaacaaacccaaacacaaacaacaaccacagtagctaaatcatcatttcaccattaaaaccaaagttttgagttcaaactccaaacttacttaaaaccatctaacaaccacaaaaacctgcttaaatcttcatattaacacataattaagctttagaaatcaacaacaaacataaacaacagccacagccacaaaatcatcaagcatgcaaaaatacacatttcttaaacttcaagaaaacaaagaggagttgttcaaagattacctcaacttgaat

SEQ ID NO: 283522 - DNA, 537 bp, Cannabis indica
gactggttttcattgagaagatcccaaccccacttggctaaaagggcttggttcatttccaaagattttcgaaatccaagaccgccctgagacttgggtagacacaggtggtcccaagccctaagacagatccctctgttaccttgttcacaaccccaccaaaagtctcttaccatcccgtcaattcttgaagccagttttttgagagtttcgtcgtttgcatggtataaacaggcaatgcaaggccaacagatttgatcaacgtggcacgacctgccttagaaagtgattttaatttccacccatgcaacttcttaaccaaattatccaggatgaagttgaaatcggcatccttctgacgggatctaaacaaggggagtcccagataatttatgtttcccatcccacaattgagccccagagcctgtttaatactcctcttcatcccgatacttgtattaccagagaagaaaatggatgttttgagcttgttaatactttggcccgaccaatcacagaatttctctaagcactgcc

SEQ ID NO: 283523 - DNA, 684 bp, Cannabis indica
aataactaagtaccgacgcatatattttcacctatctatgaatggttgaagaagcggtctctacacctagccatgaatggaagcccaacatataggaagtagggatgacttagaatagtagacgttataccagactgggacagtataatttacgaaacctacttattaagaaggatgaaataatagatctttaaggagaaggtactatcttgttggatattctataagttacacactcctaagttagatggtaagaagtatgagtactgtatgcaaagacattggagataagtatgttatagaaatgagtcaggagaggacgatgccatcatatagaaaggagtgtagtgtgctgaatagaatccaaaatgagaagttagaaagagacatgataaaattactagaggtaataacttatgaaggtatcttaaacactaagagataagcagagcatcaacaaatattagattaccgaaggaaagttgtaaactttaaactcaaggtcatctacttggtggaggagataatagagaaaaatgtgtatggtttcgacagagacattttcaaaggagaaagacaaaaaaaggtccaggcacggctaacaatttgggtacaacatgaatgagagacaactaagagggtgactactcggaattgatcacaactacacaactaagagattgt

SEQ ID NO: 283524 - DNA, 642 bp, Cannabis indica
ccgggaagaagagaaaactcaacatcccgtgtactatgttagcaagcacatgataggagcggagatgcggtacctcatcatcaaaaaactggttttctgcctcctgatggcctcaagaaaattaaggccgtatttccaagggcacccgatcaaggtactgaccaaccacccactccggcaagtcctacaaaaaccagaagcatccagaaggctcctcaaatgggcaatggagttaagtcagttcgacttacactacgttccccgcatttccataaaaggggccttggccgacttcatcaccgaatgcaatgaagccgaggcgaccgcgaatgcgccaacaccatcgatccccacatggagagtgtttgtggatggagcctccaatgaaaatggatccggagcgggggtggcaatgatatccctgaccggacttcgactccaggcagccctacggttcgacttctcagcttcaaacaatgaggccgaatatgaagccttgatagcagggttgagactagcgaaggccgcaggggccaaaagagtagaagtctacagcgactcccagctggtcgtaaatcaaatatcgggagagtaccagacacgtggcgagcgaatggccgcatatgtaacaatagtccggga

SEQ ID NO: 283525 - DNA, 660 bp, Cannabis indica
tgggatgtggtaattttcaagtctcgactgattgtagcattcagtcctcgaacatacttctgttttctggtaaaatcggtaggcaccaaatcaccagcaaatttagataaccggtcaaactccagagtatattcggccacagacatcttcccttgagtcaacttcacaaagtcttcctgatgtgaagtccttacagccacattatagaacttttcctcaaaaagtttcttaaactcttcccatgtcatcacattgacatcccgagtttgattcactatgtcccaccagacgcgggcatgatcttgaaacataaaggccgcacaatttaccctctcagttcccgtcacccccatattatcgaggatacgggtaacagtgctcatccactgatcggccttaataatgtcaatgcctcccagaaaagccggaggttgtagcttcacaaaccgctcgaacacagagtcccggtgcggcataacatacccttggttacccaccaccggcacaggagctggtggtaacccttgattagctggggcagcttgttgcctcaaacgttgcaactcttcttcttgacgaagtatgacactccgcatttcatgaaacatctgctgccagtcagcaggaggattagcattaacagcctccgcattatccccc

SEQ ID NO: 283526 - DNA, 658 bp, Cannabis indica
agtgaaaatttataaataagacatagtctagttttagaattataattgattaatttaaaccaattaattgagtctgcaagcagtattatctcaactagtgtgggggtcatgggcctatataatcaagcttccaataagtagatctagagtttaccaagtaaattctctaacttattaattcctccttgcaccactatagattcgaaattgcactcttaattataatataattactgaaatgaggcctcaatcatttatctctattaagctaagctcgaaggaaattatcgtttcacttcaaaatacttatagaagctatagattccatgactatgattagcgctcccactcaactacactatcatgttcccaagatgtaagtgtttagccatccagactttaacgaacaactttaagaacttaaataatacaattgagatcaaacctaaccatctcaggattaagatctatagacctaagatcaaccagtgatattgacttcgaaagatataatggtaagtttatgataccttatctaagttcaataccggtctaattcgatgtatactttatacatctgatactggcatactttgtcaatgctctgaaaaagacatagcacttatccatggtgtaagtataccttatcggtgattat

SEQ ID NO: 283527 - DNA, 584 bp, Cannabis indica
tctacttattgaaagctcggttatataggctcatggtcccctcactagttgagataatactgcttgcagactcagttaattgattttaattaatcaattataattttaaaattaaactatgtcttatttatgaaattcactaagtaagggctcaattatgaggaaaagaagttttggagttaatttattaattaaaagactttgcatggtctaattaataaataatataaatggaaattttatttgataattaattatatttattaaaaaatattttttgcatttatagaattgaattagaaaatatagtattattgaaagaagaataactggttgaaataaagtggcaaattgtaactagagattggtccttaagtgactggccactctagtgattttttgcccaatattttattcttttttaatccacatatttcaaacctaagccctagctgaaacaatataaaaggaacacgatgctcttatctcatccaacttgccaaatctagtttctaactttgtcagacaactagtagatgagagacaccttctatacagtttttgaaccctccttcattgttctt

SEQ ID NO: 283528 - DNA, 538 bp, Cannabis indica
tcaaagtcctagttccagtctcgttcaacttcacgtattggttccaattttgggtcacaaggtacgggttcgggtccacttttgcgtttgggaatgggttcaggtctgggtgtgggttcgaggccttgcactcctacaaattacactatttacgtcggtcaacgctactgttcatagcgttgaccgacgtgaatagtacccaaattattaaattcgtctgtttaaaaatgacgctaataatgtgtaattagcgtcatttgcttaaatgacggtaaaagggcaaccgacgaaataaagccaaaaagattttgaaaactttctttcattttgcgtctattattaacagtcaattattttgtttgtgggatttaaaactggcgtaaaattaaattataaaaaatgaaacagacgcgaatttgatagattccctaaaagccaaataacacaaggccactgttcacacattcctaaccctaaaaatcttagaaagctctggcgaaaccaccttctcagccccttcaaattcgcccagttgctc

SEQ ID NO: 283529 - DNA, 1273 bp, Cannabis indica
gattcaacaaagagatgaatgagttggctagtacacttaatgatgttaacatcgaaactattgggattccaacttactattatccttccacccttatgccacgcattattagaggtaaaacaccaccccgaaaacattcttaagtataaggctcccaaattccgagccttaactcttgtctcgagaagaccaactaacccaaccttttgagaaccaatcaattgcttgactagacattgtttttgttggctattgatcccccggacattccaacttaatattctatccattgttgagagagggccctcccccccctccattcttaatctcttctaaacattgccctgctttctcctcttcctcaattcccacatttccaactgtgccaacatcattattatcccccagcgcaataaacttgtttcgaactatagtagcagtaggagcagcttcaggtctgattttccaaccatttgacaccggttggaagccctcagcatccactttattgttgccaggactcacggttgctgtcttttgttgttgcataatgtcttttcgaacccattgctgcttcttgggttctttcttcctacattctgtagttaaatgccccaaaccatcacaatgagcacaaatcaccggtttccattcataggaaatagcaactgaagtattaaacccattctcatcttcaaaagatatcatctcaggcagctcttgtttgatggcaacttcaatcaaaactcttgggaagcttagcttctctctattctttgtagcctcatccaccataattggcttcccaacttgcccaataatcttgtacaatgacttctctccccaatacttgagctctagatcatcaaggtgaacccaaataggtaccattctaatatcttcttttttcacattaatggatggttcccattctttcatcaccacaggtctacggttaaagaatatgtatcctcccctaagcacttcatctctatattcaatggagtgaaaccgaattatgtatataccataggaaagtaatccaactctctcaaccttctcagaccacatccttctcacaaaaccctcaaaaactgccaatgggggattagctcctaagacataacaaacaattgagggtttccaaaaatccacttcctcttgtatgtcatcattagtgatcttcaccttattgcacttaggaaataaacttttaacaacagatccagatctgagaacagggggattcaaattcgtaccttgtgcgatttta

SEQ ID NO: 283530 - DNA, 650 bp, Cannabis indica
gacacgaatctcctaagtgcgacgattcgaccagttaggctttgcacctctttggtttttgttggcgagttcatatccaggagggcttggttttttctagattggcttcaattcctcgggcattgacgatgaagcctagaaagggatttagtttcatgttatatttcctgaggactttgaaacattcatccaggtcgtctatgtcccccaaacctttctggatttgacgagcatgtcatccacgtacacttccatatttcgcccgatctggtctttaaacatcttgttgaccaatctttggtacgtagctccagcgttttttagaccaaacgacataatattgtagcagtagagacccatatttattcggaaacttgtatgttcttggtctggcagatgcattttgatctgattgtagcccgaataagcatccatgaagcttaaaattttgtgtccagctctcgcgtctataagctgatcgatccttggaagtggaaaacagtcattagggcatgctttgttgaggtctgtgaaatcaatacagactcgccatttcttgttcggcttgggcacgagtacgggattcgcgacccaagccaggtaaaaagcttcaattatgaagttgttgttgcgcagcttttcaacttcat

SEQ ID NO: 283531 - DNA, 541 bp, Cannabis indica
atcctaaataatttctaatgttttcaacgaactaatatttgcttcgtattgggcgagagtcaaagatataattcattgaatagagcagtcggctcaactaaaatagacatcattctagtaaccttttatttgatcgaaaagagaatctgacgttgcttcgttttattcgagagtcaaggtcattcttatttcatgagcttcataattgtttcataccttgtaagtcctactcttagcagccactattcagatgaatgttactaagaataaaatacttacaataatacttatctttcgagattctacgacgttaaattgttaatgaacgtccatctattggagatgaatctcactaaaactagaactatgtagaaccaacaatggagatcgaatatccttataataaagctcattatttaaagtgtactcttattttatatttattttaatctatttattttaatatatatttattcaattaaaattactgatttagataactctaaatataaactttaatttaatatttataaaattatac

SEQ ID NO: 283532 - DNA, 318 bp, Cannabis indica
tagacatagtctaatttgagaagggaaatttgaatttccatgcttaaattacctaataatttttcccctaaatgcaaagttagtaaaattggtgatatatgacaacttttcttaattttctaaactactccactcatttgaaaccctctatcttcctctctcttcgtctctctcagcccaatcccagcccccagccaaaacactaaactctcaaagcaaccagaaaccgaccgaggctcaaccccgtcccaccgtgctcctttgacgctcaaccccgacccacccacgccgtcgactccaactccgaccaagcagaac

SEQ ID NO: 283533 - DNA, 581 bp, Cannabis indica
aagattaggaatggaatatctttcctttcctatgattttgaaatggttattagtgcaaggcaacgaatttaaaactggtttgattctgttatgaaatagagtacaaacttacttctatctctgtccctttgttcaagcattgtatttcctgtcctgattcctgcttttgccatttttttttttgttgttaataaactataaagaaacgagaataaaactattaagaaacttcaacaaatatttcagaaactaaccatttctcaaactgttttatcctttctcttttccaaaataaattcctgcaaaaaatgtaattaaactattattaaatgattatgcaactgtaaatcaacttaaaaaccacaactctttactcaaaattacatagttgttactcattgtcacttttcatcatgtttatttgaatcagatcaatttccaactattataaaactaatttgccaccatttacataaatcgtaccttgtatatctgctagcttttggtactcgtcaagtgacacttcttcatgatttgtaaaccattttaaaacgataatgcaactgtaaggcaacgcaaaa

SEQ ID NO: 283534 - DNA, 531 bp, Cannabis indica
ttgtcaatcttcgacaaaaactcatcactgacaaacctctcctgaaggtacagcacatgacgagctcgagccgctggatcgatcacgaccttcttccctttgtcttgaacacccttagcaggcctcttggaggaatctgcggcaggagtgacaaccacatcgcttttcctcttctgggatgtaatcggagaggtcgatgctgtcccaggtttcaatttgcggttgagcataggagcagactttaggaaagtcatttctgcgattacaaaaaacaacaagggttaatataactagggataaaattccaacaccttaagtttgcgtatgcgataaaatacctgatgatggtcgcggagtttgcttagaaaggcgtttatcaattcgctcttgctgcttttcagaaggttccttatacaccggctctctccaaagactcgcgttctcaaggatcagtttatgttcgcaaagcttagcagtcgtacataataatcgccagtcgcgatcttgtacaggaaggcttccaagaatttc

SEQ ID NO: 283535 - DNA, 966 bp, Cannabis indica
ggccctgttctatccatccaccttggcctccagggcgcgtagctggtcttggattgcggtgtactgatcggtggtcagttggacaataccctcggacactgctaccagagtaaagggtggaaagtgccccgttgtggctgctggtgtagatgtttccccggcatgagggccagtagtttcagggaataggttgagaggtctcacattaccccgacctactccgccattgatgacatctacgggaggtgctctgcctcctgacagtggaacgttcatcattccgatgttgatggattcgttgttaagacctccgttttcttggtttccagccattatgattttctctctaaattagcaagaaagtacttcttcgttcccacagacggcgccaaatgttgtcgagcaaatttcacaatgccaaaaatgaataataataataagaagaagaagaacaatatgatgaacaagtgccagtattcaacctagaacggaaagtactcgaactgggaacgtaaatgcttaataaaaactcgaaatatcaagaaaataagggaatatagtggttcagtcagatcacaatctgcttagtccactgttgcaaggatttcgtaggtgttcacttcacggcggatcacccctttatatacaaagcaagtgtccaattatttacaaggattgcattcattgccaatccgttcatacattgatttacaataattaagctaaaacgtaaacattaataaatgaagaacattttctattcactaaatacagcaacgtatgcgacttctgatgtgcgagttggctgttcatattctggtgtaagctcgcgggcttaggatacacctaacatttagttaaatctaggatgtctgcgttcttgtatagttgcacttatggacatcgtataacgagctgatagaacctagaaacgcgagtctgtattggtttatcgaggctgttggg

SEQ ID NO: 283536 - DNA, 781 bp, Cannabis indica
cccaagtgccggttatgattcaaggggacccgaatatcggtccttcggccgactcaagctagaatttatgggcaatattataattgttattgatattaaacattgtacatttagttagagacatcaagaaatctgaatggactgtgcatgtatgttatttagtggtaatccatttaacaggatagacagattagaaagatgacaatatgagttaaattgttgatattccctagtgggatatagaacataagtagttaatggaggcatcgatctaattgattcaaataacaaaatcttttgtatagaagtgatctagcgttaccaaaggtaagacaatttatgagtattgtctggaacctaggtgaattgaagacaacgattgtgtagtaattttgagattatgtaggcgtgggactatctatgttagcaagaagcatcttgttttggtagctcaccatgagggaactccatggttgagtgtctttgacttggggtgatttcatttaggaaatttccccatgaagcgtgcgagttggagcaaagcatgttggaaacacttggattggtccgtgggaccaatcgtcagtccaggaaacagctagagtgatgcactcatgtataagagccatcattctgtgagcgtaagggcccaatggagacttgaagcggggatgttactagggtaatgtataaaagaacgtcaggaagaatagtggtatcactaaagtaaagaagattacctaaattacttaaggtgacacgataatgatggagagtactt

SEQ ID NO: 283537 - DNA, 1138 bp, Cannabis indica
gtggcctatacgtcattgtggcctggaaatgtgtgaggaataagtcgacgaaggtttcccacgtcgatatcgatgcctcgggtaattgggtgaaccaatcatgggcattttcctcgagtgttgccgcaataatgtggcactttgcgagctgcggtacctaatccacttccattatggtattaaatttttcaagataatctatcgggttagaagtacctttatatttgagggattcggatagacgaaacccttttggaagttgagcctgtcgcacttctgtagtgaaaggcgaggtaccatgcaacttatatataggctttcgttgctgctcgagcattttcaaagcctgcagaagcatgctttggtcaatccctccagccgcaggagccggggctgctacaactgcgggactcgcaactactgcggcgagatttgctgggacattaatcccagtggtcgcgatcggcgcggtaggcgggttattataagtattggcaccctgatcgtccgcatggggatcacggagtgtctcagtattatgtgggacgcgagagcgtgccctgaaaactgcattgaggtgatcacgcagatcacctcggtgtacctgataacgtcctccctgttgtgtctgtacagagccggaccttgtgtacctgcttggagtgcgaccatgcgatgacgaagaggctgactctgcgtcgttgtctcttgatggtcgactgcgaggattacggcgttcaggatcttcatcaacttgtgtgctttggtttggataccttgcggattgatccctcgacgttggatggttcaggtccaaaccttcagggttggttcttcgttccctgcgtacacggttagtatgacgtctagaagtcgttacctgagggttatcggtgcgaatagcaggaactcgaggagggcgtcgggctcggttttgtccatctacttcggcctgtagtgcacgcagttgatcctgaatcgcagcatattgatcagtggtgagctggatcattccctcggataccaccgccggagtgacggggggaaaatgcatggttgctggtggcgtggatgcgtccccaacttgagggtcagtcgtttctgggaataggttgagaggtctgatattgcttctccc

SEQ ID NO: 283538 - DNA, 783 bp, Cannabis indica
ctgacgacttttctaacgttagcagctactccgatgacttttaccggcaccgacaacaaacgtcagaaaagtcatcagaattggcataatcaccggaaaaattaccaagaaactggtttcttgatgaagaaaccagtttcttgacgaagaaatcagtttcttggtgatttttttggtgatttttctgacgacaatagcaactctgacgatttttttggcgttggtagcaactctgacgacttttctggcgttggtgactttttagtaccgatagtaaactctgggaaatttgtcagaattggcattgtcgaccgaaaaaattaccggaataatcactaagaaagtggtttcttttcttcatcaagaaaccaatttcttgatgaagaaaccagtttctaggtaatttttttttttttgtgattattctgatgataatgccaatttcgatgactttttttagcgtcggtagcaactccgatgactttctcggtgtcggcagcaactccagcgactatgccaattttgataacttgtttcagttaactttattgtttagcatttatatttcattatgatttttcatagtgtcgaatctggtttcataagttcgaaactggttttacaagctttaagggttctgtaatgaggttgctctatttgataatgttattgtatattttttattttaagtttctttttattattttgtttctaggtttgaaactggttttcacacttatattttgttttagtattattgttgtgcattgtgcgttgttttgt

SEQ ID NO: 283539 - DNA, 575 bp, Cannabis indica
acattgcatgtactcacatgaatattttcaacgtaaaacatgacctcatacaaacactttttacgtaaaattttactaaataaaatatcatttattaataaaatatacaaatatgtaattatttaccaaaatctagaagctagcatatttcttaatcatttatacaaattataaaagtaattaaatccatctagaaacatgtacaatttattatccatatttatgtactaattttcacttgaaattacatataaaattctaactaattaaataactaaaataacaaaacatctcaacctagtctaaaatttatttcatagactagaattatattgtaacatcatattgacagttctcaaacagtgaacacaatttttaatatttattctatttaaaacctaattaaatagttaattagtcacaaataattataataaatacctacagtaaccaataaattataaaactctttttgtttcgttccatagatagtaaatagcattacaaaaatatattttactgttttagaatcacttaactatttttcataaatattttaagtattaactaaataa

SEQ ID NO: 283540 - DNA, 729 bp, Cannabis indica
acctaatgttaaattacacgtgtttatcatacccatttattatgaatgaagtataaaattgaataaatcataccattaacgttatagtttagtttatgacatatattttccatatatattttagcaatagttttattagttttagttatatttaaaataaataattttagagaaactaaagaaaatattataactaagtataatttaaaaaataaaaaatttattaagtttaattattttaaatttttaattaatatgccaattaatattattcttttttcaaaaaaaagaaatcacccagtttaattaccatattacttgtactcctaaagaaaattctgataaactaatatttttcatacatggtctatatttacccagtaacatctatattatttaggtgtggttgatattcactcaaaaacgtaatagattacttatgcatgaaaacttaatgtgaaattacacttatatccctacctagcacatataaaatatttgtgtcaactcaacaggttagtataaccggctatattaggttaatattgtcctttatctattatttattggcttaaaataatagttgtcagaaaaagaaaaaaattaaaggaacacatgtcacttgtactatgtttgttgatataatatatatatattatttttgtgagtcactagtcacgcatttcatacaatgcgtgattacatccaaagcctatatatatatatata

SEQ ID NO: 283541 - DNA, 582 bp, Cannabis indica
ttgtcgctgtctgtcggcgtgaagggattgagaagaagatgagtaggtaaatgtattatgtttatgtaggttaatgtaaaataatattattttatttttagataaagtgttatttttattattatttgtattgggctatttttaaaatgggcttgattagaataagagtagacccatgaattatgattgaaatattgagtgagggcttttgtgaattgggctttaataagttgagtaaagtgaattaatatatgtatatatcaatatgtgaaaagtttaatgtatatatttgagtgagggctttagcctacacataggctaaagtccctccgtccctgagtgtaccccctcttttggcgtttctcctccgtccgggtgttgcctttggaggatcgtttactcctcgaaccctgggaaggacctgccaaactagcgattggagcggagtgcgagggagctggtccatttatccctgagggatttccaaaatgggatgatgcgggggccaagacctggccctgactgtcacgggagtagcagagaactgtatgccgctcattggtggagccgcggtcgggacag

SEQ ID NO: 283542 - DNA, 641 bp, Cannabis indica
cgataataatcgtttcataatacttccctcgatcataatcgagtcaaacgataataatcgtttcataatacttccctcgatcataatcgagtcaaacgataataatcgtttcataatacttccctcgatcataatcgagtcacaaccaatacataacattaaccttgattaagataagatcgtaacaacatataccgaaatttcaaccttaatcgatattgtaataatcgtaatattaaccttatacagtatttcatacttttcttacctcagtccagaaatttagcgtacatgctgacctaggtggaatcaaagcttgacgatctcgggtcctatgcacgacaacaacattcaataaataacttaaattaatcattccgggaataaccctaattcccataatcggtaaaccctatcttctattagctccaaaataagttttacaactcttaaacaatctatcccgaatacggaaatcaccccgagtcctaaaaccggccctgaaacaaaaattgaaaaagtccccctgctgcctaaaccggtcgaccggttctgctacaccagaaccaaccggtcgaccggttctggctgggttacaatcttgagttttctcccccaaactcgaaccaaaactcaaccac

SEQ ID NO: 283543 - DNA, 359 bp, Cannabis indica
ctgactacctcttttgatggcaatctttgtgggaatggagcttttggaatgaacggtaaggtttgactcgattcttcaaccgagtctttggaatgtgaactttcaggctgactcttttcattttctttcaatgagtctttgtttatttcagcatcagtttgaggtatgtaatcaggtttttcaataatttttccagacctaaggatagaaattgatttagcttcttcagtaggtctagatgtacttacctcgtactgactctttggatttggaatgggttgactgggaagttttcccttttccctttcagctacagcagtagcaagctgacccatttgtgtttcaagctttaacaggga

SEQ ID NO: 283544 - DNA, 604 bp, Cannabis indica
gacggtttattagacattgggaatgtcaggattggccgggaatttagaatttcccaaaataccctttagtgccctttatgttattttagtgtggaggggcaaaatggtcattttgccccattgatgatttgtccttttatggacttagtaattggaaattaaatgtttattatgttaattgttggctgaatatagagttggtatattgcatttatcctttattttcaaaattagaaaattagaaaagttaaaagaaaaaccaattttctctcaaagctctctctttctcttttgttcggcctccttgagcagcaaggatcattggattttttcttgtgaattcatctctttttggtgttctaatcaagctaggttagctcctaatcctttcctctttaagtctgttgaaaattatgaaaagatgagtgttgcatgtatggtttttgatgttattgctgctgttaattgttgttgttgttgtttctatgattaaaatgcttgaattgaatggattagataggttgtaatgcatgcttgttacccttgtttaagtttgtaaatttttggtacaaaaagctatagttttcaaagtaaattgttgatt

SEQ ID NO: 283545 - DNA, 701 bp, Cannabis indica
ggttcctccttcgatcttgttagaaaatttagaaaaggtgctaaccaggtgtgagaagtctaatttggtgttaaactgggagaagtgccactttatggtgacagaaggaattgttcttgggcacaaaatttcgaaagcaggaattgaggtggataaggctaaagtttcaacaatagaaaatttaccacctccagtttctgtaaaaggagtgaggagttttctaggacatgctggtttctatcgacgattcattaaggacttctcaaagatctctaagccattgtccaacttacttgttaatggtgtacccttcgaatttggagatgactgtttaaaagcgttcaaagttcttaaagagaaactgatttcagcaccgatagttacttcaccgaattgggagttaccttttgaattgatgtgcgatgcaagtgactatgcaattggagcggtcttgggtcaaagggttgacagggtgtttcacacaatctactatgctagtagaaccctgaatgatgctcaactaaattatgccacaacagagaaagagatgctggcaatagtgtttgcttgtgataagttccgaccctacctgattgggaataaggttattgtctacacagatcattcagcgatcaagtaccttatgaccaagaaggatgcaaaaccgagactgattctatgggtactttacttcaagaatt

SEQ ID NO: 283546 - DNA, 591 bp, Cannabis indica
ggctcttcgagctgaaggagcagttaaatttttgcaagaaacccgagagtcttctggtgttggtgggatcactattctccctatgtctggtcctgaaaaagagagtgggggttctacctttgaacagaagaaaagaacttttccatcttcgggaagttcagggcaaggaaaaaggtttcgaggaaaccagaacagaggaggacgtcagacttattcttatcctgagtgcccgcgttgcaagaagcatcatcccgggacttgtaaccggagagcctgctttcagtgtggttcagtgggacatctcaggaaggactgtcctcagttgaagaaagaggaaccgaagcccgaggtcaaacctgtgcctgcacctgctcgtgtctttgctataactcaggctgatgctgctgccagtccttcagtagttacaggtcagcttctaatcaatggttttgcttatactgttttatttgattcgggtgctactcggtcttatgtgtcatcaagacttcttgatcagtttgatagacctagtgatattctcgagacggggtttggaaccctgttgcctaatggagaattaattatttcaag

SEQ ID NO: 283547 - DNA, 617 bp, Cannabis indica
aaaataacaaaatcaaccatattaattcattattaatgtccgtatttccaaaatattataattttctttattgtacttatcccaaaaaataatttttatacatatttatttatggtaaaactttattataatcaaatcaatctatattgaattgaaattacttaaaataatccaattctgttattatgacataattattcctattttaatttccaaaagataagttgtaaaaattgtatcaccataaaacatttataatgataccttcttatacgacatagattacaaaccaaattccataaaatttgacttcccaaatatatctgaacacaataaattcgcatttgacaattagtattcccacctccttttattacaatatcttcgtatttattattcttcaaattacttgattaattttaaataataatattagaatctgaatactaaattacaccactttccctttttgctaataattcctaaaaatatgaaccaatcatagctaaaaactattatcgtttaaacttaatcctaaccttatttcacttgaaaatatttttaaaatatcactttaaatttctttacatcatcccttaacttaaaatttgtctagt

SEQ ID NO: 283548 - DNA, 561 bp, Cannabis indica
gtttattattagtacatgtaattaattctaaataaatacataataaagtaccaatgtaattaaatttatgtaattctacacactaattaattaatcatgaactcatttgattatgatgtacgtaaaatgaggtcataaactcaaattttccattaacaaaaatagttttatttataaaaaatatattttcttgtatcaacaatatatatattttttatatggtataattaatattcaaatttaaaatgggtgttataaaaaaaaaaaaaatcaatatacggtataataattgtaaatatctgttatcataaaaaaaaaaatagtaaatatcaattttttaaaaagtataactgtaaatatcaatttctctaacaataaaaatatcagaaaaaaagggaaataatcagaaaaacgtaggaatcaaaatgaaaatataaatattaattattttcattttctttaataataataataataataataattttatttttaaaaaaggaaaaatagaaatttaaattacaaataaacgaaataattttaaaaaggaaatagattttt

SEQ ID NO: 283549 - DNA, 767 bp, Cannabis indica
aggatcttctctcccagtgtacatcttccacgttggcattttgaacttgtgaggcagtggcaggagattgatctctggtgagaaaggagttctgcgagcacggtccaactcaagatcattgttatgctgtccggccatgccatgaaacatattcttcaactcgtcaagctgtgcctgtacggctacgctgacttgttcggcattttgttcagtttggattacgtcagcgtctttctgagcggggatttgagtatgggctccaggctgcaagatcgttgcaatattctgctcgtctgttccccttcttctgtttagatcgtcccttaggtcatgggtcgttccaagcctatcgaacacagaagagcctggttgtcttagcggttgattcgcttggttgacaggcggaataactccattattctgattggatccgtcaggtatggctcctcctggtgaattcccgaacaaggtctgcctgcctacctcttggcccacgagtggaactggtgaccgaggattggacggctgaccattggttgtctgagaggtattcatcgtcgggtcatcctccgtttctcccaagggaatgacgttcggcgtttgctgacctacattttggtaggctcttcgtatcaacacgggagcttgccgactacgatcttcaatctctgcatggtgagcccttaatgcctccatctctttgtctctccattcagcgaacatacgcctctgttcgttaaacgcgagattcactgcagcacgcagtt

SEQ ID NO: 283550 - DNA, 239 bp, Cannabis indica
attattataatatcgaataaaatgattatacaaaatacatatttttttatttaaataatgagcttttaatcaagagacattcgatctccattgttggttttacatcgcgtatgttttagtgagtaatcctccctaatggaggaacgttcattagaaatttcgcaccgtttaactagtatttctataacatatgtcattacttgttattttctaaactgtgtatgaatttatgaacgaaa

SEQ ID NO: 283551 - DNA, 596 bp, Cannabis indica
acaatcttcatctgcttgtcctcacggttcatcaactttagcattgcccttacctacacataaacatagcactatgagtcgacagactcagtaagaaaagcataaatcaaatagcatacatatatcccggattatgatcagacgcccatacccctgaccatatccctaatccctgtgtcccacacggtactgagtctagaacgtttgtacgacagtactattgaccataatatcagcctatactcggtacgctagtcatactctagtcgtaccgatatgatactgtatcagcctatactcagtacgctagtcatactctagccgtactaatttgatactgtcaaatagtacggtactatcgaccataatatcagcctatacttagtacgctagtcatactctagtcgtattgatgtgatactgtcggatactacgaaagccaacatacatatctaatgtaatctaacaggcctactaacatgcacgctaaacatgtaaatacatatgcatactgttatattaaacttacctcgattcagaaatcaggtgtgacggtcaacctgagtggaacaatctgctcggcgaattataggctc

SEQ ID NO: 283552 - DNA, 528 bp, Cannabis indica
ccgaaatctacctgaacaactcaggatgttgagccctcaaatcagtctccaactcccaagtggcttcttccactttactattcctccagagtaccttaaccaatgatatggttttagttcgaagaaccttttccttcctatccagaatttgcactggttgttcatcataagataggtcaggttgcaactccaacatttcataactcaaaacgtgcattggatcagatacatactttctcagcatggaaacatgaaatacattatgcacagctgacaatgatggaggtaaagccaaccgataagcaacttgtccaactttttccagaatttcaaaaggtccaataaacctagggctcaacttgcctttctttccaaagcgtctgattcctttcattggggatactcgcaagaaaacatggtccccaggttggaatgtaacatcccgtcgcttgggatttgcataactcttctgcctgctttgagaagcaagcattcgagccttaatcttatctattgcctcatttgttt

SEQ ID NO: 283553 - DNA, 235 bp, Cannabis indica
ttgcagtaatataaaaaaaaaaagtgcattttaaataatctgaacaccttgatatattgataatgtgaatcctctctatatgtctaatctcttgggactggattctttactttttggtaactacttttgtgttagtcatgaagtaacacttgtattcagtctctctctggtagaccaagagacttcagataggtttttacacttctccaaaatcactactccacccccagagtaa

SEQ ID NO: 283554 - DNA, 574 bp, Cannabis indica
tagaccatttgagtttaccgctgaatgtaatgaagcattttcgaagttgaagacagctcttgttacggcccccgtgattgtagcacccgattggtcattgccctttgaactcatgtgtgatgcaagtgattttgccattggggctgttcttggacagcggaagaataagacctttcactccatttattacgcaagcaaaactcttgttgatgcccagattaactacaccactactgaaaaagagttgctagcggtggtttttgcctttgagaaattcagatcttatcttgtgggaaccaaggttgttgtgtatactgaccactcggcaatcaagtatttgatagccaagaaagattctaaaccgaggctcattcgttgggttttgttgctacaagagtttgatttggaaattcgagacagaaaagggacagaaaacaaagtggcggatcatctctctaggttggaaactaacaatcacagcagccacttagaaggagaaatacaaattcaagactcattcccagatgagcaactgctagtggtagagcaaacacgggtaccatggtatgcagac

SEQ ID NO: 283555 - DNA, 460 bp, Cannabis indica
aatagctataaataatttccataattaatcataaataactgctgattttaaattaaactaagcgggctttacactagcagcccaagcaaaaacgaaagagagagggagagcttgagagaaagaacttccttatttttccaaattttctaatctttgaataaatgataaaataagcatattacacacttatttcagctaacaagacttaaaacaaattcaataatcacataatactaagtccactaaaggacaaagccttagggggcaaaatgaccattttgcccctcccacactaaaagggttaaaaagcacttaagggtattttgggaaattctaaattcccgtccaatcctgacattcccaatgtctaaataaaccgtcccactatactaaaatactaacatgtgattctactaagccatacaccgcgttccatgttgtcgggcaccgaaaatgcaaa

SEQ ID NO: 283556 - DNA, 421 bp, Cannabis indica
aaaattccgatttcccatgtaacaaacagactccggattagatggacacttctcaaacacatgcccttctccacaaaacacacatgagacatcatcactttgaatggcagcagctggctgaatatttttagagttcccaatgctcaaattcttcaaaacattcgtcatggaagccatttgagctgtcaaagccgttattgcatctacctcaaggacccccgccacttttctactacttggagctcttgtgttggaccattggtagttgttacttgcaatggtctccaaaatctcaaatgcttcgttgtaagacttcgacaaaatagcaccattggccgatgcatctaacaccattcgagaagctgcattcaaaccattacaaaaagtctccatatgaatacaacgtggaatgccatgatgt

SEQ ID NO: 283557 - DNA, 673 bp, Cannabis indica
cacttctccaaatgcaagtaaactctgttgtagattatcatatcagtaaaaccctatgtctgataaatctaggaaactttattcacataatcatgtttactttccaatgtgttgacggcacaataaacaggatcaagtatgtgaaaagggtttcagatgaatttatacattatgtacatataatcatgaaataaatcatgtgaaccatgcaacattaaatgttatttctgatctatattaataagtaaatctgattatattgaaaagagttttatttagggcataaaacccaacataaagtccttaagaaaaaaaactaataaggaaaaagtaaactacgaaatacttaccacagtcaggcagtggctgagatctggacttgaaagatggagttcaaggatgcacaagcagcgaaccgcttgggcgcacaccgggtgagctgagacacaaactcgccggtcatctccgcggcaaagggagccaaggtaggcccgaggaaacgattgaaccaatctgacagggggtccaaatttagatcccacggattttgatagtctgatcgttaagggtatttgcatttcaactcgcaaaaccctcctcaaagcctcacatcagcatgcccacgggagtactcgtccatggtgtagttgtgtttggctatccggagctcctg

SEQ ID NO: 283558 - DNA, 421 bp, Cannabis indica
agaaaaaacgatggcgatactccttaacatgagtttgcctattatacgggaccaccccttcattggcagggtgggcccaaaacccgtaaaaactgtctttaagtttgtcccccttcttggggacagaaacaagttcgtaaaaatacaatatcttcgccgggctgggagagccccatccctgggcggagtaaaaaataaataagcctgaaaccaggcggtatgcctggggaataagttggtatggcgcaaggccgacaaaaactaagaaattaacaaaatagtcttggagaggaagcatggccctggccatcaaatgcgtctggctccaggccccaaagccgccgtagttgtgattaggcatctccgcatcacgaggtggctggtggtaggtcccggatgtggaaggcttgattccagctac

SEQ ID NO: 283559 - DNA, 663 bp, Cannabis indica
ataggaccctggattgattttttgtacaaaataaaacttaataataatttgatctaaagatgttataacaaatctagttacattttctgtatctattcgtgttagaaattatcttaaagttagttatattaaaaaataaaattgttaaaaattgagtttaggatcctatttttaccattttggaaaatatagagtctattttgtcatttaacaaaacagatggtctaattgataacttttacaaagtagaggatccaaaatagtatttatcctataatttatagttaataagaaaatattttttaaaattttaaattaaatatgtggcgctgacaataacacatcaactacattgacatgttttagcgaaaaaaatttcaaggggtacgatacgatcattgtaatagttcaaggttataaaatttttaaatagcctaattttgttattattttctaaaaaaaataagtaaaaatacaattcgcttgaccttcctatttggcccctcctcgggtctttgtctggttccgccactggttaaagttgcaggaaagatacttatttagtctaaggaaagttctatacatttgtggcactgttccaacttgccttaactactagggttacttcctgaataaccatgaagtagttgcccaaaagtatag

SEQ ID NO: 283560 - DNA, 972 bp, Cannabis indica
atattttcatttttactttttgaactttttttatttataaaaatatctcttcagaaaaaacaataaattgtttttttttattattttataatttatttatagttgttatcaagttgtttatcgttattttatagtttattataaatgatttataatttttttataaatttaataggaattaaaaaaaatatgtgataataagttttccatcatactttatttttttaaaaaaataataataaaagtattttttagttaaaatatacataataaaattatttaaataaataaatatatttaaaacaaagaaacaaaaattaaacacatcctaagcagacaaaatagcaaaaagagagatttaaaaacttttatactccttttagcatacatggtctataaaaataaataataaaaaagaaattgtaagcctatcaaaaaaaaaaaaaatgatacatttataaaaaaaaacagtactcatataaattcccctacattatttgctagaatatcatcatcttcttgcaaaccatagactaactaaaagaggagataaagaaaaaaaatataaattaaatattaatacttttctaaaattccatgtaaaaataaaatattttttcaaaagacaaaaataaaaattgagttgagaaaaattcaaacttagaaccctaaggtgaaattacaccaggctagtatataaccacttatctcatatttgttttcattgactagtacatttgtataaaaaaattatgttatatttgtccattaagagctcgtttggaatgccgtattaggtcgtattgtcttgtattgtattatattgaattggattatatatcatatttttatataatactatgttaagctttaatttatactaaaatattatatatttaagtgtccatcaaatttaataccacatatagttacgacctaatacggcattccaaacgagccctaaaagaccaa

SEQ ID NO: 283561 - DNA, 71 bp, Cannabis indica
tatttctgaccatgtgactccatatctggactacatatatcagtatgtatgatttctaatatttcagaacc

SEQ ID NO: 283562 - DNA, 626 bp, Cannabis indica
gcagccaaagtgacgtactcgtgtataagagccattcatttcgtgggtgtaacggcccaatagaggcttgaagcagggacgttacactggctgccttagtgattggttcgcttggttggcaggtggaatggctccattattttgcgtggatccatcgagcatgactcctcctgatgaattcctggacaaggtttgtccgcctacctcttggcccacgagtggaactcgtgaccggggatgggacaactgaccgttgtttgtctaggaatcattcaccgttgggtcatcctcggtttttccaaggggaatgatgctcggcgcctgctggcctacagtctgataggctcttcgtatcagcacagtagcttgccgactaagatctttgatttctgcatggtgagcccttaatgcctccatctctttgtgtctccactcggcgaacatacgcctctgttcgttaaacccgaggtttactacggcacgtaattcctcctgatcgtgatgcagggtattgttgtggccctgcatgagtccaagcacagcacgaagatttttcaattcggttgcatctccgatggtcatctgggcgctcatgcctggtggaacagtctgttgggttttatgcc

SEQ ID NO: 283563 - DNA, 751 bp, Cannabis indica
cctagtctcggttcgggtttaggtctctatctgggttttgatctgggatcgggtttgggtttaggtcctggtcctggtcctagtcctagttcggttctagttccatttgcaattcttagttcgcgtttgggtttgagttcggatcggagttcgagtcctggtctgagttttggttcgggtctggatttcagtctaggtccagatcaggctccgggtgtgggttcgcgtcctgggtcttggtctaggtcgggtccgagtcccaagttccaatccagatctgagtctggattcagttctgggtctaagtctttggttctgatcctaatctgggtttgagtttgcgtccgggtccgggtctagctttgggtctgattcaaggtgtgggtttgagttcgggtccgagtctgtgtccaggtttgtgtccaggtctggaccccgatctgggtctaggttcgggtccacgtccaagtttgggtcctgagtgcgggttcaagtttgggtctgggtcaggatctcggtccagatgtaggtccagcatttcgatcccagtctgggtcttggtccgagtcaaggtatgtatctggatccctatctaggtcgaagtctttgtttggtatcgggtcccagatttaggtgcaggtccgggtctcaatttcagtctgggtacatgatcgtgtccgggcccaagttccagtcccagtttgggtctgagggtaggtctgtgttcggttctacgtctgggtccgggtcc

SEQ ID NO: 283564 - DNA, 806 bp, Cannabis indica
ttttattttattatttaatgatggtacacgttttttttattaattcaaattatataattataatatggggacaatgaattagggctgagagattataattataattttttgaggctatatggggacgcacattgtgtgtatgtaaaagtgtatacccacacgctatgcgcgtcactaaagccacatgttcacgtggctttagtgacgcacataacgtgttggtaaagggttttgctcacacgcgtggcacgtctctataggccatgttttctttttatttttataaaattataaattttaggttttagtatttagtgacactccatagttttagtgacccacattttgggtgataaacactaaatatttagagtcatttagtgtgtgtcactaaaaaccactcttaactttttagtgacccacacttttatgcgtgtcactaaaagcttaatttgcagtagtgtatgttctggatttaacagacacatcaaaccataaacatgaaaaattcatgtaaacataaatgacttctaatcttctattgataacaaatcagattgtattgaaataggttttatttagggcataaaatcataacaaactaccacttgcactaacataaaataagtagtgcattttaataaatcaattgtcttgatatccagatcaagtgtagtgtattttactaaacccaaattactagaactgtaagtctgtggtaagctactgctttctccaccattacttcctttgtgttcataaaacattatgcaatatcattttctaaatgcattactcatctaggg

SEQ ID NO: 283565 - DNA, 796 bp, Cannabis indica
actgcttgttgggagaagcttgccgtgtgtgatgggggtcgggtttgggagtcatttcgtgactggttgcaacacttattaaacactgctgatgctgagaaagttgcacaagccggcacgttatgttgggcgatatggaaggctcggaacgaattagtttgggatcagaaaagccggagtgttaatgatgttgtacagtttgcgttaaggtctattgatcaatggaagaaagctcagttgagtgaaaactatccttcgttgaacccgatgtttctcaacaaaggtgatgagctatggactaaacccgtttctaatgggatcaaacttaacgtggacgctgcaatttttgacagcgacaaccggtttggctttggcttcgtggtgagggactgtaatggtcagcttttggtggctacggggtcttctcggccaggaagaactactccagctgatgccgaagctatgggaattgggaggcgttgagttggttgaaggataagtcataccaacatgtttgtgtggagagtgatagcttagttactgtacaagctatccatagcccgattgagatgttttcgggatttggtttaattgtgaaagattgtaagtctttgttagactctatgaataatgtttcgttacggtttgttaaacgttctgctaatcgagctgcacatgttatggcacgtcagtctcggttgttgctgatcgtatgttcacgagggataatgtcccttcggaacttgaagttgtacttttgagcgattgctcttgagttaatgaagttgattactta

SEQ ID NO: 283566 - DNA, 550 bp, Cannabis indica
aatggtcattttgccccattgttagtttgtcctttagtggacttagtaagtggaattaaatgttatttggttattatgttggctgaaataaaggttgggtttgcatgttttccctttttattcaaagtttcaaaaaattagaaagttagaattcaaaggaaaagcattttttttctctcaactctctctctctattttcggcccttgagcagcaaatatctttcaaattgttcttgtgaattcatttcctttttggtgttttattcaagctaggttacttcctaatctttctctctttaagtttgttgaaaatgatgaaatatgagtaatgcatgtatgacttttgatgttgttgctgctgttaattgttgttgttgtttcttggattaaaatgctgaactaaatgtgattagataagttgaaatgcatgatagttatccttactctagtttgtcaatttttagttcaaaagctattgtttttcaaatgaatttgtgagttttgttgctgtgtttattgaggacgattttcctgtgttttcagaggtttt

SEQ ID NO: 283567 - DNA, 893 bp, Cannabis indica
tagctgtttattttctaaggggagacgattattatggcccgtccccaggccctttgtattatattattattattttgacctgccctttgggtcaggatattttgtatatatgataactttgatgcatattctttttgcctttgtttttacttttggcctgttttacatctgtccgtgtggtatgccttagtacccccctgagtggcatgaaaactttgtttttaaggcactcagttttatttaaaatttagaggttgcatacattttgacggtacaaattctttaaacaaagcctaagttaacatatttggactattggtaatacttccggagatgatcggcgttccaggcccttggcacaatggttccatccatcctttttagcttataggttccggagccgatctcatcctcgattcatatggcccttcccaatttggcccaagtacccccactccgggttcttgagtggctgggaagactcttcttaagaccatatctccaatagtgaattttctgtttttaactttggagttaaaatatttagtcaccttcttttgataagctgccattcgtatttgagactcgtcccggagctcttcaacttgatccagcgcttcctgtaacaaagcttggtttatagctggatcataggttgttctcctatgggacgggaataacgtttccaccgggaccattgcttcgcaaccgtacgccattgaaaaaggcgagtggccggtcgtagttcttggggtcgtccggtaggcccataacactcttggcaattcttcaggccagttgtttttgcaggccaccagctttttctttagggtgacctttaggattttgttgactgcttctgcttgtccttttgtttgcggccttgccaccgc

SEQ ID NO: 283568 - DNA, 644 bp, Cannabis indica
aaaaatactgggaaatagtgaagagtgatgttgtgagccaagtttgtcagttctttgtgactggtagtattcctgatggtctgaatgacacgaatattgttttgatttcgaagaagaagcagcctacttcaatgggggatcttcggcccatatccttgtgcaatgtcttgtataaggtagtatctaaggtgctcgcgaatcatttgaaggaagtgctgcctcagatcatatcctcaaatcaatctgcgttcatcccggggcgccttattactgataatattatgatagcatttgaggttatgaactatctcaaaagaaagcgtaaaggcaaagaaggctatatggcgctcaaattggatcttagtaaagcttatgattgtgtggagtggggctttcttcgagctatgatgagcaaaatgggctttgacttgcggttcattgatcttgttattgctacggttagctttgtgaggtataaaataattcatggtggtcatgagctgggtccgattgttcctgataggggtattagacaaggtgatcctctatcaccttatttatttcttatttgtgctgagagcttctcatctttgataaagaaattcgagcaggatggtcggcttaaagggtgcaaggttgctact

SEQ ID NO: 283569 - DNA, 793 bp, Cannabis indica
gtcacgttctggttcaagtttcgattttgagtcccaggtcttggtttgggtccaggccctggtctagcttcgggtccttgtccgagtcccaaataaagacatctactatgggtcttgtccaagcctcggttcttggattttgggacaagatctggatcccaactacgggtccgagtgtggtttcgattcatgtcctaggtcccggtttgagtttcggtctagatataggaccaagactagggtccagtcgtgggtcacaatcccagttctaggtcccgagtcatgttcaatgtttgggtctgagttcaggtctgggtttgggtcccaagtcccgatttgggtttggattcatgttttgaacccaatcctagggtgggtctgtgtccgagttcgggtcctggtgcgattacagttttgggtctgggtccaggtcttagtcctggtcctgttcttgggtccccatccgattatagttttggttccagtttcaagtcacggggtacgggttccggttgagttttggtccgagtctgggtttgggtcctgatttgggtctggggcgtggttgaggttcgggtttcggtctcagttaggatccgaaggtgggtccagttccgagttcgggtctaggtcctggtcccggtcccgttccaagatcccggtccagttccagttcaagattttgttttggttcccgagtgtgggtctgggtcatggtatgtgtccgggacctggatccgggacccggactttagaaactagcaccgagacccaggacctgaccccggaccca

SEQ ID NO: 283570 - DNA, 721 bp, Cannabis indica
ctttgaaaaactcattagcatttgaggtgtttggcaaaccatcaaaagatgttcaggaattaaacgtttcatagcaatgagactaagatgatttgaatttttccaatgtgcatgaagaatttttgggcaacaattctgatattagaataagatcagcagatttttcttctcgaaggcataagtccaaatctattatgcctaaagtaattttcacatctcgtttccatgtcttaaagttggaagcattcagaattcagatgaaaacgttattgttgttcgcagaaaggagaccgaaaaatccaaaaattaaaacttgaataagcaatatgagcaatgcattagaaaatattgtagagtcaactggtcattataaactcccctttggggtgagaatataacacacacatgatctaccttcatgaagttaacaacaaagaaaaaatacatatcatttaagaattttattacctttgggcaaataaatttcttaaaaatatgtattaattcaagcaaaaaataataataaatttatatatttaaattattacctttgggcaaataattaaaatatatacatttaatattaactcacttcatggaatgtgaactaatatatgtaaatactacctttgggcaagtaattacacatatagtcaaccaaaagatataatattttcttcaacatgtgaaatttggtgataaaacaatcattgaaaaattt

SEQ ID NO: 283571 - DNA, 582 bp, Cannabis indica
tcttttggactcactaatgccccggcggcattcatggatttgatgaaccgggtgtttaaggattacctggataggtttgtgattgtgtttatcgatgacattttggtgtactctgagacagaagaagagcatgagttgcatctcagagcggttttgcaaagattacgggatcacaagctttatgctaagttcaaaaagtgtgaattctggttatctcgtgtctcatttttggggcacatagtggataaagatgggatcatggtggatccggctaaaattgaagctgtacgggattggccagtaccgaagtcagctacagaggtcagaagttttctgggtttggctggttattatcgtcggttcgttgaggtttttcaaagattgctgtacccttaacggagctgacccgaaagaaccagaagtttgtttggactgatcggtgtgagaaaagtttcctggagttaaagcaacgcttgattaccgctcctgtactaactcttccttcagataaggaaaagtttgtggtatattgtgatgcctcgagacagggtctcggctgtgtgcttatgcaggctgggaggg

SEQ ID NO: 283572 - DNA, 953 bp, Cannabis indica
aaaagaaaaacaaaaaacaaatactatgtattctctcttccttcactgcctagaccttcattgcctttaatcaatattttatataatttttgtaatttcttttaagtcaaaataaatgcaactccatgtacgatgacataattaacatctaggaggggctttgaaaagagccaagagagatactccagtctttgaaacatgaatcgaaaagagttatctacacaatgctattgctaagagttccatctcaataaaatacactttttatcgaggtcattttttactcatcaaaataattatttggactcttttcttttttctttgagataaaataataattatttggactttgagaaagatatttgctttgtttcattgtcattccacatgtaaactgggaatgatgctcaacaatagtataccaaataatatacaagagcacacaaatatatcaaacatctactttaccacagttatatacaagataattacttttcaaaatttcgcctgcacacaaaaagctacaaaagtcatattatatatgcagttttcaaattgaataggaaagaccaaacataataaattaaaatataccacaataaatctagactaattattttactaaaaaatatgatcttggtaaggtagtaatattcttgtcgtttttaacgagttgatacggtggctccagcttgggcctagctatagtgccacgtgtcataaccatggcgggaaagagaacatctttagttttggatgcgatggaccctaggggtgttcattggatcacattcaatggatttgaacccatccgatccaatccaattatttattgaatattggattttgccatccaatccaatctaattgaattgagtcacccgatccgatccgatccaatggatgtattggattggatcggttccatctattggatactttaactggttttt

SEQ ID NO: 283573 - DNA, 346 bp, Cannabis indica
aatcatcaaataacacacaaatcgacatgaaaccatccaaatcacacacaaatcgttttaagtccaaatttcttgaatacaaatcaattaccatggctctgaggccagttgttagaattattttacaaaaatcttagatttactaacaagtatgttatttaacatcctaaatatgaacttctaaaacgatatgaaataaacacttataaagtataagaaaccttacagtggttgcagcaaaatataatgtctccttccactcagatctctaacccttgtatcctttctgtcgcagagtatcaccaagatctgagcccgaatgtccttctcttgaatctggattctt

SEQ ID NO: 283574 - DNA, 723 bp, Cannabis indica
tatttttttaagaattttcgtgtttggaattttagtattcacattataatattataattaattaaataaattgaagaataagaatcttgaggatcttgtaataaagggaggtgggaacactaatggtctaatgagaatatattgcttcagatatatttgggacgtcaaattaatatagaattttggtttgttctcaatattatgggaatgtaccaaaattattacattctttgtatttttaaataatttctcgatgagtggtattagcttttttgatggaagaaatggaagtacaaatttgatggatgagatgtgccattgtttatggttttggtgcttttcaaggtttttgcgcctgatttatggctggccgctaattatttaaggtaatttggttaaaattacaagatatcattaattataaaaatattataaaatttaataactaacaattatggtatgtaattatgaaattattgcctaattagtttattatggataacataatattaattttgggtatataaattataaatatgagtttattatagataacataattttataaataacataatattaattttggtatataaattataaatgtgggattttgtaattaattggaggtagagacatttattataaattgagaatattttgttttattttatttttgggaagatattgaaataaataggaattaaatgctaatgaagtatt

SEQ ID NO: 283575 - DNA, 756 bp, Cannabis indica
ttcaagttccaaatcaaaatgagcaaccatagccatgatgattcgcaaagaatctttggtagagacaggtgagaatgtttctttgaaatcaataccttctctctggctatatcctttagcaacaagtctagccttatactttactggctgcccacttgaatcatatttgatcttgtaaacccatttgcacccaatgggtctgcaacctttcggtaggacaactaaattccatactttgtttcgcgacatggaacttgactcatctgtcattgcattcaaccataacttagattgaggactcctcatggcttcttgataagtaactggttcagaagcgtctcccacatcataatcatgttcttgcaaatagacaaggtagtcatcatgaatagcaggtttgcgagctctctctgatcttctcaatacaacttcaccaccctcaatatcaggattttcatcttgcatatgattctgaggttcatcatgagcttctgttggaatttgttcaatcacaggatcaatagtaggagcggaagcggaagcaacaggtacagggacataaatacgttcttccctgaacacaatttctcttgacccttgacttgaaccaaattcatcttcaaaatagacagctctatctgattctatcaccctggtggtgtgagaaggacaatagaatctagaacccctcgaaccaatagtgtagcctacaaaatagccactaatagtcttcggatcaagcttcttagattgtgg

SEQ ID NO: 283576 - DNA, 704 bp, Cannabis indica
aaatataaaattatatgaaattttattagaaaaaatataaaaaataagtttttaaattaatacaaaataatttgagaaaaaaattcttagaaaaaatattaaaagtgatttttataaatattttaagcttaattttttaaatatgaatatgtatttattattttatgtggtgcaaatagaactcttgtaaattaaattttaggaaaattttatttatactccaaaattttctaaagacacctcattttaataattaattttatataaaatttatatctttaattatattaagtttttttaatttttttcttccaattcatattcttgaaaaaatataactatcaaacaaaattaaattatatattaaatattataacaaaattatatgaaatttttttataaaaaaaattatatgaaatttttttataaaagaaaatatatatacatgagtttgaaaaaattataaaaataaaattaaaataagtattgaaattaacataaaatattgtgataaaaaaaatttaaaaaatatattaaaattaattttaaaattatttaagtttatatttttttttttaataattgaatgtctttataatttcatagagtgcaaataaaattctctttgtaaaatatatgtgaagaaaaaaaagggtaataccattttggaccctgtgttttgcaaaagttacagattggactct

SEQ ID NO: 283577 - DNA, 982 bp, Cannabis indica
agctcccatcgtcaacttcaatcttgacggagatggaagtagattctccaatcttgatgcagtctccgtcgctgagatcgacaggaacgtcggggtcgatcaattcgtcgttgagaaaagagccgttggaggagccgaggtcttgaagtagccattttccaaattctgattggatggagaggtgcttggtggagatgcctgagtctttgatggtgaggttgttaccccgaacaacacgaccgactcgaatggttaatccgggacggtattctaaggtttctccggctcgaggacctttggttatttcaagtttgagagccataaagaagaagaagaagaagaaaaactaaaatcagagggaaaccgtttccaacctccaattcgaatcggtttttgaattttgagccaacacaaagagagttctctgtttattttcttattttttaattttttttattaaaaagaatcacaactttattaattaattatcttcaactataacaattttttttagtaaagtaatgaataaattcatcaaaaatataataacgttatacaagttagttatgatcgtgttcatcaaataaatacaaaatatgtcatgattgtcacgatacttccatacatccaacaaaaacctagattatcatatctagccaaacaagttatttatccatctaaagagcatacacaactaatccataagcaacacaaattagggacactcttagaaatctggatgacaaacttgtaaaaacttctaacaatgatcttaaaatcattagagtaggaaaactccattgaaaaataaatcacagttgtaaaatcttagtaacagattgcaatccaatgtcattaatgtcccgcaatttgttttaaaaacttgttatcctttctctaaaagcttgaagggacattagtattttaactgcacataaacaaactatacattagtggcaatgaaacataaaataataaataa

SEQ ID NO: 283578 - DNA, 655 bp, Cannabis indica
ccgtgactccatttttggtcttagcccgattcctccatttaaatgttttagggaagccgatagcgaggtgtctcgctttggtggtcgacccttttctaggaccctcgctcgagtccttctctgagatgactttcccgacggggtctgcctcttcttcggaggtggtgggggagttatcagtggcttccgaggtgagaaggggggggggtatacagtgggttgttgaccgttgagttaggttcagtttattccacgtttgacttggatggagttatagtggatacttctttgggccgttgattagtcccagtggtctgaattccctcttgaccctttgcagttccttgggttgatggataaaaacgtattccatctgaggccctcctcttccttgggccttgaagatgttcccccactctgaaatcattaatatcattaagagggttaaatagcgtgggctccctgttggtatttatctatggtaagtgagcccataactagctcccggcctttatgatgggcccaactaatggctggccatttaaccgggttagcttgagagcccaagaggtgaagatgaataggtgggggcctggtgattagaatcggagacaagcccattgggctttggcatctggtgacaatgaccactctc

SEQ ID NO: 283579 - DNA, 829 bp, Cannabis indica
ctaattgccttcccaagataatatttaaactctttcaaataaaaatataatattttaactacattaaatatttagtctatctaccatctcattatagttttttaaataatatttttaatttacagtacacatttatttaggagaaaattttgattagcaccaattttcgggattttagtaatatataatgtatattttttcattatttatcttcccaatatagtcattttaataattttagggaattacgtaccccgtatactattttttttttcaaatttttaatttgggtttgtaaagtggtttctgcggtggtttttatgtgcgttgctatacgatttttggttgtgatttaggctgctccccgagttgcaatagggcttattcacaattacactttttaaaatttccactcctaatattgataatgaaaataagtcttcgtattcccaatattaaattaaaaatattaaacatcttaaaaatttatttaaaattgagaactatcctttcaactattgtggattgtgaatagatgcgaacacacattctacttcattagattgataaagatataaaaatcatttcacatcttcatgttcattatgaaatttaaaaaatacatatcaagatgacaccaactattgtgttttgtgaaatagatccaaacacacattctacttcattagaatgataaagaaataaaaatgattccacatcttcatgttcattatgaaatttaaaaaatacctatgaagataacaccaataataaaaggaacaaacaacataaaacatcatcacatattctttacctgaaaacatcatcc

SEQ ID NO: 283580 - DNA, 624 bp, Cannabis indica
tttaatgatttaaatattattaaaattattttataattaaacataaataaaaatactatatattctgttcaggtcgcgtatttgaaattttgagccctatttttataatactatgatattatagtagcaaaactattattcaactgacgtacaattaaattgtaactagaaatgttaagggtgcgtttgaaagtaactgtgtaattactaggtagagtaattactagggtgttaattacaaagtgtagtaattacactatattttaaaatgaaaggtgtgtttggatatgaggtggtaattacatatgaattcctaatatcttgtttggcaaaatagttagtaattacatggaaaaataatatttttttagtaagtaatgtttaatatggaaagtttttagtaattacacagtgtaattacattcaattctcatgggaggccatgattattggagagtgtaattggaacccgtcaattacttccaattacacagttacagtgtaattacatggtcagacaaacatgtcaaattgtgtaattacctccaattacacacaaatccaattacattgtggctttccaaatacaccctaaatgtgaatgtgtatctataagaaactatt

SEQ ID NO: 283581 - DNA, 798 bp, Cannabis indica
attagactaattatactagtttatcctaattaaaaattaaattagtaacataattaattttgaaataaatagaattaatttttcattagattagtttaaaattaatttagaaaaatacatttagtttaaagaaaagattctagatagtggtttctagtatctaatttatattttctaatacttaattaagtagaaaaatatatttaagttgaaaattaatttgttaattaattttagacgaacttaaattaaaatatttttttaagcacttaaattagaattaataattaagttgatttttttttttcaagacacttaattatttatttctctttcaagaaatttaattaaataaagaaaatatatttaagttaaaaattaattttattaattttagacccacttaaataggaatatttttcttagatactaaataagaattaataattaagttgattaagataagaaagtgtttgtttcaacaaatactacttttataaaaatatgactaaatctgaaaagaaagtagcaaagtagaggagatatattcaattccatagtgttctatcatcttattctataagatggtcccactgcctctattgtcttgacacaaccgatgaggacaataccattaatgttactaaacagaaagtcacagtaccttgtcgtagtgggagagttttaaggaactcaccctgttttgacttgaagacacttgtgataaaaatccattgttagttcaaacaagtaatggatagtcagaataaggaactaagaagaaaagccaagagaact

SEQ ID NO: 283582 - DNA, 666 bp, Cannabis indica
aagtttctgggtggttgctgggtggttggccgaaggttgcatcacacgaaggtttcaatcagacgaaataactgttagcaaaatgtttatgcaactgtcgtgaaacattaaaaatcagaacaatattttcatgcacataactatatctacatgtctttttataatttaatatgaacaaattcaccattagaaatttgtaaaacaacaaaatacaccaggataaacattttactatagtattgatgtatttttttttttggattatacttgagttggattgtttgggaactccaattcaactttttgagatctgccttttatggatctaaaaattgaagtcaggacattagttttatgcaattaaactggatttcaagttgaattttagtttcgtagtagtttttctacagttttttttttttttttatgaatttgaaacaacctctattttgattgattcaggtcgttttctaaggtgaagtcgccagaattaatggtggttctctttctgattgaattttcgtttcagttgcgttgggttgctacgtagttgcacaatggttgcgcgatggttgcgtgatagtttcccaggaagcatagatactgggttaaaggtgtgtgtaagtgatatttgtgtaatttttttagttgggatgtatatttttt

SEQ ID NO: 283583 - DNA, 928 bp, Cannabis indica
agcttaccgcctgctttcaggcttgtttattttttattcttcccggggctggggctctcccagtccggcagagattttgtatttttatgaacttgtttccgtccctaaaaagggagacaaacttaaggacgacttttacggtttccgggcccataccttttaaatgagggcccggtccctttcaaccagcaaaaatacgtgaaggagtaccgtcaccgcttcttcttttcctccgagttccaggctgtggaacatccggagcttctcacggagtgggttaggatccctccatatgcgcggactgaacctactcaacttttcctccaacgagctagaccttcgccacatatgacaggaaggccctcgacgtcggggagttggtcacgacggagaactgccggaagtccaagctgatccaggggcatcagtcggtggatgactccaacctttccaaagtcatctgcccaaacgtgagggtttcggccgcggagaaggtactctgggaggacatcatcgccacggcaaaagataagtaccagaagtacctcttccagaaggcccaggagcaggcttataataaggcccaagtggccgccggaaggccccttcgtatcgggaccccggtggagagaaggacccccagaccaaggcctgcggtccaggtgccgaatacgggggctcccgatgccagcacttctggttctggtaagtcccctttaatgatacattacgtccctcctgtccgtgagtatgctagccttaggcctatagggttcgatgaacgtctccataggtttaggatgccctccactcggtggggggatcatgcaaaggagtattacttctctcacttaggcgattatttaggccggtcccggatgggttctggacctccagtgccccggttcccttggactcttcagcctat

SEQ ID NO: 283584 - DNA, 577 bp, Cannabis indica
agttttttatgtcttgctatagtttttgttttttgttgttttatgtattttatagttattttataattgttttatattatttttttaccgttgttgtttagtttaggtgcattatttattgtgtatatttttcagtttgttccaaaaatatttttattgtatatatatgcaattattgttttgttattttatgttacttttaattgtttttcaatttatagttatttttttgggttgagatgtaaaatgacctcatatttagaaattaagttaataaatgtccctttttataaacatttagcaaaatggccatttgattaaaaatttaataatgaaattacaattataaccttttattgtacataaagttgctttgtagtaggaaaataaatattatagaaatcatgattttgtcatctattgtttgattgtctattggacaatttataattattcgttccatttttttttactttcatttttacataaaaatttaaacaactgctaatactatttatatactaatgaaatattattgcaaagaaaattttaccactcactagttgatcaacttttt

SEQ ID NO: 283585 - DNA, 345 bp, Cannabis indica
tagaataactcctccaccccagagtaaccaccatctcaaaatcttgaatgagttggggtagatataaggataactaatatactttcttgaatatcttctaatgttccctatttgattacatctcagatagctcccactcaatagcagatgtctggttaaataatacttttaacctcttattgtttggagagttacctagttgtgacttttgtattagtctgaaactgtaagtttcctttaagactaaaacatcaacatagcagtctagtatttgaagtataaaatacttgctagagattaagtaatcaaaattaagataccataaaaatgttatgaggattagaa

SEQ ID NO: 283586 - DNA, 517 bp, Cannabis indica
ctagacctgacatatgctatgcagtaggaatgtgagcaggtatcagacaaacccaggagaggaacattggactacagttaagcatattctgaaaaatttgaaaagtactaggcattatgtgttagtttacaagggtggtgctttaaatcccgtaggctgtaccgactcagattttcaggcttgtcttgatgacagaaagtctacatttgggatggcttttactcttgggggtggagcagtattttggagaagcgctaagaaaactgcaatatcaaactctaccatggaagccgagtacatagctgccgctaaggctgctaaggaacttgtttggctaagaaagttcttctcaggaattggtgttgttcctggaatgaaaaaaccactggttttactttgtaacaacactggtgttagggctgcacacaagtcgggttttcggatggtcgggttcgggttatcgggcctcgggttttggaaatgtgtaaccgaacccggttttcgggtgctcgggtac

SEQ ID NO: 283587 - DNA, 476 bp, Cannabis indica
agtgtattcaattccaagttctatagtggttcaatgaggaattaataagttagggaatctacttggtaaattctagatttgcttattggaagctcggttatataggcccatggtcccctcactagttgttaggctatttttaggctatattttggatcgattttatgttcgcttttcactgttttaggacggaattacgcttgttttttatgttttcaggttcttaggaataatagaggtctcgggatgcaaaagtctagaaatttcgaattgcatttatttcgaattgcatttatttattttaaatgtagatatttcgaaatttttcaatttttcaataagaataaccttgcctctcgcctaccgggacaacgttggattcttattttgatcgaataaaaagttgctagaatggtgtccattttagatgagctgacaactctattcaatgaatgattactttgactctcgcctac

SEQ ID NO: 283588 - DNA, 555 bp, Cannabis indica
aaagattcagagaaagagatccaggttcagatatttataatgctctgctacagaaaggaatcaagggctaggtatctgaatggaaggagtcattatattccgctgcaccgaatgtaaggtttcttaaactttatatgtgtttatttcatcgttttagaaagttcatatttagggtgttaatcaacatacttgtgagtagatctaagattctggtaaaataatttccaacaatagcaagaaccaagattgatgtccatgagggaaccttgacaatggagttcgatggagagacaatccaattcaacatctttgaagccatgaggtatccaagtgatgtacgtgatgcttattctcttgatgtattggatgacctctgccaaagggtgctagatctgcatagtgaagattatctggaagttgctatacgagagaacttggagttgaattcaaatgagaacttttctaaagagatgttggatgtcataaccgcacttaataacgacttcaacagctttacagaagtggcctatgtggaattgccagtcataactgata

SEQ ID NO: 283589 - DNA, 188 bp, Cannabis indica
ctagtaactaatcatcaatatacaaatcaaatttctagggaggtaatataattcaaaaatcaacttaatgatctttgaactgcatatgtaccaaatatttctccacccaaacatttcaaatttctatgcttaaggtaaaatctaaagtgatcatcttaagaatataacaaaaaactcatatccacccc

SEQ ID NO: 283590 - DNA, 870 bp, Cannabis indica
cattggtggaatgggatgtggaacttgaagataccacaaaaggtcaagatttttctttggcgtatgtaccatcgggctcttcctactaattcgcagcttcttaagcgtaaggttcttgttcaaccactttgccatagatgcggtgaggagacggagtctccggaacatgcattagtctactgctcttctttatgtcctttgtggtctaagctccgcttgtggaatgtcctcaatcgtgggcggtgtgggtcgttatcagaattacttgtttatctttttgaggtgcttgagcgcaatgagtttgctttgttggctatggtttggtggtgggtgtggtatgataggaactctgttttatttgggaagaagcaatctaggttggaggttattgatgtgttagctagggaggcgtgggaggagttttgtggagtgagttatgggggggcggtttgggttcttcgtttgggggtgtgggtgggagaggtggtggcggtggtggtgatgggacggggatggatgggcggggatgtggggagccgagagggtgtaggtggtggccacccggggatggggagtttgtgttatcggtggatgcggctgtcaccccggggagaggttttgcggggttgggtggggtcattcgtggccatgcgggggaggtgtgggctgcttgggctgtgggggttgtgggtgacttccaggtggcggtggcggagcttcttgctgttcgtatgggtcttctctggactacaagattgggattcgctgtggtgcgggtggagacggattcttctgttgtgagttcttggattaattctggacaatattctaatgtataaaccaattgtcgatgagattctttctctttta

SEQ ID NO: 283591 - DNA, 1007 bp, Cannabis indica
gttgcgagggtattaatcgctattccaaatggtgggtgtgtcacagtattctaatggccatatacgcggttatatgccccttgagatactgtgatacacccagccatttgcgacatgcgttaatattcaaatgagcgtactctttggctgataggtagtctcggaacggtgggggtctcccagtaacttcagggttatgctcgaaaacgcataccccttgagtcactgggaaactcccagccgtttctggaggtataccgcttggccgaggatgcgtgaattacttgcccaagatagttttatctcttctcgcatattgaggggatggtcagtattcgcaaggaggctgaccattctgtcgagtgcgactttataatctaatgcgggtgagatcacttactttgcttttcacacatccatcacgctgaaaagatcttctatctttcagatgagcgatttgtcggatagccaacagctcggctccggaggccgtgcatttgacggtgaagctgaccaggaggaggacagttttctccccacttcgctttccgaagaggaggccgctccaatagagttaggtccgatgtcttctgtggacatcgagaagatggtgcaagaactcgcagaacctgggaccatcgatattcgagacagcgagtccacagtgtcggcacgcgactaccttatacactcgaggcatgctcctgacatcgaggtcgaggagatggacgaggaatggacgactccagttcgcgagtcaggtgaggaagaggaggaggcggaagggagtgggacagattcggtcgacgattcccagctgaacgagcccttcgcgtgtgaggatttaatctcgagagtttccaaatcagacttcaccacctttgtgaggttaaatttgctgcgactcgcgtttcagcgacctaagccatctcagagagcgcatcttccatttactaaccctgcgatcattcccacagaggatgtggtagtctcaatacccattcttc

SEQ ID NO: 283592 - DNA, 834 bp, Cannabis indica
aacatatagagcgttttatatgactcagagtgcgattccaagttctatggtggatgcaataaggaataaataagttagggaatttacttggtaaattctagttctgcttattggaagctcggttgtataggcccatggtgcccatactagtttagaccatactacttgtaagactcagataattgattttagttaataaattataattctaaatttagactacgtctagtttatgaattttcactaagcaaggacttaaatgtgaagaaaagagattttagggtttatttattaattaagagaaattattaagtctaattaattaatatgttaaatggaaattttatttgataattaattttaattattaaataaataattttggcatttaagtggttagaattggaaaaattgcattttttagaaaataaggaaaattgttaatagttgcaaaattccaagtgggggcccacatatccatggccgtccacttgtagggtattttccatttaatttttctattattttaatgcctaataaatcctaacctaaacctaagtggttgcataataaatagatagtgatggctcacacttaaagatgatgaaaattcaccttcagtcaaattttcctgagctttcacttctactaattctgaaccagcccttctctttctctcttcatattttcataccttgagtgatagagtgattgcccacacacatcaagtggtatctcaatcatagtgtgtaaggctgtgaagaatccaaaatcaagagaaggacgttcgggctcagatccttgtgataccctactacagacaggatacaaggg

SEQ ID NO: 283593 - DNA, 575 bp, Cannabis indica
gctcaaacttttccttgactgtcttggtcacattttcacctggttgctcaggagcctattcagtcaacacaaacagggcattttcacctatgagagcaatattaatgttctctttccatttgacaaaattagctttagagagcttgttgtcagtcaatagtgacaccatggggttgttcatagtcatattgggtactacaaatatcaataaatagaaatcaagtaaggtttaatacaaaatcataaacattcagaaattattaagcacttagcaagtaggaatgaaaagtgaaaatacaaaaacaaacaatcctaaataatttccaaggtttccaacaaactgatacagtgcttcgtattgggcgagagtcaaagatatcaatcattgaatagagcagtcagctcaactaaaatggacaccattctagtaaccttttattcgatcgaaaagagaatccgacgttgcttcgttttagtcaagagtcaaggtcattcttatttcatgagcttctaccattgtttcataccttgtaagtcctactcttagcaacaactattcgaatggacgttactaa

SEQ ID NO: 283594 - DNA, 730 bp, Cannabis indica
agatgtgtcacacaagatgaagctgcacgactcctatctgaagttcacgatggattctgtagaaatcacgctgtcggacagagcttatccaagaaaattctaaggcaaggctacttctggccaacgatgattgaagattagagagcctatgttaagaagtgcgacaaatgccagagattttccaagataccaagagctccgcccaacgagctgacacagatgcaaagtccgtggccctttgccatttggggaattgacctgatcgggcagttacctaaaggtaaaggcacagtgcagtacgcagtggtagcagtcgactactttactaagtagactgaagccgaaccacttgcaaccattacatcaaagaaagttcaagactttatagtgaagaacatcatatgccggttcggactagcgcacaaaatagtctcagacaatggcaaacagttcgacagccaatctttcactgatttctgtgcgaaccatggtatcatcaaaagtttctctgcagtggcacatcctcaggaaaatggtcaagttgaagcagtcaacaaaaccttgaaggatacactaaagaagaaactcaaagatgccaaaggaaattggccagaagaactccatgaagttctatggtcataccgtacaacggaaaaaatagcaaccggtcagacaccatttgcaatggcgtacggttatgaagctatgctgcccgtcgaacttgagccac

SEQ ID NO: 283595 - DNA, 558 bp, Cannabis indica
gttatcgtttgttgggggaataacattttatttttttcaatacagagtaaaccataatcaagcataatgatatacgccaagaaacccattagtctattttttgtgtatataggaacaacaatttattttttatttcaaacgcagtgtgtgcctataaaataacaaactaattaatctatttttttttcaagttgagatatcaaatctagttgtatacaaagtacattattgtaaatgtcttatatagtaaacctgaataacaatatatgcacttgtcaaagatttgaatatgatgaaattccttggtcctaagtttatttggtatatatgcatatactcatatgtgccaaataaacttattactttattttgacatattgaaatatattttcattctttgtttacacagtagcctttttgtatagcctatcatcgtatatgctaataaatctattagtttattttagcatactggaaacaaatttttatttttctttttgtatattggaataataattcagctcatttcatatagtctaccattatatatgtcaataa

SEQ ID NO: 283596 - DNA, 595 bp, Cannabis indica
ttttttgaaaagcagcttttagcttttccaaaagctgtgccaaacgggcccttagtctgtataaaatttaatatatttctttaaagtgaagctactatattgatctctttgtaccttgaaaaaagctaatttgaaaagccacaatgggttctgaactggatcagtacgaaaacggtgcagccattgtggaccttccaactggccctaattattcggcttcaggaaggtcttatgaattttgtattgtagaagatttagctttcaatatataagggtgcttgatttaagtgcagaacaagggttattctatttttctgttttttaatctcttgtactgtaatatgtttttctttggttatgttgcagaaaacttttcgttggaggggtttcttggagcacaagtaaaggtacttgcttaatatttatttaattacttgttcatgataatattgtaagatgggaatgaataatgctcagtttattcttttggaacatgtttgtattcttgagttatttgagattgagtatgtgtgagaatttacggcattgttgattgatttttttctttctaaaaaccaatatcaaattccactgt

SEQ ID NO: 283597 - DNA, 446 bp, Cannabis indica
acctcacccgggggggtgcaccatacttagtgcttgtcaaaaagagtatgcattggacgattggcgagtgagctaaaatcagaggatgtggtagcttcagggtcagtgttgcaagggctacttggttgattggagggacgttgtgatggactcagaggagttcatgttgggggaagtattctagtgcggaggcactactccatgggtgtttctgaatagcgacagtggcacagggtctttgatcaagtccaagagtgagcgtgcgagatcatcaccaagaaggtggttctacggaggtagagagacaagtgcagacttaggattcgagagaagcttggggtaagctaaggagtcgagatcaggaggatttgcctgcggtccatcgatgagggcatcgacatgttgaagtgggggagaatgttacgtgcagtctatgatggcatgtt

SEQ ID NO: 283598 - DNA, 480 bp, Cannabis indica
aggaaagagcctagacccggaggaaaaagaaaaataataaagacactgaagggtgccattgtcgttttcgcgtggtgccaggaggacatgactggcataagtccccacgtcatcacccatgtcctcaatgtcaacccggacatactgccggtctagcagaaacgacgtccccttgactcagtgaaggccgaagccttagagaaagaggtggacaagctattaacaagcggcatgatccgcgatgtttactacccggaatggctagccaatccagtcctggtgccgaagcctaacgggacctggcgagtttgtatagacttcactgatctaaacaaagcttgcccaaaggactgtttccctctgcccaggatcgaccagatggtagacgctacctccggattcaaattactgtccttcatggacgcatacgccggttataaccaaataaaaatgcaggtagcagatcaagagtgcactagc

SEQ ID NO: 283599 - DNA, 742 bp, Cannabis indica
taaaactctgtagcatctatttatatgcattaatgtttttttcatgcaaatcgttgttattttttgttcagattcaccaatatttcattattatttcaatttattttggttttcgatttgctttttgactgaatgttgtttttgattttttttgtacagcaatggaggttggatgatttttttttcttccgtttttgtatttggatttttgggatctaagttgtttttccttgagatctacattttttttagatcttcctagttttggaaggaaaatggttgagaatgggttgttaaagtttgtcggctgggtcacgaagaagatggatgtctccgttttccttggccggtattttgtaattaacaacttttagtttctatttttgtttattttcctttttaggtcataaatgtaaatttgttccatttttagtttattattgaaaaaatccctttttttaaagactaattagcaatttttcccctcgaactttcacaagtactaaatcataccccttgaaattttttggccgttaaaaatttctcctcaactattaagattgttaaatttaaggacttttgtctaatttagtaaaaaattactaacatggatgaaagttcaagggcatgatttagtagatatcaaagtttgagggcataattggtagatatcaaagtttgagggcataattggtagatatcaaagtctggagagcataattagtacataaacaatcaactg

SEQ ID NO: 283600 - DNA, 640 bp, Cannabis indica
ttagctactaacctagctttaaaggtttgtatagagccatcagtgtgattatttcctttctaaatatccacttacaccaattgctttgcatccttctggaagatccacaacttcataggtgtcattggagaattgagtccatctcatcatcaactgcttctctatgaaatgcagtatctctagattgcatggcttctagaaaagtcttaggatcatcctcaataagaagtattaaatgaattttccttattacttcttttctagttccttctaccacgtagaaagaaattaattgagaatctatttcatccttatttagacttttctttttttctcaccctttgacctctccaaggttcaatgggttgttctacaaatttagcagaattctcctcttgagatcctcttttagatgtagaagcttgagaattatttttatataaaatattctcacctagagatgtagaatttggagagttgtcctcatacaacttattctcaaaaaattctacttctctagattcaattacaacattggatttcacatccaatagcctatatgccttactattgttggcataaccaaaaaatgcatattttatggcccttgaacccaacttggttctatttggttcgatct

SEQ ID NO: 283601 - DNA, 713 bp, Cannabis indica
ataagacccaaaggttacagaggaaaagggtaggggtcttggctattccaactccaagtgttatctagccctatggacatttgtgccaggttatgagctgctgtattcccttgccgtctagtgtggtgaagggttacagtggggaacgaagataacagccgtcgaatagctttgattatgttgccaaaacttgtaagattttcattggatgattgcaagtccgtgaggaggtttttgcaatccacttctacgtggtggatgttgattcctttatcatgacaccatttaagagcttccaacaaggcccatccttccgctgcttgaggatgcaattgtccaattcggttaaaagctgttgctgctagaacttttcctgtgtgatcacgaactaatgctccccctcctgttctattctggtgagaggagattgcagcatccgtattgagcttgaaaaatcccactggtggaggctcccaatccagaagatttctgtctgatgtaaactgggtgtggttcccacgcttgtcttgggctgcttgataaaattccaaataatcaagagcttcttgttcaatggtctccggtcttgaatcttggttcctgaaaacagatgcatttcttgcattccaacacttccaaagcatacaaagaaatagttaaactcatctttggaaaaatttaactgcattaataaaagaatatcgaaaatgttc

SEQ ID NO: 283602 - DNA, 613 bp, Cannabis indica
aaaatttcaacacccttaacctacctcaccaaaaagaatcagcggtttgtatggtccgacaaatgtgaagctagtttttcaggagctgaaacagaggttgattatagttccagtgctagctttgcctttggacaaagagaaaaatgtggtttacagtgatgcatccaaacagggtttgggatgcgtattgatgcaagccgatcgggttatcgcttatgcctcccgtcagttaaaggattatgaacagcgataccccactcatgacctagaattggccacagtagtattcgctttgaagatttggcgacattatctttatggggaaaggtgtgaaatttataccgaccataaaattctcaaatatttctttactcagaaagatttggttggagttagtaaaggattatgattgtgagatcctttatcaccctgggaaggccaatgtagtggttgatgccctgagcaggaaggctcccgggcaagtagctagtctgattcaaatttcacctcagctagcgaaggatatggtcaaatctagcattaagtttgttgtaggcaagcttcacaacttgacgctacaatctgatctactagaacgaattaaagtcgctca

SEQ ID NO: 283603 - DNA, 555 bp, Cannabis indica
taaaaaaagttggtaataatagtacacactgacaaagacgttatttgttatttacacttccattcttcaatactctactttaccacttattgtatgcaagtttaagttttttttaaaaaaaaaaaaaaaaaaactacagtaacatataacattgcaccccaaggtcatttccaaagatcacttatgaaagaatagactaagatttgcgtttataagagtgaaaataagaataagaaaatatataaaatgaataataaaaattgacaaaatattattaattttttttccctcatgaatcaccttttactttcattttataaataaaatagtcattttatcaaaatagtagaaaataatattctaattttttaaatacagccaaacaaataaatagaataaaacttaattcctttccattccttttaatttcattaccaacagccaaaggcaacctaaaagtccataatgtttaaaaaggcgtttttgaggcgcgcctcaagctgaggcgtttaaagattgcaccaaggcgtgcgccttgttgaggagaagagaggc

SEQ ID NO: 283604 - DNA, 274 bp, Cannabis indica
gatcctcgggacatcagggcttttgtagttagtcgctaggcgacaaatattttgtattgaataacaaaatttttgtaaagtattttgtaaaagggatcccaaagtattttgtatgctatattacaagtatttaattaaataaacaaaattttaattattcacgtttttcattaacctcgttgattagcaacgagctgcacagtacgttaaaaatcacgttaacacgtctatgctagttagggtgttacatgagtagtctaattaataaatatat

SEQ ID NO: 283605 - DNA, 443 bp, Cannabis indica
aaagagaaattgttgaaatctgttgctgttgtgttgttgatgtttgttgtagttttcagaggatatattatgcatgtttaagtaggtttggactgatttgaatgcatgctagtgttttttaatcaagtttgagtttggaactcaaagcttgatgctttaatggtgattttggtttgtttgcatgaagctcggtttttatgctttagaaatgttccttagggtctatgtagcaggtcaggaaggttttgtttgaatttgtttggatttgagcaagttatgaatttttggttgatatctgcgaggaactggaattccggttgtgcatccggaattccggatgaggttctgaaatttccagaaccggaattccagttgtgcaaccggtctgccagttgggaaattttcaggaaccctaaattttctcgtttttatgttatttgggg

SEQ ID NO: 283606 - DNA, 565 bp, Cannabis indica
ccacacctgtagattaggatgtgttagacaaatttctctcctcttatggacaactttaagcaaccaattattttagcattgcatttgggagacaaaccttttgggtagctgggacaaggaatattggaactttaacctttttgccctgtacataatgaaataccattcagccttgagcccgaatctttaatcaaaattacattgaaaggcactcatcaatggaaactagttctagaaagaaagtgctagcagcaacaataacatttaaaattgactcccattcctatggcacattatcttgcaatcataaactgtacccaagctggatcgataaaaaaacatacttttcaagcacacatagttgatgatgaaacaaatctaaacaagaataagataacaaatatagtcagaacccagatgaagtacaatattgacaatacaagagaggatattattaagatacattgaaatacaagaagtataataaagtgtaatcattttaaattaatattataagtataataaaattttaattatgaaattatatgtgtataattttaaatta

SEQ ID NO: 283607 - DNA, 570 bp, Cannabis indica
aggcaaagcaaggggttttgggagctgaaattctgtgttttcagcaaaggattcaagaggaatcaaggcaaggtaaccctagttcttctccccttaagtttttgaagttttagtttagtttcactatgaatttctaggtttagtggctgttgggttttgaaatgtttggggttcaatttctggggttaaattgagttaatctaagtccctagctactggttttgatgcttgtgaatggttttaagcaagcttgagttttgaaactcaagctttgttcattaatggcaacttgagttgtaatggtttattctgtgaattactgcctggaaatcattgtgtatgcattgtataggtatactggagagtttggtaaggtttgggcttgatttgaattaagggggatgatttttggttcccagcagcagaaccggaattccggttctgggaggccagtaccaaccggtcgaccggttggtgacccagaaccggattgccggttgggaaccggtctgcctgttgggggaatttccagaaccctagttttggccaattttgagatatttagggtat

SEQ ID NO: 283608 - DNA, 589 bp, Cannabis indica
catgtattatcccaatctaggaaagagttgaagaaggaaatacagtcaacttgataactttcctggatagtgcaaatgaaaatgactggcgtcagccaatcaaagactacatccaaaaaggagtcttgccagaagacttgaagaaaagagtggatgtaagaagaagagcgcctcgatttgtggtctttaatgacacattgtacaagcgttcattcgatggaatattattgagatgtctctcgatagaagaagcggcacatgcacttcaagagactcatgccggtacatgtggcgcccatcaagctggcccaaaattgtcagctcaattaaagcggttgggttactattggcctactatggttcaagatgcaattaattttgctaaatgttgtaagtcatgccaattacatggagatttcatccatcaaccccctcaaccactccatccttctatactgtcatggcctttcgaaacttggggaatggacgtcattggtccttttacgccaccctcttccaaagcccataagtatattttggccatcacagattacttctctaaatgggccgaagccgtaccactaaaaga

SEQ ID NO: 283609 - DNA, 713 bp, Cannabis indica
cagacttagtcattttcttagatcagttgtatttgttgagacaaacactttcttatctaatgactatgagatggtccacccctaatcacttagaatagctatcaaacatgcaaaccttagttgacagttctaacttttcctaagattacgattaggacatccatgaatctagtaatgatttacactaagtacacaaccattccatcattgtgaaattttcctattactagggtataggcaacggctagtaactaatcatagaccttatactatcatcaatatgcaaatcgaatttctggggaggtatgtttggatataattcaaaaaattaacttaatgatctttgaactgcatatctaccaaatatttctccacccctatcagttcgcaaaatcgttaaccacttaccataatgttttgcaacattgctagaaattcatgaaatttttcaaatatttcaaatttctttgcataagataaaatctagagtgatcatattaagaatataaaaaaaactgatatcaacccctgaatgtacatccatattcgaatatagatgatcctacattcagtggatataggcatatttactctttgtagagaatgatcttcgcaaaaacactttgaacaagatgcaaatgccaagatttataataagaatctggttgtggtcttttgatgacttaggtctagttacatcgaagagttcttag

SEQ ID NO: 283610 - DNA, 1269 bp, Cannabis indica
gtagatcgattttgtggaggacctacgattacagagactttaccgataagtttaattcaaagattgtctctttcgatacctgttatttgtttttttcagatagtatttaagattacaagccgaaactttggctcttttgctatcaacaaaggagaatattttttaatgagctgggagcgttgtttgaggatgttatagctttaatgtttaaatttttaagggcaattttgtctcatgtggctctcgatatgatttctgcagctcataatttggcaaagcatatccttcgattaacgattgactatatattaattggtctttaataagattaagagtttgtatatgcaaaatgtttaactttcgggacaacttaagattatatcatgtactctcaaatatgggtactgtagttatacatctcttttgtatttttgatatctatgtatttttgtaattttttatatgaatgcatatgatagttatttaaaatattctataattttttttaaaaaatttaaaatacaaaaggtagatttagttcacacatataaaataaaaaaatttattttcgaaatgttaaattattttgaattttttgaaaaattatatgatttcttatataaatgtgatttatactatcataaataaaagtaataagattaaaacaatttggatatgaaaacaccaacaatatatatatatatatatatatatatactagaagaaagttacgtgcaaggcacgtatacttagttttatgttaggtgctctataatttaattgagaaagattcaataaataatcatataatttaaaatggtttaaaaactaattttaattagtgtgtggggttatttgaaaatcaatagtgaaaagtcaaatttaaaatttgcagaaagagaagaggagaatggagattagcttgaaatatatttaaaaaataataatgctacacacttactatggacacttaactcgagccggtaataataaaattataaagaataagggtagcaggcatataactggacatatgaaagaaagaatataaaaaacaagaaatatgatagcttccaaataatattataacaaagcaatgctctccaaatttatcttaatatcattcttctcttgaagcctctcatcaatctcatagcactccatgatagattcaacaaaatatatgtgtttatgtatatttggattcaacaaaatatatgtgtttatgtatatttattttgagcaaatcagtaaacatatattttcaac

SEQ ID NO: 283611 - DNA, 673 bp, Cannabis indica
gttaattttgtaatttttgctcggcgacaacggaaaatgcgatggatggctagataatcacatgagtaagtttagaaccctatttcatagtggggaatattttagaaaaaataaattatcgggattgagcggggttatggagtttgaccattttacccctagcttaagaaatatccaagctttaagtttaaggggcattttagtcatttacctttaagttgattaggtggctgcctaagtggatggcacatggcacttagatttcttaagagaattaattaattatctctccttttcatttgaaataaaattaaggaattggagtgaaaaaccaacctagaattctctttctctcttcctctctttcggctgagcaaaaccagggcaagggcaacccttttttcttcctaattctctgtgattgagctgggaatttaaggaggagcaaccaaaggtaaccctagaatattggtttcatgttttttttaagtttttaccttagtttgaacttgtggttttgtgttttaatggctgttatggtttgagatgattagggagtgaattctaggcttagtttgaattgattaaaggttatagcagctagtttggttggttgatttaggttttgtgttaatttgagcataaaacctttaactttggtctttaatggcaa

SEQ ID NO: 283612 - DNA, 574 bp, Cannabis indica
ccaaccaaaacgtttccaaactcaaccaaactttccagacttgctaattagaccctaataaaaaattttcaagtgataaaacaaagcttcatgcacaaaatcaaaatccaccattaaagctccaagctttgagttcaaaactcaaacttggttaaacaacactatcatgcatcaaaccttgattaaaattacataatcaagcatatagaaactgcagaaatcaacagcaagcatcaacaaaaacaacagcaacagattcttcaatttttcttttaaaactatatttttgagtaaaaacttccaagcttgaaacaaagcaactaacatgcatcaaactagctctaatcaactcaaaataacatgctttaaacctcagaaacaacaacaaaatcacgacaacaacatcaacctaaactaagcatgcaaaccatcattttcttcccaaaattcccaagaaacttaaaagaaagttaaagaaatcataccaacaacttaggaacactaaatcttgcaaaaagaagcttgaatcaccaagaaaaacccccacttccttgctgctcaaggtgggccgaaa

SEQ ID NO: 283613 - DNA, 691 bp, Cannabis indica
ccagaggctgcatcattggaacttagtataccgtgggagccagaagggcgtgatgcaagtgtgaatcagttggatggttgagtgggaagttagtgcatgcatgtggaaatcgacaggggtgctaatgagatagttgactcgagagtcacatcctgcgggatgcacttttagatgacatggtgtgcatgaagagttggggcggtcaggcatttgcgtgtgggcatgttgtcgaggacgccaacagatgaagtgggggagagaccttcacggttcactcaacagactagttattcattacaagcatcgagatgagtatcatggagattgattgttgttcaggatgtaaagtcaagaagactcaggacacaggcagagccagttatctagggtgaaagtctgcaggactcaggtactaagataacaccatggcaatgttggcctaaggcaaaagtcagcaggactagggtactaaggcaacaatgaaatgtcgaggggcgaagagtcagaatgatcgaggcattagttcaacatcttcatcaaagtgaaatgtggagtggaggaaccgtatgcgagtatgcggttagcttgcgagctatatcttgagagatattcctcttagagagaagtttttcccaagttgaagtgggggagcccactaattcatgtgtttgaagaatcagggtacttgttc

SEQ ID NO: 283614 - DNA, 802 bp, Cannabis indica
tatcctggtgatatataccaggtctaacccaattatgtcttatacacataacgcttaacataatcgcatgtattcaatatttaccacattatataaaatcttagggtaataaccctaactcatattttcactggattaataatattaccatatattaatacgttctcactttcataatgttctaaggtaataacccaagatcgcattaaaattaaactcaaggtactagtttacggagtctagcttaattatgcctagacgcataactctttattccaacacattaaacatggcataatattcaacatcttttaactactagggtaataaccttacatcaaataactgctcactttagggtaataaccctaatccaggtttcttaattaatcacaatcacaacaaacaatatgagcgccactgcgctaaactctacgtgcatactactgtctttcctgatatcccgcaatgacagagactccaaatccccgggtgctcctaatcaggtgccagtaatcctagtcacacaatccgagatttcacaaatagggttaacccctgatttcattttcataaaatattcacatggcatttaaaattcacatattcagatagagctcgaaaagagctttccaacggtatatagaactcccaaaactcatccaaatcaccccaattcacaaccaaactctcaaatcatagggttgctaacaaatattagagggtcaaaataacctatttcgtgcatcaatttcaatattaaaccccaatttcagataacataaatatcacaaaatcaaac

SEQ ID NO: 283615 - DNA, 641 bp, Cannabis indica
gaaattaaattctaataataaaaaaagaatcgtcaaaaacggagtcacgaaactacctcactctctctcactctccggcagccgcgagtgggcttcgtcccagcaggttgtcttcaacctccagcaacctccatggctgaaaaatgggttttgtgcgacccggttcagacccgagcgggtcgggacgaaattccggccaaaaaagtgacgaaacggacgggaaaaagagggattttgattggtttacaatttctaatagatctacgatattaatttcatgtgaaaacacataaacttaggtagatctaatctaaaataaatccgaaaactaaagaagaaagtaacccaaatatgtgttccaattcggaaattaaaggtgtacaaacattttaaatcaattattgatgagatatgcacaatcaatttcaaattataatcaataaaattgaaaaacacaaaattaatttcataaagaaaatatataaaccctaaaagtttaatcttaaaattctcctaatttactcaataattttatgcaaataatatattaatagaaagagaatttaatgaggaataaaacccctaaacttttaagattgaaaaacaaaaaattcaacataaaataataacgaaattaatat

SEQ ID NO: 283616 - DNA, 548 bp, Cannabis indica
gatcccttcttcgtcaaaaaggtttgatcaaggtgttataacgattcaacccctctctcatcaaaaaggtttggtcagggagctataacggttcaactccactttcgtcaaagaggtttagtcgagatcctttgaatttcaaaaaaaaaaaaaaaattgaaatgacgggtttgcattatacaatgtctttccagatgaattccggttaatcatacataaatgtaccttaagtaatttttaaagaatgaaactttgcaattacttaatataaatgattctctttattcataactgaagtttaaagtttacatgactaatgcaagttacatcatttatttattgatagtagggtcgcaaatgttctacgttccagtagttctttattagcgagccttcaagttgagccaatttatagactccaactctaactactgcttcgatgacatatggaccctccctgttggggttgaacactcctgctgatgcatctctcatatttgcaaagactcatcttaacaccaagtttcaaacattgaatagtcttttct

SEQ ID NO: 283617 - DNA, 756 bp, Cannabis indica
gggcataaaacccaacactccaatatttgtatcctattctctgaagataaggtctgattctactgtttattttgtcgagttctgacatgtatccttcaaatgatttcgtgttgtatgtcttggcggctttgacaaagtttaatgtaagatcttctccgtgtgctccaaaattgaccttaatgttgttaagcaagtggaatatgcatgctccatggaatatgtttgggtagacagttgctactgctttctctatgcttttgtgccggtctgagatgattgtcatgcctgcgagtcaaagtatattgaatgtcagtgtatgtctgttttaatcggttttttgttacttttttttttgaaaccggttatttatgttaagtaagtctaacaaacaataggaaaactattacaataaagatgatgtatttgctgtatatttctgcttgaaccagtttcttaccttctctttctctgaatgtttctcttagcttgtggaagaaccactcccatgatgaatcattctccgagtctcctattccgaatgccaatatgaatatgtggttattagcatccattgttgatgttgtaaacaacgtcccttcgtatgttgttttcaagaatgtgccatctaccacaatcaccggtctgcaatgaatccatcctctaattgagtttgacagtactaggaacatgtacttgaaacggttcttcttgtctgttatcaattcgattacgatgtctagatttgcttttttcagc

SEQ ID NO: 283618 - DNA, 600 bp, Cannabis indica
tatccggatccctatctaggtccaagtctgtgtttgggatcgggtccaagatttaggtccaggaccgcgtctcaattcttgtctgggtacacgaccttgtccaggctcgagttccagtctcagtttgggtatgaggctaggtctgtgttcggttctaggtctgggtccgagtcttggtcacggtcctaatcttgttctagggtcctggttgggtgattcttattcaagttccaattttggctcccaggtcttagtctgggttcgggtttggttcttcgtctgggttctggtcctagtgtgagtccaagatctagacatcgactactgttctgttccaggccccgttagccgaatcccgagtaaagatctggatcactttcacgagtctctgttctattccggttcaggtcccaggtccaatttcagagtttgggttcgggagctagactagggtgcagttctcggtcccgaccctggttctgtgtccttagtctggttccatgtttgggtctgagttcaggttcgggttcgggtcccgagtgcaggtttgggttgggatccgggtccggctcccaattcgggtctaggtctgatttggag

SEQ ID NO: 283619 - DNA, 585 bp, Cannabis indica
aaatgttcttgattttgttatcaagaacatcttttgtaggtttggcatcccaattgaaatagtatctgacaatggaactcagtttgatggtgaactattcactgaattctgtgaaatgaataaaattattaagaacttctcatcagtatcgaggcttcaggaaaatggacaagtagaagttgttaataaaactttaaaagacactattaagaagaagttagatgctgacaggttttgagggttttgtaatgagattgcctcattttatgatttttttaatttaagtttctttatattattttttcttctaaatttcaaactggttttcacatttatattatgttcttaaattattgttatgtgttgtttttgattatgtttgttagtattttttcaaattattatgttttcgtgtgtgtttttattttttttttatttttccatttgattgtctgatgaaactggtttgggtttttttgttttttttatttaagtcgtcttatatattacaaccatgcataacctaggactcgaacccaggacctccaacacacacgcactattctatggccacttgagctagcc

SEQ ID NO: 283620 - DNA, 538 bp, Cannabis indica
aatatctcacaaaaagatgatatttaaaatagagaaaactgtgcaagaaaataaagctgcaacttcaagcttgaattctactatcttctgattagattttggaaaacatcaaaacataaaagttctagatctatcttttatcttttcggaacatcttgaatcgtccaattccgagcaatatcgagagaattatgaccaaaatactatcagtcaatgcagcagaaaaaaaatatctcgtctgaggtttcccaaaaatttaaatctgaatggaaatttaaacatgtgcgttttttccatctttttaggccttcaatgcctatataaagggaagaagggagttatttcatcaagcaatttcagagagaaaaacaaagagaatacagatgcaaagtggagagatcaactacaatattggaggcattcctcagagggttttcaacattcttctcttctctattttcatatcttttcttaaagttaataagtgtgattgtgctctcataaacatgagtagataaatatttaattagggttagat

SEQ ID NO: 283621 - DNA, 540 bp, Cannabis indica
gacttctcagtttcaaacaatgaagccgaacatgaagccttgatagcatgactgagattagcaaaggccgtgggggccaaaagagtagaagtctacagcgactcccaactggttgtaaaccagatatcgggagagtatcaaacacgcggtgagcgaatggccgcatatgtaacaatagtccgggaactgctccacgagttcacggactacaaagtagaaagaatccctcgggaaaagaacgctcacgcggactgtctgactaagttagcttcagacagtgaaatcgaaggactgggggtagtacccgtggaacgcttggcagagccaagcatcaaaataaaagaggccataataacggttgggcaagaacccaactggatggtccccatcatagaatacataacaaaaggtgagttgccccaagaaagggcactatctagaaagatccagtaccaggctcatcgttatgtaatgatggataaaattctctaccgaaaaggactcagcatgccttatttaaggtgtgtatcggaccctgaa

SEQ ID NO: 283622 - DNA, 681 bp, Cannabis indica
caaagaccatagttaactgtcccagctagatatttgaaaattcttttgactgcagagagatgagactgtttaggattagcttgatacctggcacataaacctacactaaaggatatatcaggacgacttgctgtgagatacagtaagccacctattatacttctgtatagagtagggtctacagggtcaccagactcatctcgtgacaatttggacgtggtgcctattggtgtgtgtgcatgcttgacctgagagaatccaaacttatctaacatagacttgacatatttagactgtgaaatgaatgtgccatgatctagttgttttatttggagtcctagaaagaaagtaaggtcacctattaaactcattagtcattaaagtgacaaatgtttggacttcattatcacaagttgagccaaaaatgatatcatccacatatatttgggcaacaaaaattcctttgtcaatatgtttaatgaatagagtgctatctgcagtacctcgagtgaagccatgagagatgagaaatgaggtgagtctatcataccacgcacgtggggcctgtttcggtccatataaggctttattgagcttgtacacatggtgtggatgatgtggatcttcaaacccctgtggttgtttgacatagacttcctcttgaattaccccattgagaaa

SEQ ID NO: 283623 - DNA, 856 bp, Cannabis indica
ttctctcagccaggcttcaagtggttgagcgggacggaccacaaggccatcagcaaaatatggcgttttgttgatgagtacttcatggtgaaggatcagaacatcactcggactcagtttcagcagattgtgacatatcaccgtcctcccctcactcttgctcttagggatagagctcaaaaacttgcccggttgccgacagaagacagggatatcatccagttgacctccgacgagaatctggtgcagtacgggctttacccagaggacttttcttctaagtccgtgacggggaagaaggggaaatctgatgctgcctggcccgaacgagctaataaggaggatgagctcattcaacttaagcgtgaacctaggtagaagggaggtgcccaggcaaagcagtatgctcaggagagtatgaatcttgaagatgaagctgaggctgaggctgaggttgagcaggtgactcctttgaagaggaagaagaaactcccggccacgcccaggcccgttgaacatgccattcgcataagggagcccatttcacctgttcggccatctcatccctatgctggaaaaggaaggctgttatgtttgagatatcaggtgatgatgttcttctgattttctgggcgggcagtcactctgcgttttacttctttttcagcttcttgaatttcatgctttgtattttctgctggtttgtgctaaccacgctatttttattctgtgcagacatgtctcgacaaatgattgatgctctgaggaagaggatgggcggaagttctaccacctcccctctggccaagaagtctaagggcggagaggcttcagagaagagaccttttggagaggt

SEQ ID NO: 283624 - DNA, 888 bp, Cannabis indica
acccgaacccagacctagacctgggacccataactagaacctgaacaagaatcgtcaaaccaggaccctagaataagactaggaccgtgaccaggacccgatgcaagacctagaactgaacacagacctagccttagagccaaactgagattggaactcgggcctggacatggtcgtgtacccagactggaattgagactgggacctggacctaaatctggcagccgatcccaaacacagacttggacctagatagggatccggatacgaacctggactcggaccaagacctagactgggatcgaaatgctggacctagatctggaacgagatcatgacccagacccaatcttggacccgcactcagtacccgaacttagacctagcttggcgtctagaccttgacacaatcccggacacagactcggacctgaactgaaacacccacacctagaatcagacccaaagctagactcagacccaaaccaaaaccagaaccaacgacttagaccaagaactcaatccagactcagatcgagatcggaacttcagactcagacccaacctagaacccaaacttagaccaggactcaaactccgaactgaactcaaacccaaactcgaactcagaatcacaaatggaaccagaaccgaactaggactaggaccatgacaagcacctaaacccaaacctgaacccagatcaaaacccagacagagacctaaacccgaaccaagactaggactcgaacccaaacctagaccaggacccaaacccacacaataatcgggacctagacttagaatcaggatagggaccagggaaacagaactagcaccaggacctagtacccgacccaaacccgaaattgaacttaggacccagct

SEQ ID NO: 283625 - DNA, 605 bp, Cannabis indica
gactaaaagtaaaaaaattgtgactaattataaatcatgattcttatgttatgactaaaagtctgtagctaaaagtattagtcacaaaaattacaatttattgtgactaaatgtatttttagttacaatatttgttatgactaaaactaaattagtgacaacttgtaactaaatgctatgttttagtcacaacattttgttgtgactaaaagttacatttagtcaaaaaaaaaaaaataatgtgatgactaaaaagttatcactaaaagtaactgttttttatagtgtgtaaatattaacgagcattgctattaggcaccagcggtgcttagcaccttttcgacatgtcacgttgcgattggttagcgatactttctaaaagctattatattaaattatgtgggacccgatacttagttggaccaatagcgatactgacacataagagggtgctaggcaccactaatgccctttagcatttctcatattacaaaggcatctccatctatccccccaataatcaaaatataaatgatcctcatgacaccttaattaacatctatggaaactcacctatgcaaattgtatttcttggaaactcaatt

SEQ ID NO: 283626 - DNA, 772 bp, Cannabis indica
atgcacaagcgaagagaagttacactgatacacaattaaggaacaaatacaatctgttaagacaaaagcacaaggatttcaagtctttaagcataatgagtgaagattattaacaattagaacctttttaataattttatttcaagattagacaattattagttcatattttattatgaatttgtcggttttgtgttatagataatgtgtttcgtgattttaaattacttgaattttttaaaatattaatgagtatttttatttgatttttttataattttatatatttgtttaaaaataaaataaatgatattcataattttttatttaaaaaaagaaaaaaaaatacaaaatttaaaattataaaacaaaagtggttacagaacacacttttgttttctgtttttaaaatttaaaaacaaaagtagttatagaacacatttttgttttttaaaaacaaaattttaaaaacaaaaaaactacttttatttttctgtttttaaaattaaaaaacaaaagtgttaccaaacgccaccaaaggaaaacgacatacatttcggaaataacacattatcttttgttaaaaatacacgtcatttctcatatgaagaaaaactacatgtcgtttatagatggacagtttcttaaaaaaaaaaaaataactgaaaatgttatagattttatttattttggtaatctcaatttatttctttttttatttattaacattagggaaatttctactaatgcaccccttaaaactggatatatt

SEQ ID NO: 283627 - DNA, 761 bp, Cannabis indica
aattcattctatttattgagaatcaaaacttcaatcttcttcactagattagccagacacacaatatttggacataaacacaggacacaatattataactcaaactcagaaacacttagtcgaaacttgaatgaataatgccactcttttaagttttaagactgtatatgactaggcaattttggttattatcattgctgctacatagttgatcatttttagatttttgatgtgaaattttgtattgtgagctttttagagtttctaatagacttcaatgagtaatagatttatataattatacttggaataaattttgataatgttgtttggtggattcctattttgttattaggtaacataaattattattcgttaggtctgtcacaattattaagtgagaatgaatcaatttaaaaacctttcactatattgaaaggtgagattgattttaatatgagcttaattatattttttattttgtatatctattgttttatttgaaaacaggtgaataaatgactacactatatacaacaattaaggacatcactccaactacagaaagttggaagaataaaatgagagtgttagaaaaatttgaaaagcggacaaataagagttcaccactcaaatatcaaaagcttaatgttagcagacaaaaaagtatacaatcagttaatttactgttgaaattgtcaatactctactaataaatgctatattttctgaattttgcctgtacacgcgttgcaacaaat

SEQ ID NO: 283628 - DNA, 845 bp, Cannabis indica
tgttaaagatcaacacctactctacaagtatgtagaattttctatcattttggtaatattatagaattttctagaatcatagaaagtaatagtcataagaagtttcaagaatattttagtaacacaattagttagaattatctagaatattatagttggtttcttttgagtagtataaataggggtcatgggtcttcaagttgtgcatccaacaagagtgtctttaaagtgtgttcaaaagagtgagagtgtgttctaaagtgtccctaaagtctttcaaaagtgtgagttatacacaagagttttgtaaaggtgtctagtattaaaataagagtatgagtatttggtgtattgtggtctagtaaaaagtgtttaagtcttggtgtaattattttttcaataattaaagtaattacgtttttcacgtgttgtggtgtccaacaagtggtatcagagccgaatcgagttcgttccaaaagagtcctttgttgggtttcttagagtgattgtgtgtagtttagtactatagagtttgcacgatgggtgaccttcaagtggttggcggaattaagaaacttaacaactaaaattacaacacgtggtcgatgcacatggaggcatatctccaaggccaagacttatgggagatcgttggtggcaatgaagtcacacaaccggaggacacatccgctttgaagaaatggaagattaaagcaggcaaagccatgtttgcaattcggaccacattcgaagatgagatgttggagcacatcaggtcggcgaagacaccgaaggaagcatgggatactttgcatcattgtcaccaagaagaatgatacgagatt

SEQ ID NO: 283629 - DNA, 806 bp, Cannabis indica
ggaaataaatattaattctttttgtttattcaaaattccaaagttagaaaaaaatcaaagcctttttctctcaaacctctctctttttcggccctttgaagcagcaagaacttgggatttttctttggtttctcaagctaattttgtgtgcaactcaagctttaggtattgttcttacccttgtcttccttgttttcttgaatttttgatgaaatggagtaatgcatgttgatttgttgtgatgcttgctgctgtgattttgttgtgattttcagaggtttaatcttgttattttaagtagattagaactagtttaatgcatggtatttgctttgattaaagattggaagtttttagctcaaaattatggttttcaaagaaatatgttgaatctgttgctctgcttgctgtagttgtttgctgctattttcagaggttaaattatgcatgtttaagtagatttgggctgaattgaatgcatgttagtggtgtttgatcaagtttgagtttagaactcaaagcttgatgctttaatggtggttttggtttggttgcatgaagcttggtttttatgctttagaattgttccttagggtctaaatagcaggtctggaagttttggtattgtttggtttggatttgaaagagttatgaatttttgagttctgcctgcgaggaaccggaattccggttgtgcatccggaatttcggatggggttcaggaattcccagaaccggaattccggttgcagaaccggtgtaccggttggagaattttttggaaccctatatttccatgcttttat

SEQ ID NO: 283630 - DNA, 663 bp, Cannabis indica
caaccttctcctcttggtggtaaaattaaaaataaaactaaaaataagcacaaacatataaggtaaatactaattacagcctatttcattttttttttatttatttttttaagcccaagcccaaaaatctctaagccaacacaatcaatattctcccaagataggtttgttagagagatatgtggctaagatgatttttttaatttaaaaagagattattaatatttaaaagattgtttatttaaaagattgtttaattttttgggtttaattattgggtttattttttaacgggagatcaaactaatcgttaaatttaacagaatattcttttatttttaagtatattctgttaaaccaagaaatgccgttaaataggcacttttaatatataaagatatatatatttagtttgctttgattatttggatcattacatataactaaatttatatatacatacatacacttgtaaatattatatatattatatatatgataattattatgatatttttattatttgagttttattatttaagattttatgaatattattatcaagttcatgtaaatctatttactttgatgttttttatttatataaattttattttttgtaatattatgttgctgttgtacataatattccaatccgcactt

SEQ ID NO: 283631 - DNA, 513 bp, Cannabis indica
agtgatgccgagttacaattctagttacaattctttttttttttcacatgtttctcaatcacgcaagattttttttcttttcttcaatacttccacacactatatatttcactcccccaaacttattgtaaggcttatgataccattcaaaatgtaatgaggacaaaaacaacagtgtggatacatcttttagttcaatgggtgaagaaacgaaacaggtttaggctcaaaagggttcactaaggatattaattttatggtaggcttgaaaggctcaaactatccaaacaaactgcctaaatcatgttcctagtaaatgttgtcaaggatttcgcctcaaaagaataagacatgcaagttctaagctattcaatcaatcttaccacaaaccacagtaaaacaattataacatatttcacagatcgtcaaattgcattcatacacaggttttacaagcatccaaactaatccaaagagttaaaagaattaagcacacagtttcaaaatttcaag

SEQ ID NO: 283632 - DNA, 493 bp, Cannabis indica
ggttatggtgtgggtttagagaagaagaagttgtgggtttagagaagaagaagggcactggttttgtcgagagaagaaaaagcaaacaaaaaaaaaagaaatgtcatacatattaaattaggtagtcatatgatcatgaaactatgttgtaagagtcccgaacaagtgggactcatagtcaaactactagtgatgatttttggcattaattaaactttttccttttctactaagacacattatttaagttgcaccttaatatatatttgtatttatattaatagttattaatttatataaaaaaaaaatcaattaataataatcagatggaatctcttaaaatgtacacgttgaaagcagcttagaatccatatatacaatgattattaccaaggagaccttggagatcacatgggtattatctataaacacaaaaatatgttaaaatccattagtaatcagtagtacttagtattattttacgtgttaaaat

SEQ ID NO: 283633 - DNA, 658 bp, Cannabis indica
gatcctgcgggacttgtctgctgaaaggggggcattccaggaggaggctgagcgaaaggaggctcttgctaaggcaaagttcgaggaggaggctaaacaaagggaagcccaggcggaggcgatgctccgagaggaggtccttcggagggataggctggaggcgaggcaccgggaggcgctgagggcggagggcgaggctactgccaaggcgaagcgcgagcttcgggaggccaaggaggccttagacgaaatggccgccaaggtgaggtccttagaggaattgcaccaggcggacttggagtccagggctaacttagccgtggagatgaaggagctcaaggactttaaagaccaagccttaaagaaggctaagaaagacgagctcctctcccctgtttcctgcagccgttgcattaagcgctttgatgacggtgtctacatggcctggtcgaccaatggccagagtatcaagcttgacttctacccaaaacctgcggagatgattgccaaattttaggagaagaagaagaagcttgacgccatgcttgaggcgcgtattggtcctcgccttcctcctcgcattgattaggctgtttgagaacagcccacttcaaccaagatttttcttatttttttttatttacagctattttgcttt

SEQ ID NO: 283634 - DNA, 750 bp, Cannabis indica
aaccacctgaactttacggtttgtaacacttaaccacaaaaaccgaaattttggcggctaaactacctaaactcccattccgttttgctctgcacacctccgtccaaaaatcacagttaagtgccacggtggactgtccacgtgtacacacttgtacacgtggcaaatttttagtggtccacgtaatattagttttaaaaaataattataaatatttaaaaaaaattaaaaaatcagattttttttttttactttttttaatttaaaaaattaaaaattaaattttttatttttttatttttttttctttttcttcttcttcttcttcaaaaaccatccatccctgggacctcacagcctcaaccataaacctttgtagaattactagcccgaacagcggctcatttcctcagcgaggagaatgggtttcaaaatcctaccaagaagaggaaaggcatggctgtcttggatgaggggaaaatgaagttccatagaactcaaagttaacttagggataaaattagtttggtaattattcaactcaaagtttttttttttttttgaggttttttatgatctttctttctaaccctgtcatgtaagttaaagttacaatcatacagagacttgagcccaatttttgtgttaagaatattgtaccatgttttttttacacgaatgaaaaaatcatacaatcttacatatatatgttggagagtctttaatttatcattttgaagtaataagatg

SEQ ID NO: 283635 - DNA, 559 bp, Cannabis indica
aggccaaacttatccttccgcatcaatccgtggaggactctaacctctcccgggtcatctgtcccaatgtaagggcgccggtcgcggagaagaccttccgggacgagattatcgccacggcagagaagaaataccaggactatctctaccggaaggcccaggagaaggcatactctcaggcccaggcggcctccgggaggggacttcgtgtggggagtccggtggtaagaagaagccaggcgattgccgggaagtccgaggctaaattttttgacaagattcttcaagaagagattggagatcgtcccgccgggaggccccttcgcattgaggattcttcggagagaagggctcccaggccacagccttcggttccagagccaaactcaggggctcctggtgccagcacttccggtgccggcggtaagtctcctttgataattcattatgttccttccgttggcgaatatgccagtcgtaggcccgtagggttcgacgagcgtctatataggtttaggatgccctcgacccggtggggggatcgtttgaaggagttcta

SEQ ID NO: 283636 - DNA, 729 bp, Cannabis indica
aattacagaccatatagatattcgacactacaatgaccaatatgcatcgctaacataactcagttttcaaaattacaattaagaacgaccatgtgtatatgatgaagtaccttgacgcatttttggaagttgtcttcgtaaaacagtgttgaccattctcgttctttcgcaatcctcttcacattaaacgaaccgagagttttttgctgcaaaagcattgttcatcttgtcaagtaacagaaattacaaccaaactcaagaagtacaaaatttaaaataagttgtacagcaaagcaattaccgagatgcgagtgggcatgtaccaaacacgaggttggtcaggtaatcggctatcacgttcgtacttgttcattagtatagaaaaacagtcaatgatctgcaacaaaatgaaatatgatttagacatgtacaataaatgatacatatttagtaactactttcacacttacggatccctcaacttctcgcaagggtcgcaacgatgccatgcacctcctatccacttcaaactttcgaaattttgcaagcacatatctgattcaattgtaatcaatgtaactgttattaaaaatttctataagtatatgataatgagaaataccaaaataacatttacttaccccggatctaatgtgttgctaaaaacaaacttgtaaaacccatattggttacgggggatcgcttccttcgtcttgaacggcccgacaa

SEQ ID NO: 283637 - DNA, 632 bp, Cannabis indica
agttgagacccaagtcccctcacaccgaaatcagtactatgaacaacaccgtaaccacctactcctggaggaggccctagacttactcgatgaaagaagagaggagtcacaattacgtaatgccgctcaccagcaacgggtaaagaagtattatgactctcgtgttcgtaatagggagtttataataggcgacttggtgttaagaagggtgttcttagcgacgcgtgatccaacagctggggtccttgggcccaattgggaaggaccgtatcagatcgaaactgtcttgaggcctggagtatacaagctcgctcgccttaacggggagcaagtgccgcgagcgtggaacagtgagcacttgaggcgatactaccaataggtggaagtcctcctcggtcgggggtccttaccttactttgatatttagccaagtttcctcttagttcatttatttatttagttatttatttttatttttactttttatgaccaagatcttcattagattgtcatattcttagaaattcttaaagttgttattttcaacgctagaataaaactatttattatttattcaaaatatagttaaattgccaaacccaaaaacaagtcaccaaggataataatcaaac

SEQ ID NO: 283638 - DNA, 529 bp, Cannabis indica
ctcgagttaataaagaacacttccttcagaaaaaaaatgtggcccatttgttatagcaaaactaatataagatgatttttcttatggaataattacataagacactattttttgtaaaataattacatttttacgtttaaaaaattactttttctaacaattttacggtttttcaaaaaataacacgaaaacaagataaaatcaacaagaaaattacataaaagtataatgaaaataacatcaaaataacaacaaaaataaacatacagataacaaaaaatacaacaagttacaacataaaaagaactgtattttctgtaaataaaaatcaaaaaaatacgtaaaaatagttaaaattttagtgtaaatcgtatttttgtaaattttttgttgtttttatgttttgttgaataatcctttcttattgtattgctcatcaagttgatgaggatgttgttgctaatgattaataatatctattttcaaaaagtaaaaaatacacaattaaacttaattattagcttcatgt

SEQ ID NO: 283639 - DNA, 513 bp, Cannabis indica
actaggaccaggaccaagacctatgcccaaacccgaacgcagatcaaaacccaactagagacctaaacccgagccgagactaggactcaaacccgaacctagaccgggacccaaacccacacaataactaagacctggacccagaataaggatagggagctgggaaatagaactaggacaaggacctagtacccgacccagacgcgaacttgaaccaatgacctagctcgtgacacgacgccagaaatggaaccacactgggaccccgagattgagatctggatctggagccagggcttggacaaaacccgttatagtgtctggatttgggacccagccctggacctgaaccctgacaaggacccgaacccacacccggacctaaacccagtctcaaaccaaaaagtggactcaaacccgtaccctctgacccaaaattggaacaaaaacttgaagttgacaaggactggaacgaggacttggacttggaatcataactgaaattggacctag

SEQ ID NO: 283640 - DNA, 504 bp, Cannabis indica
ttaaaatagccaggtgtccacaccctaggcagccaccaagttacgcacttggaaaattacaaaaatgccccttagcctaaaacttaggtattttccaaaactaggggtaaaatggccaaattccataaccccgtctaaacttggtattttattttctccaatccatttctcgctaagaaataaggttctaaacttacccatgtaatcaaactatccatccatcgcattttctgttgtcgccgaggaaaaattacaaaaataacatatttcatatataattcataaaacacccctagagtttaataaaatctctgaaattgagaaattataactctaaaactcatttctaatattggggcccacaaataattaaattcataaataattataaaaataacagaaattagtgctaattgcctttactactctaaaatactaaagcggtcattacaattatccccccgttaaaaggatttcgtccttgaaatctaacctgaatagctc

SEQ ID NO: 283641 - DNA, 531 bp, Cannabis indica
gatgttgtagaatcaatattgaggtaattgtttctcaccaatttcagtcaaggtattaatgagtataaattgcagtcatttatgcaggggattggattctatattttggatcattggattttttagaagaagcttcaaatacaaggaataccctttcttggtatagagacagtattttcaaaagtcttagcataacagctaagaattttcattttgtgataaattattctagtttataaatttattgttcaatgtgagtgccttaatgattatatcgaaaattattttctttcatagatgtttactaacagatttatatatatatatttaactttttcaaaatttcagttgttgactttgacaataaaaatacaacatggttgtagacttgtggtgcttagagatcatctttcaaagtgactcccaataagcagttcaagcaatattggcatcacagatcatgcctacatatccagctccacagagaatgtttgaagagtttgaggggcatgtgccttcactttttgtttt

SEQ ID NO: 283642 - DNA, 862 bp, Cannabis indica
acatagttgatgatgaaacaaatctaaacaagaataagataacaaatatagtcagaacccagatgaagtacaatattgacaatacaagagaggatattattaagatacattgaaatacaagaagtataaggaagtgtaatcattttaaattaatattataagtataataaaattttaattatgaaattatatgtgtataattttaaattattaagagttttgttatataaattaaaataatttaagtgtaaaaaaaaaaattgctaaaagatccttatttaataataaattacaaaaaattaattaataattatacttaatttaattttaaaatataattaatcttaattaaagttttaaaaggaaataaattaacaggttaatatcaggttacaggtcatttttaattttttttatttaatttccaaattaatcacaaccatttaatagtgatccaatggctaaaaaaaatgtaaccatgtggttacaataaaaatgtaaccattagaacctcctccatatatatatatatataaaaatggcaaaaattttaggttttatttttttttatttatttatttattacatttgtaatgatttttttttacaaaattacgacgtgttgtttttctgttgtttttaaaaatcgttgttttgtacgttgctcatcgaaaaataatgcaattcttttttacactaaacgaagtattgttttctattgttttagaacaatatattttgactattgctgatcgggaaaataacaattttctcataaaaaaagtgaaaatctgcaacaaaaaatctatataaaaaaagtaaatataaaaaaggtccgtaaaaaatgtaactaaaaatataa

SEQ ID NO: 283643 - DNA, 520 bp, Cannabis indica
gttccatttctggagccgggtcacgagctgggtcttaggttcaagtttgggtctgggtcgagtactagctcccggtcgtagttctgtttctcaggtccttatcctaattctggctccaggtcccagttattgtgtgggtttgggtcccggtctaggttcaggttcgagtcctagtctcggttcgggtttaggtctctgtctgggttttgatctgggttcaggttttggtttaggtcctggtcctattcctagttcggttctagttccaattgcgattctgagttcgagtttgggtttgagttcgggtcagagtttgagtactggtatgagtttgggttcgggtctggatttctatctatgtccagatcaggcttcgggtgtggtttcgcctcctgggtcttggtcttggttcggtccgagtcccaagttccaatatcgatttgagtttggattcaattatgcgtctaagtccttggttgtgatcctggtctgggttcgagtttgggtccgggtccgggtc

SEQ ID NO: 283644 - DNA, 1027 bp, Cannabis indica
aatcaaaataaatacaattaccctcaagaataaaatgtttgttatgcttaacatatttagtttgatctgtatctgtcttaattctgccctttcttcaagtagttttttcatcgccaaattgcccgaggcttacgcttttttaaatccaatcgtggattttatgccagtaatccctcttctattttttctattagcttttgtttggcaagccgctgtaagttttcgctaagattttgaatactgtgctagacaaattcatcgtttatttgaaaacaaaaaaattatatcaatagatatgataagatcagactggtatagctgtaataaatcaggaacaccacatttcacttccttattctggtctttttccattgcaagacctcttgaagtcttccacaatgtctaattgtgggtatgaaagaaaatttttggtaatgaacaaaaactccactttgtattaaaaagtattttaaataacttttttgaaaattcttttctatttctagtctcaaaaagtactttagtttctttcttggtatcaaaataaaaatagaaaaaagtagggtatgcgatataaaatacaaatagagaatctattctcttttttcctaaaaaaaagaatcttggagattgtttaatgcttactctaaaactatttgtttacacggtagtaatattctttgtctctctattcatctttggattcctatctaatgatccggggcgtaatcctggacgtgaagaataaaaaataaagaagattttttgttttttttgcttgattttaaaaagttcttagtagggttttagctatttcccacttttaactataagaaaataactaaaaaaaagggaactcgcgaaaaattcgaaaggaaatacaaggttattgacgaaaacggaaagagagggattcgaaccctcggtacgaaaaattcatacaacggattagcaatccgacgctttagtccactcagccatctctcccccaattgaaaaaaaaaacatatatataataagaagggtt

SEQ ID NO: 283645 - DNA, 708 bp, Cannabis indica
aggccgattggaggatggagcaccacaagttagtgtcccaagccccaagcccaagagcctcccaatttttatttttattttggctaattaggatttttgtcccctaaactttgacatgtaccaaatcataccccctgaactttaaggtcattgaaaatgccccctgaactattgagattgttggatttaaggtacttttttcttaattttaagtaaaaaagtactaacatgaatgaaagttcaggaggcataatttagtacatgtcaaagttcgaagggcatgatttgatagatatcaaagtccggaaaacatggtttagtacataaacaatcattgaaatagtaaaattgaataaaattagacaaaaggccttaaatctaacaatctcaatagttcaggaggcattttcaatggccttaaaagttcagggggcatgatttggtacatgtcaaagttcaggggacaaaaatcctaattagccaaaggagaaggctaatataaaaaatatgactagaataatagaaaactaaatcaatgaaataaagggaaataacaataaatatatatggtataattgaatttgggtgatgtagacatccatatatataaatatttcataacactcctccttggatgtctataataattgtctcattaaaaaatcttgccagatattgtggatattgtctcacaatgaaataaatggt

SEQ ID NO: 283646 - DNA, 888 bp, Cannabis indica
ataattatataaatctattactcattgaagtctattagaaactctaaaaagctcacaatacaaaatttcacatcaaaaatctaaaaatgatcaactatgtagcagcaatgataataaccaaaattgcctagtcatatacagtcttaaaacttaaaagagtggcattattcattcaagtttcgactaagtgtttctgagtttgagttataatattgtgtcctgtgtttatgtccaaatattgtgtgtctggctaatctagtgaagaagattgaagttttgattctcaataaatagaatgaatataagtgtatactttgtagtaggtcattattgtgtcatttttaagttaatgtgtcaacttgaaaataattcatttaataaacggaatagaggagtcaatctaaaaatatttttctaccttaataagtagagctatagaaaacaaactcggtaactttttgaggttaaaaattgtaaatggttataaattcagagtaagtaacttgtgtgtggcagctggttaaagaagccaaaattgaggtttatgtatatactgacaactcaggttcacatttcaagttctgtaagactatactctcttccctgtcctattaacaaaaatttaacgtacacataacacatgaatatgactttctgcccgaaaccaagagatgattagaaagtagaagcaccgctagaactttcctttgtttgaagtaataatataataactaatatcttttattacatattaataattaattcaagatgaactttccaaagtatttttgaaacatcgtgggatatataaatgcaatacttttgtataatagcatgtagcatgttgtcttcattagtatttttcaaattttaaaatgaaaattaaaa

SEQ ID NO: 283647 - DNA, 529 bp, Cannabis indica
aaggagtatcgccatcgttttttcttctcctccgggttccgggcagtggaccatccggagctcctcactgagtgggtcaggattcctccttatgaacggactgcacctactcaggtttttcttcagagagcccaggcctttgcctcttatgaccgggctgatcttgacgtcgggggcttggttactacggtgaactgcaggaaggcaaaactcatccttctgcaccaatctgtggaggactctaacctttcccgggttatctgtcccaatgtgagggcgccggttgcggagaaaaccttccgggatgagatcatcgccactgccgagaagaagtaccaggagtatctctaccggaaggctcaggagaaggcatactctaaggcccaggcagcttccgggaggtcacttcgcgtggggagcctgattgagagaaggagccaggcgatcgctgggaagtcccttcacattggggactcagctgagagaagggctcccaggccacagccttcaactcaggagccgaacactg

SEQ ID NO: 283648 - DNA, 550 bp, Cannabis indica
tataaatacataaaaaacaacttcaatcgcaatatatattaaccagcaattgaaactcagaacaaatttccagcggtgggacatatatatagcatgattaactaaatatttcaaatgcaaaaacaataatttaatggaagatcaaattactataaatcctcaagaattaatttagggaggctcttgataccccatgttagaatactgtaaactcagaatatagccctaattaattcatgagaatcaaacaatagaatatagattagcggaagcgtaccggagtccatagaatcgatctttgattggtatgatcttccaattttttgcatcaaaaccttctctctggaactttagttttcttgatgatggggattcaagaatacgatatgaagcgatgcaaaaaatggggaccaatacctgtttaaattaatcctttttgactatttccaatttggcccctcatcaaattagaaattgtctaattggtatccacatattaaaatcatggcaatcatgcccttaagtcataaactttattccaaaatagacc

SEQ ID NO: 283649 - DNA, 761 bp, Cannabis indica
aaaagcaataatcacatgttaattagtaaaacaagaagaaaacaaatgacgtatatgtacgttaaatttttgtaaatgtgtcaagatgatgcaaaagaacaaaaatatagataaattaaggactctactcaaccaatagtattttttttttacgttttctcaaattagaaagaaaaaaaatctatatatacagctagcaatggacaacacaagtagataattaggaaagtattttgtggtgaacgtttatctaatcaatcaaacatgttgtctattcacaccatatagttggagatagacttataattctaaattatttttgaatgaaaataatgttaataagttggtattaacttatattataagttttataaaaaatattatgtaatcggtatctttatccgaagcctaaatttcgaaccttaaatattataataataattaactaataaaaagttttattcatagtattattttttatttaatacaatatgtattgtacaaaaagaaaacaattaattaataatttatgattcagtatatcagaccaataaatacgtaatacaatcaagaaacaataaactaaagatcacaaaattcaagtaatgaattaagcagtaaaatagaaaagaataacaccatgcatgtttagcgagttcaagccattgcaatgctctacgtcttggtcaaaacaacagcaactatatctttattgatatcagtatttacaaggttacaaaaaatctctacaaacttttcag

SEQ ID NO: 283650 - DNA, 561 bp, Cannabis indica
gaaaaagtggttgtccatgagaatttccgatatgataaaaaagagtaatgttgacctcgcttttagccaacaacagtgagtctgtaccaccatcgtacttgtggttagatttagaatgaagagcgattcttgattcttctctcaatgaaagcaccaaaatgttgaccttgcttttagccaacgatagtgagtctaatttagtaagcggcaagtagtttataacgattgatatatgataaagcaagataaagacataggaattttatagacgtttagccccgagcagttcggtaatagccgaatcctcgttatttgaattaactcaagaacaaggagaaaggttccttttcttgtagctcttacaacaatatctctgaatatggattcttagataatatctcttaagtaaaatctttcgaccctttgcctagtgaacatgcatcactatttatagggctatgagcttggagaggaagaatttcccttctcgttacaatagatataagcagaaagattgcatagtaaatacaaaatacagtgatcgtgggatttggatagcgt

SEQ ID NO: 283651 - DNA, 578 bp, Cannabis indica
atatgaattgtagcttttaaacaatcacgtaagggtctatacatgaaaaagatggttggcttcatcggggtattcatgggatcacaattaatatttttaggtctatccagatctgattaaatattaaattttatcgttcgatctgatctaattcatttcagtcattcaatcaatttaacatttattggatcgattctattcattgaatgtattttatgtatatttattgcaataattcaggtttatcaaatattttaaacctagtgttttttttcttcatcagattagatccatctaatattttaaatccaatatttattggattggattgaattgaattgaattggatatatctattctaaaattttaatgtatacatatattttttcacatataataacataaaatcaaattactcatctaaactaaatgaaaatattaaagagttcgattgaatatttgatgtattgaatttttggacatcccatctaatatccgatcttattattttttttttttgacgtggtgaacaaagtcacacatgataaacaatgcagcacaccacaatcggcggtgga

SEQ ID NO: 283652 - DNA, 559 bp, Cannabis indica
ttgtcaaaaaatttagcctcggacttcccggcaatcgcctggctccttcgcaccaccggactccccacgcgaagtcccctcccagaggccgcctgggcctgagagtatgccttctcctgggccttccggtagagatagtcttggtattttttctctgccgtggcgataagctcgtcccggaaggccttctccgcgaccggcgcccttacattgggacagatgacccgtgagaggttagagtcctccacggattgatgcggaaggataagtttggccttcctgcagttttccgtggtgaccaaacccccgacatcgagatcggcgcggtcgtaggaggcaaaggcttgggccctccggaggaaggtctgtgtaggggccgtccgctgatagggtgggatcctcacccactcagtaaggagctccgggtgatccactgccctgaacccggaggaaaagaaaaagcgatggcgatactccttgacgtgagtctgcctattatacggaaccaccccttcgttagcgggatggatccggaacccatagaaaccgtccttaagtt

SEQ ID NO: 283653 - DNA, 730 bp, Cannabis indica
agctcaaaggatatcatcgtttcccttctaaattcctatagaagctatagactccatatttatgttagcgctcccactcaattgcactaccgtgttcccaaaatgtacgtatcaccctgacccaaaagtaggcttaactaacaaatcaaagaacacgaatagcctttcgagattgagcctaatcataacaggattaagatcatttgatctaggatcaactacggcgatattaacttgaatagatattacggtaagtttataaatctaagtcaaagttcaacatcggtcccttccgatgcatactccatgcatccaacctgagctttactttaaccaatgctctggaaagaacatagcatttctccaaatgcaagtaaactctgttgtagattatcatatcagtaaaaccctgtgtctgataaatctagaaaactttattcacatagtcatgtttactttccaatgtgttgacaacacaataaacaggatcaagtatgtgaaaagggtttcagatgaattcatacattatgtacatataatcatgaaataaatcatgtgaaccatgcaacattaaatgttatttctaatctatattaataagtaaatctgattatattgaaatgagttttatttagggcataaaacccaacattattatggccttgcatgagtccaagggctgtacggagattttgaatctcagtatcatccctaaccgtcctgtgaagat

SEQ ID NO: 283654 - DNA, 657 bp, Cannabis indica
caagaaaagtaagagagttgaatcaatttaaaaatatgtcaaagattacttaaaaacataacacgtttgaaaaagaaggtgggttattttaacacatggtacaacaaaatcacacattactacttgaatttgtacaaaaattatctaaattagaatcttgggtagcaaaattacatatttaacttttattaccccgccacccaaacaacaaaccaagtaaaaacaaccacattgcaacacaaattccttactacaacaatacatcagagaaaattcaactcttcaactcttatttacagtaaattgtccaatcttagagattcaagtttaagaaatggttgtaaatatttctttggaccatctcctagtttctccaatcttataatatcttccattgcagagcaattcattacttccaagttaccacaagaataaacagtagtgtgccatgaggaaggctaggcttagcatacacttctaaatagatttaatatttctacaacaaaacaaaaagatgggaatgacattaattagtccaatatctattatttctgtaggaatttggcttggtgaattcccaaatttgccctacaccactcaagaaaagagtcaaaacgacagggacaaacttgtcccagaaaaattcaaattaaaacc

SEQ ID NO: 283655 - DNA, 229 bp, Cannabis indica
ccttgtatcctttctatcgcaaagtatcaccaagatctgaccccgaaactccttcaattgtttggattcttcacagtctcacatactatgattgaggactcacttgctatgggtgggcacacactcaatcactaatagctgaattttgttttgtgaagaacactaaggaattcgaaaataagagaagaaaagaagaagaagaagtctcaaaaacctagagagaaagaaa

SEQ ID NO: 283656 - DNA, 624 bp, Cannabis indica
ccttccgttcaagatctctagcccttgattcctttcggtcgcagagcattatcaagatctgaacctggatctctttctctccttcgggtttggttaccacagtcttactcactatgattgagtacttgacttgctatgtgtgggcatgacactctttcactcaaggttttaaattggatgaacaatgaaggagatttgaaaccactattgaaggtgtctctcatctacaagttgtcaaagaatgaaaactagatttggtaggttgaatagtcaagttgacaagaggatgagatgagagcatcatgttccttttatagtgtttcaactagggctttaggctgaattatatggattaaacaagaataaaattttggacaaaaaatcacttaagtgccgtccacttaaaggaccactttctagttacaattttgccactttatttcaataataccatatttttcaattcaatcttataaatgctaaaactatttatttaataattataattaattattcaaataaaattgtcatttatataatttattaattagaccgtacaaagtctcttaattaataaattgaccccaaaacctcttttctccacaattaaacccttgcttagtg

SEQ ID NO: 283657 - DNA, 295 bp, Cannabis indica
gctcgaacttctctttaacagctttagttgcattgtcacccggctgttcaggagacgggctcagtcaacacaaacatggcactttcactacgagagcaatattaatgttctctttccatttaggaaagtttgatccatttagcttattttcagtcaacagtgataacatgggatttgacatggcaattcaggatactacaaaataataaatagaaatcaattatggtttaacacaaaatcttattcagaaattattagcacataacaagtaagaatgacaagagaaaatactaaa

SEQ ID NO: 283658 - DNA, 863 bp, Cannabis indica
atgatttcagcttcaatccaataatatgctttctgacaaaaaaaaaaaaaaaaaaaaaaaaaaaaaaaaactacatatgtaatagaattcaatattatattaagtacaaaaaaatcaatgatttttaattaattttttgtgtatattaattacaaaataaatcaatgatttttaattaattcaatattattaagctcttaaaacacctaaaacaaataaataactatactaattatacagtctgaattggttagtaataaaaacaaaaatcaagatagtaattagtaattactaagcaatatatattatacatttaaaagtattaagtagtactatatattttctttttacctgagttggttttaattgctttaccaaatcggtaacttcgttgttcttaacatattctcgttttgcagcagatgaatttggagaatactgagatgtaggtgcttgaatagtaatattatttatgtctgctttgttattttcagcccttgacattgtaatttaaatgttagcttacttattaaagtaataaacaatcaatattatttaatcaaaaaatgatatttaatgaaggtaaatcaatttgtttaagagtcgtaccattgatgaagagtagttgcttcgtaattatcaggattgatttcgattgtacttgattcacggcttgacaacgacagtcctgtaggaaaataatattttcagcatatttaaatgtacgaaattgatagaaatatatatggtggtagttagtatataagtacctctcttagtttgaacaatcatctttgttcccattattattgggttgtttccagtaacttcagacaatttttcactaatatcttgtaccaaag

SEQ ID NO: 283659 - DNA, 679 bp, Cannabis indica
taaatacttggagtactggcacattacctcatttcataccattcgtgttaagcaaacttcagagcaaaaagagagagttttcaggcttcaaagttgctgaagagctttcagacgatttcaggcttgcttgaatccggacactcgaatctttgagtaagtttctgatcccctttatatttttcctttgcatgcttgtgctttgaatgtaactttgctgtagaaagaacatcgtaggaaaccctagggtttgaaacttctgcgactcttattttccatgtccttgcgttagctttcaaccgtaaggctcgttttagaactgcattacgtctgttttccattatgctttcttcaagcttcatgaacatttttgccctaactcaagaaaaactttctgacttcttgagtttagacttttcttcgaacatgaccgttctttaatctgttgagtactcctggtcgccatatctgcttgttttttcgcttgatactccgtccaacactcatcttgcacgttgtcttttgtagataaacctttgtgagtcttgggagcccgagcatcaaatcgaccaggaactgcttcaacttctgcactaagtccatccttgtcttcgtgctaatccttcttctgattccgtacccagccatagaatgatggttcgtacgaagaaaactacgcgtc

SEQ ID NO: 283660 - DNA, 1658 bp, Cannabis indica
aatgcaaaagttttaatttgacacgatttttcgagaaatttctttgattagcaaagatcgcacaattattgaaaaagcactgtagcgtgccttagcattagggcgttacaattgaacctgtcaacaagttaaccatggcaatttagatctaacaataataagttttataaaacttatttcataatcaaacaatataaaacacaaacatgtaacaagttggatagttggatataggatttatttaaattttgataaattaattaattttttaatttcgaaaataaataaatttattatttagttatttattttttgaaaaaaaattaaaaaaattaatttaaaatttaaacctataaatttgaaaaattaggtttaactaacccaaatatctatttcaaaaaaaaaaattaaatattcaataaaataaaattataaataaaaatcattttttttttatgattttataatttaatttttaaataaaataaaaaaatttaaaaagttaagcaaaatgtgttatttcaatttaaaatttcatgattaaaataatcttattttaaattttacataaggtcattttataaaaaaaaattaaataatttaaaatattaaatatctaaccttaaatttaaaaataaggtaaaataatcaattttaaaaaataagataattattaagcaaacactactacaaaaagggctattcccaacggtttataactgtcttttatatgatttcccaacggttcctaaaaccgttggctatgtgggtgtcataaaaatgcggaactttaaatgacagtttataactgtggcaaaaagttactttaaatgacggttaagaaatgttggaaaaagtcactttaaatgacggtttataaccgtggggaaagacttccgtgatggaaaacatctctttaaatgacggtttataactgtggcaaaaagttactttaaatgacagttaagaaatgttggaaaagactttagtcagactataactaacaaaatacactacttaaaatgacggttataaaccgtcagacaatatgaagtaaagtataaaatagaaatattaattcaattctcctcttgtatttttattatttagatttccaatacacaatgatgaaaaacataataacaataataatatttttataagaaaattcatacatttaacactcttcaaaagaattaaagcttcatgaaaaccataatatgccatcaaagtttagtaatgcaatacaaaagaaggaaatccaattaagtttttacattttgcaatcttttgtagaatatcttctgaacatctaaaaatatgtatactaagaacaaaataagtctccaagtagtcacttgggactttaatcaaatagctggagatcacttcctaaaaactaaaaaagcaagacaatagtaactaagatcgatgtcaaacctatcaatcattggtcatcatactctatgttattagtcatttgcctgctgctatcatctgcacgacatactttgcccattcgtcacgtactttgttagtgtaagaggatgatttgttccttttaaattgcaacaaacgaaacaaatcattaatttaataggtcataataaaagtagttaaaaactttaatatttatgaaaataattagtgtcttcacc

SEQ ID NO: 283661 - DNA, 749 bp, Cannabis indica
agatcctggtaaaataaattccaacagtatgatacgggataaggccgttgaatgtagagatatccctaccctacatttgtctgattggtgcatgacattgttatggtaaggtatgatacaacgatagtgttgttgaatgtagagataccttattccatagtaatggtagggctaaatgtgcctaagttattgtagggccagttaggcccaggttgtgtatgtagtggctatgatacgccacattatggtaaatacatgatatgattgaaataattattatatgtcattggtatgattgtgctatgagtatgatgtcagggttgtggtgcctacatatatgtaatggtttcgtttagtacaaatatatggtatatgatatagcttttcatatctggagttatttaaattacaattatgagctaaggtatataatattgttaagactggatacgttaatgttataaagaatcgtattattgtgaattttaagatatgtttagtgtattgaatgctattgtatgttaagcatttccttactgggcttttagctcacccccttacttttccccctacaggcaatagacagggaacattgaatgtaagtttgatgagctgggtcagttctggtatgtatactgcgaggggctatggacgagcaaacggtctagaacgccggtggagccttggttttgtttttttgtttttttttttattaataaagtaatctgagctcagtgggatgttacaaa

SEQ ID NO: 283662 - DNA, 669 bp, Cannabis indica
accaagaaaccggtttcttagacttcaagaagccggtttcttagtgatttttcagtgatttttccggcgacaatgccaattccgacgaattttctggcgccagcagcaactccgacgacttttccaacaccgaccgctactccggtgacttttccggcaccggtagaaaactccggtgacttttccggcatcaatgacaaataaaacttcctaaacaaataaaaacattaaatatgggatttagaaacctaattacatatatatggcatatcaaataccataaaaaacctaaaaacaaaaaaataccatataaattggccaaacttaaatgtgccatatttatcataagaacttttaaattccatactgttgcccctgatttcgcccaatatacgtggaccaaccggacagggacacgtggatcaagcaattcataatatttgctaagtcttttatgccacaaggtaacatcccggacgtagatcccagagaaggcacccggagtttaaggtgctcccggaggctcatacaacactaaggcatctccgcgaggtgtcaggcctctcctgagcaatcaagtcgcattaaatgccgcatgggaggaagcgtgttgagactgcaacacgcaataaagtctgacggcacaacctccaaccagcagcgccacag

SEQ ID NO: 283663 - DNA, 682 bp, Cannabis indica
tagtaaaaatgaagaataacttttgaaatcggaagaagaagaagctctctctttattttctagttgtctgacaaaagagattgaagtcaattaagaaaactagggccatcctattctatttataggattccttctagggttaggcttataatttaaatagaattaaaaaggacaaataatagctttattgaacttaagtggccggccatattatgggcctcactagttttaatttttgccatttatttaactcttctttctttcacaaatgtcatattttaattctaactttataaatatcaattctatctatttaataattataattaattatcaaataaaattatcattatttactaattagaccttgcaaagtctcttaattaacaaataaactaaattctcttttcctctcaaataagctcttccttggtgaaaattcacaaacaagacatagtcttatttagaattctaattgattaattaaaaccaattaattgagactacaaaataatattattccagttagtgtggggatcatggccctatgtaatcaagcttccaataagcagatttcttaacttattaattcctcctgacttcattatagatttggaattgaactcttaattacatagaatgctctattaccaaaaatagatgcaatttgaattacccattg

SEQ ID NO: 283664 - DNA, 532 bp, Cannabis indica
tccagatgaggtgtccaagcatactctcctgtagcaacagtgttcataaaaatcttatctaatttttcctctacttctggttcaattccccgaatgcgaaactttgcagcatcaggatgagtctacaaaaggaattttgttaattaaatgtaccattcataaaaaagtcttttagtttcatataaatatttaacaagattataatgtacctgtaatttactattccaccaatcttcagttgcatcaattgtattcttttgcatactccatcctaaaccagtttcttttcccttgagttgcttccaaagcttccattcatttttcaatccatcccacttatttttcagctgggctctagtgtaatctctttcagttgcttttttcatatttgtaatcaagtttagatatccaattttatctaaataagtagtaggacgatgtccatcatcaacctctttgatacagaattccaagaaaaaattcacactctcagaattccatattgctttacctcgtggtactgctacatcac

SEQ ID NO: 283665 - DNA, 497 bp, Cannabis indica
aatacattctgaattcacataaatcaacgtaaataattatttaaatatcaataaataattttcataattaaaccttaaatatctgctaatttccaaattaaactaagcggtctttacaaaaactgtcttttcaaagattgatgtccaatcgggctatcatcagttgagaatctgagaggaggatatcccaaagacaactttccgcactaggtatggacattatgaatttctggttatgtcttttggactgaccaatgctcctatagcttttatggacttgatgaatagggtattcaaggatttcctcgatatttgcattattgtatttatcgacgacatcgttgtgtactcttagtcagaagaggagcatgagcaacatctctgaatggttctacaacaactccgggaacataagctttatgccaaattcaagaagtgtgaattttggctgcctcaggtgtcctttcttggacacattgttagcaaggatgggatca

SEQ ID NO: 283666 - DNA, 612 bp, Cannabis indica
ccaattaataattttattatttaattatttaaaataaaataaaatctaatgcaatatttaatttcaccccaattaatgattttattatttaattatttaaaataaagtaaaatctgatacaatatttaattataactgttgggaatacttagtattctcaacggtttataactgttgggaatactaagtattcccaagtattcccaacagttatattagtattcccaatagttataaactgtcggcatttattattttttatatatattttatttagtattggccacagttttccaccgttggcattaatttttcccaacggtttatttgcttcagttctaaaccgttggaaaaaaattttgctgaccttttccaacggttcttataattgactctcttattaaccgttggaaaaagcctattttgtaatagtgagggttatataattgagaatctaattcaatcatgatttcaatattctcataatcatatttgatgactaaaattatatgttgttacagattcacttacataccctaaagttgtataacactactcacagggtttgacaaatacacccttacatcaaatacaacaaagatcaagactaaa

SEQ ID NO: 283667 - DNA, 771 bp, Cannabis indica
gacataacatcgacatcatgtcgatattctgtcgacattatcaaacattcataactggtcgacaaatcatcgacatacaatcgacatgctatcgacaattatcataagagcagtgacacacgaccaacatcgacaacttatcgacatacagtcgacaaatcgtcgacattataccaattaactaccatacgaatcaactctaacttccctatcgacaacctatcagtcgacaaattatcgacattctaacagtaaactaccacaagaatcaactacaacttattatcgacaacctatcgacacactgtcgacaaattgtcgacattctaacagtaaactaccaaaagaatcaactacaacttattatcgacaacctatcgacatatagtcgacaaattgtcgacattacatggcaaaactacataacatcaaacaaaggtaaaaccatcgacaaattgtcgacatgatgtcgacaacctgtcgacaacaatgttcaaacacataaacagaaacctatacatatcgatatcctatcgacatttcatcgataacgctgtaaaaacacacaaacaccattgaaacatatccaacatatacaacatgcaataattgacatctagattcgcatatacaatctaaaacaatgttatctgaagaacatacacaaattcgcattgaaatttctaaaatttaaacagaaaaaaacttaccgttggattggattggatcagtggttcagtggttcgtggtcgtggtcgtggatcgccgtgg

SEQ ID NO: 283668 - DNA, 331 bp, Cannabis indica
caaaatatcatgattatagtaatcttattttaaatttttaaataaggtcaaattattttaaaaaatatttaatttaaaaaatttaatactgaccaaattaatttatttctgataattagatttgaaaattgaaaagtaaaaattaaaatacaaaactatagctcggtcgagctcgtgtctgagcgcgtgcagccgagggttgcaccctcatccgcgcgcgtaggtgggtgacaccatcctgatatttttccgattttcaaaaatcaataactaattcaaataaaatcgaaattgagttccgtaaaaaaagtaaattgcttaattttttcca

SEQ ID NO: 283669 - DNA, 594 bp, Cannabis indica
cgagctttatataacaacattccattattcgagactgaaaagtctttatgctgaccaaccagtacctcatctcgaatcctgactagctcaggatcttctagttgtgcctttctgattctttctaatagattagattgaagtgtcaatttgtgcaactttccaactacaaactcaatccctgcactaaccatttcagaagctagttgaggggttatcaaaaccgtggtgcaaacctgcccgagacctcttctactcaaagcatcaaccataacattggctttcctggggtgatatagaatttcacaatcatagtctttaaccagttacagccacctcctttgcctcatgttcaaatctttctgagtgaaaaagtatttgagactcttatgatcagtataaatttcacagttttcaccataaagataatgccgctatatctttaaagcaaaaaccacagcagcaagctctaggtcatgagttgggtagcgctgttcataatcctttagttgacgagaggcatatgctataactatgtcagcttgcatcagaacacatcccagaccctgtctggatgcatcataataaacaaaaaaa

SEQ ID NO: 283670 - DNA, 521 bp, Cannabis indica
ggcggcaaaactattcgaatttttacatttttttaacacttaactacaaaaattgaaatgtaagtgacaaaactacccaaaaatccccctttatgtttagctatttacctctttcgttcaaaaatactatgttaagaaccatggtggacatgtcacagtatacacaagtgtacacatggtaactttttagtggtccacgtaattttaattattaaaatattataaaaataagaaaaaaattaattttaaaaattattatttaaaatgcaaaaaagagatgggctcaaggttcctagggtaaatcgagtaagttccagagagagttgggaccgcgaatctgggtttggaggatcggtgatggcttcatcgggggggatagaggcgtcgcacgagattatgaaaagagagacttgtaaggcgaaatggaaaaggaaaggggataaaaagaaaaaaagagaattaatttattatttattttaatatttaatgtatctatttttcatattttgtaataattttga

SEQ ID NO: 283671 - DNA, 525 bp, Cannabis indica
atttcggttcctcgcaggcagaaattcaaaaattcatatttcaaccaaatcacacccaaacaacctcaaaccttccagacctgttctataggacctaaataacatatctaaagcaataacacaacccagaatgcacagaattgaaaaacaccatgtgagctccaagctttgagtttcaaactcaaacttggctaaagctctccaacaagcatcaaaccatgattcaaactcataatcaagcatataacaactgcagaaactaaaacctaactcatgcaaaacactacagccacaaattttgaaaattctctttgaaaaccaaactttttaacaagaaatctatccaactagagcaagagtaactagcatgcaattcaacctaattaaacatacttaaatccacattttaattatgaaaacaacaacaacaatttacagcagcaacaacaataaaatcatccatgcataactcatatttttcatcatttttttcaagaaaacaagggaagaaaagctagacaataa

SEQ ID NO: 283672 - DNA, 558 bp, Cannabis indica
agctgctcaccgcatcttgcaatacttaaaaacaacacctggacaagggctattttttccctcaaacacaacaccatcggtttctgcctatgccgaaactagtttatccccctcaaatgttcaaatctctttcttttctgacgctgattgggggacttgtcaagacacaagaaggtccatttctggttattgcctttttcttggcaactcccttgtgtcatggaaatcaaaaaaacaacaaaccgtctctcgttcttcggccgaagccgaatatcgagccatggctaacgcaacctccgaactcacatggatcctcgctctcctcaaagactttggcatcaatcattccaccccggctttgctctattgcgacaacactgctgccattcacattagtgaaaacccggtctatcatgaacgcactaagcacgtggaaattgactgccacttcattcgagaaaaggtccaacaaggctccatcaaactactccatgtttcatctcacaacaacctcgctgacatatttaccaaagctctattgcctacccctttctccaa

SEQ ID NO: 283673 - DNA, 793 bp, Cannabis indica
tttccaaaaatttctagaaggcgagctatcactagatgagggggtagaaggaccataataccagctaaaatccctacagcatgaaattttgaatatatcaaaaggctcgattggtttttaaatcccagctcgcatctatgtgacctgccctatcttcaatggtaccatattgctcagctataccataaaatgactcatgacagttgatctgaagatggaatctagggtaccaactatcaaacttatgagtaatgcggtccacgagaatggaattccaagtataaaaattaagacgggagtcttggaaagtaactaatgtattatgctcaaccctaagtacagtaggtgaccagccacattgattaccttgggatgttccttcactagattcccgaggggcagtgctttgaagatattgtgcttagaccaagcgatcccagacctggtcttcgggtggaacaattatttgctgccaagaagtatagttgggaatattgtaatcgcaagtgtattctttgttagcgagaaggcccgtcgatcgcaagtttacttcgttcaaaaggaatttgcatgatcgaagaccgtaaggaagagtcatcaagcgcctgtgcctactaaccatcttgggggtaggggtaggtctcgtcagaagagttgtcaaaacaaacaacacattagtcaagcaacttaaaaaaaaaaagaactgatctaaacaagaaagaagagaaccatcatttacagagtttgcaaaatgtggttgtgccaatgggggagagaccagacgtccagaaga

SEQ ID NO: 283674 - DNA, 511 bp, Cannabis indica
tagttgaaacactataaaaggaacatgatactctcactcatccaattaatgtcaacttgactattcaaccaaactcaagttctttccttagtgttttctcatctccttcattgttcttcaccattcgaaccttaagtgaatgagtgtcgtgcccacacatagcaagtcaagtactcaatcatagtgagtaagacggtggtaaccgaacccgaaggagagaaagagatccaggttcagatcttaataatgctctgctacagaaaggaatcaagggctagagatcttgaatggaaggagtcattatattctgctacaatcaatgtaagattttcttaaaccattatgtgtttatttcattgttttagagaattcatatttaagatgttaatttaacatacttgttagtaaatctagatcctggaaaaatattcccaacaactaccctcagagccatgataatgatttactttcacgaaatatggatttaaaacgatgtttgtgttgatttgga

SEQ ID NO: 283675 - DNA, 597 bp, Cannabis indica
tgcctttaatgcttctgaaaatattatttctgatgatgaaaatgatgatgaaatggttctgttggcaaaaaatttccaaaaattcatgaaatctgctggaaataaaaagaacttttcaaagagcccaaaaggtaacatttctggtaatattccctctaaacctttttcatctaacaataaaaaaggtattaaatgcagagaatgtgaaggttttggtcacactcaatccgaatgtgctaataccttaaagaaaaataaaaagggattaaatgttacttggagtgatgattctgagagtagtgaggatgaaaaagaaaaggttgtcctaacaagtgttttgtcaagaaatttgcaggaaaaagaaaagagcatttgcttgaacaatatcctgatcgatgacaacaaggaagaatctagatccgaatcagatgagtcagaaattgatgagaattctatggctgaatcctacaaggtaatgtttggtaagtggttggaaacatgtgctgaaaatcgctccctggttaaagataataaagtcttgtgtaacaacattaatgagttggaaataaacttaatgttgtgaatctgaactgtctt

SEQ ID NO: 283676 - DNA, 452 bp, Cannabis indica
aacaaaatcatgtcatttgtgctctttctctcataaataaatgatcgcaaaataacaaatgatcatcatgtatgctagagttcttagacaaaattaataaagtagaactcatacacaggtaagaacaatctattaaatattataatcaaatacattaatttactatcgaaaggatagataaattgtgattcataatatttaaaaaaattttcttcaccatattaagcatccttagcaaacaattattatcgataggataattcattatttatgatcttaatcttatatgggaggaagatacaatatttaaataaattaatatttaaatgttcctcattaccaaacaattttccatgcttaatcttacgataggtaagaaaataagcactaattgtttaaataaacattaatttatgccataataagataatattaataactaagattatgaa

SEQ ID NO: 283677 - DNA, 1216 bp, Cannabis indica
tgcgttcttctttgctacccgtaagagtgggtaacgatgcatatttagaaccttattatcctaacagatttgctcgccagtttggtttcgatcaaggtgtgccctcagataagttttgtctgagtattcctaggaggaggcagtgtggaataagcgaaatcgctaaagcttgggttttaatattaaggagaaatactggcatccactttcacattcctaggactctccgtatgggtcaatgcacgtggtggtactgtcgttggtgggtgaggagttgcattccatacttggggagatctgtgaaggccattcattcaacattgtccaagcaaccattcaaagaagaggagtcaaattatgtgatcaaagacattcgcttactttactccaaccctgaagaagtttttgagagatgtcctccccaacataatgaatttactggcgccaactatgctgatactgagtcggacattggatcagaaaatgtccattccttagtcccacatttcaaacaaaagaaacgtgcgaagcatgacgagtctagtcgtattgaagatgtcttcttcccactaactcagagttcagaaatgccaccatctgatacttgcttcggagcttctagctctagggatgaacaacttatcgactttgatgggtctgatgattatgttaacaaaggatttgacggtgaggtattgcctgcagagccaaccattccaccagaaccgattgtctcagcaaagacgggtactccatcatcacttgttccttcagatttgcttattcctcgaccgaacccggtgttgacagtgtcagcttcagcaatcaccaactcagacttgaatgagcataccaaaaagtttgtgattgaatgcatgaaagacattcttcattagtcatcttcagacatttcaaaacatcgtgctgacgtgagtatgcaactcgacgtgttgagtaccctttgcgggcattataaatgtggtttagcagaggttgcatggttcactgactctgtcaatgatttgctcaaggcccaagaaaagtctcttgcttctgctcaagttgttgagaatgcccttagtctttatgaatctcttatcatggatcttcttcgtcgtgataaggataatttggcagctatagatcatttgtccatatctgtcactaacaagacaaaggattttgaaggatttaaagcaaaggaagcagagattat

SEQ ID NO: 283678 - DNA, 486 bp, Cannabis indica
gtagaagtcaagtcaaagtttgtttgttactcctccaggacacagctccaccagcaaacataaacacgtaaccagatgtagatttacgtgaatcagtgcaaccagcgaaatctgagtctgagtagccaactacttctagattgtcagttcgtttgaacatcagtttgtaatccttagtaccctgaagatacctcattactttctttgcagctttccagtggtctatccccgggttactctgaaatcttcctaacattccgacagaataagcaatgtcgggtcttgtgcacacctgagcatacattaggcttccgacagcagaagcataaggaatgttcttcatttgttctctttcaaaatcattctttgggcactggctcaaatttaatttatcacccttcataattggagcaacgctcggtgaacaatctttcatatgaaatctttctaaaactctgttgatgtaggcttcttgagataaaccta

SEQ ID NO: 283679 - DNA, 706 bp, Cannabis indica
atcaattatatctcacactattatctcaaaaaaaaattatttcccacactaattcaattttaaaatttttatttctaaactatacacacactaatatacacacaatatatacacacatattcaataaaatataaaaatacatatatatactatatattgagctttaaatttttacctaataaccgcaatccgacgagcaattccgtaaaaaatccgggcactatacacaacaatattaccattaaaattaaaaaacccaaaaaataatttacaaaaaccaaaaataaaacaatgtacattataaaaatgaatagaaactatatttataccttaaaagaggttgagattcaatgttttctcaacaaaaaatggtggccggagttatacccactatttttgtataggttcggatgacagttaaatagggaaaaaaattaaaactttttgggtgtataggattaagtatcgaaaatagaagattttgcaacaaaaatgggctcaaatggttgagaaatgggggagaaatgggtggtggaggcggtggtcggcgagggtttttcgtctctgctaggtgctggttctttggctttggctgggtttggtcgagtgaggaagaaagctgagggagggtttgttttataaccctatgccgtcggttcctttataggaaccgacggcataggcactacaacaaatacacccttta

SEQ ID NO: 283680 - DNA, 547 bp, Cannabis indica
agaacctgaacaagaatcgccgaaccaggaccctagataaagactaggaccatgaccaggacccggacccagacctagaactgaacactgaactagcctcaaacccaaactgaaactggaactcgtgcccggacacggccgtgtaccaagaccggaactaagacccggacctggacctaaatctgggacccgatcccaaatacagacttggacctagatagggatccagatacgaacctggactcggaccaagacccagactaggatcgaaatgctggacctagatctggaccgagatcttgacccaaacccaaatttggacgcgcactcgggacacgaacttggacctggaccgaaacctagacctagatcggggtccagatctggacacaaacctggacacaaactcggacccgaactcaaacacccacacctagaataagaccgaaagctagaccaagactcggacctaaactcgaacccagatcaagatcagaaccaaggacttagacccagaattgaatccaaactcagatcgggattggaa

SEQ ID NO: 283681 - DNA, 773 bp, Cannabis indica
aaagtactgttctgtttacattttttaaggtgtcgtctgtctagcctcgttaagtcttaagttttgcccacgtggcaatgacaggtcactaaaaaattatcctatgtggccatattttacaaaataaaaatttaaatgagtaattgaaataaaaataaaagttttaagagtaatttgcggcaaaacccctctaactatcaatttacttgaaaaatcatccaaccttaaagttttttgggtgcttttttgcaagtaaatcgatagttggggggttttgtcgcaaattacttaataaaaaaagtacaattacttaaaaaaatataaataattataaatttcacttaaatcgtggtttcgaaccaaaccaaaccattcttaatgatttggtttggtttgaaaaaattatggggttttttcattagtgtacaacaaaaataattatattacaaaaaatgtgcaaaaaacacaattttaaaaatatacacatttgaaaatatatttacaaaaattcatacatatttttaattaaattataatagatatattaatgattcaactttctatatttagatttgtataactattttttatgattaattgatatggtattaatgagtaggcctactaattaacaaaatttatatattaataattaaaaacataataagattctaattataaacaataatattttaaatataagataaaaaaataattaacgattaaaaataataaacagttttaaattaataataaaaagtgaaaaaaaatac

SEQ ID NO: 283682 - DNA, 617 bp, Cannabis indica
agtgattgggagttttatcattccttttattgttatgacgtcgcctgtaaaaccatagatgctcgacgtcacaggtcgcaagtccttctcctgcaaccccatttgtttgaatgcttggaagttcaacagattcactgaactcccattgtcgacgagtatgcggtggacattatccccgccaatattggcgattataactagtgcatcggaatgcgggtgatggacccatctcgcatcactctccataaaggtaatatcgtcgcattccttcttgaacagtttctcgggccgctcactaagattgttgacattggtgaacgacttttctttagcttctctggcataccgctcttgtgacttgcgagagtctcctgcgatatggggtcctccaatgatggttaggatgttgcgaggcgctctggaaccactagcattttggttttctcctttgtcatccgcttggggatgactttcctcacccttcttatatttgtcgaactttcctctccgaatcagctcctcgatttcatcctgcaagacccaacattctaaggtagtatgaccaatgtcttgtggtacttacagaattttttggggtctcttctgtcgcgatttcc

SEQ ID NO: 283683 - DNA, 806 bp, Cannabis indica
agaaggcaattggctacacaatggttctcgacaacggctctagattggtggtcctcgacaatggcaagaccctagtactttgagagagaaagagaagagacaacaggggaggttgtcgtcagtacctttgttgacaaaggggagttcctttctgttagagagtcccgcattgacatgttagagaatcccacattgtcaatgtgtggaaagataatagaatatataagaggaatgggctactcctcccattgccaattggttttgggatggaacctcattcaccttatccccaaattctaacatggtatcagagcaaaataaacaaaaaaaaaatctctagcgactatccagccccaaaaaataaaccgatacgaagtagagctgaaaaaaaaaaaagaagccaccaaaaattcaaaaaaaattgatccaagagccaaattcaaaaaaagccacttgtgattcagggatatagtgagccaaaaataaaaaagagccaccaaaaatccaaaaataccgatttgaaaagtagagcaaaaagagtcacttgtgatcagggatagtgagctaaaaaaagagccgcttatgatcgagttgtccaagatgatgagcaagtaaaatagctaccatcttgaggggggatgttagagagtcccacactgtcaatgtgtggaaagatagaatatataagaggaatgggctactcctcccattgccaattggttttgggatggaacctcattcaccttattcccaaattctaacactttctctttcttttttgttcttttatatttttgagtttactt

SEQ ID NO: 283684 - DNA, 439 bp, Cannabis indica
aaataatacaattaagctgaacctaaccatatcaggattaagatccatagatctaagatcaaccattgctatttacttagaaagatataacggtaagtttatgacatcttatccaagatcaatatcgggacccctccaaaggaaaacaccatacatccgatactggtaaactttgtcaatgctctagaaatgacataacacttatcagaggtgtaagtataacttatcaccaattatcatgtagtctaaatctagtgaactgataaatcgtgggaattaaagttttgaacatacaatcatgattatattccactgtgctgacgacactataatcatgaacaaatatatatattcatgttctggacttaatagaatttatacattaactataatcacgaaataaatcatgtgaaccatgcaacataaaatgatttctgat

SEQ ID NO: 283685 - DNA, 696 bp, Cannabis indica
attagaacctcacaaggttcataaaaaccccgataggttcatacaccgatgaaaaccccgcgaggtccatgcatcaatatgaaccacgagcggttcacacatccaaaagaatcccgcgagattcacatttttattgtgcgatggtcttataagaaacctgcgagtttagataaccaatcgaaaatgtgacgcacaacatgaataaggcatcatgatctccgacaaacgcgggcttggactatttttagttctccagcacagagcaagctatactgaagaactaggggcatgtgttataggcataaatctaccctccccgcgagaaagacttgtctatagagaactcgctgtattgaaggtggctcgcaatattatagtactcgcagtaccgaaagaaaggatctcgcaatattaacttaaagagacctcgctatagtaagaaaggcacacctcgcatatttggtgaactcgcagtactaatagggaaaggtgcaaatacatacaccaattaacggaagtcaacagtcaaacatttaaggagcattcatgacaaacgttacatatatttataaccgttgtaattaatttgattaataagcatattattattattattattattatcattttgtaacggtctcattatgaccattatttgtaactgatgcctactacctataagtagaggctttcccc

SEQ ID NO: 283686 - DNA, 639 bp, Cannabis indica
tttaacttttgtaagaccaacaatggagatcggatatctcttgattaaagctcattattacttaatttaaagttggtccaaaattaattaaaaaattaattttcaactttaatttaattttcaatatttaatttttaaaatcattatataataatatataaaatttcgaaaattttaaaatataataaaataaatacttgaaaaatatctaatttaagttgttctaaaatattaaaattttcaacttaaattatttttcaaaatttaattaaataattgttgacttcgcttttagccaacgataatgagtctattttataagcgataaatgatatataataacagatatatgataaagcaataataagacatagggattttatagaggttcagtcccgagcagttcggtaatagcctaatcctcgttacttgtattgacttaagatcgaggagaaagatttcttttcttattagctcttacaacagtatctctaaatatataattcttagataataatatagtcttatctcaactactttttgaccgatccattgcccagtgactatgcatcactatttatagggctaggaagcttgaggaggaagagtttcctctctcgttacaatgcgtataaatag

SEQ ID NO: 283687 - DNA, 110 bp, Cannabis indica
aatcagatgcagtaaaagataaaactgcaaaattgcaaaaagtgaggcccaaatccatactgtatagggcaggccacttttctagggttttacctctgatattttcatta

SEQ ID NO: 283688 - DNA, 1054 bp, Cannabis indica
gattctagacctaggtatttcctctcccctgtctcatcccagtggatgggagatctacacttccttccatataagagttcatagggagccatccctatagtactctgataactgttattgtacgagaactctattaacggtagatacttactccaagagccttcaaaatccataacacaggctcgtaacatatcttccaatatctgaatcgtcctttcggactgtccatctgtctgaggatggaatgctgtactaaatttcagtttcgtacccatagcccgttgcaaactttgccaaaacttggaggtaaacttcggatccctatccgaaactatggactttggcacaccatgcagccttactatttctttgacatgcaaatctgccaactgatccactgaataggttgttctaactggtagaaaatgagcagacttcgtgaattgatctaccacaaccataatagaatcaagcaaacccgtggttctaggtaacccaaccacaaagtccatcgtgatgtcctcccacttcaactaaggtaaagttaaaggctgcaacaaccctaccggtctctgatgttcagccttgatctgctgacaagttaagcatgtcgatacaaattttaccacattcttcttcattccgctccaccagaagtaaagtttaagatcctaatacattttggtggtgccgggatgtaaggaatatggagtagtatgagccgcctcgagaatttcgtttctaagttccacactatttggaacacaaacccttgctttaaacaataacatcccattgtctgacactgtaaaacctctgtcttgaccagctgaaacctcttctctgatctttactaactccggatcagtcatctgagcgactttaattcgttctagtagatcagattgtagcatcaagttgtgaaggttgcctacaaccaactcaatgctagacctaaccgtgtcttctgctaactaaggtgaaatctgaatcatactagctacctgcccgggacccttcttgctcagagcatcggccactacattggccttcc

SEQ ID NO: 283689 - DNA, 889 bp, Cannabis indica
aataacaattatcagagtacgatagggatggctccctatgaactgttatatggaaggaagtgtaggtctcccatccactgggatgagacaggggagaagaaatacctaggtccagaattagtacagcggaccaatgaggcaattgagaaaattaaagctacaatgcttgcctctcagagtagacaaaagagttatgcagatccaaaacgcagagatgttgagttccaagtaggggatcacgtgtttttacgagtgtctcctatgaaggaaatcaagcgtttcgagaaaagaggtaagttatgccctagatttacaagacctttcgagattctcgaaaaggttggaccagtggcatatcgattagctttgcctccaactcttttagcagttcacaaacgtattccatgttttgatgttgaggaaatatgtttcaaacccgactcatgtacttagttatgagaatcttgagctgcaaccagatatctcttatgaagaacaaccagttcagatccttgacaaaaaggataaagttcttcggaacaagaccataactctggtcaaagtactctggagaaataacaaggttgaggaagccacttgggacttagaatcagacatgagagcttaatatccagagttgttcaggttaaatttcgaggatgaaatccttttaagggggggataattgtaaagaccgcttagctttaatttggaaattagcagataattagggcttaattattaaaattatttattaattctaaattattaatttatagttatttatttgaattcagaatgcattttatatttcatatatagaaatttcataattttgcatgttcagtcccgacaacattggaacgcagtgattggctattagaatcac

SEQ ID NO: 283690 - DNA, 1005 bp, Cannabis indica
gatcaccatgtgaaaataccctatcctcagaggctcagaaagtcaagtctagacaagcagttcaccaaattcctagaagtcttcaaaagacttcacattaacattccctttgctgaagctttagagcagatgccaagttatgtgaagttcatgaaggaaattctgtcaaagaagagaaagatggaggattatgagacagtggctctaactgaagagtgcagcgccattctacagaagaaactccctcccaaactcagagatccagggagtttcactattccttgtactatcgggagaattgaaggaataaatgcactatgtgacttgggagccagcattaacttgatgcctctgtcagtgtttaaaagattgcagctgggtgaagcaaagccaaccacggtaactctccaattggcggatcgatcactagctcatcctagaggagtcattgaggatgtgttagttaaagttgacaagttcatctttccagctgatttcattgttctggatatggaagaagatagcaatgtcccaatcattcttgggagaccattcttggcaactggccaagccttgatcgatgttcagaagggtgaattaaagctgagagtccaaggagaagaagtggtctttaatgtgctaaaggctatgacatacccaaaggcaagtgataactgtttcttcattgatttgattgatgaaattgtgggtgagaaaaagctgctagatgatcctctcgaactaagtttaactgaagatgaattgacggagcaagagggacaagaggtcatgggttatgtgaagtggcttgattcctatgggcccttgaacagaaggtattatgaggaattgggagcagttccaaaagagctgatgccatctactgaaaagcctccagaacttgaattgaaggtgcttctgttggaaattattttaccaggatcctagatctactcacaagtatgtttattaacaacctaaataagaactttctaaaacgatgaa

SEQ ID NO: 283691 - DNA, 735 bp, Cannabis indica
cacaagccataggtttagataaactcaaacctataatactaggacactactacaaaaagggctattcccaacggtttataactgtcttttatatgatttcccaacggttcctaaaaccgttggctatgtgggtgtcataaaaatgcggaactttaaatgacagtttataactgtggcaaaaagttactttaaatgacggttaagaaatgttggaaaaagtcactttaaatgacggtttataaccgtggggaaagacttccgtgatggaaaacacctctttaaatgacggtttataactgtggcaaaaagttactttaaatgacagttaaaaaatgttggaaaagactttagtcagactataactaacaaaatacactacttaaaatgacggttataaaccgtcaaacaatatgaagtaaagtataaaatagaaatattaattcaattctcctcttgtatttttattatttagatttccaatacacaatgatgaaaaaacataataacaataataatatttttataaaaaattcatacatttaacactcttcaaaagattaaagcttcatgaaaatcataatatgccatcaaagtttagtaatgcaatacaaaagagggaaattcaattaagttttacattttgcaatcttttgtagaatatcttctgaacatctaaaaatatgtatactaagaacaaaataagtctccaagtagtcacttgggactttaatcaaa

SEQ ID NO: 283692 - DNA, 824 bp, Cannabis indica
gtgtgtgagttttttatcatagttgctttacgaaccgtatttttttgtctttaaattttactagttgataaatataatcggtttctttatattatatttgagttattgtgtgttattatttgtgtttatttattttgttatggaacaatttcttttcatatttatgccttaatattttttgaaattgatctccatttttttaaaaaaatataatcagttttatgatatattatgtgttatgaggttttttatttcagaactagttttgtttttaatttgtgtttcagtgttttaggaacttttaattataatcggtttgaattattgcatgttacttgtttgtattcattatgttatataatcggttctattttagttataaccggttttgagttatttcgtattattggtttttattcattataacactgttatagtaccggttctattttaattataactagtttgagttattttatgttatttatttttatttattatgttacaaaaccggttatatttcaattataaccggtttgagttataactttttattcatagaaccggttatatttttagttatatctgagacatctacttttggtgacttttctagtgactttttcagcgacggggattttttcggcgacttttctggtgacggtgactttttcgacaacttttctcgcaacattaactttttcagtaatttttccagggccgactacttttcctgtaatgaccgctctagtatgtggattagtaaaggcaattagcactaaattatattattttattattatttatgaatttatttaattgtg

SEQ ID NO: 283693 - DNA, 628 bp, Cannabis indica
gagagaaaggaagaaggaaccagagataccctcccgtcgatctaagaaatcaaatcaacggaaaacatggtgacctatgggatcacctagaccaaaataaacatacaccggcggtctccacgggaaagctgaatgagggaattatggctgagcttgccatactacgcaaggatattgctcgagtctctcggagacaaaaaagggatgactcagactctgactgtgaggaccgggaactgtgcgcccgacacattttggaggcagatttccccaaaaactttaagatgcctgaaatggcagcttatatcggggactcggaccccagcgatcacttatctctgttcaaccgagtaatgacggtcatgagagtcagcaatgacgccaaatgtttatgcttcccactaacgttaagtggatccccggaggaatggttcaagaagttggaaccaggatcagtggactgctggaacaagttgcaagttagtttccagagataatttgtcgctgggagaaagattaatctcgaagtcaatgctctgactaacatcaagcaactacccacgaagacatttaaaaatttcataaagaggtttaaagaagaagccttgaagactaagaaagttgacga

SEQ ID NO: 283694 - DNA, 602 bp, Cannabis indica
aaaagctttgtacaggtataggtgccccccaagtgaccgagcagacgtatgactcttggtcacttgtcttttacaagtatattgtttatcttttcggtattttgggtttgaccaaaccttttgtacgcactggatggtaaattagaaacatgctgataatttcgactcaatttgaattttgaaataactatctttattcatttattgatcgaaaagtgtatttgttaccgtagtaacttacatcagagctatttgatccaatctgatcttttagcttaacatgagataaaacaaattgcagaaataagaaactgtactttaaatggtggtcacctgacctgagtactttgtttcttttatcgaaacctttgagcgtagtccgcccagaaggccattcacttaaaagtaaatgttcattcagtacttaatgtggtcatccgacttggtactttattggtagtattttcttaaatgttccccactccaataccgtggtactagaacgagttgcattttttcatcatacttacctaatttgtatgctccggagtcgagaacttcgaccacttgatatggtccttcccagttaggtccaagtacac

SEQ ID NO: 283695 - DNA, 497 bp, Cannabis indica
aaatacattgaggggtgaaacggtaaatttatcccttctcggtgtaaatcatctatatagaggatctttgatcaaattaagattataacgatggttaaatgagatagcgtatctatatcgtggaacatatagaacgctctatatatctgagagtgcaattccagaattaataagttaggggatttacttggtaaattcggttccactattagaagctcagtaacataggtcaatggtccccattctagttgagaccatactgcttgtaagactcaataattgatttatgatttatcaattatcaattctagaattagactatgtctagtttgcgaattttcactaagcaagggcaaaattgtaaaaaaaagagattctaggtttctttattaattaagatactctatatgtctaattaataattatgtcaaatgacaatattatttaatatgttagaattagaaaattggcgtttttaagaaaatagaaataaaatt

SEQ ID NO: 283696 - DNA, 293 bp, Cannabis indica
ataaaagcctacaatagtggccggccatagcattggatattgggccccacttttgtaattttgatgttttatcatttctacatctcattttctcgaaaatgccaattttcaaattcaaccatttaaatgccaatttcaatcatttaataactaatattaattattaaataatattgtcatttaatatatttattaatcagactagccaaagtctcttaattaacaaatgtaccctagaaactctttctttgaaattttattcttgcttagtgaaaattcacaaactagacata

SEQ ID NO: 283697 - DNA, 532 bp, Cannabis indica
tggccaacatcaaacaagaacctggtgagtctttacaagactatttcaaacgctttaacgcagaagtaacaaaggtcgagaaggcccccgagtcttcgcttgtttgcatgctgataacaggtatcttgccgaggaccgacttttggaaggagctacaagctcgaaggcccgaatccttagtggagttcttcgccatggccgaacctcacaaaagaatcgagaattctctagcggagttagagaaagggaaggacaagcgccggtcacccataccgcggtcacgatctcgcagtccacgagggaagaactccaggggccgaagcccaagaagacgcagcccgcgaagacagcgaagtccgaagctggccaagtctcctccaaagaaggaatcctcgccaaaaaggaaaggtggacctcgcttcgtcaattatactgaactcgcagtccctcgagaccatatctacgcaatcgaagaaagaaacggagtcttcaagaagccgccccccatcaggggaaatcgcgacaggagaga

SEQ ID NO: 283698 - DNA, 740 bp, Cannabis indica
tttggtttgaccaaaccttttgtacgcattgtatggcaaattagaaacatggttataatttcgactcaatctgaattttgaaataactatctttattcatttattgattgaaaagtgtatttgttaccgtagtaactaacatcagagctatttgatcaaatctgatcttttatcttaacatgagataaaacaaattgcagacataagaaactgtactttaaagtggtcacccgacctgagtactttgtttcttttatcgaaacctttgagcgtagtccgcccagaaggccattcacttaaaagcaaatgttcatttagtagttagagtggtcatccaacctagtaatttattggtagtattttcttaaatgttctccattccaataccgtggtactagaatgagttgcattttttcgtcatacttacctaattgtatgctccggagttgagaagttcaaccacttgatatggttcttcccagatgggtccaagtacacctgtcgtactgtctttggtatttaggaatacccttctcaggaccatatctcccacgaagaaattctgagctttcacttgtttgtttaaatactgagctactttttgttgatgggccatcaactttaagtttgcagtggctcctctttctttgatttcatcaagtgaatttgctaggagtatgtgatgggtaccttgatcgtacgtcaatcttctgtgaaaaggtggctcgagtttgacgggt

SEQ ID NO: 283699 - DNA, 101 bp, Cannabis indica
ttccatatccatgtttagcgcacccactcaattgcactaccatgttgaaaatacttttgtctctttattgataattaaatgatagagattacattgaaata

SEQ ID NO: 283700 - DNA, 626 bp, Cannabis indica
taatccatataattcaaccctaagctctagttgaaacactataaaaagaacatgatgttctcatctcatcctcttgtcaacttgacttttcaaccaaaccaaatctagttttcattctctgagaattagtagatgagagagttccttccatagtgatttcacctccttcattgttcttcaccatattcgaacccttagtgatagagtgtcatgcccacacatagcaaatcaagtactcaatcatagtgagtaaggcggtggtaaccaaacctgaatgagagagagagagagagagagagagatctaggctcagatcttgataatactctgtgaccgaaaggaacaagggttagagatctgagcggaaggagttattatattccgctgcaaccaatgtaaggctttcttaaacccttatgtgtttaatttcattattttagagatattaatatttaggatgttaatcaacatcttgttagtaaatctagatcctggtaaaatattcccaacacttttgccatatggggaatagaccatatcaaacaattacctaagggaaagtgtaataccctaggattaaggaaatggattagcaaaaccctaactagttaattgagtattattgt

SEQ ID NO: 283701 - DNA, 681 bp, Cannabis indica
agaggcagaatcctaatcaaccttaaaaaaacgagaaaattttatttttatggggtttaagagatacatttgcatacataaaaaaaaaaaaagataattacataaagcactaatttttgttaaaaaaattatatttttacgtttaaagatttattttttttttacatttttacggtttttcataaaaacaacacgaaaacaataataaaatttcataaaagtaacatgaaaataatatctaaataataacaaaaataacatatagataacaaaaaatcaataataaattgacaagagtacaatataaaaagaccgtatttttagtaaataaaattaaaaaaaattccgtgaaattgtatttttataatttttttttgttatttttgtgtatttgtgaagtaatctcaaaataaaaagtataccttttgcaaaaaatataacttatttttaaaaaagttattttattagaatttttttttaaaaaaaaaacatatgaaaaaaacaggataaaatagctggttataagagagcctatcctcctctaattactccagggataacccattactattatttaattttgggatattggcggctaaaccacttgaattttacggtttgtgacacttaaccacaaaacggaggtgtgcagagcaaaacggaaccagagtttaggtagtt

SEQ ID NO: 283702 - DNA, 715 bp, Cannabis indica
tttcctttgtgcaggccagtttgaagttggcttacacttactcccgggctaaatttgttacttccaagagtgcggctctgtccgacaccttgagggcggaggcggacttggccaaaaaggaagctgaggaggccagggcagaaactgaagctgttcggctggagttgggcgaagccaacaagaaactgtttgctgccgagaagaagatctccgtgctgacaaaggatctcgaagctgctgatcgctttgaggagaccatcgagattttatctgctgaagttaacagtctttaggatgagaggacttctctgcggcaagttcttcttcggatgaaggaggagaaggacaccaagggggccgaggcaaacaggttgaaggagaaggtcaatgccttggagacagccggcctcgagctcttcttcaacttctggaaggctaatccccatgccaattttgactacttgggcgaggctaaggacatgtaccttgagtactgggcggcccaagttgcttatggtgggaacgaggcggctacttcaacctctggccgagcctctggccaggctggtgatgcttctcctgttcgaacaacatatcctcctgttccagttggctcagaagaactgaaccaagagcctgggactccagctgtttgaacacttatctttttatctcctttttatatatatatatatatatatattatatgcggcct

SEQ ID NO: 283703 - DNA, 589 bp, Cannabis indica
ttgacttcccaaatatatctgaagcaatatattctcattagaccattagtgttcccacctccctttattacaagatcctcaagattcttattcttcaatttatttaattaattataatattagaatctgaatactaaaattccaaacacgaaaattcctaaaaaatataaaccaaaatatagctaataggaattagcgtttaaagtaaaccctcttaaaccttatttcagtttaaaatattctttaaatcataccttaaccaaaataatccttttattccgactaataaatctgtatagtgcataactttaactttaaaatattattctgtcaaaattttcttatacattcaataccgaaaaacgtgaaaatttaaacaaactaccctaaataattaggggcccaaccatataataggtgctaaagccttgtaaggcgccaaagccataaataatggcgcaaaatagaacaaaatcaatataaaacaaacctataacaaaattaacagtatatcccattatatcagctcacccaaaaaagaacaaaatcaataacaaacaacaagatgaaatcaactatccaccatttc

SEQ ID NO: 283704 - DNA, 536 bp, Cannabis indica
agatttattagcatatacgatatataggctatacaaaaaggctatcatgtaaacaatgggtaaatttttagttgaatatgctaaaataaactaatccgtttatttcgcatgtatgagtataggcatagtatagccatatatgccaaataactttatgaacaaggcattttatgtgagcaagacatctcatcatattcaaatatttgacaagtgcatatattgttatccaagtttactatgtaaatctgtaagacatgttacaatcatgtacattgtatacaaccagttttaatgtctcaacctggaaaaaaatagactaattagtttattattgtataggcacgcattatgtttgaaaacaaaaaataaattgttgttccaaatatacgaaaaatagactaataggtttattggcgtatatcattatgtttggttatagtataatctgtattgaaaagaataaaatgttattccaacaaacaaaaactagtaggtttgttgacatatataatggtaggctatatgaaatgaaatga

SEQ ID NO: 283705 - DNA, 534 bp, Cannabis indica
tcacacggtctatccaatttactaaagattctggctgccacataagaatgtgtggccccagaatcaaacagcactgagtaaaatgagttattaaccgagagctgacctgttacgactgaagggttggcttctgcatcagcctgcgtgatggcgaacaccctagctggagtgggtctcgccggagccctaggtgcctctggtctgagctagggacaatccctcttgtagtgtccgagcatgccacactgaaagcatccttgacctctgcactcacccagatggtgccttttacaactggggcactctgggtacgaaaaccgggtctcagcaccaccctgacgactacctctactctggttcccctggaacctcttgttctgccccgagccaccggatgcagtggatgttctcctcttctggtccatggccgaaccactacctccactgctaaagcctgatccaggaggggtaggagcctctccactcactggagtactagccgactccgacatacatccaactgcgccctcagct

SEQ ID NO: 283706 - DNA, 576 bp, Cannabis indica
tcttcatcccataccaccagaaataaggcttcaagtcttgatacattttggtggttcctggatgcaatgactaaggagtagtatgagtttctctagaatttctttcttaagctcattgatatcagggacacacacccgtgctttaaacaacaacattccactctgtcatttccgaccactcccatgaaattcaatattctttcgataacagtcaaccactgttcagccttaagaacatcaggacctcccaaaaatactggaggtgcttgctttctgaatctctcatataaaggctccatacggtaaccagcattatgttgctcagctggcaccgcaggggctgcaggaactgcagcaggcggttgcggaggaagctcaacaggagcatcccgttgcctaagtcgtcggatctcttcttcttgttgctcaattctagtttgcatctcagcaaacctttgttcccaatcaaccggggcctgaggtggattctcctgtccacctctcgggacacgaccgcggcctctaccgcgtccacgggggttttggggatttctaccaccccgaccacctccggtc

SEQ ID NO: 283707 - DNA, 538 bp, Cannabis indica
ctattttaattagtaatcccggttaggggattagggtttcataagcattttgggtagcgtgcctaattatttagggcgttacaatttggtatcagagcgccaaggtttttaaacttcctgtagaccggccgaacatgtacattcgtcgtcagagataagctcgactcatggtgcagtaagtattgagagtaaatacttgactgtatgtgtgatcatctgtttaccgctttccattttaggcagtatgcaagcatctagagtatgtatgtgttatgtgatgccatgctataaatgttaattgtttatgtaaatatgtatgaggtaaatagatgagttagggtttaaggcaataagtgcgtaagtgtggtatcggtgcttaactcgctggggttgttgatttcaggggtactagtaatggaccctccgcaatcatccagaccacagggcgagcaagtagagcccggggctacccgaaccgatccaccagcaccgcctccacctccgcaaaatccgggggataatgcggaggctgttaatg

SEQ ID NO: 283708 - DNA, 696 bp, Cannabis indica
tttgcatgttctaacaagtgttcacttagtatatatattttttttacatatacaatagcaaccgatttcagaatttagacctgctctaataaaaattattaaaataggatatctttaaaagtttttggggtgtagataaaatttctttttttatagggtcgagactggtttcgtaaattttatatgattttcttatagggtcgaaactagtttcatagattttgaaagttttgtaatgggattgcttcattttatgatttttttattttaactttctttatattatttttcttttaaatttgaaactggttttcacatttatgttatgtttttaaattattgttaagtgttgtttttgattatttttgttagtgtttttctctaaattattgttcgaatctggtttacatattttgttttattattttagtttttaggttcgaaacttacatttatattttattttcaaactattggtatgcattgtgtgttgttttgattatatttgtgattgatattttttttttgtatttttatatgtgtttttcatttgataatctaatgaaactcgtttcagttaactctattatttaacatttattatttttatgattttttatagtgtcaaaactggtttcacaggatcgatactggtttcacatgttttaactgttctgtaatggggttgctctattt

SEQ ID NO: 283709 - DNA, 898 bp, Cannabis indica
atagtattaaatttttcaagatagtctatcgggttagaagtacctttatatttgagggactcagatagacgaaacccttttggaagttgagcctgtcgcacttctgtagtaaaaggcgaggtgccatgcaacttatatataggctttcgttgctgctcgagcattttcaaagcctgcagaagcatgctttggtcaattcctcctgtcgcaggagccggggtcgctgcaactgcggggctcgcaactactgcggcaagatttgctgggacattaatcccagtggtcgcgatcggcgcggtaggcgggttattatcagtgttggcaccctgatcgcccgcatggggatcacggagtgtctcagtattatgtgggccgcgagagcgtgccctgaaaactgcgttgagatgatcacgcagatcacctcggtgtacctgataacgtcctccctgttgtgtctgtacagagccggaccttgtgtacctgcttggagtgcgaccatgcgacgacgaagaggctgattctgcgtcgttgtctcttgatggtcggctgcgaggattacggcgctcaggatcttcatcgatttgtgcgctctggtttggaaaccttgcggattgatcccttgacattggatggttcaggtccagaccttcagggttagttcttcgttccctgcgtacacggttagtatgacgtctagaagttgttacctgagggttatcggtgcgaatagcgggaactcgaggagggcgtcgagctcggctttgtccatctacttcggcctgtagtgcccgcagttgatcctggatcgcagcatattgatcagtggtgagctggatcattccctcggataccaccgccggagtgacggggggaaaatgcatggttgctggtggcgtgg

SEQ ID NO: 283710 - DNA, 1360 bp, Cannabis indica
aaatacacactttaattaaaatattttaataaaagggctgaaacaaataggacaaaagagttaatcacataatctcttttaattaatttaatttcttttccctttaaataaaaatcaaagattttaaaagaaaatggaataggataataattaacaagggcattttagttaagaactaacccgaaaaaaaccaacactattaaatctaacgatgatgccccgaaaaataataaaatgctttaatacccaaagtacgactctctaaaggcccaacgtcgctttccacagtttccgaacacaaacacagaaattgaataatttacataagatagcataataaacatatatgatataaaatgtatttccaaaatatgcatttcataataattaatttaatctcatacacaaaccctaattttttaataattcaaggtactaatcatatgcggtctttacacaatgtctggtctctgaagtcctttagctccttcatctccacggccaagttagccttggactgcaggtccgcctggtgcaactcctctaaggacctcaccttggcggccatttcgtccatagcctccttagcctcccaaagctcgcgcctggccctggcgacggcctcaccttccgccttcagcgcctcctgatgcctcgcttccagctcagcctccctccgttggacctcctctcggagcctcgcctccgcctgggcttccctttgtttggcctcctcctcgagcttcgccatagcaagagcctcccttcgctcgacctcttcctggatcgcccgccttttagcagacaagtcccgcaggatcctcacgacctcgttaatgcccctaaattcggacatgacgaagccatgattgactatggtcttggaaaggcggctggtctccgcagtaatctggaaaaggagaaaagagtgagatcaaatgccttagacaaaatattgaggaaagaaatgaatcacaagtacttactgcagccatggcattgctgatgtcttgaacctggtagacggagttcaaggatgcacaagcagcgtaccgtttgggcggaaattgagttaggtgggagacatactcgctggtcatctccgaggcaaaaagagccaaggtgggccccaggaagcagttgaaccagtccgtcagggatccatgttcaggtcccacgggttccggaagtcctccgcgttgaggatgttttcctgctcctctcgtaagaccctcttcaaggcctccacttcagcatgcccccgggtgtactcgtcaagggcatagttgtgcttggctatccaaagattctgcctctcctcgtctccggggatcggagtcaacacaatgccatgaggcac

SEQ ID NO: 283711 - DNA, 559 bp, Cannabis indica
atgtggatcctcgacttggggacccaagcagcaatgttggacctgtagaagaattagaagagatcgagatccatctagatatcccaaccagaaaacaaaaaattggaaaaggtttgttgctcgatgtaaaattagagttgataaaatttctaagagcaaacctagacgtttttgcctggtcacatgcgaatatggttggaattgatccttctattatttcacatgtttagaatatatatcccgacttccagccagttcaacagaaacaaaggcttttggacaaagaacgagcagttaccctgaaggaagaagttcaaaagctgcgcaacaacaacttcataattgaagccttctacccggcttgggttgcgaatcctgtattagtgcccaagtcgaacaagaaatggcgaggctgtattgatcaactcataggtgcaacagcagggcacgaaatattaagcttcatggacgcttactcaggctacaattaaatcaaaatgcatccaccagaccaagaacatacaagtttctgaacagatatgggtctatattgctacaa

SEQ ID NO: 283712 - DNA, 660 bp, Cannabis indica
tatagccttcatcctcaagagtaccaagtgatatcaagttccttctaagttctggtatatgccttacttcatgtaacattcgaacagtaccatcaaagtgcctaatagcaacctttccaatgccaattaccctgcaagaattgtcatttcccattagtacagtaccagaatttactttcctatagtcaataaaattttcaagaatagtagacatatggtatgtgcatccagaatcaagaatccattcatttgtgattctttgatctgaaaccatgtacaagtcaccatcagatgagcaacgatctgattgttcaacattagaagcagaatcatgcttcttttctctgtcttctttgagtttgttcttgaactcaatgcaaaacctcttgatgtgacctactttcccacagaaataacattttctgttcttatggtattttcctcttgattgggatctatgttggcttttgaaatgatcctttctgtagtgatctctgcccctattgttgtctcttcctctggccaagtaagtttcatccttaacattgtctttctccttagacatttcttgttctttggacttcaaggctccaagaacatcatcaagggtgagagtatctcttccatacttgaattcagccttcaattcctggtatgcag

SEQ ID NO: 283713 - DNA, 760 bp, Cannabis indica
ttattgactttgaacattcaatttaaacattccctcagttgcataccccttccctacaaatatcccattcttagttaaagtaaacaaatcagctcctatagtctgagtgaaccccgccttgttgagaaggtagcccgagaccaaattcttcctcatctctggagtgtgcatcacatcttttagaatcacagttcttccagaggtgaagttcaattccacatttccagtaccagcaactatagtggtgtgggagtcacccaacaacactttctgatcctcagtagcagcaacatatgttttaaacatatttctatcatagcagacatggcgagaagcgccagtatctacccaccacccttcagatccaccaataaggttgatctctgaaatcatagctgtaaaaggcagctcttctgtcaggttagcctgcggagcagaactaggcctgttcttacactttcgtgccatatgacctggcttgttacagttgtaacacatgaacaaaccagagtcatttctattagggggtggttgctgcctgttattatggttcctttgatggttccaattctgattgttgttattggttcgaggttgattgttgcggtttggattcgctttgcgattctgattcttaaagtttttcccattgggtttcagaacagcagtggatcttttattagtgttgttgttgtttccaacaacaagcacctcttccttttggtcttgttttcgagcttcctcctcaattcgaagacga

SEQ ID NO: 283714 - DNA, 367 bp, Cannabis indica
tgtggtatgctataaatagatagtgaaggcttcaggaaaaacagacttttcacatcttgtttccttcagagaaaaacctgagccttttctctctatacctagccgccaccttcaccctcttcttcttccatgaataatttcaaacctcttagtgataaagtagtgcccacacacagcaagtagtacctcaatcatagtgaggaagatcgtgatgaaagacattcaacaagaaggagattcaacactaaaggaagaagagaaaaagatccaagttcagatcttgataatactctgcgacataaaggatacaagggttagagatctgaacggaaggagacattttcttctgctgcacccaatgtaaggt

SEQ ID NO: 283715 - DNA, 898 bp, Cannabis indica
ttgacacgaaactgctttaaaaaaaaaaaaggcagtccatacataagaaaaatgaaagagatgaatatttttattattattattattattattttctatggtgaaaaggtggtatttgggtagaataaatgaaatcaaatttaaaatacatataaaaattattattaaattttttttcttctattttaaaatgtactaatcattttattgaaatgatattctaatactttaaatttaaaatgcaactaaataaaaaatagaataaagttattttctttctattttatttcatttttttaccttcaaccaaacatcattgctgatagtatgaacttgtcaactaattttttttggtcgaaaaatcaaaatctaacttcaaaactcagaaataagatcaaaatgagatttcaaagcggagagaaaactatctttctattgctttcaatgtgtggattacaaaattgattttccaatctcttctcagatttataagctttaatggcctggtagataataatgctttcaaaagacatagtgacatccatggtctgccaattgcaggttgcaggaggtggccttgtactgtgtacctttatctagtgttaggtggtcctgggtcgcaggagtggtggttagtgtgtacccttggtcaggttgtcaaatcttgcaggtgtaatgccttctctatgttatattattttataatataataataaagtagattaaaatgtgataaatatatgtgaataatatatattaagtgtatggtaaataaatgtgtaacctatgattttataacctacacttttgtaacctacatgttgtaacttggagaggagttacaatttgttgtcacttgtaactcatgtgttgatcacacattattagtgtaataaaa

SEQ ID NO: 283716 - DNA, 614 bp, Cannabis indica
tctcgctttcttacagctcattattatattcatattttattagttgccgaaaacctcggtcaacatatgggacccgctatttaattacaccaataacaatatgacactaaggagggtgctaggcaccaatggtaccctttagcaattctccaaatataacccaaaaaataccagcccacaattctttaactgccacttggcgagctccaagctcctctgccagtgtggatcccatggaaacagatttgtcctctctcactctcccacgcgcaagtacttctcactgcttcattctttttctatcagctacctatcttttttaataaaatatttacatttatgattagatatgttttgattggttaatttttattccctatactatgaggaagaaataagaggtggtacagtagatttctcctatatatatatatattatatacttatacttgtatatatatatatattttcatttttcgtgtatatatgtttatatatatattgtatattatatatatgctttatcgcataatacattcataatattcattttcatttatgtgatatatacatgcatatatatataacatgaagttatcggttaaagtttattt

SEQ ID NO: 283717 - DNA, 539 bp, Cannabis indica
gatctaaaacccatacctccttcatgtttagatttacataaagagttccaccttttccaatggattttggttccattttgatttgtaccccaccaaaaattggccatcatactctccaattggctgcaaaatttcttggtaagtttgaagcaactcatagcataggtaggaatcgattgaaccactgctttgagtaacacttcttttcccccgatcgaaaatattttttcattccatgaatgaagaagcttccaaactctttctttgatatggctgaatagttcttgcttgtctctaccagaataagaaggcaaacccaagtaccgttcatgacattccgtaataggcatattcaaagtttgagcaaagaaatttttgatgacatcagctgtgtttggagagaaggacatcacggatttattattgtttaacatctgacctgatgcttgatgataagtgtcaagagtcctttggattgcaatggccgattggttattagctcgacaaaacaacaaactatcatcagtgaaacggagatg

SEQ ID NO: 283718 - DNA, 520 bp, Cannabis indica
gatgttaatgaaacatacttgttagtatctagatcctagtaaaatatatccaacataaagttcatgggataaatctatcaagagaactggagtcatatctattcaaatggaaaatcattcatattttgatctgaacctctccgaatctggaagggcatctcacccaagacaaagaaggttctctgatagcattctagatgagcggaagggatacatttggaagggaaacctaagaggcacactaaaagcccctattgatgtgtcaatcctttgacactaaatcctaaaagattagggccttgtcctttgcgtcaaactgaaggattgcatgtaccaccaaggggaagataccctcggtccgatggccacctaatacaacagtgtaaaaaaatagtgcatgcatgccttctgtcaacataaaatggtccccatacatacagtagatcaaaccacacggattgggccttatttcttgggtccaaagtcattgtattaagtgtatttactccattagtgggtc

SEQ ID NO: 283719 - DNA, 398 bp, Cannabis indica
agactatatctagtttatgaattttcactaagcaagggcaaaattgtgaagaataaagattctagatcttatttgttaattaagagactttattaagtctaattaataagtatattaaatgaaaatattatttaataattaatttttagttattaaataattggaattggcatttaagtggttaaatttgaaatttggtatttctgagaaaatgagatagaaaaatgacaaaatggcaaaattacaaagtggggcccaatccaatacccatggccggccacttagtgtaaattttaccatttatttttctaatattttaatgccaaataaatctaacctaaaacctagtagttacctataaatagatagtgatggctcacacttaaagattgataaaa

SEQ ID NO: 283720 - DNA, 565 bp, Cannabis indica
agtcgagacgatctcgaagcttcgagatatcaggaaagaagtcacgctctataatcttctcaatggcagcgacatacgagtctcgtcgagaaccttccccgttaggtctggaaccggaaggagtactggaggaagaaggggctgaagttgaaaggcgtgaattcgatgaaggtgaaggcgatgaaatatggcgaggagaatgacccggcgagtgaagcatggtcgataatgggtagaattggggttagggtttcggcagcctaatcgcagtgggaacagaaattggaattgggggaattatttttcccttttcaggaatataaagtgatgtacacgctgtagccttaattcgattttctcaatgaagtcggtggctgcttgcacatcataagtaggtttttttttttttttttaattaatgaagaataaatttgaaaaattttaattttttttttctacattattttatctcaatttcactaattatttataacttaaatgttgtttttttttcgaccggtcactcagttaatataactcatttatttagtaaatttagactttc

SEQ ID NO: 283721 - DNA, 509 bp, Cannabis indica
tctcttgtaatgagaatttttccaacgattatcactaagttagtacattattagtacccaatatcaattctatttaaatagtgtaggtaaatggtggtggtactggtggacgtggtggaatgtcaacatttagttatgaaaatttagattagagtttagaaaagaggaaagtcctacgtcgtagctattaattagctagtacctagctagcttgtcaaaaattatcatcatttattattattattgatgtgtccacagtaatattccttcattttcattttaatatctaatgtataacgtgtttcatgtaatcttgaaaaacttattaatttctatatatggaaatattttattagcttttaattaaatactattttagacttttgtacaaaaaaaaacaaaaaaattattttagtctttgtattttataaaattattacttgaatcttctattttattaaataataaaatagactatgtattttttaaaattatacaaataagactct

SEQ ID NO: 283722 - DNA, 577 bp, Cannabis indica
atataattcagttacattttttgttttatattatcttttaattaaaatacattatcttataatatatttaactaaaataataaattacaattattaatttgattaattttataaataaaataattaaacaaactaaatgggctttacatgaactactacatagatcactattcctcacagacctaaaaatattttttttagggatcaccgctaaaaatattgagtgtttaaaatcgtcagaaaaaattgagtattctcgacagttttaaacactcgtgaagtattcccttcggtttaaaactgtcgcttatagtgttattctcgacgatttttaagcgtgccttaaaaattatgatttttatttaaaagaaaattgtcaattgttgaaattcatggcctataatatagcgcattttagatcaaaaaaatttcaaatctatacattttcaaaatgtcaatctctctccctagagttctccctctctctttctcatagacgacagtccaaaggctccatcacttgtatctcatctctcgctctctctctttctcgctttctctttcacgagctccacca

SEQ ID NO: 283723 - DNA, 665 bp, Cannabis indica
tttttttattaggttaatttggtttttttttttttaatttttgaaatggagtttgagactttgatcttttaagaaattttttgtaactattactacattggtgtgtcatttaaatgtgattatatgtatgttattttttttaaattttttaaattttttttaattaggtaacatatctaataatgcatatattataatttatttattcttaaccaaaactcacgtaaccaaatttgagtgtgtctatatatatataggttggattcgtaaatttgatataaaggtcctttatttccaaactttacgaaaaatatggtgtgtgaattcaatttaaaatataaaataaataataataaagttaaaaatatggtgaaaaatatttataatattttaaatttaaatttctttatataaaatatttacataattttttattttattttaatttaaaattaaaccaataaatttaaaaaagaataagattaaaaatatcaataatattttaagtattttaaattaaaataaaaaattatttatataaaatatatatataattttttattttaaaatatatataataatattataaaattaataaagaatattctattaaagttatcgtagaaacaaaaaaagtatcgttaaatcaagaattctgttacata

SEQ ID NO: 283724 - DNA, 721 bp, Cannabis indica
ttttctcaattgtgcgatatgaccatagaacttcaggaagctcttctggccagtttcctttggcatcttcaagttttttcttcagtgtatccttcaaggttttgttgactgcttcaacttgaccatttgcttgaggatgcgccactgcggagaaacttttgatgataccatggttcgcacagaaatcagtgaaggattggctgtcgaactgcttgccattatctgagactattttgtacggtagtccgaaccggcatattatgttcttcacaataaagtcttgaactttctttgatgtaatggttgcgagtggttcgacttcagtccacttagtaaagtaatcaaccgctaccactgcatactgcactccgcctttacctttgggtaattgtccgatcaggtcaatcccccaaatggcaaagggccacggactttgcatctgtgttaactcgttgggtggagctcgtggtatctttgaaaatctctggcatttgtcacacttcttaacataggcttttgaatcttcaatcatcgttggccagaagtaaccttgccttagaattttcttggataagctctgcccggcggcatgatttccacagaatccgtcgtgaacttcagataggagccgtgcagcttcttcttgagtgacacatctgagcaatggcatcgagaatcctcttctgtacataactccctctactatgatataccgtgcagc

SEQ ID NO: 283725 - DNA, 745 bp, Cannabis indica
ttaaataaagtagaataaaaaataattaattaataatttctaattaaatagaaaagaataaaaaatagaaaaatgaaaaaattaaggagagaatttaaagtagaataaaaaaaattaaaaaaaaagagaattaagaaaaaaattagatagtatttgaagaaaaaaaattgtatatatattattcaaaataattagttattagcaaaaatctaatttaaatttacattcgtaaataattttattactgtaacaactttttgaccgtagatggatatcggttagtccgtattcttcatgcattgctctttcttggacgacttacgggtttcttcttcactggtaccccgactctcatgttctgcatgtgttctggaagcaccaattcatcctcctcgccgacaagattaactgttgcatcgtaagtattcttccatgtctcttttgtctaataagaggaggacagaacgtacagactgacattctgagtaagcgtcgcgacacatgcatggggacaaggaatattttcaacaattagaacatgttgcatgtgcatgttctctcaattaagttcacatcaccacctttctcacagtcagaacctcttgaaacgttaaataattgtgcactgttacgtatgacgattctaaaccttccatcctcgtgttgctttatcaaattttccttaaaatgagttgccaaaggggtagcgcacttacttgccttttcgagacggtcagcgaactaa

SEQ ID NO: 283726 - DNA, 536 bp, Cannabis indica
tgctaattagaccctaataaacattttccaagtgataaaacaaagcttcatgcacaaaatcaaaatccaccattgaagctccaagctttgagctcaaaactcaaacttggttaaacaacactaacaagcattcaaatcaatcccaacctacataaacatgcataaaatcacctctgaaaactagagcaaacataaaaaaacagcagcaacagatttcaaccattttctttgaaaaccatagttttgagccaaaatttcatatcttgaaaaaaccaacaaatcaccaacacaatcatgcttgaatcaacattttaaaacatgttctaactccagaaatcaacaacaacattcagcagtaagaacaacaacaaaactaagcatgcaacccattcttacttgatttttcaagaaactaaagaggagaagagtaagagctatacctagagcttgaatgcacacaaaaatcagcttgaaaacacagagaaaacctcaaatccttgctgcttcaaagggacgaaatagagagagagagagag

SEQ ID NO: 283727 - DNA, 587 bp, Cannabis indica
catttttgattcggtattaccagcaaagtatggaatggctggtaatcaagtggaaccattgcatggaaagatttggatccaagaaccttcagactttcagggaggttcaaatatgaagaatgcttcttgggctgaaagccctgaggaaattattatgagacctcaggagattatggtagagggtcagaatattacctgcctgaatccagattatggtgaaagtggtaggagctccatgattgagcggaagaggaaacctacgtcatcagtggtgggtttaagacagaacaagcggttccgaaggtttcaaggcaagggaggacgccagggttattcttaccctgagtgcccacgttgcatgaaacaccatcccggagaatgcaaccgaaaggtatgttttcaatgtggcaaggttgggcattttaagaaagattgcccacaggtggagaaagaagaacaagagcaggaagtggtatttgttcctactccggtgtatgctaatgctcaagctgatgatgcagcaagcccttctgtagtggcaggttagctccctgtaaacgacttcttttatatcgtgttgtttgatt

SEQ ID NO: 283728 - DNA, 712 bp, Cannabis indica
agtggttcaacgaggaattaataagttagaaaatttacttggtaaattttagacctgcttattagaagcttggttatataggcccatggtccccatactagttgagacaaactgcttgtaagaaccagttaattgattttaattaataaattttaattctaaaattagactatgtctagtttatgaattttcactatgttatggctttattgtgaagatttggtattttagggttaattatggagtctaattcgtaaatattataaatgacaattttatttgataattattttaatttttaaataaatagtgttggcatttatagagttgaagttgcaaaagtggtatttgtgaaaaatagaaaaaatagttgagaaaaatggcaaaaaccaaacttaagtggggcccaatatgtggccggccatatggttctattttactctatttttatgaattttttattccaaaataaatcaatcctaaccctatggatattagtataaaaggatagctaaggtctcatcatccaactaatgcctccaaagctaaaaacctagctttttttatgagaactcttccttctacttcttcctcttgaatttttgaaatacctaagcctttcttcacaaaatatatttagccattagtgattgagtgcatgcccacacataacaaattggtcctcaatcatagtgtgtaagactgtgaagaa

SEQ ID NO: 283729 - DNA, 531 bp, Cannabis indica
gagatttaatcttgttattttaagtagattagagcttgttaatgcatggtttttgctttgattcaagattggaagtttttagctcaaagtttagttttcaaagagaattttcgaaatttgttgctgtgattgttgcatgagcttgtatttgttttctgcagctttagtgagcatgtttaagtagtttttggctggtttgaatgcatgatttgttgcttagacaagttttgagttttagaactcaatcttgaacctttaatggtgaattgagtttctgtggttaaagctcggttttgttgctttagaattgttccttagggtctaaatagcaggtctggaagttttggtatagtttggatttgatttgagctatgtgtgaatttttgaaaagttcctgcgaggaaccggaattccggttgtgcaaccggaattccggatgagggttcaggaattcccagaaccggaattccggttgcagaaccggtctaccggttggggaattttcaggaaccctagatttcctcgttttta

SEQ ID NO: 283730 - DNA, 633 bp, Cannabis indica
cttaaaggaatttcgtcctcgaaatttacttacttgagaataactcggggtactgattctgcatgtccttctccaactcccatgtcgcttctctatcagaactatcactccacaggattttgactaagggtatagtcttatttcgtaagacctttattcctttttctatcacgcgcacagggcgtgccatataactcatgtcctgctgcaagttcaagttctcgtatttaagcacatgtgtcggatcaggtacatacttacgtaacatggaaatgtggaaaacattatgcgtttctgctaatgttggcggtagggccaaacggtaagctacctgaccaactctgtccagtatctcaaaaggacctataaatcttgggcttaactttcccctttttccgaaacgcataatccccttcataggtgataccttcaagaacactaagtcccctacagaaaactcaacctcccgtcttttcagatctgcataacttttctgtctactttgggcggtgagcatcctttgccgtatcttttcaactgcttctgaagcttctcttactgcttctggacctaaatagcgtctttctccaacttcatcccagtgaagcggtgacctgcattttcgtccataca

SEQ ID NO: 283731 - DNA, 764 bp, Cannabis indica
gggaccttggaaacagaactaggaccgggacctagtacctgaccctgacccaaactttaacctaggacccagctcgtgacccagaacgagaaatggaaccagactgggactcgagattgggatccagatctggacctagggcttggacaaaacctgttgtcggtgtctagatttgggacccagccctggacccgaaccctgacaaggacccaaacccacacccggacctgaacccagtcccaaacccaaaagtggacccgaacccgtaccctgtgacccaaaattggaaccaaaaccggaagttgactaggacaggaactaggacttggacttggaatcataacggaaattcgacgtagatccagaaccgtaaccggaccaggacccggactccaaatctgacctagacccgaattggcagccggacccggattcccacccaaacctggactcaggacccgaacccgaacctgaactcagacccaaacatggcaccaaaatatggacagagaaccagggtcggtacctagaaccgcaccccagtctcgatcccgaacccaaactcagaaattggacctgggacctgaaccagaaccagaacgagacccgtgacagtgatccagatcttgactcaggattcgggtaacagggcctggaacagaccagtagacggtgtctagatcttggactgagactaggactagaaaccagacgaagaaccaaacccgaacccagaccttgacttgggagccaaaatttgaacc

SEQ ID NO: 283732 - DNA, 561 bp, Cannabis indica
aactaacaccaagcagcaaaaccaacagctagaaccttaaatcaatcaatattgagcataacaactgaacccaaatcatttctaaacctaacagccactaacctaaaaatcacctcttgaaactaagcaaaacttgagaaaaaacataactagagaataactaaggttaccttggttaattcctccttgatttcttgctaaatctcaatgaaatggaaggaaaaatctgctccttgccctagctttgtcccagccgaaagaaggaaagagagagttcaagagataactcaaatttccaatttttcttctttatctcttaattttctcaaatgaaaagggttttcccaattaactcttgctgaaaattaatgtgctaggtgtcactcactcatggcagccacctaatccaccattaaaccaaatgtctaaaatgcccttaacccaaaaactaaggcttttcaaaagctaggggtaaaatggtcaaaatccataaccccgctcaattccgataatttattttctccaaaatatttccccctatgaaataaggttctaaactta

SEQ ID NO: 283733 - DNA, 604 bp, Cannabis indica
gatcataatcgagtcaaacgatgataatcgtttcatatcattaccctcgatcataatcgagtcacaacgatgataatcgtttcctattattttccctcgatcataatcgagtcacatccaatacatatcattaacctcgattaagattaagtcacaacaacgtataacaagatttcgatcttaatcgaaactgtaacaatcataacattaaccttatacagtatttaatacttttcttacctcaagtccaaagtcaagtatgtgggccgacctgagtggaacgatgccgacactttcgagtcctatctcacggcaaaggtaaatcaataatggtctattccaaaacactgtctaaaactcgcataaaataacctagggttttctaccaaatcttatggtaaaaacaccctaaaataaaatatatcttttggctctaaactatgtctcatactgtagagctcttcataagcttcgaaacggtatatagaatgtctaaaacgaacacccgagtgaaaagttatggctaaaatacgaaaattggcgattcctgaaaattgaccatccggaattccagttggtgcagccctgtaccattcggaattcc

SEQ ID NO: 283734 - DNA, 841 bp, Cannabis indica
aggtaagtgtttgctgttattttttaggtatcaatacgatttcagatatttgcagtttatattcgtatggttgtttctgtttgggagtttgtttttagttttgttatagttttattatagttgctatacttgattattgataatttatatttattgttgccattttggttatcttgcaggtctgggactacaaatttagtccctctgattattacagatctaaatgtgtttgcactagccttttttctattattgataatattaagaaaactttatctgtcaatttactgtccatgtttcgtgagactcaatttggtcattttctagatatgcctgagtatgttttccatccccaagttgttcatagtctattattgagggaagtttaccagcccaatcctaaaaaattttgggctaaggttgctggccgttgcatacggtttagtgctgaggagttttatttgattactggaattgattgttttggtgattgcaacaagttgttgttttcacaggaatcaaatcagttggtagaaatttgtttccgtggtgtaaaaaccattgaccacaaagctattgaggatgcttttttgggtagtaggtggggtttggatgagtcccttggattgaaactggctgtgttgtattttattcagtgttttcttcttagtaatactcctgataaagaagtatctaggtttgatctagatgttgttgatagcggtcggtgggacgagtattgttggggtagggaatcctttgaattgactattgattcattcaaaggtagaattcagcatgggattataatgaaaaataggaaggcagagaagggaggcca

SEQ ID NO: 283735 - DNA, 100 bp, Cannabis indica
tttcgaataccttgagtcatagagtagttgcccacatacatcaagtggtaacctcaatcatagtctggaagatcgtgaagaatcaaaactaaagagaagg

SEQ ID NO: 283736 - DNA, 441 bp, Cannabis indica
tgtaataaccaaaatatttgattattatttttttctattacgatagtctagttatctcgatgtggaaatagttattgcatagaatatagtattttttttattattattgttattagaaagtggtatgtttctttacttcataaataaaatggtatttatttcttacatcttgtaagtaagagattacaatagctaagtgattaattttgttagaaactatatttaaatttatgtaatcaattaaggaataaatcaaagaattattatttttatgaataattttaggtatgtggcacaccaaggatcaattcaagttcaaagatagtttatacataggagtaggagggttttgaatctctaatcaattcacaagcagattaggttatattaaattctatgtgttctatcatcatcacatttagttagttatattttttttaa

SEQ ID NO: 283737 - DNA, 702 bp, Cannabis indica
aattaaaaaacatttatattattaattaaaatttataataaaaaataaaaaatttaatattataaatatttttctatatttatttaattaattttttttttaaatttatattattaataaatactaaaattaaaattaaaattaacaaatccacacaattatcattcatacattatttaaaacttaaaaattaattattatcatccatacattatttaaaacttaaagaaatccaaacataattaaaaactaaaaataaatccatacataattaaaattaagatacactaattaatattgtcttgatcaaacaaatcatcttcaaaatttgagccagtagcgtttaagttaatatcaggatttggtgcattgtcctgagcttgcgatactggcggtgatgggtaatatggttgctgagcagataaaatctccgcaaattgtcgagtctgtcgttgttgtgctaaattcggagattgttgttgttgcgaaacatttggagattgttgtggcgagaagttcgggggttgttgctgaaactgaccaggaaaaaaatatggattttgtgaaccgaaaaattgacccggagaagtttgctgcattggacccccaaaaaacatcggctgctgagatgaactcccaaattggcccaacatcggctgttgggactgtgatcctccaaaaaaatcagagtagaaaaatgga

SEQ ID NO: 283738 - DNA, 510 bp, Cannabis indica
taaggcttcttgtaatcccctaaggcattacactgttcctcatctcctccccttaacatactaagactagggcactcttgtggttgatgatcagtccctccacaaatgaagcatggttcttgcttttccacttttgcagccatctggagtgctttaccttcttgagttttgaaagcctcaaattgttttttcaaagcttcaagttgagctttcacactgtcctcctccttcaattggtagactccggctgttcgtggcttgtctgtaggacttggcgcactccatgtgtatgatttttcagaaatttcttcaagatattccaaagcttcttcgggatctttctgtaggaagtcgccattgcacatcatttgtacgaattgtcttttgtcggctgtgagccgtcatgaaatagctgacagacgccaactttcgtatccatgatgtgggcactggcccatcaaatctttaaacctctcccagacctgatgaaacgtttcatggtccttttgg

SEQ ID NO: 283739 - DNA, 596 bp, Cannabis indica
tcatcaattttgtaactcttttttacacaaatattcaaccaaaagaagttacaaaagtaattaatcttgtaactcttctccatcttacaaagtgtaggttaaataaatcatatattacacaatttatttactaaatacttaatatatattttcacataataatatattaccacattttaatctatacattatattattaaataatataacaatcccctctagattaaaatgtgtgacacacatgtaccatttatttaatcaatcaaaatcaaaatataacatttccccactttgattaaataaatacatactttcaaaaaaaatcttgcttaggtgtattaggtaaatgtctttcgacttaaattttatattagtgtagttaccacaaagtttgatgaaattttagttgccatagcattgaaccactattcatttagcacaaaccggtgataacacacacccacccttggtaatgctcacttgagaccgcacgtctcgctcttgcaccgttaatagccatgtgcaaaattctaattcatggactctctagagaatactcctaattctcataagaggcggcaccacctctagtccat

SEQ ID NO: 283740 - DNA, 605 bp, Cannabis indica
gctgcttaaacttgttatctcgtcactaatacctataataacacatgggtcaaggccctaacattaaaattcacactcttacagtacagcagaaagaatactatttttgaccaataactacacgaattcagtaaaagtttccttcataaaaattataggaaattcaattatctttccaatgatataaagatcactaaaaatggattaaaactgagggagttatgatagttttactgaaactatttctgagaaggaatatggagtaacgaatcacagtagacatcggaaatccaaagttttgatactgaaatattccaaatcagagaatactatcttcataaaagttttagaaaatcgaattcacattagacatgcgaatttctctaaacttacgatttttctaacattaatcaaataataatattatttaataccactaatttatacaattaattaaatttaataaatatattataaaaacgtaatggactttcatatcgggcttgaattaaacattacttacttatgaaaatatcataatatttcactttcgtagttaatacaactttaactttctttagaaaattggtacaactactctaagc

SEQ ID NO: 283741 - DNA, 1281 bp, Cannabis indica
gctcgcaagacacaggccgtacaggatacctcatacatttgctcggacgaggtcctctagaccgagcagtgagcaatctgcgcaaaatgccaacacttagcaaattcagctttcgcatcgtgagtcatcaaggaaatccctataactttgggatcagatttcagagatatggcaagctgtccaaatcccatgattagtgcattctgtattactatgcaatctttttgcttatatcaattgtaacgagaagggaaatacttcctctccaagcttatagccctataaatagtgattcatattcactgggcaaaaggtcgaaagattttgtctaagaattcatatttagagattgttaccccaatttttgcactctaacgtggcatcatctgatggtgacacgtggaatcaactttgagtatctgctcagaaagtacagtccgaataggatgcctcataggcgtgcctggagcaaagcgatcagcaatccgtggagagcaatgaacacttagtgaattcagctttcgcatcgtgagtcatcaaagaaatccctataacttgaggatcacattgcagagatatggcaagctgtccaaatcccacgatcagtgcattctgcatttatcatgcaatctttctgcttatatccattgtaacgagaagggaaacacttcctctccaagttcgtagccctataaatagtgatgcatgttcactgggcaaaaggtcgagagattttacccgagagatattatctaagaattcatattcagagatattgttgtaagagctataagaagaagaacctttctccttgttttaaagtcaaaacaaataacgaggattaggctattaccgaactgctcggagctgaacctctatataattcttgtgtctttacatttcttaactatataccaattgctataatttacttattgcttactaaataagactcactgtcgttggttaaaagtgttgggttttatgccctaaataaaactctatctcaatttaatccagattattcaatatcaataaagtaacagaagtatttttcattcatttgtgtatgttttggttcatcttatcaattgtttgtctatttgatttataaattcattcaaacccctttcacgtacttgatcatgtttattgtgttgtcaacacagtggaaagtaaacatgactatgtgaataaaggattcctagatttatcagaacactgggttttacagatatgataatctacaacagagtttacttgcatttggagaaatgctat

SEQ ID NO: 283742 - DNA, 597 bp, Cannabis indica
tttttattttaaaaaatttgtaatctttaatttaaataaataatattaaaaaattagtatatattataaaatataataggtaatcaatttttttttatttttaaaaatttgtaatctttaatttaattgaataaatgtgaaaattataaattactaattattgtttaattttaaaaagtaagtaagtgatattatgaactttaaaaaggttgtaatttttaagtttaataaataaaatagaaaattataaatgaatatttattacaaaattgaaaatgtaagcaaatgatattttgaagattaaaaagtttgtaatttgtaatttaaataaataaaataaaaaattataaattaatatttattataaaatttaaaatgtaatgaagtgatattataaattttaaatatttatacttataatttaaaaataaaataaaataaaattttaaagtaattatagtaagaatttaatctaattatcataaagtaagtgtaattataaagtaagtacaaatgagcataagatattaaaatagcataaaattaaatttttattatcttttcttgatctctttggttatacaccaaagataggat

SEQ ID NO: 283743 - DNA, 603 bp, Cannabis indica
aaataatcacattattttatgagtagtaatgtgagtttgatattttagttttgttgagaaaattaaaaatgtcaaatgatatttttttaggtgactttaaaaagtcatttcaagaggaaatacacaaaagtgatattttatataccctttatgctagaaatgtagtggggatgagccacaaatttaatcaaaatgtgttgagacattgttgattaatttatttgattttgaattcaaattctaaatcaaatttggctatgtgcatatgtaaaattttgacatattttggtgtcaaaatttagtgaaaataatttcaagaaggaaattaattaaaagagttatagagacaaagtggtcttctatattttaaaatcaagatattatcttgataagtcaaatgtgaaagtgtgggggtgcacactccaatatgagaatttgagacatgcttgatgtcttaaaataaagtgcaatttagacatgtttggtgtctaaattagtgtttaatattgatatgtttggtatcaaaattattgagaatttgagttgtgtgaaaattaatcttttatgattgaattttcaaagcttaagtacttaaggagaaaa

SEQ ID NO: 283744 - DNA, 547 bp, Cannabis indica
tgtgtacttagtgtaaaccattactagattcatggatatcctgatcgtgaccttaagaaagctagaactgctaactaacgtttgcatgtttgatagctattctaagtgattaggggtggactatcccatggtcattaagataagaaagttgttgttttaacaaatactacttttctaagaaaatgactaagtctgaaaacaaagtagcaaagtgaaggagatatttttttttattccaaaagtgttctatcatcttattcgatataagatggtcccactgcctctgttattttgatacaaccgaagaggacaataccacttatgttcttagacagtaagtcacgatacctcgtcgtagtgggagggtttcaaggaactcaccttgttatgacttgggagacaccggtgataaaatcttttgttagtttaagcaggtaatagatagtcagaataaggaactaagaagcaaagtcaagagaactatggttaaaaccattcatatggagtaactaaaagtttttctattacaaggacaagaaaggaactt

SEQ ID NO: 283745 - DNA, 698 bp, Cannabis indica
aaaagatatataataagttcatttcaattataactttacgtaacatatctctccatatgtaccacacaaaataaaacttaccataaaaaaataaaaggtcacaatatttatgaatgattttttttttttttgtcatgtgtacacaatttataataagaggcttttattttaaccttaaaactatatatatatatatatattctatataaaatgtgcctatataacagaatttttggtttatgagaaattattggtgcccaataatttaaaagcctaaattttctctattactatcctattttatattcttgtatgtatatctctcattttttcttatttttttttattaaagttaattatttaagtaaataaaattccataataaaaatctaattcctaaattttctctattactatcttattttgaatttaattaaaaccaacaaaatataggtacgtaatcttgtacgtatatctctcattttaattttctaatttttttttttaaagttaattattttaaataaataaaaatccataataaaaatctaattcccaaattttctctattactatcctattttgaatttaattaaaaccaacaaaatatatatacctaatcttgtacgtatatctctcattttttcttatttttttttattaaacttaattattttaaataaataaaaattcataat

SEQ ID NO: 283746 - DNA, 624 bp, Cannabis indica
agagagacaaaagttcaattgggaccggtggggtgtcagccaaagggactccgacgctcaagtcagtacgattatagtaaaaaattataataatggaaaataaatgtaatataaatggtagccggacggatgagtggacaagcggacagacggactaaaagagtaactccgatggtgaggcttaagagaaaagcttagaaaaaacgactgtctgcttgagtcagtgagtagtgtgagtatcgaatgtgttctctccagcgtctatcgtatggttccttttatcgtgtgttctcagtgctgttgccctctgtccacgtcacccgttggactcgttcaaattggttacttccctaattattagggagtagtaaccgtcttcttgactggttccatattaacttgatttcacccgtttggctgactggccgggctcaaacccggttgcgggacgatccggcttgtggcccataggctcactcgttagtctatttcaaggcctagcgagtccgtctgactgtcttattgggcccaatattgttggatccattattgatgggctcgtctgacttgcatattggacttctcaaaaatatcataaatattaagcaaatttttacctctaca

SEQ ID NO: 283747 - DNA, 752 bp, Cannabis indica
tgttgggtcttgcaggatgagatagaggaactgatcagaagagggaagttcgacaagtataagagaagcgaggagggacatccccaagcggatggcaaaggagatagccagaacgcgagtggctcgagaacacctcgcaatatcttaaccataatcggaggaccgcacatcgcaggcgactctcgcaaatcgcaagaaaggtatgccagagaagccaaggagaggccgttaaccaatgtgaacaatcttggtgaacggccagagaagctcttcaagaaagaatgcgaggacatcgtctttatggagagcgatgcgagatgggtccaccacccacactctgatgcacttgtgatagtcgccaatattggtggagacaatgtccatcgtatactggtcgacaatgggagttcggtgaatttgctgaatttccaagccttcaagcaaatgggattgcaagagaaggatttgcgacctatgacatcaagcatctatggcttctcgggagatgtcatagcaatcaaaggaatgatcaaactcccaatcactttgggaactgccccgataactgccaagtcgatggccgacttcgcagtaatcgaccaatactcagcgtataacgccgtgattggtcgaccaattctgaaggagatgaagatcataacctcgatctatcatctaacgatgaagttccctactccctctggagtaggatcggtgaggggagtccaatctgactctcgagaatgttataa

SEQ ID NO: 283748 - DNA, 381 bp, Cannabis indica
cccttcagtgtttttattattttttctttttcctccggatctaggctctttcccagccggagtactttggtggagtcgaggtcacacactgatatctcctcgacatcctccattggttctacaattttttcggaccccactcggggatccaactcatcttcttcagccatttctggctcaatggtttcccggaccatcagtacgggcagggggggtgtccgggcacaaggtgacaggaagtctcactttttccattgggatgagtgttgttccgttaaaccctgtgagttaggaaccactgggtgagaggtctcggtccgtcaggcctattgcagtgaaggcctccttgaaaagtgattcacggagcttccattgtcgatc

SEQ ID NO: 283749 - DNA, 508 bp, Cannabis indica
aacacgtaggtctatgctacatagacatatatagacgtgtgggagcaacagtaggtctatgctacatagacatatataggcgtgtgagcgtaacacgcaggtctatagcaaatagacaaatagtgcagtggcaccaataattatatgataaatatatatgttgagactaagggttatgcgctcaaggcataaccaggttggactcggtaacaagaaccgagatgaactgatctaaggccttattgtaaatagacgtgtgagagcaacacgtgggtctacgccacgtagacataaatagacgtgtgagcgcaacacgtaggtctacgccacgtagacataaataggcatgtgagcgtaacatgcaggtctgtgtcacacagacaaatttgaatagcattgttgtttatattgtatgatgagcatattattgatatgttttatactgtcttgctgggcttggctcacgggtgctctactgtgcaggaaagggtaagtcagtggctgatca

SEQ ID NO: 283750 - DNA, 382 bp, Cannabis indica
gaaggaacaagactttcacgagttggttaacgaccttcagacatttgaaaatttgattggaggaccacagaagaaagggtctaaagctcataattctggaaatggtaatggagcgactaaggctgaggacaaaccttgccttcgtacttccaaacccaagaacaagaagaaatggaaagaatagaaaaaagcatagttcaagctgtgaaaaacaattaaaaagaaaaaggctagctactcctggtgatgcaccaaaaggaaaatgcttctattgcaatgaaaaaggccactggaaaccccaatgccctaaatttctagcaaagaaacaaggtatttctttccctataactgatgtgttttagtgaattattatcctatttgg

SEQ ID NO: 283751 - DNA, 668 bp, Cannabis indica
aatcacgtaatacgcctatgttagttagggtgttacagttaggcctattgcaatgaaggcctccttgaaaagtaggttcacggaacttccgttgtttatcaagactctggccaccactttattggcgatgggggtctcaatgaccaacggatcatgatgagggaagcgcaccttcttggcgtcttcttctgtgaacatgatgggttgatccatcagccggggcctttgagctgggagtttagtaacctcccagacctcattgtgttttacggcccccgcataccgctttagttctttgcgggtggttcctccaatgtggggtcctccggagatcatggctactctcccgttgggtctgggtggcagaccggggatgtgctgggcatcgctagcgggagcaacaggagccaatactcctgctgcactccctagtgttccctgcggtacaacccctatcgcctgacccggattgaggtgaggcagccgattcttgatccactcatagaggtggcccaatcggatcaggttttcaatctcatccttgagattcttgcattcgttggtgctatgcccaatgttgttgtggtactcgcatcttttgtttggatctctccgagagctgtccttgtacaagggaggtggtctccggtagtgcgtattttgcctag

SEQ ID NO: 283752 - DNA, 538 bp, Cannabis indica
tcgcgataggcttgaccgaccgtgacctctcgcctagtgggtcccagctcacagggtttaacgggacgacacttatcccaatgggaaaagtgaggctcccggttactctgtgcccggatactccccaaagcacatttaaatattgcaccttcgtggtggtggactgtccgacagcctacaacgcgatcctcggccgaccggccctagtggactttggtgcaatcacttcgatccgacatctgtgcctaaaattccctacccaggaggccggagtcgggactgtgagggggaatcagggggaagcaaggcaatgttataatgttgccacccacctacccgtacttatggtccgggagtccgctgagccagagatggctgaagaggatgagttggatcctcgtgtaggatccgaaaggatcgtggaaccaatggaggacgtcgaagaaataccagtgtgcgacgtcgactccaccaaagtactccggttagggaagaacctggacccggaggaaaaggacaaaataataaaaacactgaa

SEQ ID NO: 283753 - DNA, 482 bp, Cannabis indica
aatctgttcattaaagtcgaccaatagatcttctcatcacatatagattaaggacatgatagttcatctgagtgggagtgctaatcatagatacagaatctatagcttttatccggacatagaagtgaaacgatgatttttttgagcttggcttaatagagataaatgataaagcgctcattttagtgattatattagttcactgaaatatcatatataggaagataagtattctaaggattaaatacattgaagggtgtaacagtaattttgtccctactcaatgtaaatcatctatagaggatcattgattattagaatataacaaatggataactcatagcatatctatatcgtggaacatatagatcgttctatataattgagagtgcaattctaaatctatagtagcgcaaggaggaattaataagttagagaatttacttagtaaattctagatttgcttattggaagcttggtta

SEQ ID NO: 283754 - DNA, 730 bp, Cannabis indica
caacccaaacctggactcgggacccgaacctgaacctaaactcagacccaaacatggaaccagactacggacacagaactagagtcgggacctagaaccgcacccccgtctcgatcctgaacccaaactcagaaatgggacctgggacctaaagaggaaccagaccgagacccgagacagtgatccagatcttgactcggtattctggtaatggggccaggaacagaccagtagtcggtgtctagatctgggactcagactaggaccagaacctagacgaagaaccaaacccgaacacagacctagacttgggacccaagattagaacctgaacaagaattacctcagaccgtgaccaggaccacgacctagaaccgaacacagacctagcctcagacccaaacagagactggaactcaggcccggacacggtcgtgtacctagaccggaactgagacccagacatggacctaaatctgggacccgatcccaaacacagacttggacctagatagtgattcggatacgaaactggactcggacccagaccaagacttggatcgaaatgttgtacctagatctggaccgagatcctgacccagacccaaacttggacacgcactcgggacccgaacttgaacctggacccgaacctagacccaaatcggggtccagacatggacacaaacccggacacagactcccacccgaactgaaacacccacaccta

SEQ ID NO: 283755 - DNA, 625 bp, Cannabis indica
cttaggattgagatcacttgatctaggattaactaggtgatattgaattgaatagatactacgataagtttatcatatctagctcaagtttaatatcggtcccttccaatgcatactccatgcatccaacccaagcttactttaaccaatgccctagaaaggacatagcacttatcaagtaaactacattgtagattatcctatcaattaaaccctgggtactgatgaatcataggaatacatttaatcacacaatcttgattaccttctagtgtgttgacgacacaataaacaagaatatcaatgtgataaggatttggattaatttataaatcaaataaacaaataaatgatcacatgaaccaaataacacactaaacaagaaatgaaaataaatatgcttctttattgataattgaatagaaaagattacattgaaatagagttttatttaaggcacaaagcccaacagattgcacatccttgactaaagacatgccacaacataaatttgaggatcgtaaagtaaatatgagattcagttacccctaatgcaatttttggctgtacaactaaaattattcaatgaaattctaatttccatattttctcatatttatgtgca

SEQ ID NO: 283756 - DNA, 754 bp, Cannabis indica
ttccatatccagaacaatgaaatcagctggaaagatgaacttgtcaacttttactaacacatcctcaatgactcctctaggatgagctagtgatcgatccgccaattgaagagttaccgtggttggctttgcttcacccagctgcagtcttttaaacactgacaaaggcattaagtttatactggctcccaaatcacatagtgcatttattccttcaatttttccaatagtacaaggaatagtgaagctccctggatctctgagttttggagggagtttcttctgtagaatagcgctacactcttcagttagagccactgtctcataatcttccatcttcctcttctttgacaaaatttccttcataaacttcacataacttggcatctgctctagagcttcagcaaaaggaatgttaatgtgaagtcttttgaagacttctagaaacttggtgaactgcttgtctaagcttgactttctgagcctctgaggatagggtattttcacatgatgatcaatgctaataggtggagactgttgtggtggtgctgggctgtcagtagccttctctgctgttggtgttggtgtttgcactggttgagcatttatttcttcatctacctcaactggttgtggtaactcaggcccatcatacttcttaccgctcctcagggtaattgctttgcagttttctttgggattaacttcagttgtgctaggcaaatttccttgagggcgggttgctacctgagtt

SEQ ID NO: 283757 - DNA, 599 bp, Cannabis indica
tttcgccattaccaactttaagtttcaactctctggatttcaaataattctagttttcaagcaattgcaatgaacaactaacatggtttgtagatcaagaatcaagaatccatattgatttatcattctctaaaacacatgattcaaaaaactaaagcatcactacttaaccctttttgaattgctctcattgctggttcaatctgaggaagtgaaatcactttctctattcttcttaaactgagcttgaagtagtaggattgtcggagctatgaactctttgctcttcagattgaacaattcctagcttagctgctttttggaatttcatgttcatcatgagcaagtgtgaagtgttactctgaccaggagttttcttcacacattcaagttcattcataaaggcatattctagatgagtgttgggatgtgggttgtacattttggcacttcaaatatcaataaacaaaagtaaatcatttggttcaataaattcatacacaagttcataaaataacaagtaatcagatatgtttgcaaaaatactaaaaactaaacatatttattatttttcaaggtttccaacataatgaaataca

SEQ ID NO: 283758 - DNA, 804 bp, Cannabis indica
atagatgaatagaacacaccccaagttagaacattattaatatatgacaattaattgacaccttctcttcaaacaagattaattcatttgacagaaagggataatgatttttgtggggtgactgattcgtgacacttgtgctgactgatgatgtgagtagtcttgagttagtgatttttagttagactctttcactaattgttagttatttctgttaaaatttgcttatatgggagcattacaaattaaggctttttgatagagaattctgtggagagagttcatttgtaattggagcaagactcctttggtgattgagctatattgttctctttattatccttgtatttaatttggggtttattatgttctttattgatgttctttcttaattaagttgatgttcattagtttgttacatactgtgtcttgtaataataagttaataacccttttatgtgagctggaataatacaacaatgaacccttttaccattttgtgtcatgagcgtgtgtgtagtgtatgtgagagtttgattgagaaagaagataatctgaaatagaagcttaactaaaggaggaaggaaaggaagaacagtgcaagagggtaaaaactaaataagaaaagccagcaactccgtctataatggaattttggggatcgcccaaagctatgtttggtgtgtagtagaaccttaattaaatcatgatgaagaaaaactccataactccaccactggttatggccagagtagaaagctctgctctggtctttatgttgaccttgtggatcaatcaattaca

SEQ ID NO: 283759 - DNA, 544 bp, Cannabis indica
atttggaatctaaaatttaaagtcaaagacttaaatttatactaaatatacatgagtaattattctagcttggaccaccactactaatctaactctaagtttaagttgctataagtaggcatatacaagtaggagattttaagattgaggatttatatcatttcggaatagaacttcgtgaatatagtcatatgcaccattcaatttcatagaagaaaatagaatgacatcataagcatatgatcataaaccatctatccaatgatatactatttaagcaaattctaaatgaaaaagctaagagaaaagtaataaaggataatttcgatttaaaataagaatccaacggtgtcccggtaggcgagagtcaaagttattcttatattataaatctcttcattgtttcatattgtaaatactagtctaagttgtcatctttggatgtacaactagatgttgcatttacaaatacttatctgtcgagatctaacactattatgtttgtctaacggatgacaatcctttgcgatttgtcccattaaaa

SEQ ID NO: 283760 - DNA, 705 bp, Cannabis indica
aaaataaaatattatttttaatatgtttaaacttaaatatcaattttaaattaataattatttaatttttaatagattattattaattttatgatattttgaggtttaaatttaaaaattgattattttattttaaattatgatcatattttaaaaattacttaatttctttaatttttaaatattatttaattataagatcagatattttaatattagccatatttttaaattaaaagataactttatccttttaatttgaaatattttattaaaattatcttatatgataaattaaataattaataaatttgaaattaacctagatatttttatagatattctaaccataatattttcaaattcaaaattagttattttgttaaatatttaattgtttataaattataagttagaaaaatgatattttatatcattttacttatcagatatttataaatagtattttaaataaattaaaccaagatattttaaattagtttcatttttaaattttaaattttgaaaagatattttaggttgtttttaaaaaccctaaattttcaaaataattggttagttaaaataataatttaattatattaatattttatttcacatattgttacatgggtattgtttgtttatttaattgtttattcaattttttttttaacaaacctattatatatttgatctaaattg

SEQ ID NO: 283761 - DNA, 75 bp, Cannabis indica
cagaaaaacctgagcctccactctctcttctctagccgccacactctctcttgcttcttcctttgaatttcgaaa

SEQ ID NO: 283762 - DNA, 600 bp, Cannabis indica
ttgtcgtaacattctgatcgtctgactcccctccttatgtttagatcattccttaggtcatgggttgtccctaacctttcgaacatagaagcgtatggctgccttagcggttgattcgcttggttgacgaatggtaccattgatctggttggaaccatcaggtatgactcctcctaatgaattaccagacaaggtctgctcgcctactgctgggcccacgaagtggaacttgtgaccggggattgggcggctaaccatttgcagtctgggaagtattcatcattggatcctcgtccgtctctcccaagggaatgacatttgccgattgctgacctacagtttggtaggctcttcgtatcagcacggtagcttgccgactacaatcttcgatctctgcatggtgagcccttaatgcctccattctctatctctcaattcggtgaacatacgcctttgttcgtcgaacgtgagatatacagcaacgcgtagttcgtcttgatcatgatgtagggtattattatgaccctgcatgagtctgagcgcgtcacagagatttttgtaattcagtggctatctccgatagtcgtctgggcgttggtt

SEQ ID NO: 283763 - DNA, 672 bp, Cannabis indica
acaaagaaataaacacaaaggctcttttgacaataaattaatccctctagtaaatgtcatgtttgaaattccaaaagtttaactttaccaactcaaatgatcaatgaaagttcaaaaagttgttttctcaactctcacaactcaccaaaaatgaaaaactttacactcaaaatttttcttaactatatgtgtttacaaccattttaccacatgtttggaaagtgcacaaaagaactctgaaaatcacaacttggtaacaaaatatagcaaatattgactcaaactgtaattttactatcatgcttggataattttgaaaaaatttgacttaaaaaattcaacaagacaattacaattctctaaatgaacgctcaccagagctcaccacccccaactcaaaattagacagtgtcctcaatgtcacaaaaaatatgaaatgaaaaaagatagggaaaagagtacacctgattgacgataatatgcacggggtgagagtggagataacctgataacagtaacccaaaacaaacatagaaaatacaaaaataataaaataaattaaataaacttactaaaaacataaagataaaacctgattagtcattggtagacagaagtgatctcctcaggtaagtctaccaactatatgtttgtactatccagtatcaaaaa

SEQ ID NO: 283764 - DNA, 581 bp, Cannabis indica
atacaaattagatttttcgagttctggttctatcatttctcgaaatgacattcaaatttgtgttgcatctatggaatatgggctttatgttctaagaccaaatgaaccgtttgcgcttaataacgaactggtcaaggtagctaaacctagaaaccataaaaagcaaaagattgataataaagacgaaacatatctatggcacttacgtcttggtcatataggctatgatagacttcacaggttaaccaaagatggtccattgaaaaatgtcacctaggtgaattaccagtttgtgaatcttgcatagaaggcaaaatgacaaaacgttctttctctacaaagggagagcatgccaaggaaccactaggcatagtgctttgagatctttgtagaccattgaatgtcaaagctagaggtggttatgagtactttgtcactttcatcaacgattactctagatatggtcatatttaccttatgcataagaaatattaaacgtttgagaagtttcaggaatttatagcattggctcaaaaccaattgggtaaaactttaaagatcttgtgaactgataggggtgg

SEQ ID NO: 283765 - DNA, 775 bp, Cannabis indica
ctttccatttcatcaataatcttggtagcttttccaaaaaggcatccagaagcccttgggccacaaaattgtgtctcagttctcctgatgtttcctttgcaatatttgccacactaactgaaaggttggtacatccattccataataaacctttagccttaaacgccatgatcaatggattctgggacctttgatccttgcccaagaacacgaaggtcctcaccttctgattctgaagttaccatctttccttcctaatcgacatttgtactatattttacaagtcaatccaatcctcaacattacctcaaatcacctcaatttaactcaactaaaacaaccaaccattctcttactaagacccgtaaccaatgggtttttctttttgtccagatcattagagttaacatcctttagccaatccaacactggacatttactttcatgaatcgctctcttcacattatttcctttgtgatctaatccttgtaccctcaacattaagggttagctcgactacctgagcataaaactagaaaactcctagttatttagtcataatatgtacattctgaaaaaatataaccgttctaccttaaagccttcctagcggccttagtagccgctgcattttaacaaaactttgccaatcggttcagcctagtgtcattctccaactatgctgcccgggattaaccatataggttctactaccttattactcaagtaatcttgtaaagcccgcttagttaatttggaaattagcagttgttta

SEQ ID NO: 283766 - DNA, 557 bp, Cannabis indica
gaaacaaagtgagaagactcattcttctcattttgttagcttgcttgtttcagctacacactgagaaataaggtcactaacactccatgatttattataagtgtttaggcagtcttgataaagctaaaagtggtaggaagttcatgaagaacttgaagaatagtgtaaaagtcgggaaaaggaatactatgaccttgcaactcggactgaacattaataattttcaaaataaaatcttgcactccttttaattcatcatacttaatggtggtcatttcatccataagatgtccaactttagcgttttcaccagtgtcatatagtttttctacagcattgaaaaactcttttgcatttgaggtgtttggcaaaacattaaatgaatgttatggaagtgaactttcatagcaatgagactaagatgatttgaatttttccattgtgcatgaagaattttctaggcaacaatgctgatattagtaagatcattagatttttcttctcgaaggcataagtccaaatctattatgcctgaagtaattttcacatctcgtttc

SEQ ID NO: 283767 - DNA, 535 bp, Cannabis indica
aagaagtttctttgaactttttaaggatttgggtctgtgtcaaattgtgtaattcgtaatgggttgttgtttaattgtgttttaaaggacttgcatggtagttgaattgaaattgatcataaagattgtatcttgattttgtttaaatttttgttttttttttagcaggaaagaaaatcttggaacaatcttaatattggagaaagcttctaaaaggaagcttgaggatatataactctggccgatattttagagatcttagctaaagccggagctggcgtttttcctttgttctccggtccaagactttgtttcaattggcctctttcacttgtttggtgtcttcccattgattatggctaagttttgctaaacttaattactcctaatgtgaacctctacttgttacaatgttctctctgtggtagaggctcaaaagttaaccattagagatgtgagaatctatagaacaatttgcaagaaaaaaaaagaaaaaattataaaaaaatcagtatacaaaaagacacttcttttt

SEQ ID NO: 283768 - DNA, 192 bp, Cannabis indica
caagacaacagaggcagtgggatcatcatatgttaaataagatgatagacatgcaaacctgagttaacagttctagcttttcttaatattacgatttggtcatccaggaatctagtaatgatttatactaagtacacaaccatttcatcattatgaatttaccttatcactagggtagtatccctacgaagg

SEQ ID NO: 283769 - DNA, 1390 bp, Cannabis indica
agtaggtatcagattaatccaagaaaggaacattggaagacaatcaaatgaatcttaagatcaagaagaggaactatatgttagtcgataagggtgtatttaatactcttagactacaccaaattaaatttctagacttgccttagtgctagaaagtctgctaatgagtaaagaattcagtatccctaaaggagtagacatatagagagaaatttcacaatatctagtatttggtgattaaggaaatgtaatggtggaggaaaggttgtattctatacaacctgtcagatcttaatatagagtatatactacatactacacttgatttgtatatcaaggtgttgagatgatttgaaatgcacttttttgttttatattagtgcaagtggaagtttgttgggttttgtgccctaaataaaacccatttcaatataatcagatttactaattaataaagatcagaaatcacattttatgttgcatggttcacatgatttatttcatgattataaattctattaagtccagaacatatgtatttgttcatgattatagtgtcgtcagcacagtggaatataatcatgattatatgttcaaaagtttaattccctgatttgtcagttcactggatttagactggcatgataatcagcgataaggtatacttacaccttggataagtgttatgtcctttccagggcattggcaaagtttaccagtatcggatgtatggagtatacattggaagggaccgatattgatcttggataagatatcataaacttaccgttatatctttctaagtcaatatcaatggttgatcttaggtctatggatcttaatcctgatatggttaggttcaacttagttgtattatttatgttctttgatttgttcgtggaagctaacttttggttctggtggatacttacatcttgggaacatggtagttcaattgagtgggagcgctaatcatagatatggaatctatagcttctataggtatttagaagtgaaacgatgatttccttcgagcttggctgaatagagataaatgattgaggcctcatttcagtaattatattagtttactgaagtatcatttataggttgctaagtgttttaaggataaaatacattgaagggtagaacggtaaatttgtccctattcagtgtagatcatctatagaggatccttgactattaggattgtaacaatggataatcataacgtatctatatcgtggtacatatagagcgttctatataactgagagtgtattcaattccaaatctatagtggagcaaggcggaattaataagttgagaatttacttggtgaattctagatctacttattgaaagctcggttatataggcccatggtccc

SEQ ID NO: 283770 - DNA, 519 bp, Cannabis indica
aaaaaatcacatgaaaatgtaaaaattaataaaaaaaaataaaactaccatacttttggaatataaaaaaatctcaaattttatgtaattaactaatttgataacttgtccaatgggtggatcggatgttgggattttatctcctaaataaaacttatttcaatataatcagatttactaattaataaaagatcagaaattatttcatgattatatgtttaatgtataagttctattaaacccagaacatatagttattcatgattatagtattgtcaacacagtggaatataatcatgattatatgttttaaagtttatgtcccatgatttgtcagtacactggatttacactaaatgatagttagacgataaagattacttacacattggataagggttatgtcattttcaaggcattggcaaagtatgctagtatcggatgtaaggagtatacatcggaccagaccgatattgacattggataagatatcataacttaccgttatatctatctaag

SEQ ID NO: 283771 - DNA, 601 bp, Cannabis indica
agcatgtcactcatcagtttttgcaaatattgtgacctaggggcttgtaaactatcgagcagttgttccactcaggttgaccgtcacacctgaattcggaaaaaaggtaagattagtataatgatatgcatatgtgattacatgtttaacgtacatgtttatgattagctgttagattacattagaatagcggtatcagtatatttagaatattattggataccgataaatgtatgtttagcataagtatttattgacactatgacatcagtacgactagagtaccgagtataggttgatattatggtcgatagtactgtcgtatgaacgttcttgactcagtaccgtgtaggacgcagggaaggattatggttgggtgtatgggtgcctaattgtaatcaggtttatatttatgttatgattatgcttttcttactgagtctatcgactcacagttattatatgtatgtgtaggtaagggcaaagctacgttgaacaacaatgagtgcgaccagatgaagatcgtacatgtcgggtcggttaggcctggagcgtacgatctttgtgacggcaggctgtattttgaatggtcactaggcga

SEQ ID NO: 283772 - DNA, 255 bp, Cannabis indica
tatctcaactagtgcggggactatgggtctatatagaattgcactctcagtatagagtttcatggcatagagaagtctggaatcgatataacatgcttaaacatagctttataatgtggcttgctgttcaaaataggctccaaaccaggagtcgattgctaaaatttaatgtatgtcaagaaggcagttgccttttatgcgacattgagcttgaaacaatagatcatttgttttttgaatgctatttcagtaaca

SEQ ID NO: 283773 - DNA, 741 bp, Cannabis indica
aaaatcaagtattcataacattatcgttaaaatattattttttgcctaaaaaattaataaaccaaaattttcatggtactatggatggacagctttttgtacttccaaaaatcaaattttcataacactatcgttaattatcatttttgccttaaaatgatatttttatgacctcatcgttaaatcatctttttagtatagaaaattaagttttcatatcaccttgttaaagcatcaattttaattgaaaatttaatttcggtaaaaaaaaatcatgtaatattaagcatttaaattttggattgcactttcaatcaataaacataaaaatgttgaaaaaataatgggtgtttccataggtgcaaaaatggtgagaggatgacgcttctatggatgcttcaatgatactttatagccatttggatttttttttatttctaatggtcgttggataagagaagtagaaagatatactgctacaaaagacacatttagcgtcagtactaaattgactcctaaacttattgtgtcggttcaggaaatcgacacctattccaccgatctttaaagtatattcttttgcattagttctaaactgaaactattgagcataggcatcgatttagaaccgaaacttaaaattatttatgttttcactttaagcgtcaatttagacaagtgggaaatttgttttgcactttaagcatcgattttgcactgatgcaagtaaaaagaaaatcc

SEQ ID NO: 283774 - DNA, 563 bp, Cannabis indica
attttacataaattaaaataaaataactaattaactttgttacagtaataactaactttaaaacacaaatttatacaataacaaaataaatatatataataaataaaaagtatataaataaataaatgtatttataccgagctcggagagagaaagagagaaagggagacgaacaggaggtggtggtggtccaacatatgagatggagatgagagggacaccgacgggaggtggtggtagtctgacgtatgcgacagagagtagagggagaccgatgggaggagggtgggtggagatcgatggatgagagagacgagaagaaagagagatcgagagagggaggaagacggcgagagaggaaggcgatggtgcgtaggcgtgggtggggttttggagagttaagattttcattttagggtgtgggaaatggagaggtgagaagaaataggtgggcatgtgggaaataaaaaaaaagtaggtgggcacgtagaaaatgtggcgagaagtaggtgacgattttttaatggacccttataggcgacggtttaaaatcgtcgcatata

SEQ ID NO: 283775 - DNA, 505 bp, Cannabis indica
tacagtgttctttctacagcaaaagaaccttcaaaagcacaagcatgcaaatgaaaaacataaagggaataaaaaacttactcaaagattcaagtgttcggattcaagcaagcctgaaatcgtctgtaaactcttcaacaactttgaagcctgaaaactctctctttttgctatgaagtttgcttagcaacgaagggtgatgaaatgaggtaatgtgccagtactccaagtatttataggcaagaggataactgtacgtaaaggaaccttagacgcctcaacttcccgccttgaaagcaaatatgggaaatcaaaataatccagtgcaaccgtcagccttggagagagaaattcgaattttcaaattaattgttagagcattaattagccaaaaatcgaagggacgcctagtcagcttcacatcgagtctcgaacggtcatgctcgacacgtgtgttaggttttatgccttaaataaaactccatttcaatgtaatctattttat

SEQ ID NO: 283776 - DNA, 641 bp, Cannabis indica
gttcgttctttgcaaattaatatcgggggcatattttgaaaagattaaagaaaaaagggggcatattttttttttatttttttggctactttttttctttttattttttcttttatggaaacatatttttattgcaattttttattgttgtgtttcctttattcttgttagggatttggtcttattttttgtggtgttttaggaaacttatttttatttaattaattattttgtggtttcctttttggtggcattttcgaatttcgttggtatagttattttttagattttgtggggatatattgttccctttttccatttaaggtaacccttgaccaatttttgaaatatctttttggtttcttttttctctcctcacgtggtgaacaaggtaaggaagttactttcctttttttttttgtattattgggtattttaattttaagttgctatatatgttcaacttctcacttacccacgatcaccactattcactactcctctcatttttttttaaagtctaaccttcttcaagtttgagagtgtgtttgtctttctgggtttacaaaggaaaaatggcaaaaaccaaaatgctcaattgtccaagagccttctcttggctctgcctctgtctctccgat

SEQ ID NO: 283777 - DNA, 534 bp, Cannabis indica
gctgactccaaggagaattttaggggattcagtttcatgttgtattttctaaggactttgaaacattcgtccaggtcgtctatgtgcccccagcctttctggatttgacgagcatatcatccacgtacacttccatgtttctgccgatctgatctttaaacattttgttgaccagtctttgatatgtagctccggcatttttaagaccgaatggcatgactttgtagcagtagagacccatatctgtctggaaacttgtatgttcttggtctggtggatgcatcttgatttgattgtagcccgaataagcatccatgaagcttaatatttcgtgcccggctgttgcatcgacgagctgatcgattcttggaagtgggaacagtctttagggcacgccttgttgaggtctgtaaagtcaatacagactcgccatttcttgttcggcttcggcacgagtacaggattcgcgacccaagccgggtagaaagcttcaataatgaagttgttgttacgcagcttttcaacttcgtcttt

SEQ ID NO: 283778 - DNA, 514 bp, Cannabis indica
atttatgaggaaatttggaagtgttttcagaaaaaaggcggcaagttatttttccccgctctcatcactcagatttgcctagcgggtaatgccgctattggggacgatgaagaacttctaagagagcggatcagcattgatttggtctcaattcagcgtgttgccactcattgcacaccctcgactgctcctcccaaacgtcaccagccatctagcagtcagacgacttccgccaatcttcctcgcactcagcacgaacaaatcatggatcgcctagcacaccttgaggagaagcaacttacctactttcgctatgttcaggcgcgtgacactgcattagcaaaatctctaaagcgaatggcgccaaggccgatagttgacttcccagtgttcccacaagaagtgtttgctcgatgggctgatccagaagctccggaagactctagcgcttcagaggatgaccccgagggatagacagagggagtactttttctttcagcttcagtatttattt

SEQ ID NO: 283779 - DNA, 351 bp, Cannabis indica
cctttgaaattttgtgcccaagaacaattccttctgttaccataaaatggcacttctcccagtttaacaccaacttagacttctcgcaccttgttagcactttttccaaattttccaaacaatgatcgaaggaagaaccaaaaactgagaaatcatccataaagatttcaatacaagattcaatcaagtctgaaaagatagccatcatacacctttcaaaagtagcaggggcgttgcacaagccgaatggcattcttctaaaagcaaaggtaccgtagggacatgtgaaagtagtcttctcctgatcttcaagtgctatagctatctggtggtatccagaatatccatcaa

SEQ ID NO: 283780 - DNA, 721 bp, Cannabis indica
acttgtcagaagatcaaggctgaatatcagagaccggcagggttgttacaacctttagccctacctgaatggaaatgggaggacatcatgatggactttgtggttgggttacctagaaccacaggattgttcgattctatttgggttttggtagatcgattcatgaagtctgctcattttctaccagttaaaacaacctattcagtggatcagttagcagagttgtatgttaaagaaatagtaaggcttcatggggtgccaaagtccatagtttcggatagggatccgaagttcacctccaagttttggcaaagtttgtagcgagctatgggtacggaattaaaattcagtacaacattccatcctcagacagatggacagtccgaaaggacgattcagatattggaggatatgttacgagcctgtgttatggattttgaaggctcttggagtaagtatctaccgttgatagaattctcgtacaataacagttatcagagtacgatagggatggctccctatgaactgttgtatggaagaaaatgtagatctcccattcattgggatgagacaggggaaaagaaatacctaggtccagaatcagtgcagcggaccaatgaggcaattgagaaaattaaagctagaatgcttgcctctcagagtagacaaaagagttatgcagatccgaaacgcagagatgttgagttccaagtaggggacc

SEQ ID NO: 283781 - DNA, 693 bp, Cannabis indica
attaattgtaattgtaaatttcgtgtaaaataagaataactttgactctcgcctattgggacatcgttagattcttattttaaatcgaaattatcctaatttttcctcttggtttattcattttgaatttgcttaaatagtatatcattggatgaatggtctataaatcatttgcttatgatgtcattctattttctcttatgaaattgaatggcacaaatgactatattcccgatattctatcccgaaatgatataaatcctcgatcttagaaatctcctacttgtatatgtttactttaggcaaattagacttagagttagattagtagtggtggtccaagaaagaataatagcagaagaaatatttggtataaatttaagtctttgactttaaattttaaattccaaatagaaatttgtatttctgtttccagaatacaatatagttcaactttcacaagttattaatatcaattttctgtcaatggattcaaactatatgttaatctatggaatattagtttagtattctgtgaaaggatccacttgcactattctaagaactcttcattgtaactagacctaagtcatgagaagattacaaccacattcttatatatctatgacatttgaatcttattcatagtggttttgacaagatcactctttgcaaagagttaaacatgcctat

SEQ ID NO: 283782 - DNA, 604 bp, Cannabis indica
aggtgcgaaaactattgtattcagtgcctcgctacacaatgattgaaagcaaactatatagaagagggtattcaatgcccctacttcgctgtgttcttcctacagaagaaaatgaaatcatcagagaaattcatgaaggcttatgtggggatcatgctgatcggaaaagtttgtctaagaagatcattagacaaggatattactggccaacaatcaataaggacacacacgagtttgtcaagaaatgtgataagtgtcagaggttttcacatatacctcgcgtatcgccaatagaacttagaatgatgacctcgccctacccatttgctatatgggggatcgacctaattggggaattacccactaggcgaggaggagctaagtatgcggtagttgcagtcgacttcttcactaaatggacggaggtcgagcccctcgcctctataaccaataagaaagtccttgactttgttgtcaagaacattatctgtaggatttgaattcccatgaagatagtatccgataatggaacccaatttgatggcgacttgttcacttaattctgcgagaggaataaaattatcaaaagcttcttgtcagtatc

SEQ ID NO: 283783 - DNA, 643 bp, Cannabis indica
ttcctcctcgcattgactaggcccctctgagttcaacccactacaaccaagatttttcttatctcacttttcttttttatttacagctaattatcttatatttaagacaatttttatttatagctgttttattttgcaaggggaaacattggttaaggcctgtccccgggccctttgtatatatatattttttttgacctgcccttagggctaagatttttatatatttatatatgatcttatttgatgcacatatctttcttttggacctgccttttaggtcaggatgtttatacatatgctttttttccttttttgtgcatactttttttttacctgccctttgggtcaggatattttacttagcctgttttttgtctgtccgtgtggtataccttagtacccccctgagtggcatagaaactttgtttttaaggcactcagttttatttaacatgcagaggttacggtttaaactctttaaacaaagcctaagttacatttttggactattggtaatattttcggaggtgatcggcgttccaggcccttggcacaatggttctgtccatcctttttagcttataagtgcctgaaccgatttcgtcctcgatttcatatggtccttcccaatttggcccaa

SEQ ID NO: 283784 - DNA, 705 bp, Cannabis indica
ggacacgtatactcagatttccacagaaagctgagatgtccctgagggactcctcgaagttttaaacctcgcttaagatataaccagcgagaggtggcgagcatgaccgaagtctaatcgcatccgagacaagagagtagatcgcatatatcgaatatatgcgatcatcctccccttgtccttgtataaaccaggagaacgattctctgtaagtacgagttgatcttaagaaccctgcagcctttataatgcaatatagactcgcatgtctaggttctatcagctcaacacgcgatgtctacaagaagcgactatctaaagacgcagacgtcctaaacataatgataaccctgcgagttgtacatcggaatatgaacagtcaactcgcaggtacggaagacgcatgcgttgatgaacttagtaactgtcattcatttattaatgttaacgttgcttagtttaattattgcaattcaatatgtaaataatggattaacaatgaatgtgatccttgtgtaaccgattggacacctgctttgtatataaagaggtgatccaccatgaaatggcacctacgaatcctttgctacagtggactaagcagatcacaatctgactgaaccactataattctctgtcttactgatattttccagttttgttgattgttttcccattcccagtcgagtactcgccattctaggt

SEQ ID NO: 283785 - DNA, 371 bp, Cannabis indica
gtagacacagttatgccagcttagcaatactggcacaaatggagaagcccctacaacaagaactccaaagaagtggtatagagatcattacacaaaaactagctaacctaaccattgtctcaacgctgctacaagaacttaaagatgcacagattgttgatgagttcttacagaagaaaagagcaggcttgccagagaaggaggcagaagatttctccgaaggtacagacagcatgttgaggtataagggaagagtgtgtgtagccaacgacatagagcttagaagaaagatcatgatggaagcacacactacaccctactcaatgcatccagggtcaaccaaaatgtacaatgacttaaaaacctgtatt

SEQ ID NO: 283786 - DNA, 767 bp, Cannabis indica
tcagctgtgcatgagtgtattgcatcgttggatcgataggcccaaagaaattgtgggggccgctcctcttcttcttcaacactaggctctcgttgccgcctgcgtccttgcggtgcatcaggtggaggctggccaaaaggatgtggctctttcagcttgttgacaaatgtggtatccatcttgcgaagtggcaacaccgttttgtcatactccaattgtggaactccatatgccccgcagagttctgttataatacccgctaaaccaaaaccacctcccgtgactccttgtacaatttggacattggagaagtgcttatttggcaccaaccaagcacttacgaagtacagccatgtctttgccactgggtttaattcacactgatataggatgtttggcaacccctcttggccatcgttgtcgtggaacctcaaccctggaaatcccaccgtctcagccacattcaccatatcaaactgctcttcctcctcaataagtcggaggcgttgctcttccctagaataattcgggacagaaaacatcacattaaaagcatcagcagtagcgggaaccttctttcctcgcacctttacctacccattccggcgctcgggccaattggcaagaaattcacaggccatagtcacattagcccggcccggagcatccacaaacgctcccccacttcatcctctcaatttgggctcgaattgtctcgaaccgtggttgacgtctcaaaggattttcagggaattcaataccccggt

SEQ ID NO: 283787 - DNA, 628 bp, Cannabis indica
ttaagggatttagtttcatgttgtatttcctgaggactttaaaacatttgcccaggtcgtctatgtgccccctagccattctgaatttgacgagcatgtcatccacgtatacttccatatttcgcccgatctggtctttaaacatcttgtttaccaatctttggtacgtagctccagtgttttttagaccaaacggcatgactttgtagtagtagagacccatatctattcgaaaacttgtatgttcttggtctggcggatgcattttgatttgattgtagactgaataagcatccatgaagcttaaaatttcatgccctgttgttgcgtctacgagctgatcgatccttggaagtggaaaacagtctttagggcatgctttgttgaggtcagtgaaatcaatacagactcgccatttcttattcggcttgggcacgagtacgggattcgcaacccaagctgggtaaaaagcttcaattatgaagttgttgttgcgcagcttttcaacttcatctttcagggctactgctctttctttatctagcagtctttgtttttgctggaatggccggatgttaggatcgatattcacaacatgtgaaataatagaagggtcgattccgaccat

SEQ ID NO: 283788 - DNA, 617 bp, Cannabis indica
ttcaccatataagtagtgtcgccaaaatttttagggcaaaaacccactgccgcaagttctaggtcgtgagttggataacgctgctcataatcttttaattatcgagaagcgtaggctatgactttatctgccagcattagcgcacagcccaaaccttgccttgatgcatcacaatacaccacaaatttctcttgatccgatggcaaggctaatacaggagctgtaatcaatcgttgcttcagctcttggaaactcttctcacacttatctgaccacataaatcgctggttcttcctagttaactcggataacgacattgcaatcttggaaaaaccttccgcaaaacgtcgataataacccgctaaaccgagaaaacttcgaatttcagtgactgttttgggtctaggccaattcttcactgcctcaatctttcctggatcaaccataatcccaacttttccaacaatatggcctagaaaggacacttgtgacagccaaaactcacactttttgaactttgcatagagtttatgatctcttaatcgctgcagaaccgttcgaagatgttgctcgtgttctgcttctgaccgagagtacacaaggatatcgtcgataaa

SEQ ID NO: 283789 - DNA, 592 bp, Cannabis indica
aaatattaagcttcatggatgcttatttgggctacaatcagatcaaaatgcatccgccagaccaagaacatacaagtttccggacagacatgggtctctactactacaaagtcatgtcgtttggtcttaaaaacgccggagctacataccaaagattggtcaacaagatgtttaaagaccagatcgacagaaatatggaagtgtacgtggatgatatgctcgtcaaatccagaaaggctgggggcacacatagacgacctggaggaatgttttaaagtcctagaaaatacaacatgaaactaaatcccttaaaatgctcatttggagtcagctcgggaaactttctaggcttcatcgtcaatgctcaaggaattgaagccaatccagaaaaaatccaagccctcctggatatgaactcgccaacaaaaaccaaagaggtgaaaagcctaactggtcgaatcgccgcacttagcagattcgtgtcaaaatcaacggataaatgtgttccattcttcaacatcctacgaggaaacagaagtttgagtggacaaagaatgtgaaagagcttttcaagatctaaaggtacagctcg

SEQ ID NO: 283790 - DNA, 534 bp, Cannabis indica
acataaagaaaagtaaattcagatacttacatgtcaaggccataagaagatagccagaacgatcatacgtccatagtaaaaggctttaaggctaaataatagtagtgttcaaaaactgagtgcctataggccaaaatcaagaacatgaaagccttcactactacaatttagccttttagtgacatgatttagtgacacacacaaaaatgtgggtcactaaagagttaggagtgatttttagtgacatgcacaattcaactctaaatgtttagtgttagtctcctataatgtgcgtcactataaatatagagtgtcactaaagattaaaagtcaaaaaatttcaaattttatttatttgaaaaatattgacatatagtgacacgctaaaagcgattggataagcatatgccgacacacttagcatgtcactatatcataatcatatttttttttaaaaaaaaacataataaaaaaaacaggtgtaatttttttggaaaggtaaatagctgtaaaataatatatttaataaataaa

SEQ ID NO: 283791 - DNA, 651 bp, Cannabis indica
gaatcctaaagtgagatgcagatgatgaaaggaaaaatcaattgtatactcagacagtcaatcttctatatatttttgccaaaaaatctagtctatcatgaaagatcaaaatatattgatataaggttgttttggatcagagagaagattaaagatcgagaaatagaacttgagaatgtacttagtgaagagaatcttgcagatgaaggaactaaagttctatcagtcagcaagttctaacgttgtttgaaattgctgaatatttgcttcacttgaagataactagatcactcccctgaggttttgtcttgtttggttctatgaattaaggtggaatttgttgtttggtaattcatagaacaaacacaataaaaatataacaatttttttaactaacatatgttaagttagttaaatgctatacaatgtttaaaaaaacgacaaatgagccttgaggcgtttttttttgtaaggcgaggcgtaagcctcaaaaattaatagaatcaatacttttagagcacctaagaggaagaagaagcagcaagctttttttttttttttttttttagttgggtttgaactttgaagcaatatgcagtagctgtgtgcaactgtgaagaaagagacgagctgctatgaagaagataaaac

SEQ ID NO: 283792 - DNA, 542 bp, Cannabis indica
aaataccccaaagaacaataccaaagcatcaaaacaacccagaacacacagatactaaaaatgccatgtgagctccaagctttgagtttcaaactcaaacttggctaaatctcacctacaaccatcaaaaccagaataaaactacatattcatgcatgtaaaaactgcagaaactgaactcaagcacaaccaaactttacagcaactaatgtcacattttcactttgaaaaccatagcttttgaaccaaaattccatatattgtaaaaccaactcaacatgcatcaaaacagtttcattccactcaaataagcatgctttaaatctctgaatacaacataaaaacacagcagcaacaagcaactcaaaactaagcatgcaacctaccatttctcttaaaaaattcaaggaaacataaaggaaagatgtagaaatcataccaacaacttttgaacactaaatcttgctaaaatgagcttgaaatccaagaaaaatggccagcttcttgctgctccaagaggggccgaatagagagagagagag

SEQ ID NO: 283793 - DNA, 575 bp, Cannabis indica
tttttttctagaagcttagatgatgtttgtgttttcatatttttgtaccttgaatttttttttcttattcgattatggtaagattcaaagttttttcgatctccttctcttcaaattctctcctctgtacgcttttagtttttgtttgtaggttatttttgcatttttttagagcaatggaggtcgatatctctatttttttttcctttttctcttttttgtatttggattttttcgggattttattgctttttctttgagatctacttcttgatttgagctgatttccttagtttttgaaataaaacaatggagatttggtgaattggggtgtttcggctagctcacgaagaaggaggagtttcctccgtttttttgttaggccggtgcttttttaaatacatacttttgtttactatttatgtttatttttcctttatagggtataaacgtaaaatgctgcctttattagtttattatagaaaaaatccctacttaatttttaacaattttattttttaatataaccaactttgagataatttctaacatgaacatatacagaaaatataatc

SEQ ID NO: 283794 - DNA, 524 bp, Cannabis indica
ggctactgcccgttctttatccagcaatcttcgtttttgctgaactgaccggatattaggatcgatattcaggatgtgcaaaataatagaaggatcgattccgaccatatccgcatgtgaccaggcgaaaacgtctaagttttctctcagaaattttatcaattcaaattttactccgagcaataaaccctttctgatttttagctttttggctgggatagctggatcgacctcaatctcttctaattcttccacatgtccaacattgttgcttgggtccccaagtcgaggatccacatcttcatcctcaccttgggcggtttcctactttggaatatttactcccctgtccgggctctggctggaggatacttccttcttagccttggccactacaaggttgtaacattcccgagcaaatcgctggttccctctaagacaccctaccccgattttggttgggaacttcaggcacgagtgaaatattcatgtgacagcttttaagtcatacaaggctggtcggc

SEQ ID NO: 283795 - DNA, 1051 bp, Cannabis indica
aagattcagagaaagagatccaggttcagatattgataatgctctgctacagaaaggaatcaagggctagatatctgaatggaaggagtcattatattctgctgcacccaatgtaaggtttcttaaactttatatgtgtttaatttatcgttttagaaagttcatatttaggatgttaataaacataattgtgagtagatctaagatcctggtaaaataaatttccaacagtatattaccgggaatggttggctaatccagtgctggtaccaaagcccaacgggacatggctggtttgtgtagacttcaccgatctaaacaaagcctgcccaaaggattgtttccccttgccaagaattgaccaaatggtggatgccacctctggattcaagctattgtccttcatggacgcatacgccggttacaaccagatcaaaatgcacatcgcgaatcaagagtgcactagcttcaggaccgataagggggtatactgttacctggtcatgccttttggactaaagaatgttggtgcaacttaccaaagaatggtgaaccagatgttcaagggccttctggggcgaaatatggaggtatacgtggacgacatgctggtcaaatcgaagacgtgcactagccacgcggatgacctagaagaatgtttcgaagtggtccggagatacggaatgaaacttaacccaaagaagtgcacttttggggttaagtcggggaagtttctgggtttcattgtcagtcagcggggaattgaggcaaatccagagaaaatccaagctctcctgagcatgccttccccaagaaacacaaagatgtccagagtttaaccggaaaggttgctgccctgagccgttttatctcccgatccacagacaaatgcattcccttcttcaacatcttgaagaaatgtcagaaatttgaatggtccgacgagtgcgaggaggcattcaaaaaactaaaagagcacatggctaagccaccaatcctatcgaagcccgttctcagagaggacttgttcctatacttggctgtctccgag

SEQ ID NO: 283796 - DNA, 578 bp, Cannabis indica
aatgccataaaaaactttaaatttgtatttctttttatttctttttctttttttaataagtaaaacactaaaataaataaaaaaaaatgattagaatgtttttttttttttttttatttttatagaaattaaacttgttttttatggaattattacataaaaaatataaattgacattttatttacaaaaatacctccataaggtaaagacaacatttataccttttatgtgattttaattactaaaataccacttacactatcatcacttacacaatcagacgatggttgcagggtggttgctgcgtggttgcacggtggttgcatcagacgaatcagacgatggttgcagggtggttgctaggtggttggtcgaaggttgcatcagacgaagttttcaatcagacgaaagtttctgggtagttgctgggtggttggctgaaggttgcatcagacgaaggtttcaatcagacgaaataactgttagcaaaatgtttaggcaactgtaatgcaactgtaatgcaactgttgtgaaacattaaaaatcatacagtgtttccacgtacttaactctatct

SEQ ID NO: 283797 - DNA, 382 bp, Cannabis indica
agtcttacaagcagtattatctcaactagtgtggggatcatgagcctatataattaagcttccaataagcaggtctagaatttaccaagtaaattccttaacttattaattcctccttgtgccactatagattcaaagttgcactcttaattatatagagaactctatatgttccacgatatagatacgctatgaaattatccatcattataatcccaataattaaagatcctctatagatgatttacatcgagtagggataaatttactgttccaccccttaatgtattttatccttaaaacactcagcttcctataaataatattttagtaaactaatataattactaaaataagagcttttccatttatctctattaag

SEQ ID NO: 283798 - DNA, 534 bp, Cannabis indica
aagacaaagctttgaattcaaagctcaaggttgcacaaagctcaacccaatcaacaatatcagctgctaggaacttaatttaactcaaataacctataaaattcgaaccctaagcataaacaaacctaacatcccctatcaaaccaaaacaccatttcaacctaacttaaaggcttgaaaataaataaccaatagtctagggctttacctcacttccaatagcttaaagccttgctggaaatccaaggaaatgaaaggaagaaatctggttttgcctttgatttgccccagccgaatgcaagaaagagagaggaaaggtttatgttgattttctattttcttctattttctctaaatgggaaaaaacttaaggaaaatccattttcccttgctgaaaatagctttgctaggtgtcaaccatccaaaaagccacctatctcttatttctttcaaatgacaaaatgcccttttaggtataacttaggtatttctaaagctaggggtaaaatggtcaatttccataaccccgctcaa

SEQ ID NO: 283799 - DNA, 753 bp, Cannabis indica
ttatttgcgttttcagtatgagttgtttccattttttattgacatttgtttccattatagttaaatctaacttgcattttaatgttaaattgttttattttaataagacttgtttccaataaatagctacaggggaggttagagagtcccacattgctaatgtgtggaaaaataataaaatatataagatgaatgacctacttctctcattgccaattgattttgagatggaaccccatttatcttatcccaagttctgacaggactcattaaaaaatgtttcgtatattgagttctttatatagatttattatttttcactactacaatatgggcctttagcttcccttttttaacccattttataaaaagggaagctaaagggtgtgaaaacacccaccagattcgaaattgacatttagaggcagttttttggtaaaaaccgtaggtatatatattagtaaaccctatcccgtcggttggaaattgggattttttaagggtttctgggagaccctatgccgtcggttcctagcaaagaaccgacggcatagggtctcccaaagtataacctctgcatcgtcttcttcttcctcacttcttcttctccagcatataccagccacttctacagcagagaaaacccacgaaaaccctcgccaaccacctctaaaaacccccatatctttctcatttcttcaccatttcacctcatttttgtcttaaaagtttctattttcaatatctaatccc

SEQ ID NO: 283800 - DNA, 552 bp, Cannabis indica
ttttttagggctgaaatagcccatttcacacacaaaatttgaggcgcacgcctcttacgcctcaacgcctcacgcctcaactcaacgcctcaccacatgaggcgtacgcctcacttcttctcaacaaggcgcacgccttgaggcactgttcaaacgcctcagcttgaggcgcgcctcaaggcgcgcctcaaaaacgcctttttaaacattgattcagaatcggtagatacctattcacagaggcacccattcatttacacatgttatatatgaaaaattaaacattttcgcaacaattatacaaagcaaaaactttgtgtgataccgcttccatattaatttccactcattcttgaagccgattaaatctgcaaagttctcactgcaatctgtaaaggtattttttatacgcttcattattgttaatttaataacaataaatttatagagaaaacttaataaatttaatagcagattgaaagaaggagattgatagaaattttattttatatatgtatattatatatttgatttatatatacattatatata

SEQ ID NO: 283801 - DNA, 682 bp, Cannabis indica
ttggacggtttgtaaattttattgaacacccctagatttcatagtcttgactttgagattgagaaaataggagacaaagataaagtttagtttaataggatatgggaaaaatagttgtaaataagggtatattatcaaaacccatttacctatctacttacacctataaatttaatttataataattaattaaaataaaaactaaattaactacctaattataattctctaaccatataatttgaatattattatttaataattaaataaaacaaaatcaacctaattaaaaatatctacctacgtataattttaatttatttattttttatgctctttctttttcacactcaattatattacatttcaattccatttttaaaaatttcagactttttctttttttcttttttgttgtcgtataaattgattatacgactgactttttttatatggaaaaagattttttggcatacgactgacttttttaaattgtatttatatataaatattatttttaattaaatcaaataaaaaatagaaaaaaaatgagaaataatagtaaaatatcaattagtagatttatactctaataaaatattaaaaaattgagagaattaaggagagaaaagaaaaatatcaattttaaattgtatttatatataaatattatttttaatta

SEQ ID NO: 283802 - DNA, 918 bp, Cannabis indica
agaaggtgagcaaaagccggcaagtcaaaagttcctccactggaacgtccgcccaattcccccattatccaaataattcaagcttaaatggcaaacgttctaacaacaacaatagacaatggaatgggaagaaaggaaaattcactggcaaaaccgaacaagctccccgagagaatcaaaccagtacactgcatttaccatcttgactgaggatatagaaagtgtttacatggccactcattcgctagccccgtctaagaagctcgcgcccatgaagaaagatgttagtaagagagacatgaccaagttttgtcgattccacggagactacagccacgacaccaatgaatgcaacaatctgaagagagaaattgaattcctgataaggaaaaataacccgcatttacaaaagtatgtcaaagccgatcagaatcagaggaatgacaatagccaagaattgctacctccaccggtagatggacatctgtaagtcatcattggaggccaacatatagctggagatttaggcaaagcttaggagaggtatgcctgaacagcacagcacgagcaagaagaagtgatcttggccgtagaagaaaggaagcctaaaatcccacgggcaggagggcctaccataaccttcaacgatgaagatgttgtcaaaatcaagtttccgcacaaggactcgttggtcttagaggtccagatagctaacaagatggtggccagaaccatgattgataatggagcctcttccaatatcttgttcaagactgcctatgaaaagatgggactccaactcgaggatctaaccccatgtctcctgcctatctatggtttctctggccaaggagtcgcacctctaggacaaattcacttacccctcactgttgggcaatctccgacgagcatgactat

SEQ ID NO: 283803 - DNA, 1114 bp, Cannabis indica
atgaaaaaaattttaaaaaatatattgatatgtgattttaggcgtggatgttaattaaaaggttgtaataggatgttataattagcacttgatcattttgaggggcaccggccttaagatgccaagcactacaaattatgttttattattggtgcaatttaatattgatcaagtcttatataatttgatttaataaataacataagaaactgctaattatttacaatgtgctacattaaaatggtattaggtaccttaaaatacctaattggcatgcttatagctagatatatggcctattatttttctttttgaataaaaatatgacttattattattattttatgtcgtcaatgttcaccaaatacattcattaaatatacttatattttgtttacattcgtattatataatatatatattttttttaaaaattaacgaagtacttcattaaataaaactaaaagttagacctcacggtcattacaaagtaggttctccgacaaagcagagatcagaatacatccaaacatctggtgggaaaacgcccacttagccacattatgggccgcatagttacactgtctactaatgttcaaaaagttacaactaataaaagtaggagttgatctcaaacaaaaggaggcatagttctcaagagcccaatgggaatccttcccattgaggacattgatcactagtctcgagtcactctcaatagtaataaactttaaacctaagtcaattgccggagaaatggctgaacacatgccgcagctctccgcataaagcatctgaaaagtccaactgagctgtatggattcgaatcacctcacccacggtggttcctagcaacaacagctgtgcacatgcttgccagcccactcgacatcacattcagtttgatccactcctcagggggtggaatccagctttctgtcaaggtctgagtcggtgacggcattaaagaagcatgaaaatctgcaaaagaagtgtaaataaggtcaatgcattttgatacattcggggaaaggttattgtgaactttgtcatttcgcactctccagatagtgtcaactacaatcgatgcaaaaagaaaaacctcctcttcgcg

SEQ ID NO: 283804 - DNA, 499 bp, Cannabis indica
taactgggagtgcaattccaagttctatgatggatggaatgaggaattaataagttagtggatttacttggtaaattcctgatctgcttattggaagcttggatatatatgcctatggtccccatactagttgagacaatactgcttgtaagactcaattaattgattttaattaatcgattataattctaaaattagactatgtctagtttatgaatttttactaagctagggcttaattgtgaagaaaagagattctagggtttatttgttaattaaaagactttattaagtctaattaataaatatattaaatgataattttatttaataattaattttaatgattaaataattagatttggcatttaagtgtttaaagtataaaatgacatttttgagaaaataagataaataattggaaaaatggaaaaattgcaaagtggggcccaatatccatggccggctacttaatgggcaatttaccatttaatttttt

SEQ ID NO: 283805 - DNA, 775 bp, Cannabis indica
aaaaaaaaaaataaaaaaaaaaaaaaaaaaaaaactaagtttagaagtgtaaaaataaaaaaaaacccctaaattttaattaattctcatcaaatttcaaaaggagagaattagaggtaactaagggcccgtttggcacagcttttggaaaagctaaaagctgcttttcaaaaaagctgtgacaaaaaggtgtttggtaagcagttaaaaaacagcttattgaagaaattatggaaaagctacagctaaaagctaaagctggtacaacccaacttttagaaaaagctgttttgattaaaagactttataataaattatttttactaaaaatttatttaattatttattatatattataaaaataaaatatttttaaataaaaaatatttaaaaataaataatatttaaatttctaatttttattttattttaaaaatattttatatttattttttattattaacaaataatatcaatttatgtttcttataaactacaattttatcttttgcaagtgataaaatataatttaaaatattaaaaattatttttatcaaatgcatataaatttatactatagaaaaaataattaaaaatatataaaaaataaaaatttatataacatattttttatatatatttgtaattataatgaactagattaaaatattatcattattgtaatagaatcttaacaactcacagcactttaaaaattataatttaccaaacactcagctcagcttttttccacagttctgctacagctgctttt

SEQ ID NO: 283806 - DNA, 507 bp, Cannabis indica
tctttgagagcagcttttccttgaggaggcttctcaggaattttgaaagtggttccaacagcaggcatctcaattgattcattctcaagaatcaattcctcttgatcagataaaattttatagattaagtgaggaaaaatgagattgagcctaggtttcttaccctttcgaagagagacaatttgctcccaaatcatgtcagccaaatcaattttagcaccaattgaaactttatacaaaaagaaagcaagttcatttgaaacatttaccggattggagcaagaaaactgttaactcaaacttttatatctccttgttttgatgattaacaaatatttgattattatttgttattaatgatttgttgattttgtagcaaaattaaaagagaaaataaataaattggtatttttaccaaactttttaaagcaaccctaaatggattcaacaagcatatcaagagcaaaagattcatcaagagatcaacaactcaagaccctattcaaa

SEQ ID NO: 283807 - DNA, 520 bp, Cannabis indica
tgggccatttcagatacttgagaaggtcgggcaggtagcgtatcggctagccttaccaccaacattgttggctgttcatgacatatttcatatttccatgttgaagaaataagtgtcagacccgactcatatcttgagttatgaagcccttgaactgcaatcagacttatcctacgaagagcaacctattcatattcggcatatcaagagctattcagattagatttcgaggacgaaatccttttaacgggggaataattgtaatgaccgccttactaatttggattagtaaaggcaattagcactaatttctattattttataattatttatgaattaattatttgtggaccccaatatttagaaataaatattaaagttataatttctcaatttcagagattttattaaactctaggagtattgtttgattaatatgtgaaatttgcaatttttgtaatttttgctcggcgacaacggaaaatgcgatggatgcctagtttgatcacatgggtaagtt

SEQ ID NO: 283808 - DNA, 519 bp, Cannabis indica
aataaacaaattgatatatgaggtaatgtaaaagtgtgagttaaaataaagaaagtaattttttttaaaagaagaaagtgaaattttggtgaagtgttttgaaaaattcaggataaaggtgataggagtgctctaaataaaataaaatgagaaatttacaccaaatattattattaatttttttaaaatatacatttatactttgacaaggaaatttttgcatttatatttttcttcctttaattttttttttcttttttacttgttttttatttattaaaagcttcaaaaaagctttttattttaaatcagttgcttacccttttttttttctttctctctacttcctctctatttctctttttttattatatttttcctaattctttctctttttattttttttttcttctaaataatttttttattctttgttatatatttattataatatatataataagtgtacattttattctctttttttaattactctttctctctcttacaaaaaattaa

SEQ ID NO: 283809 - DNA, 788 bp, Cannabis indica
gaaactgagatggaactgtggcataaaaggatgggtcacatgagtgagcaagggatcaaagaactgaccaagcaagggctcttaggcaatttcaaaccgaactcattacctttctgtgaagcatgtgtgttgggaaagcatcacagattgaaattcatggctggccaccattgttctaaaagaccactagaatatgttcatgctgatttatggggttctcacaaggttggaactcactcaggtaaacactatttcttgtccattgtagatgatttcagtaggcatgtatgggtttatttacttaaaaccaaaaatgaatgtcttgagaaattcagagaatggaaaattgaagtggaaaatcagtatgaaaggaaattgaaagtgcttaggacagataatggtttagagttcattaatactgaatttggcttgttatgttctgaatttggaattgttaggcatagaactgttaagcacacccctcagcaaaatggtgttgctgagaggatgaatagaaccttgttgaacaaggttaggtgcttgttgattagttctggtttaggtaaaatctactggggagaggctttgatcactgcatgttatttgattaataggagtcccagtagagtgattgatttaaaaactccctatgaaaaattgcatggcactacacctaaactgaatcacttgaaaatatttggctgcactgcatatgcacaccagaaacttgacaaattggaacctagggcaattaaatgtttctttcttggatatcctaagggtgttaa

SEQ ID NO: 283810 - DNA, 672 bp, Cannabis indica
cctggattaaggtggggcaacctatttttgatccactcatagaggtggcccaagcggattagattttcaatctcgtctttgagattcttacactcattggtgctatgaccaatgtcgttgtggtactcgcatcttttactcggatctctccgggagctgtctttgtacaatggctgtggtctccggtagtgcgtattttgcctagtggcaaagtacacacgttcctgggagtccgtgagctctgtgtactgagtatattggggtgtgtaccccttcttctggcgcttctctcccgttcgggtgctgcccttggaggaccttttgctcctcgacccctgggtagggcctgttaagctagcagtcggggcagcctgtgaaggagctcgtccattcaccccggacgggttgccgtaatgggaagatgctggtgccaaagcttggccctggctgtacccgggagtagcagagaactgtatgccactcacttgtggagtcgcggtcggggcagtacccgagggcgacactcctggcatgtatcctgctatcccggtgggataatagcctccataagccacgatctgggcttcttcgaggttaatatacttttggacccttttctggaagtcctggaggctagcagcaccttcttgctgcaactcattccagaaggga

SEQ ID NO: 283811 - DNA, 515 bp, Cannabis indica
ccggcgtttttaagaccaaatggcatgactttgtagcagtagagacccatatctgtccggaaacttgtatgttcttggtctggtggatgcatcttgatttgattgtagcccgaataagcatccatgaagcttaatatttcgtgtccggctgttgcatcgacgagctgatcgattctacgaagtgggaaacagtctttagggctgctttgttgaggtctgtgaagttaatacagactcgccatttcttattcggcttaggcacgagtaaggggttcacaacccaagccaggtaaaaggcttcaatgatgaagttgttattgcgcagcttttcaacttcgtctttcagggctactgctcgttctttatccagcaatcttcgtttttgctgaactggccggatattaggatcgatattcaggacgtgcgaaataatagaaggatcgattccgaccatatccgcatgtgaccaggcaaaaacgtctaggtttgctctcagaaattttatctattccgat

SEQ ID NO: 283812 - DNA, 519 bp, Cannabis indica
aacctacatgctttcaacatagcttaattcctatcaatttaacatgctttgaaccacataaaataaccacagaaagcagcagcaacaacatccaaaacaacatgcatgcatcatcacttttcatcatttttttcaagaaatttaaagagaaagagttagaatcacctaccacaatcaagagctcacaaattaaggttgaatcaagctttgaaaattgaagaaaaacccagctttgcaccccaaatacccagccgaaagtggagaggaaaagagagagagtttgagtgaaatttctaaatttttctaagtgtttgttttgaaaagtcaaatggagaataaagccacttaatctcaattcatttcagccaacatttaattaaaataaacatttaatttccaaataaaaactcacataagacaaaacactaatggggcaaaaagaccattttgcccctccaccataaaaccatgaaaatcatactaaaggggtatttttgggacattctaaattcccggcca

SEQ ID NO: 283813 - DNA, 433 bp, Cannabis indica
catggtagtgacgtcatggatctgagacaccatgtcccaccagacaagagcgtcttcctggaactggaaagtggcacacaccactctgtcattaccggtgacacccataaagttcagaattttggtgatcaccgttagccactgttcggccttcatcacatctggacctcccagaaagaccggaggtgcttgcttccggaaccgttcatacaaaggttccattctgttggccgccacaactatttcggcctgagcagaggggcgggtgccactggaactactggcacaggcactgcaggagccccctgctgcctcaatctctgaatctcgaggtcttgctcttcaattctggcttgcatttcagcaaacctaacctcccaattctgggctccctgatcggcttggggagcctgggcagcctgtggcgggttct

SEQ ID NO: 283814 - DNA, 957 bp, Cannabis indica
cttttcttttatttttaagcttttaagctgcaaaaaaaaaaaaaaaaagaaagaaaaccctatttaaagagtttccttccaaggcaagaaaaaacatttcaaaatcaacatcaagcttctcttcttcttctccttctgccgaaccctaggagcagctgggaaccaggtgaaactcatcttatttcatccactcttgagctaatctaagccctagaagctagctaagtgaaggtatgattttctactcttctcttgattggttttcttgagtttagtataggttttggtgaaggttttcaatgaattctgagctggggtataaactgagggtaaggtaggttcttagggttgaattggaacttgtttgaatgaaaattgagtgaggttaatggctggttgaaattggatatggttgttgagagaaaatttagtttttcttcactttgaagtgtgattttgagcaaattgatatattgcattgaaatagttgtttggttatgttataattgccataatatactgttctggaaagtttggttaggtttggtggaggtttgattggtttttggggtgaaaaaccagaaatcaccatggctgccaggaaaaaaaggcaggccgtttttctgggtgtctgaaaaacggccgaccgtttttcccaggaaagggggattttgggtttttctcctcaagtccgatctgattcggggtgtctttcggagtggaattcagggtgttttagagatggttaagctagtttgatctgggggaaagtagggtgtgttcgattgtgagaattagagttgattatcagaaatttgattaaggttttcatttgagttttaattgtcgtgacataggaccggaattgcttagcttgttttccactcaggtcggcccgtactcttgatttctgaaccaaggtagaaaagtggtaagcaccgtatgtggttaaagatt

SEQ ID NO: 283815 - DNA, 583 bp, Cannabis indica
tgacgtagacccacgtgttgctctcacacgtctaattacattaaggccttagaagtggttcatctcggttatgagtaccgagtccaacctgattatgccttgagcgcataatccttaaatttcatttcatttaacatggcatggcattatacacatattccactagagtaataaccctaggctaacagaccgttcctattagggtaataaccctaatcccggttactaaacattcatgcatatcatattcacataagcgccactgcgcatactctacgtgcaaactactgtcttacctgttgtccagctataaaaggagattccgaatccccgggtgctcctgatcaggtgccggtaatcctagtcacacaaatccgggataattcacacttagggttaacccctgattttcaactcataaaattcaaacatggcatttataactcagataatcatacagagctcggaacgagctttccaacgatataaagaactcccgaatcggagttcggaatcaaaagttacgaactttcgaaaatcaacacaaaactgcccaaaaacacgagggcgggccgtggcatgc

SEQ ID NO: 283816 - DNA, 504 bp, Cannabis indica
ggtcctatgtcacgacaattgaagcacaataaataccttaactcaaaatttcggattaaaaccctagtttagaaattaaacataacttaactcccaacaaccccaaattaggtcaagcatcccatatttaatttaaaacagatagtacacaatttccccgggtcaaaactgaacatgaggcaaactcggaaaattcccctgcaagcaaccggtcgaccggttctggtacaccagaacccatccggtcgaccggttctggcagaccaggaacttaaggttctcttctccaatttcgacccaaaactcctccaaacctaaccaaactttccagaacagtgtaataactataaaacaacatatctcaagcttcaaaacacaacaactcattcatttaatcaaattcacatactcaagtgaagaaaaactctactttagcctcatctagcttattcactccaaaccagcccctacatccaacaattataaattcaaacaatctcaaaa

SEQ ID NO: 283817 - DNA, 674 bp, Cannabis indica
aaaaacatggcaataccccaaataacatagaaacgagaaactttagggtcccaaaaaatttcccaaccggcagactggttgcacaatcggaattccggttctggaaattcctgaaacccatccggaattccggatgcacaaccggaattccggttcctcgcaggaaactttcaaaaattcatacattgctcaaatcaattccaaaccataccaaagcttccagacctgttctaaataccctaaagaacaagtctaaagcaacaaaaccatccagaaatctcagatattaaaaatgccatgtgagctccaagctttgagttcaaaactcaaacttggctaaagctcataaacaaccatttaaacttgatttaaactacataaacatgcatttagaaactgcagaaaacatacacaaactcatgcaacaattacagcaacaaatttcaaaatttctctttgaaaacttaagcttttgaactaaaaattccacaactctaaacaacctaactatcatgcatcacaagcagcttaattatcctcaattaatcatgcttaaacctctgcaaacaacaacaaaatcacagcaacaacaacaacctaaactaagcatgcaaaccataaaattcttccaaaatttccaagaaacaagaaaagaagctagagcaaggtttacc

SEQ ID NO: 283818 - DNA, 605 bp, Cannabis indica
gttctgggaattcctgaacccccatccggaattccggttgcacaaccggaattccggttcctctcaggatacaatcaaaaattcataactcattcaaatcaaacccaatttaaaccaaaccttccagacctgttctaaataccccaaagaacaataccaaagcaacaaaacagcccagaacacacgaatactaaaaatgccatgtgagatccaagctttgagttcaaaactcaaacttggctaaagctcacctacaagcatcaaaactagaatcaaactacataatcatgcataataacactgcagaaaccattctcaaactcatgcaacaaacacagcaaccaatttcgaaatttctctttgaaaactaaagcttttgaaccaaaaactcaaacttaaagaagggtgacaagcatgcattagaaccagctctaatctactcaaattaacatgctttaaacctcagaaacaacataaaatcacagcaacaatactaaaccaaactaagcatgcaaaccactttctttcataattttcaacaaattcaagagagaaagattaggagctaacctagcttgattagaacaccaaaaaggagatgaatt

SEQ ID NO: 283819 - DNA, 557 bp, Cannabis indica
ggggggcggcttcttgaagactccgtttctttcttcaattgcgtagatatggtctcgggagactgcgagttcagtatagttgacgaaacgaggtccacctttccttttcggcgaggattccttctttggaggagacttggccaacttcggacttcgctgtctccgcgggctacgtctccttgggcttcggcccctggagttcttccccggggactgcgagatcgtgaacgcggtattggtgaccggcgtttgtcttttcccttctctaactccgccagagaattctcgattctcttgtggggttcggccatggcgaagaattcgactaaggattcgggccttcgagcttgtaactccttccaaaagtcggtcctcggcaagatacctgttatcagcatgcaaacaagcgaagactcgggagccttctcgacttttgttacttctgcattaaagcgtttaaaatagtcttgtaaagactcaccaggttcttgtttgatgttggccaaagtcgtataaggtggcctatacgtcattgtggcctggaaatgtgtgaggaa

SEQ ID NO: 283820 - DNA, 514 bp, Cannabis indica
tcaaaatgtcatcaacataaaggaccaggatactaccacttaattatccttgagttgctaaacacaaggttcatcatcattttggtaaaagttgtaggttttgattatttcatcaaaccttttgttccaagaacgagaagcttgcttgagtccataaatggacctattgagtttgcaaaccttctctttctgtcctagaagcttataatcttctggttgctccatatagatggtttcttcaagaattctgttaaggaaagctgtcttgacatccatttgccaaatttcataatcgaaagcagcagccatggagagaagaattttgatggatttgagcatggtgaccgaactaaaagtatcctcatagtccacaccttctctttgggtataatccttagcgacaagtctagctttaaaagttttgacttcgccacatcacctcttttcttcttatagacccacttacatccaattggatgatgatcattaggtgcgtctacatattcccagactt

SEQ ID NO: 283821 - DNA, 534 bp, Cannabis indica
atgcaggatccaccgtctgtgaatttgctagatcagtcaggcctctacgagtctgcaccatcgtatttgtggttaaattttgaattaagagcaattcttgattctactcgcaatgaaagcaccaaaatgttgacctcgcttttagccaacgacaacgagtctgatttagtgagcgataagtgatttatagcaatcgatatataataaaggaatataaagacacaagaattttatagaggttcagccccgagtagttcgaaaaatagcctaatcctcgttacttgtattgacttaagaacaaggagaaaggttccttttcttatagctcttacaacagtatctctgaatatgtattcttagataatttctttagggcatagtctcgactaaactgtttgcgacccttttgcccagtgaacatgcatcactatttatagggctatatgcgtggagaggaagtctttcccctcaatggatataaacagaaagatcgtgggattaatgctgagtacaagatcctgggattgatgtaga

SEQ ID NO: 283822 - DNA, 707 bp, Cannabis indica
tctgctgcacccaatgtaaggttgcctaaactttatatgtgtttatttcattgttttagaattcatattaggatgttaatgaaacatgcttgttagtaaatttagatcctggtaaaatatttccaacattctggcctataaatgccagcgttttccttcattaggttactttcactactttgccattttttcacaagagtccatttgagagaaaaaaatttcagacaccatagatttcttcttgctcttccttcgccgttgccagtccaccctgtatcgtcgactgacgccgacccccagctctcaactttcatgtaagttctctagacacttcatgctttttatcgtctatttgcatgttaggatagaacttcttggttgagtgctggatttttgggaaataactttgactgagtctgttgtgtaatgtgtataatcttttttatttgtgtttttcttattttcctccatttttctttagaatcgacccttctgttcgaaagactggttagggcatggggcaatttttgctcccacattctgcgtttttcatttttcgtccactttcggtgcctttgggatttttgcacccgatgtttgctaaggaaagtcctttgggtttccattttcggcaaacatccggagagggcctctttccagcggttaggggacccccattcccttttttaacattagggttttgtttg

SEQ ID NO: 283823 - DNA, 562 bp, Cannabis indica
atacggtgataaaaataagtgagatacaatgagacaacaagtgagatacaataataacaatagttttgaatgatggagatatgaaaataatgcattatgaaaaatgccgtaatttttttataccaccttatttatttatttttataaaaataatttcttttaataaaataatttagaatactatatatagtaaatttcaaacttcttaataaataattctaaataataattaataaaattgtgcatttagtttttaataaaaaattatttataacaatatgaaataagataagatagcatatttataattttaatatatattataattatattttaagtaattatttattataatactaaaaaaatttaaattagccgcgcgaacggctaaattgcctaatttattaatacataccatatttgtttcatcatgattttaagtattaaatattagtatattattttttttattctaaattaaattatttatgaaatttttacatcaaaaatccaatttactcaatttattacaaaaaaatccctacacgcttacatcatcatt

SEQ ID NO: 283824 - DNA, 738 bp, Cannabis indica
gtcattttctaatgaggtacttatttttatagatatatgacttgcacaagtctggatcattagagaatggcaaagagttgctagctttagcatccgggtctgatcacttaggcacttactatgaaggttgtattgtgaatggagttcgatttatggctaccaaaagagatgagaagaggagcacacaaaatagtggagtgtttgtggcaggaacagaaggttttaattattacggcacactcactgaagtgctaaagttaaccttcactggtgtttactctgtcacattatttaagtgcaagtggtacaatacaaatccaagacggaagaaaacaatcgtcgagaaccttatcactagtattaatgtcagtggtgtatggtataaagatgacccatacatacttgctagtcaagcaaagcaagtgttttatctcgatgatttattgagagggaaaaattggaaaatagttgagaatgtaaatcaccgacaaatttgggatatcgtggatgatgatgctaacgtcgaaattgatttggtacacgacaccaactcatccaattttgtgttaacagttgatcttggggagttaattttgctacctaatcaacctcctatagacattggcactgaaccaagttcgcctgtcaacgaagatgccgcaacgtggacgcgaagatgctactgaagaatctgacgaagattttagttgacctttgtgaagatgatgtgaatgatca

SEQ ID NO: 283825 - DNA, 501 bp, Cannabis indica
aaaataatcaaatctatagaaaaaaatattaatttttggatatttatgtaaagttgatcaattgaatatatatatttatatataaatatataaaattaattgagtaaggtattcaattgcccctacaaagagaaatattaattttagacaaatcggtgtgaatgaaaaaatattttacttgtagtattttcttaatgaaatataatatatattgtgtttacttgtagttaataagtataatactcacatagtttgtaaacaatgtgagactcttacaaaatatatgtatatatacattacttagaagacatattataaaataaataaaatattaatagataaatagtaaaaaaatgttcatacatctcatttgatttatatattgagaaaaaaaataatgtttaatttcattttaaataatttagttcgaatattttttgagctattaaaaatatagaattatatatataatcttgaaataaaattaactcataataaatt

SEQ ID NO: 283826 - DNA, 516 bp, Cannabis indica
tccggtctcttgcacaccaggcgcagtttcagtaacaggagttgtcccaccattcaccacgcttcccgtctgtccaggattgacagcgggtggaacccttgaactccctaggtcctgcaacatcggatctagcgtctgtgagtttcctgggtcggacaggtctctacgagtttgtaccatcgtgtcgagtattgaaaggagcaatctgtgattcttctctcaatgaaagcaccaaaatgttaacttcacttttagccaacgacaatgagtctttttgataatcgagaaacgatatgtcgtaataagaatatgtaataaagcaataataagacaaagaaattttatagaggttcagccccgagcagttcggaatcctcgttagttgtattcacttaagaataaggaagaagtgtccttttcttgtagctcctacaataatatctctgaatatataattcttagatagccttagcttatagcgtttcggcttacactttctcggtcctttgcccagtg

SEQ ID NO: 283827 - DNA, 887 bp, Cannabis indica
ctgttattcagtactactccaccatttatcacaggtctacaaatgttatgactgtgtattctcctatagaacagacctttaataccacaacccaaagaaacttcttgactgcaataccaatgaaagaaaaaaagaaagaaaaaacacccatgttacaaattcttaataaataaaaaataaacaaacaaataattgaagagaaagggctttaccagggaaacatgtgaggagtaatccgataggtaaagagagagaaagtgaagcttttcataagcacagcccagaaagaaacttaagtaaggtttttgcaagagttcatgggttcacgtcacctaagtcgaaattcaaggccaaagactctgtaatcaaatactcttaattattaaactcagttcatttctaagtttcctcacaaacaaaatgcacacacacatatatataagcatattatttcaaataagttttaacacttgtgaggcattttctcaaacacatggtttgcataaacaaacaacaactcttctctctcgctatgtatatatatatatatatatatatatatataactaaataataatatgtatagaaggaagagatatatatatatatatatatataactgctattgtttgctaaatatttgttataaataatattttttcaaaaagaaaaaaaaaagaaaactaatgatccacaatgtgatgactctccaagtgtgaaagcatatctaccgcccagtcttccctcatttcatcaatcatagcttttggatatggttttttttctattagctgcaaaatataaaataaaaataaattaattaaataataaatataaatataacataatttatagtttataattattttacaaatatttatgtacat

SEQ ID NO: 283828 - DNA, 569 bp, Cannabis indica
attttgattgtatttgaatattaaaatttaaaatttacatatgagtaaatttttttattgtattttttaaaaaatattatttaatactttaatgtttattcaatttatatttatttgttaacattactttaaactataaatattttaatcttgaaaggcttatactatacatttattttttcaaatcaattatttgaacaccaaaaactaacaataatgaaaaaaaatcggtttaaatgggttaacccgaccaaactgacgaaaatcattgagcgggttataattttttattttttcattggacgggttacaaatagatatttacaacccgacatttatattgggttggtaaaaatacactataacctgaccaaaccgatcgatgtataaccctagtttcagcatctagaaaaaaaaattagtctatttttttttcatattcatgtccgttatagctatttaagagatcctacaaattttgagaaattcaaaataatttacaatatagaaaataatgttcaaatagtctattttatacgtatataaaataaaatagtcactcgtgtaac

SEQ ID NO: 283829 - DNA, 684 bp, Cannabis indica
taagtagatctagaatttaccatgtaaattctcgaacttattaattccgccttgcgccactatagattttgaattaataacactctcaattatatagaacgctccatatgtaccacgatatagatacgttatgattatccattgttacaatcctactagtaaaaggtcctctatagatgatctacactgaaaagagataaatttaccgttctatccgtcaatgtattttatccttaaaacacttagctacctataaatgatatttcagtaaactaatataattactgaaatgagatcttaatcatttatctgtattcagccaagctcgaaggaaatgatcgtttcacttctaaatacttatagaagctataaattccataactatgatcagtgctcccactaaattgcactaccatgttcccaagatgtaaatatctgccataaccattggttagcttccacgaacaacttgaagaacataaataatacaactaagttgaacctaaccatatcaagaataagatccatagacataagatcaacaactaagtttgtgatatcttatccaagatcaatatcagtctcttccaatgtatactccatacatccgatagtggttaactttgccaataccctggaaaggatatagcacttatccaaggtgtaagtataccttatcgctga

SEQ ID NO: 283830 - DNA, 524 bp, Cannabis indica
tttcgttctatcccataatttgtggctcatttagtttttgcttcctgatctactagtaagttggcttcatatattccaccacatttagtggtacaataggaagtgtcggtaatatatataaaaatagactcaagatgagcctattgttctttcagatctcaaatatgtttccccttgttgtctaatcatatcctgtatagcagaatttacatgttcccaccattatgacaataaataattctcttccatactgtttgccctgagcctaaatagctcgctaatcacacaattccattgcccttactgtataacttaccacacatttagtccacatcttctaaccatttaaaactcagacagatatcaatatgcatataccattcttatcacaatcatcactatgctactgttcccagcatactttataatagcctaggcaggtaatccaatagcaaataatataaatacttactatataccatgagtcgacctgtcctcgcagcaaatgtacatattcgaccagt

SEQ ID NO: 283831 - DNA, 568 bp, Cannabis indica
aaacttacaaacaagctaaacacatactcctgcaacaaaaaaaaatatttattttcgaaacaaaataataatataataaaatataggcagcagattttgtgcccatatgtgcaaaatacggattggaatccgttgtacggcaggtgggtcccactgtacttttaaatgttttttaatttttgaaattttggtggtaaccagttgttgtaggtgtggttaccggtagggagtttatttttttaattaaaaaatagttaggtacgaaaaaggtacaaaatagtactgtgtgtgttagttagagtacaaaaaggtacagcagtcttcactattcctggcagttgatggtacgaaaacactgtaggcagtgggtccatgttgtcggattgaggctattttggtattttccttcattcataggatcatatgtatttgtgggatggtaattaagtacattatatcgagtaccgtgtacattacttgtttttgcgttaccgagtacaaaatttcacgtaccgagtacgttcatttacgtttcgtagtatattgtttagaatttttttttaagtga

SEQ ID NO: 283832 - DNA, 660 bp, Cannabis indica
ttgaaaaaaaaaagaatgaaaaaaaaaatcagaaataaaaaaaatttcagtgatgtctagtgattgaaaaaaaaaagtagaaaaatctcaatcatggttagttgtgggaacacttcgggaaattttaaaattatgagaagcttgtgggttcttttgtgcttatgatatctttagccaaaattgtctttcattttccaaatatctaagccataaattctaaccttaaaaagtccttttgattccgaaaagaatgttgtcaacattagtggagagaggtaagcatgcaagcatattggctattggtttgtggactagtttgatggagtgaaaccattatgacattatttcgatactgaagttagtttgtatctctgcattgtgtgataaaatgagcatcctaattaattgttagagtttttagaattgaaatctagtttagttaatggaaggaaatttcacatgagccagcagtaatataattatctgatagcttagttaatcgagttttagtgttagtcttagtcttactcgagggcgagtaagaatctagtttgggggaatttgttaggctatttttagcatacgttttgggtcactttttatagttgttttccttctttattattatatttggaatagaattacgctggttttctttgg

SEQ ID NO: 283833 - DNA, 676 bp, Cannabis indica
agattatttgaatagttagtttgtatattattttttagctaaacttaattttattttgtaatgcatgggatttaattaatgcttacttaaggttttataattctcattcagtttatttttacaaaatgtgtatatttatttttttattttaaaataaatataatttttgacatgataagagtatacaaggtttttttttcaagaaaaagagtatacgaggtttcattttcattttttttaaaaaaaattcaattttaaattaattaaataaaagaaataaataaattatattaaattatactttttaatttacataattttatattcatattaaaaatcaaaagaatgcatgtgcatgcatcgcacgtgccaaaaactagtatttatatatatatatatattagaaatttttacacccctacacgcttacatcattatttttaccttttctctttcttttattacaaatatatcacttacacatcaatttcatgcacagacacgtgtggcctccctatcaaccatcaatcaacttccaatcactttcctctcttttttcctttttttttcatttgatttttgattttattttcagtttttttttttttttttttagtaaagtatcaagtaacctccattgttgaagcataactacccacgattcatcacagttttt

SEQ ID NO: 283834 - DNA, 517 bp, Cannabis indica
aaagagttttatttagggcataaaacccaacataaagtactaggtcggatgaccactttaagtgctaaatgaacatttgcttctaagggaatggcctgctgggcagactactctcaaaggtttcgataaaagaaacaaagtactcaggttgggtgaccactttaaagtacagtttcttatgtctactatttgttttatctcatgttaaggtaaaggatcagattggatcaaatagctctgatgtaagttactacggtaacaaattgtaacaccctaactagcataggcgtgttgacgtgattttaaacgtattgtgcagctcgttgctaatcaacgaggttatcgaaaatcgtgattaattaaaatttttctatttaattaaaacttataatattacatacaaaatatttcgggatcccatttacaaaatactttataaaagttcgctattcaacacaaaatatttgtcgcccagcgactaactacaaaagccttgatgtcccgaggattgtacgct

SEQ ID NO: 283835 - DNA, 444 bp, Cannabis indica
ggcacaaaacccaacaaacttccacttgcactaatataaaacaaaaagtgcatttcaaataatctcgacatcttgatatccaaatcaagtgtagtatgtagtatactctccgtaatacgatctgacaagttgtatttaatacaaccttttctccaccattacacttccttaatcacaaaatccttgatattgtgaaattcctctctttatgtctactcctctagggatactggattctttactttttggcaactacttttgcattagtcaagaagtaacactagtagttaataaatgttggaacaatgccaaaaaatatatagaactttccatagactgaataagtatcttttctacaactttaacattcagtctctctggtagacttagagaattcagataggtttttacagttctccaaaatcactactccacccccagagt

SEQ ID NO: 283836 - DNA, 331 bp, Cannabis indica
taggtcatacacagatgaaagaagaatgtaaaatttacctgttacaaattatttacttgacctattgacaattgaaccatgggttaaaatcagatcattggatctgtcaacaagttaaccatgacaatttagatcaagcaataataggttttagaaaacttacaaacaagctaaaacacatactcctgcaaccatttcaaaaatttgctaaccatcttttaaattttcatattattttataaattaaatattcaataaaatagaatgataataaatatcttttctgattttataatttaataaaaaaaataacaaaatttaaaagttagca

SEQ ID NO: 283837 - DNA, 601 bp, Cannabis indica
tccaatactgaagctatcacaaggattgaagctcaaagatcaaggttggaggtatttcgatccttcattgcatatacatttcgatgtgtttatagtttttccgcattacatatcgttcatatatatgctatatgtcatatactatatatattagtctcacaagtatttgatgtaaaataaaaagaaaccttaaaatgtaaatgtaaaataaactaaagaaaaaaaataaaaccaattaagctagaaacaaaaatatgagtttagatattatgtttataaaaatatagcatattaaatactaataaaaaaatattaaatgtaaaaaaataccataaaagagtaacacatttataaataccatatttttagtaactttttttttttataaatttccatattccatctaattttcacattttaaaagggaaatttgataaattatgcttaaacattagggggtggtgtttaattataccacccttttcaaaattttataactatcctcatcttttattagtgaccccaaaatacccctctcctctaacccaaaaaatttgcctcttctccctctcatctcatcttcaggcactctctctttctc

SEQ ID NO: 283838 - DNA, 655 bp, Cannabis indica
gttttcgaacagatatgggtctctaatgctataaagtcataccgttcggtctaaaaaatgttggagctacgtactaaagattggtaaacaaaatgtttaaataccagatcgggcgaaatattgaagtgtatgtggatgacatgctcgtcaaatttagaaaggctggggggcacatagacgacctggatgaatgtttcaaagtcctcagaaaatacaacatgaaactaaatcccctaaagtgctcctttggagtcagcttgagaaagtttctaggcttcatcgtcaatgcccgaggaatggaagccaatccagaaaaaattcaagccctcctggatatgaactcgccaacaaaaatcaaagaagtgcaaagcttaactggtcgaatcgccgcactcagcagattcgtatcaaaatcaacggaaaaatgtgttccattcttcaacatcctaagaggaaacaaaaagttcgagtggacagaagaatgtgaaagagcttttcaagatttaaaggcacaacttgcaaaacctcccgtactttctaaacctctagacgttgaggagatggggatatacctagctatcacagagcatgccgtgagtgccgtgctgatcagagaagagaacagcgtacatgacccagtctattacattagtaa

SEQ ID NO: 283839 - DNA, 537 bp, Cannabis indica
ttccaataagctgatcaagaatctaccaagtaaattcactagcttattaattccttgttgcatccactcttggaacttagaattgcactctcagtcatatagaacgctctatatgttccaccatatagatacgctatcacatttaaccatcgttataatctaaataatcaaagatcctctatatagatgatttacaccgagtagggactaatttaccgtttcacccctcaatgtattttgatccttaaaacacttagctacctgtaaatgatatttaagtgaactaaaatataatcacagaaataagagctcttccatttacatctatttagctaagctcgaaggaaatcatcactttacttctaaatacctgtagaagctatagattccatatttatgtttagcgctcccactcaatcatactatcatgttcctaatatgtacgtattgccctgacctgaaagtaggtttaactaacaaatcaaagaacatgaatagtactcctgaaattgaacccaagcatatcaggattaagat

SEQ ID NO: 283840 - DNA, 425 bp, Cannabis indica
ttttaaacagtttttttttcttaatcaatattttggacttcgaccagacccggacccaaatccccttcccacagccttggcaatgaacccgccttctgaccccgtacttagacccgacttaaataaaatcaaaaagtaaagataaaaaagaactttacagaacacacttttgttttctatttttaaaattgaaaaacaaaagtggttacagaacgcatttttgttttttttcaaacaaaaattttaaaaacaaaattttacttcattttgggattaaaaacttaaaaataaaagtgttaccaaacggcacctaagttaaggaacttagtaaattctagatctacttattgaaagctcggttatataggcccatgctctactcactagttgagataatactgcttgtaaactcagttaattaattt

SEQ ID NO: 283841 - DNA, 598 bp, Cannabis indica
ttcagaccgagaaaactcgaagaggcccttgtccgaggcgagtttgaccgagtaaacactcggatccgcgcgcgcatggggtgtcaccacccctatttttttcaaaacttcaaaaaatcataactaatttaaattaaattgaaatgaacttttgtaaaaaagtgaattgcttaattttctccaaactatccaataaaaataattccagaaaaaaattctaattatttttcgtaaaaatttgcaaacatcaaacaatcatcataaacacaaagatcaacatgaatcacatccaaatcatacatttatcgttttaagtccaaatttcttaaaagtaaattaattaccatggctctaaggccagttgttggaattattttactaggatcaagatttactaacaagtatgttattaacatcataaacatgaacctctaaaacgatatgaaataaacacatataaagtttcagaaaccttacagtggttgcagtggaatataatgtctccttccactcagatctctaacccttgtatccattatgtagcagagtatcacaaaaatctgagtctgaatctccttctcttgaaactggattcttc

SEQ ID NO: 283842 - DNA, 591 bp, Cannabis indica
tcgtaatgtccatacctagtacggaaagccgtcttcggaatgtcctcctctcaaattttcaactgatgatacccgatcggagatcaatcttggaaaagaccgtcttcccctgaagttgatcaaaaagatcatcgatcctaggtaatggatatttattcttcactgttagcttgtttaattcccgataatcgatgcacattctcatagttccatctttcttcttgacgaataaaaccggagctccccagggtgacacactaggccggataaaccctatgtcaagtaacccttgaagctgaatctttaattctttaagctcagctggagccattctatacggagccttggaaaccggttccactccgggtgccaaatctataacaaaatcaatctcccgctgaggtggtaaacctggaagttcttcgggaaaaacatctaaaaattcccgaactaccctgatgttgtaaagaccgcttagtttaatttggaaattagcagttaattatgtttaattatggaaaattatttatagatatttaaataattatttatgctgttattattgaattttgaaatgcattttatgtcata

SEQ ID NO: 283843 - DNA, 342 bp, Cannabis indica
atctatagcttctatctggccaaactgacacaaacatcccagtggatctgaatagcaatcccttgcctccaagggaggaccctccagtggcgcctcctactaaaggaaggactcatgggcgacaacccccaagaacaacaactgaatctcatctccagtactatgctgaagagacaagaccaggagttggcgagcctacaaatggtgaaccccatgtggacttgggagaagatcttgttggaaattattttaccaggatcttagagctactcacaagtatgttgattaaaaacccaaatatgaacttctaaaacgattacaaattaaacacatataaagtat

SEQ ID NO: 283844 - DNA, 577 bp, Cannabis indica
aatctaaaaatatttttctaccttaataagtagagctatagaaaacaaactcggtaactttttgagtgttaaaaaattgtaaatggttataaattcagagtaagtaacttgtgtgtggcagctggttaaagaagccaaaattgaggtttatgattagaaagtagaagcaccgctagaactttcctttgtttgaagtaatagtataataactaatatcttttattacatattaataattaattcaagatgaactttccaaagtatttttgaaacatcgtgggatatataaatgcaatacttttgtataatagcatgtagcatgttgtcttcattagtattttttaaattttaaaatgaaaattaaaattataaaatatagcttaagaaattataactaaggttataaactggtaaaggttgtgttggaggctagggtttttgctctagagagagaaatttgttagattaaattttggtaggattatttagctaaaattaatcaattataattaacgttttctaatcagaatattctgttaacattttgacagaaaaataaataataacattaaaccaa

SEQ ID NO: 283845 - DNA, 385 bp, Cannabis indica
atttaattaaatatcatgacagtaataatatttaagtgtcaaaaatgaaatcaacttaaatatttaatttttaatttaattaaatgtattaaatacaagaattaaataatcaagtataaaagaaacttaattattaattctaatttaatactaggaaaaatattctataaataagttggtccaaaattaattaaaataaataattaattttcaacttaaaatattttcctatttaatattagaaataataactagtactagaaataactatctagaatatatcattgactaagtgtttttctaaaatttgaaaaacaaaatatctaatttaagttgttatagaaaaaatttaaaatatccaacttaaatatttttcaaataaaat

SEQ ID NO: 283846 - DNA, 538 bp, Cannabis indica
tttctcttgtcggcttcgttgtgttggttacttggcagtttccttttgttatcaccacctccattactggcctttctggcctcccaccttgctgtattgtctttctgtatacgactttcacacaactcagcttctagggctttttccagtacctcagcatacgtggttgcccttactcctgacatcgctatgtcccgacttattcgggagtcgagcccttcagtaaaacgatgaatcctcagaaactcagtaggaaccagatctgtggcaaactttgctaatctgtcaaattggcgagcatactctgtaactgtagacttaccctgcctcaggttcgtgaactcattaactctagctgagcgtattgcttcactgtagtattttttgttaaaaacttgtacaaagtcagcccaggtcattgcggccacatcccgtgtttgtttaataacatcccaccagatgcgggcatcctttttcaataaactagcagcacaagctacactatctccgttaccgagccgcatgtactcaacaatac

SEQ ID NO: 283847 - DNA, 572 bp, Cannabis indica
aagaaagaaaagaaaatccttactatattacttagaaaccaagtaaccatcaaaacacaacctcttctccttctctctctctctcgtgcaagcttgaaccagccaaccctaggggattttcttcagcaagctttctttttccaagcagaatttcaattccaaatcagcctagaagtgaattgaggtaggtttcctactttttgggttgagaacactagtttttgagttggttttgaggtagggttttgcttttctattgctgtaggaatcaaactgagtttgaggtgtgtttagggtaggtttttgagtatgttgggagtgatgttaagtggtctttatggctgtttgaattgagtttggtttgatgaagccaaagttgaatttcttcacttgaacatgtgattttgagttagggattgaatttttgtgttttgaagcttgagatatgttatatttatgttattatactgttctgtaaagtttgggaacaattggttaggtttggagcaagttttgggactttgaagagctgaaatttttgagtttctgctgttgtgaactggaatttcgga

SEQ ID NO: 283848 - DNA, 434 bp, Cannabis indica
tattttgaaattaaaaataagtcttttttttttcctttttcttttttagattggttcctcaactcatgcccctgcttctgttgagacttctgagaagactgatcttgaaatggttgtttttcaagagactcctattttacgtcctcaaaagagggatcggaagaaaggagctgttttgaaatccccattcattgagcttgcttctggtgcatctaaatcaggttcatcctcagtttctcctgatgattctgtgtataaggtcgttaaatatgtgcgtggtttgtgcccgttggacaacaagattggtgaacctgtcgatccgcaattggaagctgagtttgtcaagtgggttgatacaggtcttagaaagcataaatctaagtaagtatttttgtaggtgttttcagttatatatctcttattgttttccattt

SEQ ID NO: 283849 - DNA, 550 bp, Cannabis indica
attgaaaagaaaggtggaaactcctgaaaacaaaaaaaaagtgaggacccatttgcgttcttgtgcaaggttcaaagatcccaaaatccattaatcccggtgtttaaggctaaaggggttattataggagggatgtatcaacttttcagttagtgtggccaatattataaagggaacattagtgagattgggacaatcttgtggctcaaggtttctagatgcttttagaggagtcactagggttattggttaagcgggacattgattctgaattgaaatggtaatgggagtaaaacctgtatctaaaattctgaattggatggtaactgtagaattgaaaggagtgaagattcagttgtaggaaaagttgggcttgaaattaccagtttaagtatttcattctggagtacaccagttttatttgtgaagaataagtatcctttgataaggacagatgttacgttgaataattttagggaaggatcatcttctctaggtttggtcttcgatctggttattaccagttgaagacttgaaaggaggatgttcc

SEQ ID NO: 283850 - DNA, 442 bp, Cannabis indica
gaatttttcaaaaattcacacatagctcaaatcaaaaccaaacaataccaaaacttccagacttgctttaaatgtcccatataacatttctaaagcaacaaaaccacccagaacacacagaatcagaaatcaccattggaggttcaatattgagttcaaaactcaaaacttgactaatccctccaaacagccactaaaacatgcataattcaacatatttcatcatattaaaactgcagaaaccaaaccctaactcatgcaataactacagccaccaatttccaaaattctcattaaaaactaaacttttgcatagaaaatccataactctaaacaacctaactatcaagcaccacaagtagcttaattaacctcaaataaccatgcttaaatctcagaaaataacaacaaaatcacagcagcaacaacatcaaattatcaa

SEQ ID NO: 283851 - DNA, 727 bp, Cannabis indica
tccatcaagtattgctaaccaaaaaataattttgtgtttagaaattatatttactccatatttgttcataccatttcatcatctcgccttcaggattaagaatcttataaccaagactaatagggtagttactgtttgcaaattattcctcagtctaaactagtttaatttttttttttaactttggcttaccttaacttttttattaaaaagaaaaaaaaatattgtactgaagatcctttttagttctccttacttaattggatactatcaaactttgcatgtttatctttagaaaatatacaaagcaaaaaattattattagaagaaaagaaatcaaagatacatgacatgtttctaaaaaaaaaaaatacatgaaatatttcaaaaaaaaaaaaagaacatacatatataatctaaaatttaatttgagaaagcaatatagaaattgtggtatgtctagcacctctatgacatgttattttataattagttataagcagttttttataatttttattaaattaaaataaatagtatctaatattaaattgtattagtaacaagtagacaccataaaagtcttttaacatttctcatctaaaaaacatttgtgattaagctaatttgttctattatcaagatagcgttcgaataggcgaggggactttggtaaatactaaatattcttctttgaaatgttttggtaagcaagtaaaagctattg

SEQ ID NO: 283852 - DNA, 562 bp, Cannabis indica
ttcctttttcggtcattggggctaaagcttttactcactccagtactagatgaggttttccacacgtccttcctctgagtactctttttacgaatcatgctttcagccccctcagcagtgagagctaagtccacaatctgaggataagtcttcacgatccctgattgtttggctgccataatcacatctctagcaatatactcttcaagacctctgataaacttagcttttcttgcagcatcactggccacttcatcagaagcaaacttggctagcctgtcaaacttggtagcatattcagtcacagtcatgctaccttgaactaatcgtgcgaactcttcagcttgagcggcacgaatggattcattataatatttctcataaaacagtgccctgaatgcatcccaagtcatagtattcagattatgaccttgggaaacaatctcccaccatatccgggcatcatctcgtaacatataaatagcacatcgtacccgatcattattttctacccgcatgaaatcaaagatagaagcaatcatagtcatccactgttctgctt

SEQ ID NO: 283853 - DNA, 112 bp, Cannabis indica
acagtaattggtttttacgtataataaggcagccaatctttaatttttatcctttatttatttcttttttttttactaaaaaaaaaaaagaagattttatctgttttttttt

SEQ ID NO: 283854 - DNA, 1012 bp, Cannabis indica
tcccagtggatgggagatctacacttccttccatataacagttcatagggagccatccctatcgtactctgataactgttattgtacgagaactctatcagtggtagatacttactccaggaaccctcaaaatccataacacaagcccgtagtaaatcttccagtatctgaatcgtcctttcagactgcccatctgtctgagggtggaaagctgtattgaattttagtttagtacccatagcccgctgcaaactctgccaaaacttagaagtaaacttcggatccctatccgaaactatggattttggcacaccatacagtcttacaatttctttaacatataaatctgcatactgagccactgaataggtcgttttaactggtagaaaatgtgaagacttcgtgaatcgatctaccacaacccaaatagaatcaaataaacccatggttctaggtaatccaaccacaaagtccatcgcgatatcctcccatttccactcaagtaggttaaaggctgtaacaaccctgctggtctctgatgttcagccttgatttgctgacaggttaggcatcttgatacgaattctaccacattcttcttcattccgctccaccagaaataaggtttaagatcttgatacatcttggtggtgccgtgatgcagagagtatggagtggtatgagcctcctcgagaatttcattcctgagttccacactattaggaacacaaaccctggttttgaacaatagcatcccactgtctgacactgtaaagtctctggcttgaccagctgaaacctcatctctgatcttaattaactccgaatcagtcatatgagcgactttaattctttctaacaaatcagattgcagcgtcaggttatgaagcttgactacaacaaactcaatgctagatctgacaatatcctctgctaactgaggttaaatctgaatcatactagctacctgcccgggacccttcctactcagggcatcagccactacattggc

SEQ ID NO: 283855 - DNA, 569 bp, Cannabis indica
gtacggttcggtagacttgtccactttttacttctaccctactgtttgttaagtttggagtaatacaattaggaaaatacaagaacaacttagaattcctacccctcctctctctctctctctatctctttcaaaccaagaaacctagggttcttctcctttgttttgattaattcttgctggaatgcaaagtgttgctcagtagtttgtggaaggattttatgaaggtaaaccatacaagtctagcttttatgttttttaagcttaaatttggttttatcatgcaaattctgagaagtagtggctgtttaggttaggcttttttctagtgtgatttctggttgaatatattttaccaggatctagatttactaacaagtatgtttattaacatgctaaatatggatttctaaaacaatagaattaaacacatataaatttgaagtaaccttacattgattgcagcggaatatatgtctcctcccactcagatctctaaccctgagtattatcaagatctgagtctgattctccttcaggtgttggattcttcacagtcttacacacta

SEQ ID NO: 283856 - DNA, 301 bp, Cannabis indica
aactgaaaatatgtttcatggcatggccggacagcgtaacaatgatcttgagttagaccggtgcacgtcggaactacccttcgtcaccagagatcaatttcctgccactacctcacaagttcaagatgccaacatggaaaatgtacactggagagaagatcctctctcccatctcaagtattttgagatgcaaatggatttacaagtggtacgagtgttagaatttattttaccacccgaatgtccttctcttgtgtgtgatcctcacagtcttccatctatgattgagttaccacttgct

SEQ ID NO: 283857 - DNA, 580 bp, Cannabis indica
caatcacgtgtacatcaacccaccaaaccactatataagtaaaggttaggttatccaaactaagcatttttttcaaaccccgttttactgttacctacatcaaatggacccttaccaaaacttcaacccttttgaaacaagtcctcaaaaatccccaccgcatcctttttcttccacaagacccgtaggtacaccgtcacggagtccaagactccgttcagcctccatttcaggatgtcctaactgtgcaaggctcgagactgttctccacgaacacgaaaaacttataaggaaggcacatttaagagccacggaggccaagcaggagtcatacaaactggcggaacacctctaccattcagcccatgccatgcaagaagccaacacttcaagagaaaaattaaagggtatcatggatgacattctcgactacaccgaggtgtccataccccactacccacttcatgtaaaacaaggatcaccaaacactactccaagacaaagtccttcacgaccaaagtccccgttcagagacaatagccctccgtctcaacggaagttccctcaagttatagaactt

SEQ ID NO: 283858 - DNA, 340 bp, Cannabis indica
tcactcaagggaatttcgaaaacagagaagaaaagagagaggaaagtggtggctcaggaattcactctgaaaagaatgagatgcaattgtgtgtgaaacctgaagcctttaccttctatttatagaataccacatatggttaaggttgaatatttacttggaattaaaaaatgaaaaatataatgagaaaaggcaagttaagtggccggccgtagcatagtggaaacaagcctttcacttttttaactttcctatttcatcatttctagtttctcattttctcaaagattgtcaattctctcattcaaccacataaatttcaaatctaattatttaataa

SEQ ID NO: 283859 - DNA, 514 bp, Cannabis indica
ttaaggggcggttaattcaagataaggcaattcttggttttgagagcctccattgtatgaagaaaggacggttcgagaacgagaggaagatggccttaaaactagatatgtcgaaagcatacgaccgtgtggagtggcctttcctagaagctatgatgttatgtttgggtatgatgagcgatgggtctctaaaattatgaactgtctccgctgggttacgttttctctcctgatcaatggtaatattagtggcaacatcactctgcaaagaggtctaaggcaaggtgacctgctatctccgtacatgttccttatttgctcagaagggttttcctgtctaatttatgaagcagaaagggctaatcggatccatggtataaggtttggaagagatggactccaactctcacacttatttttgccgatgatagctttgtgttcttcaatgcaaatgtcgaagaggaagagcactcaaaggtatccttgatgagtacacgcacctctctggtcagcg

SEQ ID NO: 283860 - DNA, 569 bp, Cannabis indica
cagactaccgtacaaaatagtcccagacaatggcaaacagttcgacagccaatccttcactgatttctgtgcaaaccatggtatcatcaaaagtttctccgcagtggcacatcctcaagcaaacggtcaagttgaagcagtcaacaaaaccttaaaggatacactaaagaagaaactcgaagatgccaaaggaaactggccagaagaactccccgaagttctatggtcataccgtacaacgaaaaaaacagcaaccggtcagacaccatttgcaatggcgtacggttatgaagctatgctggccgtcgaactcgagcctccttcccatagaatattgacgtacgatcaaggtaccaatcacatactccttgcagaatcacttgatgaaattgaagaaagacgagcaggtgcaaacttaaagttgatagcccatcaataaaaagtagctcggtatttcaacaaacaagtgaaagctcggaaattcttcgtgggagatatggtcctaagaagggtattccaaaacaccaaagacaggacggcaggtgtactaggacctaactgggaaggac

SEQ ID NO: 283861 - DNA, 560 bp, Cannabis indica
gccttctcgacctttgttacttctgcgttaaaacgcttgaaatagtcttgtaaagactcaccaggttcttgtttgatgttggccaaagtcgtatagggtggcctatacgtcattgtggcctggaaatgcgtgaggaataagtcgacgaaggtttcccacgtcgatatcgatgcctcaggtaattgggtgaaccaatcatgagcattttcctcgagtgttgccgcaagaatgcggcacttcgcgagttgcggtacctggtctacttccattatagtattgaatttttctaaataatctatcgggttagaagtacctttatacttgagggattcggataaacgaaaccctttcggaagttgagcctgtcgcacctctgcagtaaaaggcgaggtgccatgcagcttgtatataggcttgcgctgctgctcgagcatctttaaagcttgcagaagcatgctttgtcaattcctcctgtcgcaggggctggagtcgctgcgactgcggggctcgcaaccactgcggcaaggtttgctgggatattaatcccagtagtcgcgatc

SEQ ID NO: 283862 - DNA, 680 bp, Cannabis indica
tgaactaaactttccagaagccaacttgaaataccattgctgtgcggcttccgacagagtggcggggaagattctgcaacatacgtctcctcgcaccccttgtaaatccatttgcatctcaaaatacttgagatgggagagaggatcttctctcccagtgtacatcttccacgttggcatcttgaacttgtggggtagtggcaggagattgatctctggtgagaagggagttccgcgtgcacggtctaactcaagatcattgttacgctgcccggccatgccatgaaacatattcttcagttcgtcgagctgggcctgtacggctgggctgacttgattggcattttggtcgggttggattacgtcagcatctttctgagcggggatttgagtatgggctccgggctgcatgttcgttgtagtattctgctcgtctgttccccttcttctgtttagatcgtcccttaggtcatgggttgttcccaacctatcgaacacagaagaacctggctgccttagcgattggttcgcttggttgacaggtggaatggctccattattctgcgtggatccgtcgagcatgacccctcctgatgaatccccggacaaggtctgtccgcctacctcttggcccacgagtggaactcgtgaccggggattggacggctgaccgttggctg

SEQ ID NO: 283863 - DNA, 1022 bp, Cannabis indica
acaaagaaggatgcaaaataaaggttgattcgatgggtgcttctgcttcaagaatttgacattgaaataaaggataagaaggggaccgagaatctagttgctgatcatctttcaaaactcgagatagaagaaagccaaaatgcaaaagaagtgcaaataaatgatgagtttcctgatgaagaactctttagtttgagggaaagcttgatggtaccctggtttaatgattatgtcattttcttggctgcaaatgtaactcctctgaagatgtctcgtcaacaattgaaaaagttcttttcagaggtaaaacattactactgggaagagccaattcattacaagcactgcgccgatcagataataaggagatgtgtgcctgaagaagagatgtattctatcttgaaccactgtcatgccttacaatgtgggggcatttcagcggcataagaacagctgcaaaggttcttcaaagtggattcttttggccgactcttttcaaagatgctaatgactttgtgaaggcatgtgtcgttgtcagagaacagggaacatttccagaagaaacgaaatgcctttgataggtatcttagaggtggagttgtttgatgtctagggaatagatttcatgggtccttttccatcttcattcatcaatttgtacattttattggctgtggattatgtatcgaaatgggttgaagttgctgcaactccgggtaatgatggtaaaacagtcttgtatttccttcaaaaatacatattcactcgttttggaactccccgagcaatcattagagatgaagggagtcacttttgcaataaacaatttgaagctctgctatccagatatggcgttcgccataggactgctctaccctaccacccacagagtaatgaccaagctgaaatttccaaccgggagatcaagatgatattggagaaaacagtgcagagatcaaggaaagattggtcacaaaagttagatgatgcactgtgggcgtattgaacagctttaaaaacac

SEQ ID NO: 283864 - DNA, 409 bp, Cannabis indica
aaaataaaaaaataaagcaatgtacattactaaaatcagtaaaaattagatttataccttaatggacgttgagatacaatgttttctccactaaaaactgtggccagaggtataaccaccacaaccactacctctaccttcggtttaccctaaaaatgagaaaacatgtgatctttttaggtatggaaaatagaagatttagaaagaaaaaaaaggagctaaaatggtaaaaaaatggtgaaatgggggtgattttttatggtggttggcgaagagggtttgggggtttctgggttggctgatcgaatgaggaagacgaagggctgggtagggttataaaccccttttggcgtcggttatttagaaataactgacggtatagggggcacaccctatgccgttggttatt

SEQ ID NO: 283865 - DNA, 565 bp, Cannabis indica
ataaaaaaatcaaattttaaaggaaataagaaaagaggtaagcaaaacttgatttttcctattttcaaattcaaattacactaatatctaaaattaattttgaaaaatcaaattaatttatttctgataattagatttgaaatatgaaaaataaaatcaaaatacaaaactacacaaaaaatcggaagttaatttcatgaaatagcatgaaaaaaccaaagaaaacgaagaaaaattgcacgctgtacggatggtatgcattgcataccacccgcgcgcgcatgaggggtgtccagccgagtttccacggtgctgggaggctgcaagcagcccttccgcgcgcgtgggaaaggtgatcaccaccttgattttccccaattttcaaaaattcacaactaattcaaataaaatcgaaatcgagttatagtaaaaaaagtaaattgcttaaaattttccaaactatccaataaaaataatttcagaaacagaaaatcaattattttttccataattcacaaacatcaatcaaacatcaatatgacacaccatgataccatccaaatca

SEQ ID NO: 283866 - DNA, 609 bp, Cannabis indica
cgtcagtatccagagttgttcaggttagatttcgaggacgaaaatccttttaaggggggataagtgtaaagaccgttttcactttaatttaaaaattagcagatatatagggtttaattatgaaacttgcatatgagttatgaattgtcatttttacggagatttagttgaattcagaatgcattttatatgtcatatatggaatttcatatttttgcatgttttgtgccccacaacattggaacgcgatgtttggctattagaatcacattttagtatttttagtgtagcagggcagtatagttagacattgggaatgtcaagattagtcgagattttagaattgactaaattatccctaagtgattttatgacttttggtgtaggcaagggcattatggtctttttgccttttgggatttttcgtcctttactgagattttatttgaattattaatctaattttttgctgatattacttagataaaacaaagttttattttttcaatttattaaaaaaataaaaaaataggaaaaacaactcgctctccatttctctctttctctctctcaaattcaatagaacccagctagggtttggtcattttc

SEQ ID NO: 283867 - DNA, 553 bp, Cannabis indica
tgggccgaagccaaagcactcgcaaccatcacagcaactaaattgcgcgagtttgtctataactccataatttgtcgatttggtattccatacaaactcatttcagacaatggaaaacagttcgattgtaaagagatgcgacaactatgtgacgatctaggaatcaaaaaggcgttctccgcagttgcttacccgcaaagcaacggacagactgaagctgttaacaaaataataaaacacaccattaaagggagactagaagaacgcaaagggacttggccagacgagttaccgcaagtcctgtggtcttataatacaactcctcgatccacaactggcgaaacacccttctcgctttcctacgggtgcgaggccatggtgccagttgaaattggggcaggttccctacgcagagatgttttcaacatctcgcagaacgaagagaagcagtcactctaccttgatcttctggaagaaaaacgcgatcaagcacacttaaaaaatgcggcttaccagcggcgaactgcaagatactttaactctaaggtaaaag

SEQ ID NO: 283868 - DNA, 752 bp, Cannabis indica
gtgttagtctacaagggtggtgctttaaatcccgtatgctataccgactcaaatttccaggcttgtcttggtgacaggaagtctacatctgggatagtatttactcttggggtggagcaattgtttggagaagtgtgaagcaatctgcaatatcaaactctaccatggaggccgaatatatagctgccactgaggctgctaaggaactggtttggcaaagaaagttctttacagaacttagtgttgttcctagaatggaaaaaccactggttttactttgtgacaacactggtgctatagccaacagtaaagagcctcgaagccacaagagaaacaaacacattgagaggaaataccacatcaccagagaatatgtggcaagaggggatgtactggtggagaaagttgatactaaagacaacttacctgatccattcaccaaaattttgacagtcactacatttgaaaagcacagaacgaatctgggattaattgaaatgtactgattgttttattttagtgcaagtggaagttttttgggttttgtgccctaaataaaaccctatttcaatgtaatcttgaacattgatttatcaataaagaaacaaatttattttattacttgtttaatgtgttatttggttcatgtgatcacttgtttgatttataaatgttagagatattattacaatggaagaaaatcaaaatattacaactctattgtaatacaatacaaggaccaacaaagagat

SEQ ID NO: 283869 - DNA, 793 bp, Cannabis indica
gtaataattcaatagtaaataatatttttgtaaatcaatatagaaggaccaaaattatttgacatttttattatagatgagagaaaaaatttaactgtgtatatatgattctatccaaattcaattaatacaacaaataataatcattttattttaaatagaagttatattaggggagattcgaacttgaaacctccttgttgaaatttattattttctattaatttcacgtttttttctttttattttataggaaatggattagaatttgaacctccttcacatgaagaaaaatgtgaaactattagactatacttatgacgacatctcttactatatattgttatcatactttggtgattttacctttttgtttatatatatattttgctacacttaaataataaactttaactatatatcttaaatagagaatataatattaaatttcttccttaattaataaataattttatttatttactatattatagtggaaaagtaattatataatgattttttgtatttttttttagagtttagatttagagagaattcaagtacagaatcagtgaccatactataaggtatgaaaaaatcttaatcttttattttttgtagataaaatctttctaagactttttagctattttatttattttttgctttaaaaaaaagattaatttggactaataaaaccattacagggtatatgtattttataataatgttaatgtttataatgttgtgtaatgtacataatgaaagtcaatattatatatgatgagagaaa

SEQ ID NO: 283870 - DNA, 946 bp, Cannabis indica
ataatctagattcacttaaatttattccaagattttttaagtgtctgattttattgcaaaatttggtaaaaaaaaaataatcctgtctaaattttttttaaacaaaagaaatctaatttgaagggaaaaaagaaagtattttcttgaaaaggaaatattgagcagattcgttctgtaatttaattataaaatattcattaaatacatagtattttctttttgtcaaaataaataaataaataaaaagacagtatttgttggttgacaaacatgcccttacctgtcctaataaattttacaataaatgcaaaattcttccttaagtttccacgtgtatttacttaattatttatttatatttcattttcaccgtctaaaaaaaaataaataataaataaaaaaggtttgattgacaaataaaaaataaataatttaaaataaaaagtttcaacgtgtcaagtttttattggttagaagtgtacggttctcctcaactaattcactaattctcatatgtaaactttatattaaaaagtgattgacctacgtcttttgtttcattattattaatattaatattaatcctctcaagtctcaatctaattaagattagcaataaaatatttgaattttattttattttttttttgagtataatttgaattttatttttaacacgtttaaattataaaaaatttctaaaaacttacaaatagttttaaataattacaatttgtataattatagaaaaaaaatttaaaattatctaaaaaattactaataaatatcaaactaaatgagtatacttggaacacatctctaatttccattaaaatactattttaattttcatttgtaacgtatatttttttttgaatgatttatagcacatatttagtcatcggaatattcataaatagatccaattcaataacaaccgattaat

SEQ ID NO: 283871 - DNA, 554 bp, Cannabis indica
gaaaagttatgcagatttgaaaagacgggaggttgagttttccgtaggagacttagtgttcttgaaggtatcacctatgaaggggattatgcgcttcggaaaaaggggaaagttaagcccaagatttataggtccttttgaaatactggacagagttggtcaggtagcttaccgtttggccctaccgccaacattagcagaaacgcacaatgttttccatatttccatgttacggaagtatgtacctgatccgacacatgtgcttaaatacgagaacttgaacttgcagcaggacatgagttatatggcacgccctgtgcgcgtgatagaaaaaggaataaaggtcttacgaaataagactatacccttagtcaaaatcctgtggagtgatagttctgaaagagaagcgacatgggagttggaaaaggacatgcagaatcagtaccccgagttattctcaagtaagtaaatttcgaggacgaaattcctttaaggagggtagattgtaataaccaaaatatttagttattattttttttattacgttagtctta

SEQ ID NO: 283872 - DNA, 591 bp, Cannabis indica
ctttcagctacaacagtagcaagttgaccaatttgtgtctcaagccttaacatggattgagaacttgtgtgtaaatcttgttgggtggtttgcatgaactgttgtagggtatcctctaaagatggttttctttgttgttgaggatatggcatattatgttgggcatgactctgattgggtgagttgtattggtgcccttggttcattggaggctggttctgtctccaagaaaaatttggatgatttctccaatttggattgtcggactgagcaaatgggctatcaaatgaattcccataagtttgaagagcattcacatcttcaaaaaatgcctcttggtagataggcaatgatggacaagactgggtagtatgacttgtactataacatagagaacaaaattcattcctatggataggagtattcatggattgacttaatgacatagcttcaactctcctagttagatttgctaatgatgttttgatatctacgtcatctttgacatcgtaaattccacctctcttaggtgtgttggaagctttcgatctaggatcttggcaattccactgttgagaatttacagaaaga

SEQ ID NO: 283873 - DNA, 537 bp, Cannabis indica
ttctagacttgccttagtgctaggaagtgtactgatgagatggtgactacactgggggtggagtagtaattttggagaagtgtaaaaacctatctaaagtttctaactctaccagtgagactgaatgttaaagttgcaggaaaaatacttattcagcctatggaaagttctatacagtttttggcattgtaccaacaatttattaactagtagtgttacttcttgactagcacagaagtagttgccaaaaagtaaagaatccagtatccttagaggagtagacatatacagaggaatttcacaatatcaaggattttgtgattaaggaaatgtaattgtggagaaaaggttgtattgaatacaacatgtcagatcctattacagagcgaatattacacactacacttgatctggatatcaaggtgttaagattatgtaaaatgcactttttgttttatattagtgcaagtgggattttattggattttgtgccctaaataaaatccatttcaatataatcagatttactaattaata

SEQ ID NO: 283874 - DNA, 408 bp, Cannabis indica
ttacacaaggatcacattcattgttaatccattatttacatattgaattgcaataattaaacccaagcaacgttaacattaataaatgaacgacagttatcaagtccatcaacgtatgcgtcttccacatctgcgagttgactgttcatgttccgttgttgagctcgcagggtcaccagtacgtttggaacgtctgtacccttaggtaattgcctcttgtagacatcgcatgtcgagctggtagaacctagacatgcgaatctatatcggcttgtcagggctattgggtcgttgggaccaaatcgcatcatagagagttggtctctatgctttcgcataagtatagaggggatattcgcatatgtcctggcacatgcgagttgggtctacctgttgggttttatgccc

SEQ ID NO: 283875 - DNA, 602 bp, Cannabis indica
gctaaacatgtaatctacatataaatactgttatacatataaaagtttccctatcgataaaaagcatggcaataccctaaataacataaaaatgaggaaaactagggtttctgaaatttccctaaccggtagaccgattgcccaaccggaattccggttctggaaattttcaaaacccatccggaattccggatgcacaaccggaatttcggttcctcgcaggcagaaatttaaaaattcataactcaaccaaatcaaatccaaacaacctcaaaccttccagacctgttctatatgacccaaattacatttctaaagcaataaaatcaagcttcatgcaaccaaaccaaaaccaccattaaagcatcaagctttgagttctaaactcaaacttgatcaaaccctactaacatgcattcaattcagcccaaatctacataaacatgcataattaaacctctgaaaatgaaagcaaccatctacagcaagcaattaacagattcaacacatttctttgaaaatcatatttttgagctcaaaacatccaatcttgaatcaaagcaactatcatgcattaaactagctctaatctacttaagata

SEQ ID NO: 283876 - DNA, 624 bp, Cannabis indica
ctagaatggtgtccatttttagatgagctgacaactctattcaatgaatgatactttgactctcgcttactggaacactgtataagtttattggaaaccttagaaattatttaagctatgatagttttgtattttcacatgtctttgttgtttgctaaatgcttaataatttctaaattgtgtatgaatttatattgaaccatgttattttctattattaattgtagttgtaaatttcgtgtaaaaataagaataactttgactctcgcctaccgagacatcgttggattcttattttaaattcaaaattatcctttaattttttctcgtagcttattcattttgaattttcttacatagtaaatcattggatgaatggattatagatcatttgcttatgatgtcattctatattctcttatgaaattgaatggcacagatgactatattcctgacattctattcctaaatgatataaatcatcgatcttagaaatctcctacttgtatatgtttattttaggaaaattagacttagagttaaattagtagtggtggtccaagagagaataataactcaagaaatatttggtataaatttaagtctttgactttaaattttaga

SEQ ID NO: 283877 - DNA, 618 bp, Cannabis indica
ccattgcaagtggatagtgtaacaagaaacagggatcggctgcagtaccctagaattttaattcaggttagtttggctcaaagctttcctgataaaattgactttatagatgagtttgatcatgaagtggaattggaagtgaagtacgaatggattccacttgtgtgctataactgttctggtatagggcatagtacaacagaatgtaggaggaaagaggagaaacaagagcaagggaagcatgtttggatgccaaaaaagaagaaaccagaaaaagagcagcaggttgatgaggaggggtttcaaagagtaaacaagggtaagaaagtgatggtgagtaatgaagcagaggagactattgtgaagaatatgtttgctaatttagaggtagaagagacaatcaagtttaacacaggaggggagggagatacctcaacatcaaatggatagattcttatgttggaatgtaagggggattaatggccagcagaagcataatgagattaagcaattgatcttctcgaaaggtgctggtttcgttagcctccttgaaacaaaggtccaaaataaaaatatgggagctttatatactagtcttttttctggtcggtgctttac

SEQ ID NO: 283878 - DNA, 736 bp, Cannabis indica
tcctctatttttctgttttgatttgaacgcgcactgaattttgggctcaaaaataagtcaatgatttgcttccaactctcggtagtgcagtgatcaggtactgcttcaataacacttgccaaatcatttggatccccagaataatgttcctgaaaccacgtgtgcctgatattctttctctcagaatatcttctcttcatctcatgataaagagtactcatcactttttcaggctcaggatggccatcaatatcgtacaaatactacaaacaaatagtatttgttaaaaaattatgtgttaattgaaattaattatttgaaacattaaacttgttaatgtgttttaccttcattttttgtacaatttggtctttaaagtgttgaggaatttcactaaaattcaagtagtgtcctggcaacgtaattgtgacctcaacacccatttgacgtacaaaagctgaactctccttaccaaccactttgcctgtcacggcatcaagttttagtggtaatggtttccctgcatcacgccttctttgctcaacatccaagttggtagcaaggccacgcccctttcttcttggcggtggagcagtctgacaagttggcggtaccctactagggtccggtggatcagtaccacccccgtctccaccatgataagtggatacatcagctgacattacttttttttaaaaaaaaaaaatatttcatttataagtaatagtaaaaataa

SEQ ID NO: 283879 - DNA, 497 bp, Cannabis indica
aacatggtagtacaattgagtgagagcgctaatcatagatatggaatctatagaagatcttatttcatggcttaatagacataaatagaaaagatcttatttcaataattatattagtttactgaaatattatttttaagaaactaagtattttaaggataaaatacattgaagggtagaatgataaatttatccctactttatgtagatcatctatagaagatctttgattatttggattaaaacaaaggataattcatagcgtatctatatttggaacacatagagcgttttatgtaattaggagtgcaatttcaaatttatagtggagtgagttaataagataagaaatttacttggtaaattttagatctacttattgggagtttggttacataggcccatggtcccaaattttctgagataatattgtcttgtagactcaatattaatttgttttaactaattaattaaagttctaaataagactatatctt

SEQ ID NO: 283880 - DNA, 571 bp, Cannabis indica
atacccttcttcaacgtgctaaagaaatgccaaagttcgaatggtcggacgagtgcgaggaggcattcagaaagctaaaagaccacatggccaagcctcctatcctatcaaaacccgtcctcggagaagacttgtttctttacttggccgtctccgaacacgcggtcagcgctgccctggtccgggaagaagagaaaactcagcatcccgtgtactatgtcagtaagcgcatgataggagccgaaacgaggtacccggtcattgaaaaactggtattttgcctcctgatggcgtcaaggaagttaaggccatacttccaagcccatccgatcaagattctgaccaaccacccgctccggcaagttctccaaaagcctgaagcgtccggaaggctcctcaagtgggcaatggaactaagtcaattcgacttgcactacgtcccccggatttctataaaaggccaagccttggcagacttcattactgaatgcaacgaagccgaggcaacagcaaatacgccggtaccgccaatccccacctggagggtatttgtagacggagcttctaatga

SEQ ID NO: 283881 - DNA, 605 bp, Cannabis indica
tttatttatttatttttgagttaatggatatttgttccaaaacaaaagttaatatattaaatagggcaataaatgtaagcttcggtaatgctgtcaatttattatttatttattttttaatttattttgaagtattatttcttttaaaaattttagatttatagaataatttaaaaataaaaatatattacttatagagctttttatttaataatttatttaatttaagattatgatatagtgacacactacgcgtgtgagtaaatctgtttaccaacgcgttttgcgcgtcactaaaacgtggctttagtgacgcgcacaacacgttggtaaacagatttgctcacacgcgtggcatgtctctatatgccatgatttttttatttttataaaattataaattttgggttttagtatttagtgacactccatatttttagtgacgcacattttgggtgataaacaccgaatatttagagtctaatggtgtgtgtcactaaaacctactcctaattttttagtgacccacacttttatgcgtgtcactatatagtgtcactaaaagcctaatttgtagtagtgatttaaccattgttataatctta

SEQ ID NO: 283882 - DNA, 517 bp, Cannabis indica
tttcgaaaaaatcaataaaaaaatattttttaataattttttaactacataattatcattaaaataataataattattaaatggagtcaaaaaattaattaaaaatcatagaaaaatcagaaattaaattttaaggacgctggaaaaaggaacgtcgaaaaacgatatcccaggtggccccacgcgccacctgcgcaagtgggcttcgcggctgggagtcaccttcaacctccagcgggtctgcataccggtcacgcgacccgggtcgtccagtcgggtctgcttgtgtttttcggccaaaaaatcgacgaaaacaccagattttgcatgggtttcggtcgggatagaatttctaatggatctacgctactaatttcgagtattaaagattaaatgtgcaaatcttttgctaaaatcaatccgaaaattgaagaacacaaaagaaaaaaaattgtaatgccaatcttagtttaaatccgaaattaattatgtaggaacattcttaaacaattgataa

SEQ ID NO: 283883 - DNA, 555 bp, Cannabis indica
gtctctggaagttggtctgtaacttgttctaacagcccacagatcctggttctagctttttgaaccattcctccgcggacccgctcagagtaagcgggaagcacagacatttcgcgtcattgctgactctcatgaccatcatgacatggttaaaccgagacaagtggttgcttggatcggagttcccggtataagctgccatttcgggcatcttaaaattcttggggagctctgcttccaggatgtgcttagcacatggctcccggtcctcacagtctgagtcggagtcatcccctttttgtctccgggagactcgggcgatatcttttcagagtatggggagctccaccatgattacttcatttaacgttcctgtggaggccgcgggcccgtatctcttttggtcaaggtgatcctggaggtcaccttgattcccattgatttgatttctcaaatcgacgggaggacatctctgtcctcttcctcctctacctccgggctcttggtggacggaaacgctttttcggtccaatccatcctgagggccaagactcc

SEQ ID NO: 283884 - DNA, 585 bp, Cannabis indica
ttctaactctggaaatggggaaacacccaaccgagggattaaaatggcaaaaattgagaaaatgaaaggcccggggaaccctgccaaaactggctagccgatttttgtggcactgcaaaccggctagccggtttgcaccaggtttcccaaaaccttcatttcttgctcaattctcctccaaatgcaatgaaaccttccagagctcctatacaatgcataaacaatataatccagtcagtatttcacagaacaaatcactaaatctcaatttgccattaaagctcaaagctttaaactcaatggtcaaagttgcataaaaccaatcaataacctcaaaaccagctgctatgggccaaactcaacttaaattaaccctagaattcgaaccaaaccaacatcaaactctaacagctcctataacacaatttcactactttaactaattcaaaacttgaaaattagagaagagaccattaaggcttaccttagattgatttccccccttgaatccttgctgaaaacccaaagaaatgaaaggaaaaatttgatcttgcccttgatttgccccagccgaaagcaagagag

SEQ ID NO: 283885 - DNA, 533 bp, Cannabis indica
agcttcatcaagtatctctttcttaagctcgtcaacaccaggttcacaaactcgagccttgtacaacaacattccactatttgagactgaaaagtttctaggttgacagccataacctcatcttgaaccttaactagctcaaaatcttctaattgtgcctttttgattctctctaacagatcagattgaagtgtcaagttgtgtaaccttccaactataaactcaatccctgcactaaccatctagaggctagttgagggctatcagaaccgtggtacaaatatgcccgggaccctttctactcaaagcatcaaccacaacattggccttccaggggtgatacagaatttcacagtcatagtctttaaccaattccagccacctcctctgcctcatatttaaatctttctgggtgaaaaagtacttgagactcttatgatcaatataaatttcaaacttttcaccgtaaagataatgtcgccatatcataagaacaaaaccatagcagctagctcaaggtcatgagttggata

SEQ ID NO: 283886 - DNA, 537 bp, Cannabis indica
aatagagagtagataaatacatgtaaaaaaaaaaaaaaaccagcgtatatacaaaaagagagaaaaaaaaacataaaaacataaaagtaataagcactgcgtatatacctattcaaaaataattataaaactaagggtatattccacaattaaaaataagagtgttaattgtgatgtttttttcaaaatttggtttccaagcgtaattttctctaatttcaaatttggtcctagcctctcgtatttttgtatgatccaatgaaaatatgcatttatggacagtgcaaatactaaaagggaaatttgattttttatgcttacatttggttaaatttttttttctaaacaaataataactaatatttgtaaaatatgacaatttttatgatatccctaaaatacccccatttacatcaccccatttacaccatcggaccacccatcgggctacccatcggaccatccatcgggcctaccccatcgggccaccatcggaccacccatcgggccacccatcggacccatcggaccaccatc

SEQ ID NO: 283887 - DNA, 655 bp, Cannabis indica
gcagggtgccttgggcgccaggtgggtaagtcctccgtccaagatttcggaggcacgcctccgcactctcgaccagggcgggtacctaggcgagctggactgctacattcccgcccacgacaatcgcgccacaaatcctaataagggaatgtgcgcctggtcgggggctcacgaccagcaaggggcgctgatgcgtttgcataagtacttcagggatgtggcggacttctttggcctctgctcggcccagattactccaaagagcattaagtatttgtccgttctcttcatcctctacgcttcccaaggatgggatgctccttcccccccacaaagtcacctggttcttcgacctgaagtctacccccaaacaaggcaggtcggggtatttttacttctctcagccaggcttcaagtggttgagcggcacggatgacgaggccatcagcaaaatagggcattttgttgatgagtatttcatggtgaaggatccgagcatcacccggactcggttttagcagattccgacatatcaccgtcctcccctcacccttgctcttagggatagaggtcaaaaacttgcccggttgcgggaggaagacaagaatatcattcggttgtcctccgctgataatttggtgaagtatgggcttta

SEQ ID NO: 283888 - DNA, 628 bp, Cannabis indica
atcatgtgagagaggatcaaaagaggaaaccaacttaaaaagagaaaccaccagcccacgaatacaaaaggaaactgcccactctcttgcaactcctttccttttttaaaaaaaaaaaaataaaaggaaactagaattaccaacaatatttccaaaaataagtcaatctttcaagattaaagacacattaccatataaaagctcaatctttaaatgaaaacatatcaaaaataaatcaaggaagaataaatgttgatacttaccatttaagcacaaaattttcttagcccatgaaacaagtcacacgcctccctcttcttttttttttattttattattttttttttatttaaaccaaaaccgaaaataaaatacaatgtgtacaataaatatatgagattctaaacaagcaatgtaatcaaatatcattgaaaattgacaaaataaaatacatgttatgcttttaaggaaaataactaattagtatctcaggaacaaatcaaacttaaatgatgttgaggaaaaagatatgcatgttactaaaaattgtgaaccaggattatcactttaatttaaaagaggagacttacaaatttgaacacacttgtcagacataagtgtgtgcagt

SEQ ID NO: 283889 - DNA, 641 bp, Cannabis indica
ctgtgcccaagcggtttgccacttgcgcttccctgaactccatcttccaagtccaggacctcagccattccctcacagtggtaagtactttgcaatttcttgcgtttcctttttggtgtttgtattttgttttcttcctttgagaaatttttccttacatcccgttatggttcagcttgcagctgaggctggtcgcctctccaagaacatcataagccatggcttcgctctgtccgattttggggacatgaacgacgtcaagaaggtcctccaagaccttactgcggagaggcagatctaccaggaggccgccgagcgccaggaagcagcggccaaggctaaggaagagagggccaaggccagggaggaggaggccatccggagggaggctcaggcggaggacatgatccaggccgaggcccagcggagaggcaggatggaggcccatcatcaggaggagctaagggctcaaaccgaggctgccgagaaggctaggcgggaccttcgggaggccagggaggctttggacgaaatggccgccaaggtgaggtctctagaggagactcaccagtcggatattgaatccaaggccgctctggctgcggagttgaaggagcttcgggactacaaagatcagtcta

SEQ ID NO: 283890 - DNA, 603 bp, Cannabis indica
atccaatattttaggtccaatatgtattggattagactggatccatccaatccaagaaaaaaagagtaaaattttaatgttaatttttatgtatacatatatattttacgtataacattataaaatctaattactcatccaaactaaatgaaaatactaattagtttaattggatgttggatgtattggatttttaaacactccatccaacatccgatctgatccaattggatattcaaaaataacatccaatctgatcttatcacaattggatatccaatgtttggcggtcagttgtgattgaatcggtcggttgtcattggattggatcgatttatgcacacccctacctgccactggaggtggcataaggtctccattttgggcaccttgtgcctgagtctagtcgttcggcacataacgacgcatgtggggattattcttccttattaggaattcgatctctctcttcaaattctgacactcgttggtgtcatggccgaagtaattgtgaactggtagaactttgacatgtccctcttgctcatctctgttttgatgggagggggcttcttgtatgggacagttccctgagtggccatg

SEQ ID NO: 283891 - DNA, 618 bp, Cannabis indica
ctctctctctctcggctgggtggatggctagggctgggaattcttcttaatttttcaagctttttcaatcaatctaggtgtagttcaagttgttggtaagtccttaaacttgttctggtttttcttggaattttgatgaaaagaaatggtttgcatgcttagtttgagttgatgttgctgctgtgtttttgatgttgtttctgaagtttaaagcatgattatttgaggagaattaagctgcttgtgatgcatgatagttaggttgtttagagttgtggaattttttagctcaaaattatagttttcaaagtgaaatttcgaaattggttgctgtgtttgttgcatgagttaaagattgtttcctacagctttagtatgcatgtttaagtaggtttggactgatttgaatgcatgatagtgttgcttaatcaagtttgagtttgaaactcaaagcttggtgctttaatggtgatttttgatcctgtgatttctgggtggttttgttgctttagaaaggttctatgggatgtttagaacaggtctggaaggtttggtttaaattgggtttgaattgatgaagttatgaatttttgagttttgtctgcgaggaaccggaat

SEQ ID NO: 283892 - DNA, 669 bp, Cannabis indica
gctacttagccagacagtccacgtgagcatttcttttccctggaaattctttccactttatagtccgcgaactcgtggagcagttcccggactattgccacatacgcggccattctttctccgcatgtttgatattctcccgacacttggttcactaccagttgggaatctctgtagacttctactcttttagctcccacggttttcgctaatctcagccctgctatcagggctttgtattcggcctcatcgttagaagctgagaaatcaaaccgtagggctgctaggagtcgaagtctgttcagggatatcattgcgacccccgctccggatccattctcgttggaggctccgtctacaaatactttccacgctgggactgatggcgtgggtatgtttgcggtagcttcagcttcattgcactctgtgatgaagtctactaccgcctacccctttatagaaatgcgtggaatgtagtgtaggtcaaactggcttaactccattgcccatttgaggagccttccggacgcttctggcttttgtaggacttgccggagtggatggttggttagtactttgattgggtgagcttggaagtaaggtctcaactttctcgaggccatcaggaggcaaaaaatagtttttaaattactgggtatcgcgtctccg

SEQ ID NO: 283893 - DNA, 587 bp, Cannabis indica
agttgagacaatactgcttgtaagactcagttaattgattttaattaatcaattataattctaaaattagactatgtctagtttatgaattttcactaagctagggcttaattgtgaagaaaagagattctagggtttatttgttaattaagagactttattaagtctaattaataaatatattaaatggaaatttattataaataaatgattttaattattaaataattagttttggcatttaagtggttgaattggaaaaatggtatttttgagaaaataagataaatagttgaaaaaaatggcaaaattgcaaagtggggtccatatccatggccgaccacttaatggacaatttaccatttattttttcattactttaatgccaaataattctaacctaacctaaggtggattcatataaataggtagtgatggcctcaaaggaaaagatgatgcaaacactttccttcagtcaaaatttgagccatattctctataccaatttcgaatcctcctctctctctttctttattcaattcgtaccctatagtgattagagtaagtgcccacacacataatgtggt

SEQ ID NO: 283894 - DNA, 586 bp, Cannabis indica
taaattttattgacataataacatacggtaagaatgtaaattttaatcataaaaatttaacatttattatataaatgtccgaccaacataaatctaattaaagattttacaaatcaatttttgaagatcgtgaaataagaccttcaaaaagaataatatatagagatttctcaacaaacaaaaaagaaaagatatgttgaaaacgaagtgaaagatatgctacattaaaagcattgaaaaacaaccaaataacgataaaattttccaatccatctaattataatgtgatgcacacatctattggtgatgatacgacaacatcaagtacgcaacatccaaatattcatattaaatataccaataacaatgaccaagttagtattcagcaaggataatctaagagacaacagagtcctcgtacacacccctatatagacaaagagggttcgtctcatgaagaatgtgtttctttcgttcctgattatggtgtgactgatctctctgcaatcccttcttccacaaatgataacaataaccaacttgtttatatgcaaaacaatattctcatctaactcaaccacccttt

SEQ ID NO: 283895 - DNA, 468 bp, Cannabis indica
tgggactgattaacaagatcccactaccagaaccttcgctatttgaggctccatcgacgtacaatgtccatgtctctctgtttgctataataatgtcgcttctgtcctctatgactgtcacctcagttctggggaattcaagtataaaatctgctaaggcttgccccttgatcacagttctcggtttatacttgatgtcgaactgactcaactccatcgcccattttaacaatctccccgatgcttctggtttcactagaacttgtcttaaggggaagttcgtcaaaacttcaatgctgtgagcctggaaataaggtaacaattttcttgaggatattatcaaggcgaaagccaatttctccatttggggataacgtgtctcggcatccagtaatcgcttactgacgtaatacactgggtattggcgtccttggtcctcgcgtattagtaccgaactaatcgcatatt

SEQ ID NO: 283896 - DNA, 416 bp, Cannabis indica
atttgaaaattggcgtttttgtggaaatgagatgcagaaatgataaaacagcaaaattacaaaagtgggcccaaatccactatccatgggccggccacctttgtaggctttatcatttaatatttttattattttaatgccaagtaattcaaacataaccctatgtggcatgctataaatagatagtgatggcttcaggaaaaagtgacttttgcatcttgttttccttcagagaaaacctgagcctttcactctaaccttgccgccaccttcctctccttcttcttcattgtaaattttgaacctcttagtgatagagtagtgcccacacacaacaagtagtacctcaatcatagtgaggaagatcgtgaagaaagacattcaacaagaagtagattcagcatcaaaggaaggag

SEQ ID NO: 283897 - DNA, 693 bp, Cannabis indica
gattctcacgtacgggggggggggggtcttctttgtcgctctacttggttgcttggagttagttccatcctcaggggaggtacatctgtagccacatcatcatccacacccaaatcaaccacaggatcattgttgtaaaagggagcatcgaactcatctgaatgatcaaattcgatacccactctctcatcatctatattagtgccaacttgctcattcaaaccaaccaccagatcagtttctgggacaaaggtcccaacaacacttctaggggttacatttcggggagtatgctccaaattcacattcttcttcaccttagtcacaaatagtggcaacaagttgtccacactcatttttgccttcatgctcaagaacactcgtagttgactatctttcactaaaacctcaggcggaaacttagtgcctttcatgtacatgtaaagaacttctaacttcaattcatacaccaatgggtccacctccaactcctcatgcaaaacttcacgcacctttttcagtgtagagtcaatgtcaaacatcaatgtcttactttttgaggaatcaaatacccagttgaaaccctccacagtccaaacgccatcatacagtacaggcacaaatacaattgaatctgtcccaaagaaaaatacaaagaaataaacagaaaaaatcagcatacaatatcgcaca

SEQ ID NO: 283898 - DNA, 672 bp, Cannabis indica
gcaaagttgttatttattttaaatatattactgtgcataaaaactagaaagaaaacggaagaaaacgtagcactagttgtaatattttcttattgatttaattttagatttacaaattgtttagctgttaattttgaggtgtgttgtgaaaattatgtacgcaagtatacgtagtcacacaagtaataaagtgataagtaagatcgtctccacagggattgcaaataaagtttgatgtaaaaccaactaattacaacttaaagtaagaggaaataacatgaaaatagttgagcaatgattcaaaattaaaatgacagtaattaaacttgctaaaattaatgctattgttgctaaaaaaatactttcaaaaagaaaaagaaatgtaatatggtaaaagtggcttgaatagctaattcctcctatgctggtttttcctagatattatagcattacctcagcattcctaccagtgataacaaaatttttatgtgtttatgagaattttccaaaactccacaatttaagttcaaccatctagatttacatattcctatatcaaaccatattagagaacactaattatgcatcaattcttaagttatgcaaggtaaatgaaatattcatattccacttacaaagaaaaacctaaatctagaatttctcttgctccat

SEQ ID NO: 283899 - DNA, 194 bp, Cannabis indica
tttaagagatgacatgctcgtctagtccaaaactgcaacagccatgcaagcgacttagaggaatgcttcgagcctgaccggaaaggtagctgccctaagccgcttcatctcacggtccacggacaagtgcatacccttattcaacatactgaagaagtgtcaaaggtttgaatggtcggacgagtgcgaggagg

SEQ ID NO: 283900 - DNA, 563 bp, Cannabis indica
agaaggtaagaactgcgtataatgtgtaatatgaatatgtgaatgtatgtatatgttaagtgtacatgcatgcttatatgtttgttacactaccaacacttttacggatatggtacagagtgcattggtatagtgtatattgttaaggagtacattacggtgttactagcataagtacgggaaagtacaaggtgtgtgtggtatatcactcagtggtagtcagggtacgaaataaaccctaccaacactcgtacaatgaggtacgaaatgtatgtggtacagtggttgtaccctagtatgaaacgttcttactcatctgttaagccttgtaaataggtgtatggacgcctagatacaagtcggcattatatgatatgttatatgattttgttactgagtctgtcgactcatagttctactttcatgtgtaagtgaaggaaaggcaaaagctgaacaagagtgagccttagctaggatgagattgtacatgtcatggcggcgcgacctggagtgtttggtcttgggacatctggggttgtcaatttgtagtcgttgtgcgacca

SEQ ID NO: 283901 - DNA, 556 bp, Cannabis indica
cattttcatgaataaaatttgcagcggtaagtatataaataatttaacaattacgttgtggagtgtaagtccaaccaatcacaatgaaagtcacgacagccccatgtctgccccagcacctgttgcgcgcatgaagcttgcaatggcagcgcaccacctatttgcttgttcccactcaatctataaaaatggctccatattccccatttctatcagtattttgtgccacttctcttactttgtggtatacgaaaatagcaattttgggatcatttggcttataaattgatcatttaagagagtgaaaaagcatcagatttactagtagttattataccgaaattttatcttttctttctttcttttttattttgctttattaattgtggtgtaaagacaatgtcttttttaggataatttctttggcaacactcaagtgtaagttcatgcaatttttactttttctaatatattgattctctttgttcttcatttctacatttgttatattaaatttctcttcttctaaattgcactttaaatttaatagtacctt

SEQ ID NO: 283902 - DNA, 581 bp, Cannabis indica
tacaacaaaaattaaacaaaaaaaaattataaaatacagtttcattgaaattttaaatatttttacgatttttttgattttatttacagaaaatacagtcttgtactcttgttaatttgttgttaatttttattatctgtatgttattttttattgttgttttgatattatttatatgttatttttatgttaattttatgtagtttttttggattttcgtgttgttttatattaaattataaaaatataaaaaaaaaatacttaaaacgtaaaatatgtaaattttttataaaaacataataacttatgtaatatattattgtcaataaaaatactctataatttctgatcatatctgaaaccggccccaaggccaactcaaatcaaatgaatatttcaattgtaggcaacaacacccaatacggcaacaaataaagcaaaaaaaaaaacgtgcccaactaggtagctgaggtgacttttttttttcatattagagtcaggtgagatgattttcccaaccaattatcaaaaagattccttagtaatattcaataaaaattattttcttaattcgatactta

SEQ ID NO: 283903 - DNA, 1133 bp, Cannabis indica
agctgggtctgaaacgtattttctcaacatagagacatggaatacgttatgaactgttgaaagagctagaggcaaagctaatcggtatgccacttgcctaaccttctcgagaatctcaaaaggtccagtaaacctagggcataacttgcctcttttatcgaaacacttgattcccttcataggagacacctgtaggaacacatgatcccctacttgaaattctacatttccgcgtttcagatctacataactcttttgcctgctatgagaagcaagcattctagctttaatcttctcaattgcttcattggtccgctgtactgattctggacctaggtatttcttctcccctgtcacatcccagtgaatgggagacctacactttctgccatataatagttcatagggagccattcctatcgtactttgatagctcttattatacgagaactctatcaagagtagatacttactccaggagccttcgaaatccataacacaggctcataacatatcttccagtatctgaatcgtcctttcagactgtccatttgtctgaggatggaaagctgtactaaacttcagttttgtacccatagcctgttgtaaactttgccaaaacttcaaagtaaacttcagatctctatctgaactatggattttggcacaccatgcaaccttactattttcttgacgtacaattctgcgtattgatccactgaaaaggttattttaactggtaaaaagtgagcaaacttcgtaaatcggtccaccacaacccaaatagaatcaaacaaacccgtggttctaggtaacccaaccacaaagtccatcgtgatatcttcccatttctattcaggtagggttaaaggttgcaacaaccatgccggtctctgatggtaagccttaatctgctgacaagttaggcatttcgatacgaattctaccacattcttcttcattccgttccatcagaagtaaggtttgagatcttgatacatcttggtggtgccgggatgcaaggaatatggagtagtactatgagcctcttcaagaatttcatttctgagttccatactattaggaacacagactctggtcttaaacaatagcattccactatctgagactgt

SEQ ID NO: 283904 - DNA, 663 bp, Cannabis indica
attgcaaagggccatggacttgtgatagaatggaggttactcggaggccggtgggtataagtggctattcgctgacacctgtcacacttctttgcaaacgcgagagcatcttatcacaatgttggccagtaatacccttgccgcatgatttttaacgcaagggagttacctccaatatgattgccacaaatcccctcgtgtacttcacgaagtatgtaaccacagtcctctccgctgatacatttgagaaggggttgactaaaactcctgcgatacagcctttggtcatatattacataacgggcggctcgctgtcgcaactttcttgcttctattttatcatcaggtaagagcccattttccagatatgcgaggataggagtcatccaggtaatctcctgaacggcatctatctccatgatcacttcttgatttatggttgggtgagcctatacgtctaccggaatcacatcaagcaattcggcttctctagttgaggccaaacgggccaatgcgtctgcgtgtgcattttgagcacgtggtactcgagacacgactatatttttgaacttctgaattatttcacgaacaatggctaggtatttaaccaatctccctcctcttgccaggtattctccattcacctggcataccacgatttgg

SEQ ID NO: 283905 - DNA, 555 bp, Cannabis indica
tggaagttgtgtttgtggataaaataaactgtcacaacaagatcagtggtaactatgttgtttactttttatatatatttattaattatatagtttacaatgatatgaaatgtgtgttgtttttgtatttttagtagtgattgtggtgtattcgttataaagtatgctaaatactttatacatgaaatgatcaatcatgtccccaaatctttgaatatgaatattgttcggaagaagatgtgtgttgagctttttgtgcatggtatgaggaaggagtttaatggatatgagtctggttcagagtttactgggaagaagatgtgtgttgagctttatacaagcattgcatgtgagcaaggtatttcatcatattcaaatttctgacagctgtaatttttgttatctaggtttactatgtatgagtcggtacaatcatgtactttgtatacaagcaggtttgacgtttctacctataaaaataaatattttagttgaagttataaatgagcaatgtttttgtttaattgtttatgagattagattaacatgtatact

SEQ ID NO: 283906 - DNA, 534 bp, Cannabis indica
aaatagctgaactcttctactgagggagccctatgaacatactccatatacatcgcatagaaggccagggcagtgcgataactgtttggagttagttgaaaaggcgatacatccgaatacccgcgagtattcaaagtatgggacaacgtctatttaaatgtttcttactcagtatgcggttattccaaattacaggttttttcataaaattacccagttttttagccaaaaaatataacctcatacatatcccttacaaacatgcattttctaaaagccccaaaataccaaaacccagaaaagacatcctttctcaaatacaggaaacaagaaatacaatggaactcgaaactaacctttagtttggcaagttgttcctacggttactcttaattgcttatgagattgaaggatgctttagataaacggttgaaatctgagcaaaaggtgagaatggtttttgaagtttctgtaagggagagcagaagttaagaaacaagaggaaaaaataggggatttgattcgtatcaaagg

SEQ ID NO: 283907 - DNA, 899 bp, Cannabis indica
acttcttcacatcctccgcaaaatattgaggctgttaatgatactcctactattgatatgcaaggagttatacatgatgtctttgaacaaaatagtagagacagtgaatgtgaaattgaaaatgatgataatcttcaaggtgaagaggatgaaccaaatgtgaaggcaaaagaattttatgatttgataaaagatgcagagacagaactttaccccggttgtaaaagttttacaaaactctcattcgttattgaattatttcatattaagtgcatgtgtggatggagtgataattcatttggtaaggtacttgagttatttaaaagagcactaccaaaaggtgaaaccttacccgattctttttatgagacaaaaaagttaatcaactcactaggacttgattatgaaaaaattgatgcatgtaaaaacgattacaatgttgtatagaaaggaacatgtaaatgacacagaatgtcaagtatgctctacataacactttttttcttctattttttttcagttcacatatactatttagattaaaataactatatattttttttttaataaaaataggagtgaagcaaaagtcttgcgccactttccattaataccgagattacaaagattatttatgtcatcaaaaacatctgattttatgacttggcatcataaaaaagattatgcaaatgatggttgtatgagacacccaagagattctccagcatggatgacttttgatcacaaacataaggattttgctgcagatcctcgaaatgttagacttgggttagcttctgatggaatgaatccttttaagacattaagtgtaagtcacagcacatggccagttattatgataccatataatctccttccatggttgtgtatgaaacaac
